United States Patent Application Publication US 2026/0103690 A1 - sequence listing, part 92

SEQ ID NO: 455712 - protein, 361 aa, unidentified
MSNGSTEQMKMTAGMDLGDNYSHLCLIDTESGELIEGSRLRTTPEAMRRRFDSERPLHVAIEVGTHSPWVSRLLEECGHEVLVANPRKTRLIYGERRKTDKLDAEKLARLARADPELLYPVEHRGCDSQAHLAIVHSREALVRSRTQMINHVRGTVKSFGYRLPKCSTPSFHKKVPGQLPSELAEVLEPIVETVGSLTEKIKDYDRRIEELAAERYPETRLLRQVSGVGSLTALTFVLTLEDPQRFAQSRSVGAYLGLAPGTDQSGEKDPQKRISGEGDEMLRRLLVSSAHYILGPFAPDSDLRRHGEKIAERGGKNAKKRAVVAVARKLSVLLHRLWVSGEVYEPLHNARRLGVQREEVA

SEQ ID NO: 455713 - protein, 319 aa, unidentified
MAGAPFAGIDVSKDSLDGCCRPGADFRHDHTPDGIARVVARLVEQAVGLVVVEATGGLEVPLVRALHQAAVPVAVVNPRQARDFAKASGRLAKTDRIDAQALAHYAEALRPQPRPLPDEQTQLLDALVTRRGQLIDMRTMEQNRLAGCPDARVRKGIQKHLDWLNRRIQDTEDDLGRAVRDNPDWQARDQLQQSVPGIGTVVCQTLLASLPELGRLSGRQLSALVGLAPLAHDSGQRRGKRHVFGGRAAVRSKLYMAALGASRSPGPLGAFYRRLRAAGKECKVALVAVARKVLTIVNAVVRSGQPYEAAHASVAGVHP

SEQ ID NO: 455714 - protein, 380 aa, unidentified
MSESTTIVAFDQHAATTVAAVLLPGHQTPALHALPSDSATIVRFLRRLSATGPVQCLYEAGPCGFDLQRALGAEQFPCDVIAPALIPRRPGDRIKTDRRDATHLAVLYRAGALTAIHIPTEQEEAARDLLRCREQIRADLLRARHRLSKFLLRHGRRFTATKNTWSKRHHQWLQTQRWPLAALEHTHRAYVRAVDEAVAQLQAIETELRDVLVLEPLRTRVETLRCFRGIDDLTALTVAAELGDARRFPSAPRVMAFTGLVPAEYSSGTSRARGRITKTGNAHLRRVLVEAAWHYRHPPFVGDPLRRRQRGAPPGAIAHAWAAQCRLHRRYRRLAARGKPKQHIVTAIARELSGFLWAALTQPSDRPTSKGESSGFLCDR

SEQ ID NO: 455715 - protein, 392 aa, unidentified
MLDREGTILGRRKVEHGGGAIQQMMTWLAELAGGASPETIAVAVEDPRGAIVDALLERKYAAFSINPKQMDRFRDRYSVAGAKDDPRDAYVEANSLRTDLAHFRRLSPDHVQVVRLRELSRAHDALQEDWRRNANQLWAYLQRYFPTILKLSSAADELWVFDLLEQSEALSQRAAALSIEELTKLLRRHRIRRFSAEHLHQALQDRLTLAAGVEQALAEQVLLLVPRLRLLHQQRIEVDRRTERLLEEMAEENFPEHRSVEILRSIPGLGRVFLATVLSEATRPLLDRDYHALRNLAGAAPVTRRSGKTKIISMRRACNDRLRNAVLNSANAHVQKDPRAKKIYARLRAQGNSHARALRGVGDRLLELICILLSSDQMYRLERRQPLKTDAA

SEQ ID NO: 455716 - protein, 462 aa, unidentified
MQMTLGIDVACRAAHQASLADETGRFAWSGRKFRTTAADLDQLWESIPAGAAVLVVMEPTRNAWVLLAAWFRRRGATVIMVPPEQSADLRDYYSKHAKSDRLDSKMLARLPLLHPEGLRPAEGLGPADALRRASVLRSSLVKRRHVILARLDSYLELLGPAWHAAFGGDLANITPLRLLAAGYADPHAVRRLGLARLTRFTWRYSHGAFGEHYAAGILAAAAETLQLWDGELSYPDLAEDIAAEARLALTLTTEIRNLERKIAALLHQADPAGILTTVPGVGAIGAAQILARLTDPARFRSMAGARSFTGLVPSLTASGTSGRHGPPTKSGDALLREALFMAANQARRIDPVLAARYHRLMVTCGKHHNSALCHISTAVLTRIIACWRAGTPYQIRDLDATPLTTAQARAIVTQRYHVSDELRALRRTSHLSAKAGRRHQESPSAPTPARPQPNATARSRNT

SEQ ID NO: 455717 - protein, 355 aa, unidentified
MDDSKYIGMDVHQASIVAVVLDASGKVVMESILETRAETVLQFILGLRGTLWVTLEEGISAAWLHDLLKPHVARVVVCDPRKNALLKSGNKNDQIDAHKLAELLRAGLLSPVYHGESQERLLKELARSYQALTQDTTRVMNRLKAIYRGRAIRCAGRKVYRARHRGDWLKQLHETGARRRAERLYEQLDRLQPLRRQARQELVREGRKHPAAADLRTIPFLGPLRTAVLIGIVGTPYRFRTKRQFWAYSGLGIQTRISGEYQLSGGRVQRTKKVLGVRGLNRNHNPELKRVFKSMATEASSRRGPWCDWFWARVKEGVDPALARLTLARKLAAITLAVWKKGRKYDDEALKMQAA

SEQ ID NO: 455718 - protein, 344 aa, unidentified
MSQPDLQCIGIDVAKATLDVASTEEIIPFTVSNDTAGFEVITNKISGLNISLILMEATGGLETQVAARLQSEGFDVVIINPRQARDFARAMGHLAKTDRLDATMLAQLARVINSHPDRNRYIRLMPDAARKALTALFVRRRQLNQMLVAERNRLYPSHPDGRECISRIMTALEAELALVTRMMNRQVRQHFRDQARQLTSVKGVAEITAATLLAELPELGTLTRREISALVGVAPVNRDSGKMRVRRTIFGGRADVRCTLYIAVIIAIQFNPAIRAFYVRLVEAGKAKKVALVACMRKLLTILNAMVKRGMYWEDHFMPPRQFSELKTQSGSETNVIRTVLMPL

SEQ ID NO: 455719 - protein, 342 aa, unidentified
MEKVSIVGLDLAKRSFQAHGALAEGSVAFRKKLSREKVLAFFAEQPRCIIAMEACGSAHHWGRAIRDIGHEVRLIPPRYVKPFVKRQKNDAADAEAIAEAASRPTMRFVAIKTEEQQARAMLFRTRDLLVRQRTQLINALRGHLSEHGVVAAQGPANLKVLEAAVEDQTTPLPLLVVELARVFLDQIEGLSKKIVELEKVTAHEAASGETTRRLQTMPGVGPITALAIETFAPPMDVFKCGRDFAAWLGLVPRQHSTGGKQVLGKVSKMGQRDIRRLLIIGAMAVIRSALRKGPPEGSWLQRMLARKPRTLVAIALANKMARSAWAMLMKGQDFRVPVVAAS

SEQ ID NO: 455720 - protein, 402 aa, unidentified
MTYDYVIGMDACKYFHHACVLDIDGTQVLSKRINQNEQSLRALFSAFSAYDHKVLVVVDQPNNIGRLTVAVAQDIGIDVRYLPGLAMRQLSRIHAGNAKTDIRDAYIIAHAAKNLPESLRSVDRVEEAFLQLKVLNGIDEDLARSYTRLINQIRSALVGCYPQFEQALRGQIIHRKWVLHLLARYGGPTKIKRLGKAKAAAFARRYKARNPEPVLDAIFAAISEQTVTIAGAHYAEMGVAMSAKDALLKLEHRQQIEKEVIELINDIPHTQFLLSMPGIGPKTAAQILMTAGDMSDFPDAAHLASYAGLSPRTNQSGTSIMSNSLNRAGNKKLKNALWQSSFASIRFHERSRQFYERKRREGKRHNAAVVALARRRLNVLYAMMRNHEHYHDPAPSQEDLAA

SEQ ID NO: 455721 - protein, 415 aa, unidentified
MKVVFSTCCGVDVHKTFVVATIITTPADSLQPHYQKKRFSTFNSDLNRFADWLLEHNCLDVCMESTGKYWVPVFNILEKHGIRVVIANPKWVKAVKGNKDDTKDSKWIGDLFRIGLVKSSFIPELNIRILREFLRYRYKLVSMKSSEKNRFQNAFTVCNVALDSVVSDMFGKSATAITDYLTSDESFDPDHCVSLLQRSLKKKAEKVLESIEGYSISDEQKTRIKIIREHYDFIEKLIAKVDTCVNEMVEKYEGEINLLCTIPGIDRNSAITIISEIGTDMSQFGSSKRLCCWAGLTPGNNESAGKKKSVRISRAGVYLKPALVQVAHAAVKDKANPYYALKYERIAKRRGKKRAIIAIARMILTAIYTMLCTGEVWNPVDLFKIDMPEHLKEQQLAKAIKQATRFLEKQGLTVA

SEQ ID NO: 455722 - protein, 404 aa, unidentified
MDLAPLYRRVAALDVHQAKLTVCVLWEEADGELRVELREFGGFKRDRREMARWVASFAPELVVMESTGIYWKSPYEALERAGLRARVVNARHVSQVPGRKTDLADAQWLAILARSGLLRGGFVPPANFRHLRLVSRQMQKLTGILASEKNRIHKVLTDGGIRLGVVVSDLHGKSGRAMVKALVAGEPAQSLLGYADPRLKATEEELLDALDGDLSEEHRLVLRQLLDHIAYLEQHIAALHQALVAGLAPQQGLLQALQTIPGLDETGAAMLVVEIGDDMQAFGSPEKLASWAGVCPGNHESAGKRKTGKQRKGNPYVRRILCEAAHAASRTRCALAEKFKGLLVRRGRKRAIFALAHKLLKTVFVLIDRGDYYRDAGVDYEAMSVERNAPRWIKMLRKYRYIPA

SEQ ID NO: 455723 - protein, 372 aa, unidentified
MHYSTVYVGMDTHKDTFSLCCYTNEKEQAEFPQKVEGHYSKVLNYIEAMRFHYGDDALFICGYEAGCLGFKLYKDLTAHNVKCVIMAPSTMSTPKGKRIKTDSRDAALIARCLAHHDYSAVHIPTEEDEQVKEYIRMRDDHKAGLKRVKQQIQAFCLRHGCQYSSTKNSWTQAHILWLRGLTLDGLYAETLEEYLLEYDYLTQKLERIDKRIEELATDDEYWERVHRLECFIGIKKLTALSIVVETGDFKRFADASHYAAFLGLTPGEDSSGGNQNRLSITKAGNAHLRTLLVEAAQSYTRGQPGHKSKLLAARQEGNSPAVIAYADRANERLRRRYYRLTLNHGKKANVAKTAVARELACFIWGMMTDNIA

SEQ ID NO: 455724 - protein, 431 aa, unidentified
MTTSSVPMETEILAYVGLDWADQQHVICCQAAGSTSVETAVVRQRPEELQAWVAQLQQRFPQGLVAIALEQSRGAVIAALMHYDFLRLYPINPKSLARYREAFFSSGAKDDPNDAALLLDLLVKHRDRFSPWVPDDPLSRQLALRVEHRRQLVNLQTELTHKLSSHLKLYFPQALDWAGELDSLQACDFLQRWPTLQAVQKARPAQLKKFYNQHHCRRPQLIEQRIEQIGQAQALTQDTALVEASYRMVLALVAQLRPLISTLVQWQQEISQLFAQHPDATLFASFPGAGPVLAPRLEAAFGSRRDRFSSAQEILQFSGVAPVTQKSGKSHQVHRRWARPKFLHQSFVEFAAFSIPHCDWARALYQQLRARGQRHWAAIRVIAYKWIRILFRCWKDRVPYDEPKYLKSLERRNPRLWTAIQQLALEKPEVA

SEQ ID NO: 455725 - protein, 439 aa, unidentified
MPDVPWVYRKKGGASMSKKNSSLAGLQALYARVCGLDLHKKLIVACVRILDSKDGTVQSTLRKFGTMTADLLALRQWLAELKVTHVAMESTGVYWQPVFNLLEGHFTVWVVNAQHIKKVPGRKTDMKDAEWIAQLLQCGLLRPSFVPDRQQRELRDLTRQQTKLVQQRNAVDNRIQKVLETANIKLGSVASDVLGVSGRKMIEGLLAGEKDVTALADLAQRQLRGKIPELQRALEGELNDHHRFLLRQLLGQYDFLENEIASISERLGAVAPPSFRAAVEQLDAIAGVGERGARALLAETGTDMSRFPTHKHFASWAGRCPGNHESAGKRRSGKTPAANRHLDAVLTEMAQAAVRTKNSYFKAQYHRLAGRRGKKRAIGAVKHSLLVTVYFMLRDNRPYKDLGVDYFDKLNPQQRIRYHVRRLRELGQEVELSPMADAA

SEQ ID NO: 455726 - protein, 318 aa, unidentified
MNVIGLDVSKDTIDATLITTKGSKDYIKISNSTDGFENLINWIKTKRIRKIAISMEATGIYYEQAAEYLSALYTVYVINPLKIKEYAKSQFSNTKTDKADSKLIAEFANRHLDKLTPFRPSENPILYKLVNLMQQLKEQQKETQNRLHTAKDIYIKSTHEAIIELLEEKIDQTSKRIEGMIKQKESLNIEYQNLQTIPAIGKETAVILLRHLTDKNFETANKFVAFAGLSPKIEQSGTSVNKKGRLSRYGHRQLKRALFMPALVAYRMNAFPQLVSNLEAAKKPKMIIIVALMRKLAKIAFYIHKTKKPFDKARHQTV

SEQ ID NO: 455727 - protein, 316 aa, unidentified
MKNYIGIDISKASIDVYDGKKSYKFDNNENGFKKIIFLVENIKETIFIFEPTGIYSYALTNFCSKKNIFVVMVGPKESRDFARSLKVRSKTDKIDAKVLYKYQSHVEPSMVKVPVINHHAIKIQEMLNVYEGTLASKQRLKNQLESTNKTHKDLVRTIKRIIDVLDMEATKLFNKIELLLLKDEETKERYDAISTIPSIGQKSALYLTAFFLKYPRANAKQMTALLGLDPVMRDSGLFRGKQRISKHGGQQLRNLLYLPTLCAIQHNSWIKAFYERLTAQAKTKKLAVIAAMRKLILMAFSIFKSKEVYQPLVVEI

SEQ ID NO: 455728 - protein, 400 aa, unidentified
MLSIGIDVSKGKSTVCGMKPGGEIVYTPFEVQHTREGMSELVSLLRSSGEEVRAVLESTGSYHCPVVAALLENGIFVSVVNSLRMKRFCSQSIRKVKTDRIDAMQIALYGLAYWQELQPTRLPENTYRELQLLARQYYQMTSLLIKAKVDFNAICDQVLPGMQELMNDHAGRHKLSDFVLRYHHTTHILEMGETRFRKDYCKWAEKKGYRNRERMAALIFATAQNGIPVLPNAPSTQIVITEAIRVLHTVEASRDAILTQMQALAKTLPEYSLVREMPCIGDTLAPRLIAEIGDVRRFHSKRALIAYAGIDAPPYQSGKFSANNRHISKRGNRYLRKTGYEVMQSYVMHKPANDPIFTFIEKKRSEGKSGKLAMVAGLNKFLRVYYGKVTELYRSLPAIE

SEQ ID NO: 455729 - protein, 355 aa, unidentified
MNSKKYIGMDVHKESISIAVRNDAGKIVMECVIETKASMILQFINGLRGDLQVTFEEGTSAAWLYDLLKPHVTRLVVCDPRKNASMKEGNKSDKIDARRLAELLRLNHLSAVYHGEHGLRSLKELVRSYLTITKDLGRVMSRVKAIYRSWGIACTGKQVYAPRHRAEWLAKITEPGVRRRAEFYYQQLDALRGLRQEVRRDLVAESKKHPAWKRLCQIPSIGPIRAAVLLGILQTPHRFRTKRQLWTYSGFGIETRSSADHRSVDGQLERAKKQICIRGLNQNCNHDLKNLFKGAAIVASSKPGPFQEFYTALLTKGIRPEMARLTLARKIATIALIVWKRGASFDAKYLKPQTA

SEQ ID NO: 455730 - protein, 406 aa, unidentified
MELVTLYKRAVGLDVHQAKITVCAIIEDETGDVTVELAEFGGFKRDRQALAEWVSTRGPEVVVMESTGIYWKSPYAALERVGIVATVVNARHVKTVPGRKTDWADAQWLATLARSGLLRASFVPPAKLRELRQVARQRQQLVGILSGEKNRVHKVLSDGGIRLSVVVSDIHGVAGRAMVKALIEGQSPAEVLMLAGNRLKADRRELLDALDGDLTAEHRFVLRELMAHVQELEQRIDRFDRHLLHELEPYRTTLALMQTIPGIDAIGAALLLVEIGNDMDAFGSVDRLASWVGICPGNNESAGKRKSGRIRKGNPWVRRLLCQFAHAASRTQCAFKSKFEALRFRRGHKRAIVAIAHKILKTVFLLIRRQTHYRDSAVDFEAMSVTRNAPRWLKMLKKHGFIPAAA

SEQ ID NO: 455731 - protein, 347 aa, unidentified
MLADELDYVVGVDPHRDTHALAIVQAATGAALFEVQVTASERGYAQALRLAERESPGRRAWAIEGTGSYGAGLARFLARRGERVLEVGRTRRERRSHAKTDALDALRAARSVLGKAQLASPRAAGEREALRALMVARAGALAAKKAGLCQLRALLVTCPEPLRSELRSLTRARLLRRLAAVRPDRHQDAELRGTLLALRALARRVQALTAEEQELKQEIQALVARLAPAVLDEPGVGPIAAAQVLLSWSHRGRFRSEAAFARLAGAAPIPASSGRLLRHRLDPGGDRQLNRALHTIIISRRKNHPPTSAYIERRRAEGKSVREAIRCLKRYLARHLFRLLEAAPMAA

SEQ ID NO: 455732 - protein, 383 aa, unidentified
MAARCREGQARADRGVLRISQSRAGFTALDTWLEAGPEPVELVVMESSGHYWMPLAAHLKRRGVPVAVVNPLAARYFAKSRLGRTKSDPADARSLAEMAMRDTPPARDPLIGVELRQAARFAMTLVEEQAKVCQRLYRLVELGFPELRELFDDPTCRTARAVLRLAPTARQAARRQAETLANANKGHGQRRLGQTRAARLRAAAADTIAVPELDAETAFEIGLLLDQYDLLEGQIETADRRVAGLLDGETARLLRTIPGVGPAIAATLMAEIGDIGRFTDFVQLLAYAGVHPAERSSGTKGVRPDTSWHMSKAGNSHLRAAAYRMAVVGIQHNPVIAAHYARKRAVGKSPMNALGHCMRKALSLVWGVWRSGQDFDASMGQSA

SEQ ID NO: 455733 - protein, 400 aa, unidentified
MQTTPQNSTTSSRLYLAFDLGGSSWKLGFATEPAGRPRHRSVAVKNRNAPEILEAVFAEIAAAKSRFRLPNDAPVSSCYEAGRDGFWLDRALRAEDVSNVIVDPASVLVNRRARRAKTDRLDVESLLGSLFRHQAGEKVWRVVRVPSAEDEDLRRLPRDRENLVKQRTRHTNRIKGVLVLEGVGKLDARPLSPRFEEALERIRRFDGSPLGDRQLQVIRDEVARLRLVQNQIKRIDDEHKRLLTTKQPIGSTLEKAQRLTQLRGIGPVGAMILVTEFYGWREFKNRRQVGALAGLTDSPWKSDGIDKQQGISKAGNYRIRRLAVELAWGWVTQWQVGSELAKWFHGQTGTGKKRLKRVAIVAVARKLLVALWHYLDHGVVPAGAVFKPSRCLVRAKAKTA

SEQ ID NO: 455734 - protein, 311 aa, unidentified
MTSQFAGIDVGKDSLTGNLYGQDAVKEYPNTSRGIQRLSTWLQKHEVHLVVMEATGGYEKMASLKLERAGLAVAVVNPTYVRRFAQGMGTLAKTDPIDARMIAWYASVKQPKPRPPRSEAAEALSACVDRRDQLVAMRTMEKNRLGSAAAYVQPSITAHIESIDEQIKQMEVEIDHLIDQEEEWQSYIACMTSCKGVGKVTAVTLLAEMPELGHEKREQIAALAGVAPMNRDSGRKSGRRKTRGGRSKLRRVLFMAAMSAAKFNPVIRAFYQRLIEKGKPKSVVMVACMHKLLTILNAMLRKNEMWRPDFA

SEQ ID NO: 455735 - protein, 404 aa, unidentified
MYNAVGIDVSKGKSTVAVLQPGGTVIRKPFDVSHTSQNLNELADYLSSLDGTTKIVMECTGRYHEPMVKALSEAGLFVSIVNPHLIKNFSNNSLRKVKSDPADARKIARYTLDNWTELRQYSGMDNTRTQLKTLNSQFSFFMKQKVAAKANLIALLDNTYPGVNKLFDSPTREDGSEKWVDYAYSFWHADCVRKIGLKAFTERYKSFCKKHHYIFQQDKPEKLFNASKELVAVFPKEKTYKLLIQQSIQQLNLASEHVERLRREMNELASTLPEYSTVMGIYGVGKTYGPQLIAEIGDVSRFTHREALTAFAGVDPGVDESGQHKSKSNRASKVGSARLRKTLFQIMTTLLQNAPEADPVYRFLDKKRSQGKPYYVYMTAGANKFLRIYYGKVKECLRNLEQTE

SEQ ID NO: 455736 - protein, 359 aa, unidentified
MKTIVSNKQNWFNKIKLTKDDEIYVGIDVHKNSHHIAIWLNDAPAIDFVMPADNQKVLTMLDKLRIALKQVVYEAGPTGYSLARLLQDAKLPIRVIAPSKTPRQSARESKTDKLDCRKLAQYAAKGLLRPIAIPTKQQEADRQLFRLREQLVEKQRRLKLQIKSFLLQHGISEPAGLKSWSVLAVEKLRTIALPDKLRYCLNIFLDELAFLKTQIKKTEQHLRETFLVPQHAKKIKLLLTHPGVGPVIAGQFCTEIFNPKRFKNATEIGQYVGLSPMVTQSGQSRKNGPVLKTGRPQLRSNLIEASWIWIRKDPHAYKTYIRLLHNTGEKNKAIVAMARRLAIHLWKMLSDNKPFIQAA

SEQ ID NO: 455737 - protein, 400 aa, unidentified
MISVGIDVSKGKSMVCILKPYGEVVCSPFEVMHTEQELNALGELLKRLNGEIRVVMEATGIYHLPILTYLQEKGFFVSVINPYAMKKYVKDNGVRGAKTDKLDSITIANYGIEKWYKLQEYKSDEDAYAELKILGRRYRHYIELHIAALQELTHILDYTMPGIKKMLKSWNEANNKDKLSDFVEIFWHFDVIVSMKQEEFVLAYVQWAKERKYHQSQSKAIEIYELAANGISTLPSSTPSTQMLVQEAINVLRTIDKSLNNILTRMKEIAKSLPEYSVVRSMGGVGDVLAPKLIAEIGDIRRFYSAKALTANAGIDPPPYESGQFVGTNRKITKRGSSTLRKVCYEMMRVLKTHGEPKDHAVSQYILKKESEGKSKKLAKIAGLNKFLRIYYARVSEVYQ

SEQ ID NO: 455738 - protein, 359 aa, unidentified
MLKYSLGIDISKKDFHACLSVIDVNQQVKVKASRKFSNNEQGFKELISWLGNHRKEGRVPLTIVMEATGVYYESCAMFLFKAGLQVAIVLPNKAKKYLQAIGLKTKNDKIDATGLARMGAEQCLELWQPMDEFFYTLRALTRHHQSLQELKTNIGNQLHADEHSIYSNKKVMKQLKKLITTIEKELLEIADEIDKQLYSNPEIAKKVQLITDIKGIGNITVATILAETNGFALFSSIAQLVSYAGYDVVENQSGNHLGKTRISKKGNSHIRRAMHMPAFNMIRYDVGSFKPFFERILERHHLKMKAYVAVQKKLLVLIYTLWKKNEAFNSGEKVNTSGIEETVPSFALTEGQLNEVAPA

SEQ ID NO: 455739 - protein, 446 aa, unidentified
MSNSKLKNKTVDPSFQEVQCPVSGIYFSSIGVDVHAQILVCHSQRYDPDTKSLFESDMRFGTSRQQLELFAQWIIQKNPEVVLMESTGVYWFSPYEALEQAGFNTDSIKVVKATEVKAAKGRKTDKVDAKRLSEFARMGSFHNSFIPIKAVREARQIGRALHKATQDCARYSNRLHKLFSASGSRLSSVFSDINGKTAAKIIEAYLDKEWPEFVSVVRKFNSRLKADFEDILDAFSHVSPQMKTLLKEVRGQLAQAKSYRDRLEELLRDSLVPYSKQVSRLTAIPGVKELSALKIISEIGGDLSKFRNIEAFCSWIGICSGNNESAGKRKSGSSPKGNAYLRTYLAEVGQGIGLMKTTESQLRVCFQALKERRGHNRAVIAIGHKVARIIYAMITKGEEYVEKYCHTLKAVRLARLVNDIRKAPEVELTVNGASVVDLKSGQIYKT

SEQ ID NO: 455740 - protein, 343 aa, unidentified
MDHFAGLDVSVKDTSICIVDDTGRILREVKVASEPDALVAVLTNRSYHFKRIGLEAGPMSQWLFSALAEADLPVICVETRHMQAVLKAQINKTDRNDARGIAQMMRVGLYRAVHVKTLRSQKLRMLLTHRKLLQSKAIAVDNDLRGTLRNFGLKVGIVGAAKFEVRIRELVEGFPDLAVLIEPLLIVRRVLREQIGILHRRVLSVVRDDEVCRRLMTVPGVGPVVALTYRATVDVPARFRKSKSVGAVFGLTCSRDQSGERDRPGAISRCGDEMMRTMLYEAAQSMLVRSTRWSWLKAWAMQIAKRRGIKRAIVALARRLAVILHRIWVDGTEFRWTRDAAAA

SEQ ID NO: 455741 - protein, 422 aa, unidentified
MSYCPVAGIDVSKQFSDMCILSPDNKIFAQEKIYHDETSINRANALLQKAERLFFSKPVIVMESTSHYHLILFQFFSEHGYDVIVVNPLQSNSMKDFSIRKRKTDRVDAFKLAMMYRTKTLRPSQIPQTATRALRQLCRHRAELLNDVSSYKNRLTALLDQTFPRYDKVFSDVGGVTSCAVLVRFPTPTILLVEEESELVEVIAAASKSGYSFAKKKAGLLISAAQKAQTLGIHSCADETLIVCTIQMLRTLSESVLQIETAIDNLMAQIKEMRNNVSLLQSIPGIGSHSAALLLGEIGDISLFKKPKQLAAYFGLDPTERQSGSFRGTKNKLSKRGSPYARAALHMGVVNSICKRRKDSAANPVLLSYYEKKCKNKPAKVAQAASMHKLVFIIFAVLRDQKPFELKTPEQHAVEQGFVKAA

SEQ ID NO: 455742 - protein, 341 aa, unidentified
MEYYAGIDVSLECSSVCVVDGSGKIVREAVVASAPEALIDWFGSLGLGLARIGLEAGPLSQWLYTAMKRAGLAVELLETRHVRDAFKAMPVKSDRNDARGIAQLMRLGWFRPVHCKSIGAQEVRAVLTARKLIQTKLLDVENSLRGTLRGFGLKVGKTTARSFAGRIQELVKGNPNLETIAEALLAVRAVLLREFNGFEKRVRAMARSDARTRLLMSTPAVGPIVALTYAAAIDDPARFKSSRQAGPHFGLTPKRYQSGETDYSGRISKIGDAAVREALYQAAHVMLTKPVKGCSQLKSWAMRIAKRAGRSKAKVALARKLAVILHRMLANGTPFNAAAAA

SEQ ID NO: 455743 - protein, 397 aa, unidentified
MYIVGIDIAKRKHEAAVIDGEGTVIIKPFSFTNNCSGYNRLLAMLAKANLPLDEVSFAMEATGHYWLALFTRLQKEGFRVQVINPVQTNSIRSFYIRQAKTDPRDALLIAEVIRFGHFSESTLHPENIYELRELCRGRHAIVSMQADVKRKVVALLDQVFPEYETAFTNLFGDTSMAILQTCPTPKELSEMPLEELCHLIEVSSHKRFRMAKAQELQELARNSFGFAMAGDVFSTMIRLYAKHLDFLKQQVREMDRKIAEIMETLDTPITTITGIGPTLGAYILSEIGDISRFSSAAKLAAYAGIDPTMRQSGEYNGVRNRMSKRGSPYLRHAIWLAASSAVLHDPALKLYFQKKRDEGKPYMASVGHACRKMVSIIYAVMRDNKEYVPCIPNEISA

SEQ ID NO: 455744 - protein, 386 aa, unidentified
MKRNDLSRSLVAFDQASTMVAVVELSFRSWLVAGLVPSLTRQPLKKLGPDAQALLTLLRRWQHEATKAGSIINRIVVAFEAGRDGFWLARWLRARGIEVYVIHPTSIPVSREHRRAKTDRLDTGLLMRAVLGWLRGEPKHCSMAAIPTIAEEDARRPNREHQMLVQEQTRVVNRIKSTLIRFGIRNFKVKLRKAADRLATLRGLEDEPLPPNTVAELRRDMARLQLIREQIKAIEKAWLEHLKKATRKGTHPMLLMLAQIMGIGVETADMLVHEVLSRNLRDQRAVARYGGLTGAPDESGTKRREKGLARAGNARVRHGMIQLAWRWLMHQKNSELAQWYQTRTTGAKPSVRKTMIVALARKLLIALWRYVTTGVVPAGAVLRAAT

SEQ ID NO: 455745 - protein, 441 aa, unidentified
MIRASVAGIDLGSEQHWVCAPTRDRSGREVASFGATTAELIRMAEWLQARQVESVAMESTGVYWIAPHEVLEGQGLQVLLVDTRQLAGVPGRDKKSDPTDCEWIQRLHSCGLLRGSFRPEAAICILRTLVRDKANLVAESADWLRRMQKSLDQMNVRLHRAVSDIDGVTGMAILRAIAGGERDAQKLAQLRHGRCSKSEQEIADQLSGHWREDHLFSLQQALKMYDAVQERIAAYEQEILRKLGEMEREEQRGQTAPPLNNTNKARAIKNRGQEPRRQALYRMSGVDITQIDALAVETVEVVLSEYGPDLSRFPTEKQFVSHVTLAPHVPKSGGKPVKKKKRNSASTRVAAALRMAALSLRHSQTALGAYYRRIAQRRGGDIAVFASARKLATLIYRLLRWGQPYVDEGEAAYENRYRQHRIGRLAATAKELGYQLTPVPA

SEQ ID NO: 455746 - protein, 437 aa, unidentified
MTTSPRRETRHRDHQRPARHRRAGRSHQHIVINPDDADILIHSDGQQLVAKRRIADDPTGFAELTVMLADVGDTADDPIPIAIETPRGLMAAALRASGRPVFALTPLAVARYRERHSVARAKSDHADAMTLANILRVDAHIHRQLPADSELAQSIAVLARAQQDAVWRRSKASNELRSILREYYPAFLETFAGKSATNLAKPEARAILAIAPTPAHATRITKARIATALRRAGRQRGIDDLAADILRRLKTPQLRQPELVEKAMGRQALALLAMLDAACTGADELQQAAAEEFRKHPDYDIITSFPSLADLTGARMLAEIGDDRTRFADGRALKAYAGSAPVTRASGKVISITHRRIKNDRLAAVGWVWATYASINQGPAREHYRHRRDHGDRHAAALRHLFNKMLGQLYHCLQTRQTFDAQKAFSHSAETQNGAAA

SEQ ID NO: 455747 - protein, 382 aa, unidentified
MITMTRTSESTAPTGGLLLAFELGQRSWKLGFTVGMGQRPRIRQIPAGAVSALVTEIERAKKRLGLSADAPVTSCYEAGRDGFWLHRYLVAHGITNYVVDSSSIEVNRRARRAKTDRLDLAGLLSLLARYVLGDRRAWRVVRVPTVAEEDARHVPRTLEALTQDRTRLMSRLKSLLATQGVSLAIDAQFLHRLEGAHLWDGAPLPPGLQERLTRTWTQLQEVDRQIRDVKVLRLTRPENLTPATSRALAQLLTMRAIGPIGASVLATEIFGWRRIRNGRELGALVGLVPAPYQSGETDYDQGITRAGNAHVRRVIVQLAWGWIRHQPDSALTQWYQQRFGAGGKRLRKIGIVALARKLLIALWRYLETGVVPDGAQLKPMEG

SEQ ID NO: 455748 - protein, 349 aa, unidentified
MTMLADRVDAVIGVDTHKHTHTAAVVTPTGGLVAHVTGPSDGPGVRDMLAFVRRHAPDRRVWAIEGTGSYGAGLTTALLEQGEWVVEIDRPKRSARRSGAKSDELDALRAAREALAREHLAQPRRRGDHEAIRVLLCTREAAVRGRTRSIAALHALVVSAPEGIRGRLRGLRTGALLRHCARLRNGAGRSSEHRATIMALRSTARRALACEAEAADLKSALRALVETVRPGLLAEPGVGVLTAARILNAWSHAGRIRSEAAFAMLAGVAPIEASSGQTVRHRLNRTGDRQLNRAFHTIVLSRLRHDAETRAYAQRRTAEGKTPREIKRCLKRHLARRIFRLLEDPAHAA

SEQ ID NO: 455749 - protein, 377 aa, unidentified
MRNDIRFVGLDVHAETIAAAVVEPDGELRFLGTIPNRPEAIRRLMKRLGPAARLRACYEAGPTGYVLYWQLTELGVHCDVGAPSLVPVRSGDRVKIDRRDAEKLARCYRSGDLTPVWMPDAAHEALRDPLRAREAAKSRARHRLGKFLLRHGRRLDPGIGPWTCKHMEWIKRQVHFEVAAQEATLTDYITEVEHVALRIERLERAIDEAVSAVPNRMRAVIDALQALRGIRQISAATIVAEVGELSRFARPRQLMGYSGAVPLEHSSGERTRRGGITKTGNAHLRRIVGEASWAYRHRPNLSRGLRQRQEGLSEQVKEIAWKAQHRLHQRFRKLTARGKAKQQVVTAVGRELLGFIWAIGTTVERGLTEPADQRRVA

SEQ ID NO: 455750 - protein, 403 aa, unidentified
MNSVGIDISKGRSTVAVMRPFGEVVISPFEVRHTDSELSELARQLKSLDGETRVVMEATGNYHAPVAKLLHDAGLYVSVVNAKLVHGYGNNDLRRVKTDRKDAVKLANYGLDRWLTLPRYIPEEDTRLLLKNCYRQYRQYSKVQTVLKNNLVSLLDTVFPNANRLFSSPICRDGSEKWVDFVAEFWHCRCVSEKSEKAFTSKYQRWCRKHGYNFREEKAHTIHAEASGHIGVMPKSETTKLLVEQAVSQLRATSAALAALKQEMQTLASTLPEYPVVMAMFGVGPTLGPQLIAEIGDVRRFYSKKALVAYAGLDAPPNDSGDVTGRHKSMSKVGASSLRRTLFLVMSVYLQNAPLDEPVYQFMDKKRAEGKPYRVYMMASANKFLRIYYATVKAYLESLEHSA

SEQ ID NO: 455751 - protein, 320 aa, unidentified
MMAQNDRVVVGIDVAKNKMDACIRAASQRRTFESSAQGRRQLISWLRKHKATTAVMEASGGYERDWAKVLREAGLEVRIVDPKRVRSFARSAGRLAKNDAIDAEMIAWFAETFGEAPAQAYDADREQLLYIVNARQALVDVQTELQNRNEHSLPDVVQKVQARLLKRIALELAKLEAAIAAMISATAHFAELAEIIESVPGLGKGTSAGLIAAMPELGQVSNKVAAALLGVAPYDDDSGKRRGERQIKGGRRKVRNLFYMACLGAATLHNPVLKAFYRRLIAKGKEKKVALVACMRKLIVILNIMIGRGEKWDASRYPVG

SEQ ID NO: 455752 - protein, 419 aa, unidentified
MSFKILKNNCCGLDVHKTWIFACIGITDPYNRTEYKQARFSSYTKGLQELCDWLAKYNCNDVCMESTGKYWIPIFNILEKNNIWVTLSHPKYTKPQKGNKTDRKDARWICDLYMCGMVKPSFIPPADIRQLRDLVRYRFKLICMITGEKNRAHNCLTVSNLKLDDVFSDIFGKSSRSITEQILQHPGEYFDVAPFVHGRCKTPIEEIQAAVDGAISNEQAVKLRQCLSHIDELEMHKTEIEREILRLSEKYEDALSLIRTVPGFDKNPMTAIQVLSEIGGDMSVFPTAKNLVSWAGCCPRNDQSNHKIKSTRISRAGSYFKPVLVQVANALIKSKKNPEFAIRYRRIKARRGHKKAIIAICRMILTAIWHILSDLKPYTPEGFLAPPSVNESKVLTTSQALNLLKQRGYVINDAASPVI

SEQ ID NO: 455753 - protein, 351 aa, unidentified
MTDASRWVGIDLHRRRSHIAILDEHGELTQSRRIANDRDTFLELLGDPAGGETHVALEATYGWEWLAELLEEAGDDLHLAHPLRTRAIAAARVKTDAIDARTLAQLLRAGMLPEAYIAPRALRDLRELLRHRATLTRMRSALKNRVHAILAKHGIIHQHSDLFGKGGRQFLAALQLREAPRRPLDSLLALIDDFDREITDTTREIDQRAREDDRVDVLTQIRGVGRYTALLIIAEIGDVTRFPTSRHVCSWAGLAPTVRSSDGKARLGHISRQGSPALRWALVEAAQKITTGSGPLREKFERIAKRRGRKIAKVASAREILTLSYYGLRDEEIRCLARRSSRASAKEKLAA

SEQ ID NO: 455754 - protein, 340 aa, unidentified
MNSTQIAVDLAKSVFQVAVSSTPGRIDEQHRLSRARFQRFFAEHRPVEVLMEACGTAHHWGRELEALGHTVSLLPPADVRRYRDGDKTDRADTKAILEAARNEAIDSVPVKTIDQQAITALHRLRSGYLATRTARINCVRGLLREFGVTIPVGARHLAPRARQAIDDGSVPAYLEPVLLDAITEVDELRRKAGDIGTQLKRLTKHMPEATLLMSVPGIGVLTATALVAYVGDVRRFRSGRHFAAYLGLTPREHSSGLSRRLGRISKRGNSYLRMLLIHGARSVLRAAKLTEHPDGLRAWALGVECRSGHNVAAVALANKLARITWRVWRDDRPFENRLDA

SEQ ID NO: 455755 - protein, 347 aa, unidentified
MYYSGIDLHKDNCFITTINDAGGLVQQERVANVPEAVLAYFARLGSDHQAVVESTSGWYWLNDLLESHGIELVLAHAKYVKAISYAKVKTDKVDSHTLATLLRMKLIPQAHKISRELRDIRDVMRARLRFVQRRTRSIVSVHTIARKFNCDDQIAIERQTIPDVLSEPYRLQMQLLYHQITLLSDQILTLEKSLHPVLIPNDDIQRLLWVPGIGKTTAFTMYLEIDGIERFSSDKHFVSYCRLVPGAHNSNRTLRQKSGNKDGNKYLKLAFSDCAVRAIQYYPEIRAFYKRMLRRTNERVARTIVAKELARIVYYILTTKNNYRGFKGQPISRVKALEWPRLASPYA

SEQ ID NO: 455756 - protein, 348 aa, unidentified
MKISRVGIDLAKNVFQVHGVDSRGKLVWKRQLKRGNWLRVLVERVDTDCEIGMEACGGAHHWARELQSRGYQVKLLPPQFVKPYVKGNKNDASDASAICEAMGREDMTYVAVKTVAQQDIQAVHRVRASVMGRRTASSNQIRGLVAEYGLVAPKDLGPLRRAIPDWLEDAENGLTGPFRRLLHELWQELLRLDERVEELDREIEVIAETHADAKRLLKLRGVGPLVATALVARLGDASHFKRGRQAAASVGLTPRHHGTGGKNRIYGLSKEGDRYLRSILIHGARAVVSQAKRRDDRLSLWVTDLKERSHMNVAAVALANKTVRMAWSMLRNGTDYEPELAAGERYRG

SEQ ID NO: 455757 - protein, 350 aa, unidentified
MKEGTTIGMDLGDKNHEVCVLDTTGQVMERKQIVNTKESLGKFFKSYAGALVVLETGTHSPWIARELEALGCEVLVGNARKLRAIWMAKDKSDVHDAEMLARIARVDRALLYPVHHRGEAAQQDLAVLKARDLLVAVRSDLINHVRSAVKASGHRIAQCSTDSFAGRAREDVPSGLMPALLSVMEEIESLTRRIRAYDKQVADLIDERHPEAKRLSQVPGVGPITSLGYVLSLEEASRFKKSRSVGAYLGLTGRRDQSGETDKQLRITKAGDEFVRRLLVGCSQYILGTFGPDCDLRRFGLKLAARGGKNAKRRAVVAVARKLSVLLHRLWVTGADYDPDYREHHREEAA

SEQ ID NO: 455758 - protein, 372 aa, unidentified
MDRVCGLDVHKDSVFMCILTANGEKIEDVFGTLTPELDRLRDTLVSHGVGKVAMESTSIYWVPIWRILECDFDVKLVNPYFIRQLPGRKTDIKDAQWIATVLQKELIKGSYIPDSKIQELRQYSRRIFHLTRRKQQAESAIDLTLQRCNIRLSNYVSDIGCKSMRKVVNALICGETDSEVLALLVHKRIRNKHCHEVIKSSLTGIVSSSDRDMLKMSLEEVELYDRQLLECKEKMRIICEEHYAEELEILQTAPGIKEESAMRIIAEIGVDMKAFLTASALVGWAGLRPRNDQSAGKIKGRKTLHGNKYLRVMLTQCAWGACRTQTSKFYSRYHTLKKRMNHNKALMANARKLLVVIWNLLAKKQPYMPFVN

SEQ ID NO: 455759 - protein, 328 aa, unidentified
MAKEKFDVSFLRQSAKSAVAAPVHKVVSNTESSIRTFLKSVPAGSILVAEHTGVYGERLLKMCTDMNVKIAYVGGHVIHTYKAGPDRGKTDELDCSLLREFGERFTDKLRLATFPTEAIYELQQLSRQRTMLVEERKRVATADKAEECRPYRSETVRRSMRNLMDMLDEEIRDIEKAMLDIIGKDEGLSNSYDIITSVNGVGLVTAVELIVKTKNFTTIKTAKQYAAYAGTAPYEKSSGKMNRGAHISKWGNRRSKTLLYICAESARRYNKEIKLYYERRTIVDKKAHHYVLNAIANKLLKLVFTLIAKNEKYDPCYIQHDPRTFNKK

SEQ ID NO: 455760 - protein, 398 aa, unidentified
MISVGIDVSKGKSTVCFLEPYGKLLKKPFEVEHDKISLSTLVTMLKKLDGEIRIVMEATGVYHLPILLYLKEHDFFVSVINPYEMKTYCTCGLRRAKTDRQDAIKIADFGINNWYRLKKYNVSDDVYSELKLLVRRYNHYMRMHVESILELTHILEYTMPGIKKLLQGWNEATNKDKLSDFVETYWHYDNITKLSEEEFIEDYTKWAKDKGYQCKQSKAVKIYALANTSIPTITSNTSSVKMLVQEAVRVLREVNNTLKKILTQMQKLAKRLPEYSVVRKMGGVGDVLAVKLIAEIGDVKRFHNGKALIAYAGIDAPPYQSGQFIAKERKISKRGSASLRKIGYEVMRCLKSHAMPEDSAVYEFIIKKELEGKSKKAAKIAGLNKFLRIYYARINEIY

SEQ ID NO: 455761 - protein, 407 aa, unidentified
MDVVIERACGMDVHKDNITACIMTPDGKEIQTFSTKTVFLLQLVDWIKQHNCTHVAMESTSVYWKPIVNLLEAEDIEFLVVNAQHMKAVPGRKTDVKVAEWIAKLLRHGLLKASYIPDRNQRELRELVRYRRSIIEERARQHNRIQKVLEGANIKLGSVVSDVLGVSARDMLDAIADGEEDPEKLANFARRTMKKKKEELELALKGYINSHQRLMLKTILGHIDFLTEQIEMLDQEVADRVSSHQEDVARLDSIPGIATRMAEQILSEIGTDVKNQFPTAAHMCSWAGLVPGQNESAGKRKSAKTKKGNKYLRSALTEAAHSVRGSKNYLGALYRRTASRKGKKRAGIVVAHAMLRISYYLLTRKEMYVDLGEDYFDKQRQQSIVRHSLRRLESLGYTVTLEKPKAS

SEQ ID NO: 455762 - protein, 373 aa, unidentified
MPRYSTAFGMDVHLRSTTVCALDAETGEAVARRFRGNPWGEVAEWMSGFPGPSLAAYESGYLGFAPQRELSALGVDCVVAAVSKVPRSAADLSSKNDRNDAARMAKAILSHDVTPVWVPSPEIEGLRDLAAAHDAATARLAAAKQRLLAFLARRGYVYGGTTPAGNPRKYWTYGFLRWLDKVRPADDGGIRALAALRNEVEAADEAREALLAEYRAAVAAGPLSAEVEALQSIKGCGFVLAAAFASEVGDFSRFRSGRQVTAYFGLAPKQRSSADSMRLGGISGAGNALVRRLAVEGSWRYAQAGHQPKLMPKGSGVPLEIRMHGRKGSERLLRRREEMLERGMPQAKANAATAAELVRWLWALGMMCREAGE

SEQ ID NO: 455763 - protein, 381 aa, unidentified
MLFIACDVASKGTTDRKSLGLERPQCSEGRRAQMVEEPEQLPGPVEPVSRKEGPDRRRRRPMGTEKVYVGIDVSKETLDMAVHASDQRWRFANSDEGITETLSCLEELCPTLVVLEATGGFQDPLAAALAVAGVPMVVVNPRQVRDFARATGRLAKTDTIDARVLAHFAAAVHPPFRLLPDTQGQELKAILTRRRQLIEMLTAERNRLHSARSRFAKAHIQAHISWLEEEMAHIDHDLRHSIRQSPVWQEKDDLLKSVPGVGPVLSTTLLADLPELGLLNRREIAALVGVAPFNRDSGHFRGQRTIWGGRAVVRSALYMATLVATRYNPIIRDFYRHLLSAGKPKKLALTACMRKLLTILNAMLKHKTSWHYPISGISQTS

SEQ ID NO: 455764 - protein, 341 aa, unidentified
MGEVSTIGLDIAKSVFQVHGVDVAGSVVIRKRVSRAKLLEYFGGLPRCLVGIEACPSAHHWGRELQALGHRVRLIAPSYVKAYLKRSKNDANDAAAICEAVTRPSMRFVPIKTKEQQTVLMLHRTRQLLVRQRTMLSNALRGHLAELGIVSAKGRNGTAELLRIIADRRLSPAVCGILEVLARQYGAIGTEIASIDKNIMVLHRACEASRRLAEIPGIGPISATALVAEIGDWKAFGSGRSLAAWIGLVPKQYTTGGKDKLGRITKQGNRYLRWLLVVGAMAVIRYARNHGTEKRPWLGRLMQRRPTKVAAVALANKIARMAWAIMVRDERYQEPKPLLAA

SEQ ID NO: 455765 - protein, 392 aa, unidentified
MPELWAGIDAGKAHHHCVLIDDEGNRLLSRRVANDEAALTELLTDVRTIAAGKEILWATDLNRGGAALLIGVLEAHHQSLVYIPGRSVYHAARTYRGDGKSDAKDAAIIADQARMRRDLQPIRNGDQISTDLRLLISRRTDLVCDRTRAINRLCAVLLEYFPALEAAFDYAMVKAAVVLLTKYTTPAGIRRAGEARIATWLGNQGCYNAKAIATKAVAAAHAQSTTVQAQEVGADLVAALARTILDLHEQVAEIEKRIEARFREHQQAEILLSMPGFGVLLASEFLAATRGDISAYDSAARLAGVAGLAPVPRDSGRISGNFHRPKRYDRQLLNAFYLAAQSAARYCPQSRTYYQRKNHKQAVLSLARRRLNVLWAMLRDGTPYQQPTVLAA

SEQ ID NO: 455766 - protein, 349 aa, unidentified
MFAGVDTHKDTLAVAVIDHAGRVVRQLELPNQDSGYVRLLALLTSHHVVRVGIEGSGNFGWPAAIYLLERDLNVVEVPPLMTSRERLSRPGQGKTDPVDAVAIARITAREDALPPVRPMTGHAADLRVLTEYRDQLVNERTATANRVHTDLGWLRPGYQHQLPHLTNMAHLHAALELVSGDDSVRAAVTRSRLHRMLTLTKQLADLRIQIDALVKASGSTLPEVYGVGPVVAATIIGHIFDVRRYPTRHHFATANGTAPIPASSGRTIRHRLNRGGNRQLNRAIYTIAITQIRADTEGRAYYQRKRSEGKTSREALRCLKRRLSDLIYRTLRADLANAAQPTPTRSVAA

SEQ ID NO: 455767 - protein, 369 aa, unidentified
MQTLVAMASVMFQELEEVPMTMVGGLDVHRQQITFDYVDDDGLVHWGQIRPATRKTLRGWLAEHFRDGDADFALEGCTGWRYVSEELAAAGLGVHLGDPAETAALRGRKKRAKTDRADARLLRTLLVEGRFPESWIPPAHVVEVRTLGRLYCTLMDERRAWQQRIHAQVFHQGCPPIRALLTRAGREALAGAELSAAGRQYVDTALRRIDELSAEIDPLRTQLIGFARRQPGCRALQRHYGVGWLCAVIIWAEIGDARRFSSSDQLVRFAGLDVTVYSSDAKRAPGHLSRQGSPELRWAAFEAAKSAARRGSPDHGYYHKLAAKHDGHNGKNPTLAVERKILRRCYHTLRELGDAALALPDIRPQEVAA

SEQ ID NO: 455768 - protein, 340 aa, unidentified
MEKRYIGIDLHRNRFTCCIRLENERTYVTEWELEDLARFVKKLRASDEVAVEITSNTRLFREAVAPQVKRVVVVDTNQFRVISRSVKKTDPNDARLLSLYLSKNLLPEVRMKDKDLAQLASLTQTRDTLVKQRTALKNKVNNILSARGLNLAKEALSSEKKLAEVLELPFDEIVRIELGVIVAQIRSLNKSVAELEKTIGEEGSKLEGHQGLLSIKGTGKITGAILLSVIGDVKDFPDEGRLASYFGIVPRVSNSNETERSGRIHKRGTKLGRTALVQSALTAANYSPYLKSFYQRVKAKRGAGKAIIALAHKFLGIIYRTLKNKWVFEDFPNFVLTEES

SEQ ID NO: 455769 - protein, 360 aa, unidentified
MERYGEKKDHRVVGGVDTHKDLHVAAMVDEQDRVLASQCFPTTRHGYKQMLAWMRSFGSLQRVGVEATGTYGAGLLRYLQHAGVKVLEVTAPDTHDRRKRGKSDDLDAQNAAHAAFAGRRTVTPKSRDGMIESLRVLKACRKTAVAARRVALQMIHNTVVCAPDELRETLRQMTRMQLIRTLAAWRPDLTDYRNVVSAYRITLRSLARRYLELHDEIADLDTMIPAIVDELAPALVARNSVGHGSAAQLLLTAGDNPERLRSEAGFAALCGVSPVPASSGKTTRHRLNRGGDRAANSALHIIAISRLRTDPRTKAYLAKRLAEGHSKLEAIRCLKRYIARELFALIQQRRREINQAAIAA

SEQ ID NO: 455770 - protein, 346 aa, unidentified
MTNNIQFSSVCGIDIAKSVMQVYKVTSDGVVSNKAVKRADFLNEFRNIPPALIGMEACGGSQHWARELQSLGHTVRLMPPKLVKPYVTGLKNDKNDARGIYKALEMSVREVPVKSAAIRDLALLQTMRTKRQREKIAKINHIRGILSGYGLIMGKSVNAFLAKAGSLIVELKERADVSPFIVSELNALFPKVKEAMAKIKELETNIDSIAKTLKQYDLFRSAPGVGPITAATMLVLLCNPEVFKNGREFAAYIGLAPKSSGSDGKNFVTHIPKKYECNNEVRTLLVQCAHAICRSKHKSDRVSLILARKPKKVVIIAVANKLARQLWIMAKKGEKFERRFILAAAQ

SEQ ID NO: 455771 - protein, 337 aa, unidentified
MGEVNAAIDVGKRQLEVALGSAGERFAENNEPRAIARLCQRLAAAGCARVLIEGGSYQNLLVGALRAAGLPVVIVNPRRVRQFARSTGQLAKTDALDARMLADLLRANLFPACFVMPPELEGLRRQLRFRRLVVEEAVRFKNKTAGLLMEAGIEYERRRLHGKRYFGEVMRQELIDRELRPLLEFSRSQTEELKRMDGRLMRMLAQHPHLAARVEALRKIDGVGPVTALSWALEVGDPSRFASIKRAVSYCGFASALRESAGQQKRGPLSKQRNRHLQTVLIEASKIGVMYHPKLREVHDQAAHKGHPNRATLAVARKLVAYLLAADRAFFAASAPA

SEQ ID NO: 455772 - protein, 465 aa, unidentified
MKRHRRCQPPKPRVSPSVLEHLNPHAAGIDCGSAEHFVAVPADRDSTPVRSFTTFTGDLERLADWLTACRVTHVAMEATGVYWIPIFEILDARGFQVSLVNARHVKHVAGRKSDVSDCEWLRDLHILGLLRGSFRPADGIVALRGYLRHRATLIESAGAIVQRMQKALVQMNVQLPLVVSDITGVTGLKILRDIVAGRRDPHQLAQHRDYRCHASEAEIVAALTGNYRAEHVFVLQQNVELFDGYQRQLTACDVAIEAHLAQLAATVTPTMTALPPARRRQKPRENEPRFDVRTPLHQLTGVDLSQIDGIGPYNALRLLSEIGTDMTRWATEKHFTSWLTLAPQNKISGGRLLSSRTQPSANRAAAILRLAAMNLGRTQTALGAFYRRLAYRVGKAKAITATARKLALLVYRTLKDGLVYADPGAEAYDTQHRTHVVRRLRQRAANLGFVLINASTGELVDGSVS

SEQ ID NO: 455773 - protein, 412 aa, unidentified
MRIVGLDVSRSVAEIAYLEDGVLHAGGHAELRRDEVERFAAGLRSTDHVVLEATGNTAAIVNVLRPHVARVAIANPLLVRLIAEARVKTDKIDAAVLAQLYASRFLLEVWMPDENTLALRRQVSRRSQLVRQRTRLKNEVHAVLAAHLIERCSAADLFGRKGRVWLGAQPLPMDERLGVEQRLRELDRPGDDLREVDQALAQASIGDGRLCRLLTITGVNTAVAIGLLSAIGAVERFPNPEKLVSYFGLNPSVYQSGPTPTRHGHITRRGRSYARALLVEAARGAAQAPGPLRAFFLRVRDRRGQQIAIVATARKLAVIMWYVLTRNEPFAWDRPALTAHKLRALELQSGMPAQHGSRKGSAAAYSLKSVRDQERAVAEQAERTYQRLFSRWKQARPKGHEAPLSWPGTPTS

SEQ ID NO: 455774 - protein, 641 aa, unidentified
MTEAYDGREVVGIDLHRRRSVLVRMTGDGRKLETARITNSPAELRRQIARAGKSPRVVLEATYGWYWAADTLAAAGAEVHLAHPLGVKGFAYRRVKNDERDAADLADLLRMGRLPEAWVAPHQVRELRELTRYRHKLVRIRTSVKDQVHAILAKLGIPVTCTDIFGVWGSAWLDELVLPQPYAGKVASLRKVCAVLADEIALLETAIAGLLEDHPGYQAVRALPGIGPVPVAVIVAEIGDVTRFPRPAELCSWAGLTPRHRESDVKVSRGHITKMECAGGMVPRWNVRAEWFRRGSGRCAMTVAGGLDLHRGQLTFDYVDLGTGEARRGRICPADRASLRGWLRQFDGARDVEFSVEGCTGWRYVVEELQRAGITAHLAEPAETANRRGSKRRAKTDWADARLLRDLLIDGRVPESWIPPAHVLEARARVRLYKDLLEERTGWQQRVHATLFHQGIPVVPKLGTADGQRRLDAAELSAAGRQAVEAGVRQIERLNQEMTPLRRELARLSSRQPGCRALRTAHYGIGGLLSVAVWAELGDCRRFSSSDGALRHTGLDISVHDSDGKRTRGHITRQGPPVLRWALYEAALYASRPASPDYAYFCRVRERIDGQRALLSVARKLARRCYHTLRDLGEEALQPAA

SEQ ID NO: 455775 - protein, 433 aa, unidentified
MNNNIVVGIDVAMEKHQYQICDTKTIYSKGAIQNNITGGNKLLAKIKEAAKDREVVVGMEATNNYHICLQTFLQNNGLKVIVINPLKTSAYSKIDDYGNKTDPIDAKGICNFLLDNKHKNIKQMNQKYLKLRELCRCWLKLKGDMTRISLRLRSRLIIINPEFESYFQKTLCKSGLWLLEEYLIPENIAELDVDKLQHELKKIAGVFGKKDTAQRIVELAKNTFGVKNDIEGYLRYIQYHLDEFKFLREKILEIKKEICRETEQNYCKVDIEYISSIRGIGTEVAAGILAELGDFDNFEKQSSIVRFAGLTVLRKQSGKSEGKSRMSKQGSSYLRCFLYQAAMGTKLHSATFAAVYANRKLKVKDLSPIDKRIANAKALANIARRILETVYTCTKKKRLFNDKIAFESLNIDNFIRETIAVQFKEQLSKATRQ

SEQ ID NO: 455776 - protein, 319 aa, unidentified
MADIGTFVGIDVSKATLDVHVRPQADAFALPNDPQGIAELVARLAPTRPALVVLEATGGLEYAAAAALAAAGHSVAVVNPRQARDFAKATGRLAKTDTIDAAGLALFAQRLRPEPRPLPDEQAREFEALLQRRRQLLEMRTAEQNRLAAAPAAQVRASLQAHIDWLSKQLDKVDKELGAAVEASPVWRAKDELLRSIKGIGPAVSRTLLAALPELGTLTRQQIAALAGLAPLSRDSGKRRGQRCIGGGRAEVRSLLYMAALSAARYNPALRSFSERLRRAGKAVKVRLVAVARKLLVIANAVLRERRPWDAALCGTEGG

SEQ ID NO: 455777 - protein, 321 aa, unidentified
MSEPTLERFVGVDVAKDWLDLHADPPATQLPGHVTYDDAGLQQLCDVLARLRPTLIVMEASGGLEQRLACELAARSLTLAVVNPRQVRSFARASGQLAKTDAIDARTLCAFAKLIRPQAKPPKDEATRELADLLGRRRQLVDMRIQELQRQHTASTKAMRKSLAEHVTWLERRIAQLDDDMGKRLRDSDVWRLKDDLLRSIPGVGPVLSRTMLALCPEIGQLNRREIAKLVGVAPMARDSGKYHGRRRIWGGRSDVRRVLYMATHAAMKHNAPIAAFAQRLKAQGKLPKVVIVACMRKLLTVMNVVLKTSQAWTDSSIRQA

SEQ ID NO: 455778 - protein, 416 aa, unidentified
MTFKVVRFICGGMDVHKNLIVATIGTTDRQTLITEYIQQSFSTFYSDLIRLKEWFISHDCYDVCMESTGKYWIPIYNVLETELNICLTHPKYVKAIKGKKTDKRDSKWICDLYKCDLVKHSFIPKKEIREMREIARYRCKLVYMRSSERNRYQNCLTVSNISLASAVSDPFGKTATNIMKELMQSEVIEDDKILKLIHKNCKDKDKILDSLQGYHIESDQRFKMDTVMNHIEYLDKQIQACEAELIKRAYPLRDYFQHITHIKGISALSAILIVSEIGTDMNQFESDKQLVNWAGLSPANNESANKKKSVRISKTGQYLKPLLVQCALSSIKDKNSYFGIKYCRIKKRRGHKKAIIAIARMMLVCIYHMILTGEEFNPCDYKSLTNPKPKKEPIMTVESALQFLKDSNFDFSSIQL

SEQ ID NO: 455779 - protein, 372 aa, unidentified
MHYSTVYVGMDTHKDTFSLCCYTNEKEQAEFPQKVEGHYSKVLNYIEAMRFHYGDDALFICGYEAGCLGFKLYKDLTAHNVKCVIMAPSTMSTPKGKRIKTDSRDAALIARCLAHHDYSAVHIPTEEDEQVKEYIRMRDDHKAGLKRVKQQIQAFCLRHGCQYSSTKNSWTQAHILWLRGLKLDGLYAETLEEYLLEYDYLTQKLERIDKRIEELATDDEYWERVHRLECFIGIKKLTALSIVVETGDFKRFADASQYAAFLGLTPGEDSSGGNQNRLNITKAGNAHLRTLLVEAAQSYTRGQPGHKSKLLAARQEGNTPAVIAYADRANERLRRRYYRLTLNHGKKANVAKTAVARELACFIWGMMTDNIA

SEQ ID NO: 455780 - protein, 312 aa, unidentified
MIRTICGVDVSKKWLDAHIRPAGIFHRFANDAEGIAALACYCRAHGAELVVMEASGGYERLAFLLLSQRGQPCAIVNARSVRRFAEAMGFLEKTDKIDAAVIAHYGEVKKVKPTTPPSAAQQRLRALVTRLSQVSDDMTVNKQRLSTAEDPEAVASLQAAIAFFKREERRLEGEIASLIDDDPLWAKLNATFRTLKGVADRTVARIMAELPEIGLLSNKAITKLVGLAPIANDSGKHQGRRSIRGGRAGPRGILYLIARTVARFDQHFADFYQRLQRAGKEKMVIRIALARKLLVVLNAKARDARAEFANAT

SEQ ID NO: 455781 - protein, 365 aa, unidentified
MKKSNTCRQSSGRQRKSVAESVTIGMDLGDKMSRCCTLNSSGEVVEEERVATTKQGMTQAFGTRKRSRIAMEVGTHSPWVSRLLSRFGHEVIVANARQVRLISQSSRKDDRMDARSLARLARADPELLRPVRHRSEEAQQDLAKIRIRAALIEARTALVNAGRGMVKAFGERLPKCDADQMSWERSEDLPVGLRETLKPLLKQVESLSEQIRECDEEIEEMGRRKYPEIAVLQQVSGVGTLIALTFVLTLEDKERFQKSRDVGCYLGLRPKRSQSGESEPQLGISKEGDVYLRKLLVQGAHYILGWRGPDTDLRRWGMKLAARGGKNAKKRALVAVARKLAVLLHRLWVTGEVYQPLRRAQGVAA

SEQ ID NO: 455782 - protein, 423 aa, unidentified
MSKQNVELAAFIGLDWADEEHAVCLQGAGESRKEISTLDQTPEGLQAWIHQLRARFGGRPVAVAVEQARGSLIYALMHVDFLHLYPVNPQTLAKLRQAFYPSGAKDDPGDAQLLLEVLLNHRDHLRVWVPDDVLTRSIQLLTEGRRKLVGERTALTNQLIAALKMYFPQALDWFGDLHTPRACAFLYRWPSLQQLKTATSSSVRKFYQNQGYRGEDKLKQLIQDIQQALPLTGDEAVVLASTMMVQALVKQIPSLTESIEEYDRKIAALFKSHDDSTLFGSFPGAGPTLAPRLLAVFGSDRSRFEYAAEVQQLSGIAPVTEKSGKACWVHWRFACSKFLRQSLHEFAGQSILKSAWARAYYQQQRARGSSHQAALRALAFKWIRIIFRCWKDRTPYDEAKYCQSLQLRGSRLASTLKTASTEV

SEQ ID NO: 455783 - protein, 346 aa, unidentified
MQYTAFDAHKHYTWARVERPDGTVVREKKILHEPGALRQFLAGCEPGSPVAVETVGNWYWIVDEVEAAGCVPQLVHAYKAKLMVGRVNKTDRLDARGLVQLQRAGTLPVVWIPPRELRDVRELPRARMVLVAQRTRLKNRIHATLSKYAIPLPEVADLFGKRGRQELRVRLSELPPHTSFVASRLLEQVERFDREIEALEARMGELFEADDAIRLLMTLPGVGFILATVIHTEIGDVTRFARSEQLAAYAGTVPRVHESGGHRHYGPVRSDVNQYLKWAFVEAANVICRHRGTHRQRHTTQLYERIARRRGHQKAIGAVARHLAEAAYWMLTKGEPYREPGSSTGA

SEQ ID NO: 455784 - protein, 349 aa, unidentified
MKKIFIGIDFSKEKFDVTVIKAEDLGEMQSIGHQEFINKATGYRKMLCWVGSLCGADTCEDWLFCGENTGGYSQMMSDYLYSKGYDLWIENALSIKRAFAMKRGKSDRSDSLMIAEYAMRYQDKARLYEPLSPALSQLREVFLYRHMLVRHKCGFEVRRIEKHFTQQKSSAKTMISQSSRHILTELKHEIQKCDQRIQELVRSDEELSRIFGIITSMPGVGTLNAVCLMVFTNNFTKFDYNARKIACYYGVAPFARDSGTSVHSAPKVGYLANKMIKSLLSQAALATVNFCPAMSMYYHRLVDKGKKPMVALNNVKNKMLAIITAMVKNECKYQPKYVSINAGSEMLNK

SEQ ID NO: 455785 - protein, 437 aa, unidentified
MEVVHPRCAGLDVHKRTVVACRLTRGPAADPAREVRTFGTTTRELLALADWLAAADVSHVAMESTGSFWKPVYNILEAGFELLVVNAAHLKAVPGRKTDVRDAEWIADLLRHGLLRASFVPTRPERELRELTRYRTSLIRERASEVNRIQKVLEGANIKLASVASNVAGVSGLAILRALVAGETDPAALAGLARGRMRSKRPALEEALDGRMGAHQRFILATMLRRLDELDRHIATVSTEIEARLRPFDEAIERLTTIPGVGRRTAETVLAEVGADMTRFPSARHLASWAGMCPGNRESAGKRMSGRTRKGSPWLRGILIDAAHGAARTTTYLGTQYHRIAARRGGKRAAVAVGHSQLVIAYHVLRRAEPFHDLGANYFDERDHEHVRRRLTHRLEALGYQVTVAPAALRYLRGTPLIFGHLIRRPRIDGHLILAGT

SEQ ID NO: 455786 - protein, 342 aa, unidentified
MAIVAGFDVHRRQITFDALDTETGEVSRGRIDATAAAVGRWMTRFAGEQVDVAVEACTGWLFVCDALAGAGAVAHLAEPVETRALRGSRRRAKTDREDAKWLRELLAEGRLPESWIPPEHVRQWRSRARMRHTLIDERTQWLQRIQATLFHHGISGTPERLRTRAGRAFLGDLELPGDARERIEIALAMIDAIEAQIAPLERELRQLARRQSGCRALMGLYGMGELTSLVTLCELGDVGRLSASRKAVRMAGIDIGVHRSDRRARAGKLTRQGSPQLRWALYEAALAACRPSSPDHADYLALKARGLSHTRASLTIARKLARRSFHVLRELGPAALDPVTTP

SEQ ID NO: 455787 - protein, 370 aa, unidentified
MQFIGIDLHTNKFTCSYRDENTPPDAKKGKRTETFELSSHGLEAFYQTLTAETHVLVEATTTAFSFVRLIQPWVKEAIVANTYELKQISLARTNTDKIDANILSRIIKMQVLSGEQAISPVAVPPVEIQELRGLFTTYRLYRKQTTQIKNRIHSLLKEKLYGFTQEEIFDRKNREKIRGLESGTSMSFQLIELLSLLEHMESRIEPLKEQIMAQAEPYKREIAILTSMKGVSVFIAIAIIADIIKVDRFKNSKAFTSYLRSAPQVSSSNTSVKIRGINKKGRKMAATLLTQSLHHVLQASPKLHRWYTTLTRYKKAGLVRTGLRRRVFAEIYQMLKKGEYHYGRDALKHEAKMRQYTKFLERRKNLLKSA

SEQ ID NO: 455788 - protein, 343 aa, unidentified
MQIRSVGIDLGKTTFHLVALGTSGKVLVKKKFSQKQLLAFTANMQTSLIGLEACSGAHFLGRALRQQGHDVRLIAAQFVKPFVKSNKNDYVDAEAIAEAVERKNMRFVPIKTDDQLDLQAIHRVRDRLVSRRTAVINQIRAFLLERGMVFAQKPAKLKAAMADVLENAENALTPMMRNLIGMLWDEWKTVEQQIDELTDRLEQIAASDAGCCRIRQIPGIGPIVATAIVGAIGNGAAFRKGRDFAAWLGLVPRQYSTGGKAKLLGISKRGNIYLRKVLIHGARAAAMRIKRDRFTIGAWMNALEARAPRNVLVVAMANKLARIAWAVLSTGEDYRPAASATAA

SEQ ID NO: 455789 - protein, 412 aa, unidentified
MKQIRDKVGGLDVHRDTVVACARIVQPDRSVLVTKRSFSTTSVGLGELARWLEETGVSTVAMEATGVYWRPVYYALEGLFAELWLCNAGHVKNVPGRKTDLSDAEWLADVAAHGMVRPSFVPPPEIRELRELTRYRKTQVDARVKELQRLEKTLQDAGIKLTSVASSVWSLSSREMIEAMIAGERDPKVLAQMAKSRLRAKLPELEEAFSGHFGSHHAVVCRQIIDHVDFLDRSIAALTAQITERLAPFESAVTLLCSITGVGRTTAEVMIAEMGADMTRFPTAGHLCAWAGVAPASHESAGRSRPAGTRHGDPWLRRALVEAAKAAARTKGSYLSAQYSRIARRRGANKATIAVAHSILAVSWHLLSTGAIYEDPGAEYFNRHHDPDREAKRLQRKIESLGYQVTITGQAA

SEQ ID NO: 455790 - protein, 323 aa, unidentified
MEQISRIGMDTSKHIFQLHGVNIAEEPVLRKKLRRTEMVVFFEKLPPTVIAIEACGGSHHWARLLQSFGHQVKLIAPQFVKPYVKRGKNDAADAEALCEAMSRPAMRFVPVKTPDNQAALMLVGLRDRLIRNRVQLANAIRGYAAEFGLTAAKGVCKIEPLLDRAAADKTLPALARELFAFHAAEYAQLQEQLEKVEAKLVAWHRADECSRRLAQIPGVGPIGASMLVMKTPTPEAFRSARHFAAWLGLTPKDHSTAGKVRHGVITRAGDEALRSVLVVGATAVIRQIRYGRGALSPWLLDLLKRKPPKLAAVALANKIARIA

SEQ ID NO: 455791 - protein, 411 aa, unidentified
MEILYPRCAAIDVHKRTAVASVGWLDEQGQRHKQTRTFATMTADIERLRRWLGEHGVTHVAMESTGVYWQPLFNLLEGQCVVVLANAAHVKAVPGRKTDVRDSEWLLDLMQHGLIQGSFIPPAPIRALRGLTRYRTSLVEERAREVNRVQKLLEDANIKLAAVASDVLGVSGRLMLEAIVAGETDPGVLAGLAKGKLRKKHEALVQALTGRVRGQHRLVLRELLAHIDYLDGAIARLSAAIAEATRPVAAALELLCSIAGVKQRVAEVILAEVGPDMRQFPSASHLCPWAAICPGNNQSGGRQRSGRTRRGNRWLKGALLQAAWAATRVKDGYLAAQFRRLAKRRGEKRAAVAVAHSILRLVYRVLTTGSPYQELGAAYSDQQEAGQRARYHLRRLAELGYAVAPEPRPAA

SEQ ID NO: 455792 - protein, 457 aa, unidentified
MMETKRRREQRSMLPVHPDAAAIDIGATVHVAAVGPARDPEPVRSFGTFTGDLHRLADWFAQCGIKTVVMESTGVYWIPIYEILEQRGFEVRVVNARDAKHVPGRKTDVSDAAWLQRLHEFGLLRGSFRPQGAIAALRAYLRQRERLLDYAAAHIQHMQKALTQMNLQIHHVISDITGATGMRIIRAIVAGERDPDTLASYRDIRCHSSAETVRQALIGNYREEHLFALAQAVELYEVYQAKVATCDEKIEGVLERLKQPCRAPAKPLRAARHKTRQPNAPAFDARGALYAVLGVDLTQIHGLGPYLALKLISECGTDLSAWPSAKHFTSWLSLAPGNKISGGKILSSRTRPSGNRAAALLRLAATTVGRTETALGAFYRRLSARIGKAKAVTATARKIAVLFYNAVRHGMDYADPGASYYEERYRQRVLTNLQRRAKAFGYVLQPTEIKAVSMAVS

SEQ ID NO: 455793 - protein, 420 aa, unidentified
MMEQYKLERAINKSCGLDIHKQFLIATILSRSGEKQQQRFTRDDDGILELKNWVTSEKCDVVACESTSDFWVPIYDSLTNHLPVIVGNARDMKAFTHKKTDKIDSEIIAKLALNQMVQPSRVFPKNHREFRSFVRLRLTLVRKRTDIKNEAHAILSSEMLHLGNVLKDIFGKNGRAILSGISSGKAVDQIIESLSPNVRKKSTPIREILDREISHTAAIRLQTCLNLIRHFDDEIKLLEREIFNYAYGKHKDKMEILMSVPGIGELGAAILIAEINDFNDFPSGDKLASWLGLVPSVYQSADKYHNGRITKRGSKVARWILTQIAQAAARKKNSKLKEFFNRKKKSIGHSKAVIALARKIVTIIWHLIKNNEMYEDETGYEKGEIQKRKIIETEVFSVDERIRIISGIFAIMGKEDREGT

SEQ ID NO: 455794 - protein, 418 aa, unidentified
MKSTKTKKITKINDKTVVATLDIGKNVQYGYFRAPNGNDVKPFAFYNSKKSCNAFWEKLRQFQKQQGLEQIVIGFESTGPYAEPLFHFLRKKPVELVQVNPVHTKRVKELTGNSPNKTDKKDPRVIADVICLGHALTLVVPEGPAAELRRLTQARQRAIKTRTSMINQLQHLIFVIFPEFLNVLKISTKTARYLIKHYTTPEKICALGLDSVGQVLKKVSRGKLGQDRAKQLHEAARDSIGISEGKQSIVFEIEHLVGRIEAEDQFIDSLEKQMRVYLQQIAYSQNILSIKGLAEVTVAGLIGEVADFNKFDTISEVMKLAGLDLYEISSGNHRGQRRISKRGRPLMRKLLFFAAINAVKSKGIMHEKYQQMLDRGKIKMKALVAIARKLLGLIFAIVRDKTKYVENYSDNYHYKLAA

SEQ ID NO: 455795 - protein, 351 aa, unidentified
MDKGITVGMDMGDKNHIVCELDAEGKVLAQATVTNTAKAIRKHFGERKPCRVAMEAGTHSAWVSRILEEMGYEVLVGNPRKLRVIWDSDEKGDERDAEMLARIARFDPQLLYPIHHRSPKAQTDLAVIKARDMLVKTRTILIAHARGTVKSAGQRISACSAEAFHGRLLEEMPVELMPALEPVMKSIEELTIRIRHYDKLLEKLCADKYPETEGLRAISGVGPVTALAFVLTIEECSRFDKSRAVGPFLGLTPKRDQSGQTDKQLRITKAGDAYLRRLLVGCAQYILGPFGPDCDLRRFGLKLAARGGKNAKRRAVIAMARKLAVLMHHLWKSGTIYDPLFQESRKQKKVA

SEQ ID NO: 455796 - protein, 352 aa, unidentified
MIVLGADAHKRSHTVAAVAAATGELLGEQTVPVGRRGFDALVQWARSLDGERVWALEDCRHVSGSLERFLIERGERVLRIPTHLTANTRRSARQRGKSDRIDALGVARAALQEGLESFPAAQLAGPELDLRLLVDHRERLVRHRVELNSTLQWHLHDLWPELRLPGGALFSKKWSTRIGRRLARAEQTMRVRIARDELRRLRELTLAINQLEREIGALVEQIAPQLLDEPGFGPLIAAKLVGEIAGAQRFATPAKLARAAGVAPIPASSGNTQRHRLDQGGNRQINAALHRVIVTRARCHPQTRDYIARRRREGKNTREAIRCLQRYLARRVWHLLQPPVPTKTETLTASIS

SEQ ID NO: 455797 - protein, 341 aa, unidentified
MNDMIGVDLAKNVFQVHGASMTGDVKYRKKLSRGQFFRFMSEQSPALVVMEACGSAHYWARELMKLGHAVKLIAPQYVRPFVKRQKNDAVDAEAIVIAARQPEMRFVEPKTADQQARAVLFLARERIVHQRTELVNALRAVLYEYGQVIPQGIAHIKRIEAILDNTEIGLPEIVQEECRDLLAQIGEKTARIEEKARKVAELSRRSGATRRLQTMPGVGPLTALAIEAFAPAMQGFRCGRDFAAWLGLVPRQFSSGGKERLGRVSKAGQADIRRLLIIGAMARLSWVGRKPPAQGSWLSRMLAKKPRMLVAIALANKMARTIWAMLTKQEDYQDPALAMAA

SEQ ID NO: 455798 - protein, 395 aa, unidentified
MFIVGIDIAKRSHEAIIIAEDGQVVRKAFSFRNNCTGYNLLLEQVRRLTLVKSQIVFAMESTAHYWLALYARLLKDGYTVMVLNPIQSHSLRELYIRKAKTDARDSLIIADLVRFGRCKASNVPQDKILALRELCRSRAYLVDMAADLKRKLIALLDRIFPEYESLFDSVFSKASIAVLRKYSTPQKVKNANLRKLTDLLMESSNGHFGEWKAHQLKEAACSSFGIDDSGGVYSTLLGVFLEQILSLTAQADSLEKQISVFFQEFNNPLTSIPGVGTVLAATILSEIGDITRFSSADKLLAYAGLDPSVKQSGEFKSNQNRMSKRGSPYLRRAIWLASTVAVHRDPMFQIYYEKKISEGLHYMNVIGHVSRKMTAVIFAVLRDGQPYQPILQSAG

SEQ ID NO: 455799 - protein, 387 aa, unidentified
MQKPDDDSKACRTAFVQDNTLVAVIEMSLSSWLVAGMIPGVSREPVKKIAPDAEDLLQLLYRWRDGAITAGKEIIRIAVAYETGRDSFWLARWLRERGIDAQVIHATSVAISREHRRAKTDRIDTAMLRRGFLGWLRGEPGHCSMAIVPTVTEEDAKRPCRDRESLVHERTSIVNRMKAMLIQFGVRNFNPVLRKASEKLDAVRTPEGIALPPNTVCALRRNMERLHLIKEQIKAIEQAQLQTLQRDPTEKMNAIIFLLVRIIGLGVETAQQLAHELLFRNLRDRKAVARYAGVTGSPDESGSKRREKGISRSGNARVRKILIQLSWRIVKFQPESDLVLWFKNRTQNARGSRKPMIVALARKLIIALWRYVNTGVVPEGFKLRPAA

SEQ ID NO: 455800 - protein, 316 aa, unidentified
MAKIICGVDVASRSLEVRIGSDGPAHSFPNTAEGISELVIFCRHQNVELVAMEATGGYERLPFSLLWAQGVPVVLLHPQAVRRFAQSMGLLEKTDRIDAGVIAWFASVKRLAPLVPPSARQQHLKALVTRLRQLTDLQTAQRHQRRLVTDPVVLQGFTPLLTLVAAQIRELQTAITQHIASDPLWQKLDQTFRSIKGVADRTVASLLAELPEIGTLPNKAISKLAGLAPLARDSGQARGPRAIRGGRSAIRHLLFLIASVVRRFHPDFIAFQQRLSAAGKPKKVILIAIAHKLLVRLNAKAREVRQQLPLQAPCAT

SEQ ID NO: 455801 - protein, 430 aa, unidentified
MGLIVPTAMHPAREDQPMPYEWFVGIDWGSQRHQVCVLDRDRRRVGERAIDHDGASLAQLAAWFWTVSAGPPQRVAVAIEVPRGAIVEGLLARGFHVFALNPKQLDRFRDRHSVAGAKDDRRDAFVLADAVRTDQPSFRRLQLDAPQLLRLRELSRAEETLLEDFRRSANRLQDQLHRLYPQMLKLCSAAEASWLWDLIDLAPPPAHAALLSEENVQGGLKAHRIRRVTAQEVLACLQTPALPVAPGAAEAAPAHCGCLLPCLRVLAEQLQACSQQVSVLLRTLAEEPGEGEGPSHVAMVLSLPGVGRKITAWLFAEAAQPLAERDSQVLRTHGGVAPITKHSGKRRVVVMRRGCNPRLRHALYHMARVAMQRDAHFRRVYAALRAKGQRHGQALRNIGDRLLRILMAMWRHRTCYDASRIRREPVVQMG

SEQ ID NO: 455802 - protein, 391 aa, unidentified
MIYIGIDVAKDKHDCFITNSDGEVLFKAFTITNNLDGFNDLYQKIETVMKDITKVKVGLEATGHYSYNLLGYLIDKGLPTYVINPLHTNLYRKSLSLRQTKTDKVDARTIASILMSDVNLKSYSDISYHNEELKSLTRYRFDKVKERAKLKTSVSRLVCILFPELEKLVPTLHMASVYALLSEFPSAKHVATAHLTRLTNLLSESSKGRYGKDTAITFRDSARASIGSNMPAKSLELKHTIKLIQELDSEIDEIENEIKIIMDEINSPILSIPGINYRMGAMIIAEIGDFNRFDSPDKILAYAGFSPSTYQSGQLDGAYAHMEKRGSRYLRYALYNATKYVCHWNPTFAAYLAKKRAEGKHYNVAISHAVKKLVRVIYHLEKTKQQYIKAA

SEQ ID NO: 455803 - protein, 343 aa, unidentified
MQTVTTIGLDIAKSVFQVHGVDAAGQVVIRRQLKRRAVLAFFQKLPSCLIGIEACASSHHWSRELQALGHRVRLMPPAYVKPYVKRQKNDMADAEAICEAVTRANMRFVPTKTPEQQSCLMLHRTRHLFIRQQTAVINSIRAHLAEFGIVAPVGRKGVTELLQVVADPSDKRVPEVARACLAVLGAQLLGIKEQIVEFDRMIMAWHRSDETSKRLRYIPGVGPMLATALVASVPDPRVFRSGRTFSAWIGLVPKQHSSGGKDRLGSISKQGDRYLRGLFVAGALAVIRYAKIHGAKHRPWLTALLARRPTKVAAIALANKLARMAWAMMAKGERYRQPVALAA

SEQ ID NO: 455804 - protein, 341 aa, unidentified
MMMIGCDFHPRFQQIAYVDRETGEYGERRLSHPGEAEEFYRGLKGRTARIGLEATGNFRWFKLLLEELGEEMLLGDAGAIRASNPRNQKTDKRDARHILKLLVEDRFPAVWQPPAENEDLRQLLLHRCRLVQMRTRAKNQLDALAKNEGFLSARVWTAGRREQIEALRLTGWRAQRRKDWLALLEDLDGRIKPLDEAVEKAAKENRQACLLMTHPGVGPVVSLAYVLTIGDWTRFPRGKQVASYLGLIPAEESSGDKRRLGKITKQGNGMVRWLLVEAAVIAQRRDASWHRQYVRLSMTKHHGVAKVAIAHKLAVRLYWMLRSGQSYEQIVERGSHAGQSA

SEQ ID NO: 455805 - protein, 387 aa, unidentified
MPRVNDLSRSLTALDQDNTLIAVIEMGLKNWLVGALVPGVDRQPLKKLDPDSEVLLQQLQRWREEAARAGGPVARICVAYEAGRDGFWLARWLRARGIEAHVMHPTSIPVKRDHRRAKTDRLDVGLLMRAFVGWLRGEAEHCHMVAVPTLAAEDAKRPSREHETLVAERTRLINRMKSTLIRFGVRNFKPTLRKAAERLAGLRTPEGEALPPQTQAELLRDMARLRLVKEQIKAIETARLERLKQAPEAGPHAMVRLLARIKGIGPETADMLVTEVLARELRDRRAVARYAGLTGSPDESGKRRREKGLARAGNARVRRGMIQLAWRWLMFQEDSELAQWYRTRTADGRKDTRKTMTVALARKLLIMLWRLVTTGQVPDGLVLHPAS

SEQ ID NO: 455806 - protein, 347 aa, unidentified
MLHAGLDLSRRKLDVCLLSDEGEHLDQLAVAPDADSLKTLARRIEETHCEPVCAVVESMTGARLVHDTLEQQGWTVEIADAQKVKGLAPLACKTDKIDSLVLATLSQRDLVPAIWLPGPRVREERELARFRLHLVKHKSALKNRIHSTLINFGRPCPVTDLFGAEGRELLARLDVPEPWRSNVTASVALIDDLERQIAEVNTRLKTGHADHPYIPLLRSAPGIGWVLAFTIAAEIGAIERFASPEKLTGYTGLCPRVNQSGDSDRRGPLTKHGPTYLRWALIEATMHALKHPAYAKRYQRTKKRLGRQRGAKVAQIDIARRLAHAIWHMLTRNQEFAPRGAAFRLAA

SEQ ID NO: 455807 - protein, 343 aa, unidentified
MSEDYDGRQYVGVDLHRRRSVLVRMTETGERLETVRIVNDRELLAKVMARAGEDPEVVLEATYGWYWAVDALAELGGCVHLAHPLGVKGFSYRRVKNDERDAFDLADLLRMGRLPEAWIAPPKVRELRELVRHRAKLVHLRTSLRCQVHAVLANHGVRVPVSDLFGVQGSALLERAALSPAARARVDSLLQLIDTFDTQIDQVAKTTATQLATHPGYTAVQTLPGIGPILAAVFVSEIGDITRFSAPAKLASWAGLTPKHYESDTTVHRGRISKQGSRLVRWAAVEAVQRVGKHTRLGAYRDRVAARRGRNIGNVAAARELVEYVYYALRDGTCRRALTPAAA

SEQ ID NO: 455808 - protein, 336 aa, unidentified
MQIVTCGVDIAKNVFQFYGTDEQGNIIQRRLKRNQLLKFFNQLTPCLVGMEACGGAHCWARELTKQGHVVQLMAPQKVKPYVQGNKTDANDAQGIHEALLRPAMRFVSVKTAEQQDILMLHRIRAGAIKSRTALVNQIRGLLAEYGVVLPKRIENLRRQLLDVVTDQEKVSPLAQEQFYGLYEELLRLDDRIKRQDAVIKRVCQSNPDCQRLLSIPGIGPLTATALVASAGDVSAFRNGREFSAWLGIVPRQSSSGDRTLLQGISKRGDSYLRTLLVHGARAVLQHAEGKADRSSRWLKELESRRGYNKACVAQANKTARIAWALLRHNTTYQVAA

SEQ ID NO: 455809 - protein, 423 aa, unidentified
MFKIILNNCCGLDVHKTRIYACIGITDAHSRTEYYEANFSSFPKDLRKLSEWLHKYNCVDVCMESSGKYWIPVFNALEETCKVTLAHPKYTKPQKGNKTDRKDARWICDLFMCGMIKPSFIPPPAIRHLRDLVRYRVKLTNTLTGEKNRAQNCLTVSNLKLDDVFSDVFGKSARSITEYILAHPGEKFDVAPFVDKRCKTPIDQIQAAVDGAISPEQAVKLRECLNHIDELIAHRDRIESEILQLVEPFSVQLDLIRTVPGMDKDPMTAILILSEIGSDMSVFPTAKNLVSWAGCCPRNDKSAKHVKSTRIAQSGCYLKPLLVQVANALLHSNKHPEFTERYRRIKSHRGHKKAMIAICKMLLTAIWNILSTGEVYNPSGYLIQTPRPTNETKVLTQKQALDLLRLRGFVIKDDPVEPEPLPA

SEQ ID NO: 455810 - protein, 366 aa, unidentified
MDDSTSGTVSVGLDVHAASIRLAAVRGDELLEERTLAYDHEALERELERWPGARVCYEAGPTGFGLHRHLSAAGIACDVVAPGLVPMRPGDRVKTDPRDARKLARLHAGGLLEPICVPSVELEAVRDLVRAREAARIDRMRDRHRLGKLLLRHQRRMPFQSWGAGRRKWLGEQSFDQPAQQLAFGTYLQTLDLVDRRVEALDRQLEEVAAAGPWAELVAQLRCVRGIDTLTALGLVAEVGAFDRFASAEAFMSFVGLVPSERSSGEKRRQGSITKAGNAHARRLLVEAAWHCRRRPKVSYELSRRQRDQDPAVLERAWAAQQRLHRRFHRMAGRGKPQQKIVVACARELAGFVWGIATDQPLRKGA

SEQ ID NO: 455811 - protein, 330 aa, unidentified
MKNYKEVVGIDVSKKTIDAYCFKAQVHKAFVNDLVGYKSLIKWVLKETKESEVFYCFENTGYYSLKLALYLSSQAIVYVEESPLKIKRSSGIVKEKTDRLDAHLIARYAWLYREELEPSTVKSSSHLELGRLLALRDQLVRNNAGLKGTLKEMRTLLSSPTTDFGCISLKRSIDYLSKQVKGVEIRIKQIISADESMSTNYELLSSLKGVGLVVACQLIYHTGNFTRFASWRAFSSYCGTAPFEHRSGTSIHRRKQCHYLGDRKMKSLLSMASVSAIQHDSELRLYYKRKLAEGKDKMLAINNVRNKLIARAFAVIKRGTPYVVLQQHAA

SEQ ID NO: 455812 - protein, 388 aa, unidentified
MIYVGVDIAKLNHFASALSSDGEVLIEPFKFTNDRDGFDLLESKLESFEKDSIIIGLESTAHYGDNLVRYFVADSYNVCVINPIQTSTMRKNNIRKTKTDKVDTFIIAKTLMLQKDRRLISFYDLDLMDLKTLGRFRQKTVKQRTRLKIQLTAYVDEVFPELQYFFRSGLHQKSVYALLKEAPTPKEITSLHMTHLAKLLEVSSRGHFTKEQAKELRALAKRSVGANDSALSIQITHTISQIELLDSQLKKIEAEMTDIMQFHDSVILSIPGIGFINGGMILGEIGNIYRFSSPCKLLAFAGLDPSVYQSGNFNAKSTRMSKRGSRALRYALVNAAHNVVKSNATFKNYYDKKMAEGRSHYNALGHCAGKLVRIIWKMLTDNVEFNLE

SEQ ID NO: 455813 - protein, 371 aa, unidentified
MNTVIDIGIDVHKDSYSLCSYSFATKRTFAQTRIGSDSKLVIKYVRKLQESHPNVEVLCGYEAGPTGYGLYRDLEKAGIGCVVMAPTTLPKASGNHVKNDRLDAMELSKHLAFGTYGAVHVPTSEDEAVKNYTRLRNTQVDALKKAKQNLLAFLLRSGRVFSEGRNYWTKIHYTWLKRQRFTDPVDQETFDEYLQEVHDQQEKVDRYNQRIERLSQLEAYREKVARLRCFRGIETHTALSLVTEIGDFSRFANAQQFSAYLGLVPGEDSSGQRERRGGITKAGNARLRLLLIEGANATLRGGLYGQKSKRLKARQQGNDADVIAYADRANRRLHRVYNNLTSRGVIKNKATVAVARELACFIWGMMNNRID

SEQ ID NO: 455814 - protein, 350 aa, unidentified
MVTLGVDAHKRSHTIVAIDGVGRKVGHKTVAATPAGHLEALRFAGTFEDRPWAIEDCRHLSRLLEGDLLRAGERVRRVTPRLMARERRSGRERGKSDPIDAEAVARAALREPDLPLAQLDGPEREVRLLLDHREDLVAERTRMQNRLRWHLHELMPGFEPAPGSLDRFKVLDGVAARLAEHHGVVAELAAELVQDIRSSTRRINELERQIQKRMEPMAPNLLAVRGCGALSAAKLVGETARVGRFTDRAAFARHNGTAPIPVWSGNNVRHRLNRGGNRQLNAAIHRIAVTQIRLNGPGKAYIERRLAMGNTKTEAIRALRRRISDEVYRRLTIDEAARNALVSGHVSVAA

SEQ ID NO: 455815 - protein, 428 aa, unidentified
MNNVVAPYISVGIDVAADDSIVCLMLPSFETIGKPFKVVHTDLNSLERVVSAIKKAEDKFQMKSQIFLESTGIFHFPLFCFLKNEGFEVFVLNPLITHSTKNADIRKVKNDKFDSIKIAKIGLDPKTKKSVIADEFVLNLRLQTRQYYVLTDDRTALINRLSNHVRIAFPAYIGIFSDLAGGASLKILRSINSLDDLLAANRDDMLALISKSARKGKAYSNKKFDAIIEAVHISKKLSFILPDVFSVIHAFIDQINLIDKQLDDIIKRVRDIVKNNDGHPFIKQIKLIDSIPGAGFFSSVTLMCEIGDFSVFSNPKQLFAYFGLDPSVNESGKFKGTKNHMSKRGSRLARRIIYTIALASIRNKRNEQPFNAVLQSFYQDKVKSKLKKVALGAVMHKICKIVFAVLRDGVSFTLITQEEHIQRYSNLA

SEQ ID NO: 455816 - protein, 355 aa, unidentified
MAIRKQCIGIDISKSTFTACLCQQADDYKLTFSKVLDFSNDSKGFNQLLRWAKGLVVSDSELVFLMEATGVYYENLAHHLYKIKKRVNVVLPNTSKHYFSSLNVKTKTDAVDARILSQFGIERVHKLWSPPPGALLQLRNLTRYYVQLQEQKTALGNIKHSKDCSYDVQIFITKSNKKLISEIDKEIQRCLKEIKKAIEEDKALKDRVKKILTIKGVGLITVATILAETMGFNQFQSSKQLVSYSGYDVVQRESGTSIKGKTRISKKGNRYIRNALYFPAMVACRYNESLKETYIRINKNNKASKMIGQVAIQRKLLVLIYTLWKNDTEFMENYQRGSLDPKTETTQDSSILELL

SEQ ID NO: 455817 - protein, 343 aa, unidentified
MQAITTIGFDIAKSVFQVHGVDAAGQVIVRRQLKRRQVIAFFQKLPPCLVGIEACASSHYWSRELQALGHRVRLMPPAYVKPYVKRQKNDMADAEAICEAVTRANMRFVPTKTPEQQSGLVLHRTRHLFIRQQTSVINAIRAHLAEFGVIAPVGRKGVEELLRVVADPNDKRVPEVVRACVAALGSQLLSLKKQILDFDRMIMAWHRSNQTSKRLNCIPGVGPLLATALVASVADPKTFRSGRNFSAWIGLVPKQHSSGGRDRLGSISKQGDRYLRSLFVAGALAVIRYAKIHGTKHRPWLTALLARRPTKLAAIALANKLARMAWAMMATGARYNYPASLRV

SEQ ID NO: 455818 - protein, 322 aa, unidentified
MNTAAMPLGIDVSKAKLDCALWLGSKYRSKAFANTPEGFARLSEWLHHHGADQVHVCMEATGTYWEAAALYLADAGQRVSVINPALAKAHGQSLGLRSKTDALDAKLLADFCREKQPPMWTPPSEAERRLRALVLRHQSLVEMQTQEKNRCESLREDVRTSVETHLAWLASELARIEQAIARLLDDDDHLRGQRALLDSIPGLGERTIAVLLAYGLSSERFQSARQFVAFAGLSPRLHQSGSSVRGKPRLSKIGHAFLRRALYMPAMVTLYKTAWGKRFQQRLAAHGKPPKLIIGAMMRKLAQVAFGVIKSGKPFNPALHGA

SEQ ID NO: 455819 - protein, 404 aa, unidentified
MNYYIGIDTAKGQARYQVEDTHTQIVRKGRLKANHWSMKQFLLQLERLGVLPADTLIGIEATGLLHIGWCVALSQAGYRVLALNPLLSKRRYTPENAIRDHKTDPVDAAGLCDIIRRDGHKLQRFLYQHQPERFALKRLLSVRKVLRSSLTNLYKASGDLLDFIFPELRPMGLTLTHQGLRRLLKRHSTAQAIAALPKATLKRYVADKSTLLKEAAEHSFATAELAQCSVPALREFIVNIEQLSERLLQVDKQIDQFLATAVPAEQVTLARSLPAFGAKTTPAVLAFIPEDYARWGSKKKITAKLQALFGTEPRMRRSGKWIGKEKMSKRGVELARTALFQIAFCSLLHDPQCRSYYDSLRARGKSHKEAIVNLMRKHLRRLVSVLVEQNPYTPVLSENVAIST

SEQ ID NO: 455820 - protein, 316 aa, unidentified
MASFLGIDVSSLSLDAAVRPQGIKMHLSNDPTGFEALLESLRKLSIKRVLLEATGGYERDVMRFLQAAGYKVIRVNPRRARSFADSLGIKAKTDAIDAEVLAHYAEVIPDQPSLRISPERALLRELLQQRDRLVQQRDDDLRRLKQVQSTAVANYLNANLKHFKAQIKLVEREIEQQTAMLNDERVTQLIKVKGIGMVTAGKLVALLPELGRVESREIASLVGVAPFNHDSGKFMGKRSISGGRFAVRRSLYMACLVAMRYNPALKARYQSLRERGKLPKVAIVACMRTFIVRLNAMLRTGTSWLDLMLPQPESTT

SEQ ID NO: 455821 - protein, 321 aa, unidentified
MTYIGIDVSKNDFVVAYSPDKSCRTRTFKNTTKGIHEFIRTICKGEHHCVMEATGNYSALLVYLLSEAGITTSLENPLKVKNFARAMLSTVKTDEIDARLIALYGEKMQPAPYKLRSDAILTLKQKRTVIRQLKKQLFATRNLKGSMEVLPFFDAKCKRSIDKTIAFLEKQVKDLEEDLASLAKSEYKKQIDLLTSVKGIGITLAAALIMVTGGFTYFDNAKQLTRYLGLSPTYQQSGTSVNFKGHINRNGDSSLRSQLYVAAFSSIRCNTECRACYDRLRSKGKPGKVAVIAVANKLIRQAFAVVTQEKPYVDGYISSPK

SEQ ID NO: 455822 - protein, 423 aa, unidentified
MMKLKYSICCGLDVHKNVIVATIVTTNKDGISEYLQKSFSTINSDIQRFHNWLIENNCYHVCMESTGKYWITIFNYLENDIDICLTHPKYVKAIKGKKTDKKDSKWIADLYKFDLVRCSFIPPKDFRQLRELARYRFKLVCMKSSEKNRIQNCMTISNVGIASVLSDPFGKTATEIMSYLLEHTADSMDEKAVRKLIKKGAKAKSDEIIEAIKGYNIETDQAKKLELAQGHLEYLDDMITQTEVELYVRIKPYYEFVEFVSTMPGMTELSSTIVLAETGVDMDIFDDAKHLCSWCGLSPANNESAGKKKSVRIAKAGDYLKPMMVQCALAAIKSKKQPYFAIKYGRIKKRRGHKKAIIAIARMMMVCIYHMVSEKKPFTPTDYEELMNPQNHVERVVLNENNVFAYLESLGYDSSKLVKRNDN

SEQ ID NO: 455823 - protein, 385 aa, unidentified
MGTQTFIPRDYDVFAGLDVDKKSISVTFTDHQGFLKSLNMPYKVEHLVNYVRKHYPDKKVVFAYEAGPTGYGLYDGLEAQAYPCLIASPSMIPKAPGQRVKTNRLDSRGISENLRGGQLKGIHVPTPLYRELRHLTQLRDTLVSEMVRMKQRIKSLLLMEGLEFPPAPAGSQWSFLVKKKLRELPCSTTVRFKLDRLLDSLEFDEKQVLKATREIRRFCQTDPELSQCIEYLKTLPGIGWIVASQLLARVGDWRQIKNIRQLPAFLGLVPTENSTGERTERGSISHTGAGRLRSKLIQASWSAIRQDGELREFFRTVAKKHPRHLGSRVAIVAVAHKLSVRASVVLMKQRPYEVRQKVQSAPLTQEETVPQGTTRRLAVPGETNS

SEQ ID NO: 455824 - protein, 561 aa, unidentified
MTESSDYESVQVFIGVDVGKDTHHAVAINRSGKRLFDKALPNDENKLRSLISDLKQHGQILLVVDQPATIGALPVAVARSEGVLVGYLPGLAMRRIADLHAGEAKTDARDAAIIAEAARTLPHALRTLKLADEQIAELSMLCGFDDDLAAQTTQASNRIRGLLTQIHPALERVLGPRLEHPAVLDLLQRYPSPEKLASLGEKKLAAQLCKLAPRLGKRLAADIAQALAEQTVVVPGTNAAAVVLPRLALQLITLRKQRDEVALEVEQRVLAHPLYPVLTSMPGVGVRTAARLLTEVACRAFASAAHLAAYAGLAPVTRRSGSSIRGEHPSRRGNKALKRALFLSAFAALRDPLSRAYYTRKMSQGKRHNQALIALARRRCDVLFAMMRDGTFYTRRGHNMLDNLIGAPPASILIFLLCFLTGGVMRWILFILFCLLGAPAHAVSIPGVTTTTTTDSTTEPAPEPDIEQKKAAYGALADVLDNDTSRKELIDQLRTVAATPLRNRSRRSCRRRWLKSKPCCKRSPKSAAIMVKPFPPASGNFIAILPAPRISRLIHKHSAMR

SEQ ID NO: 455825 - protein, 362 aa, unidentified
MITYRSFVGLDVHARTIVACALDGHTGEVVRHRFGCDLAEVVSWISSLPGPQQVAYEAGPTGFGLYRLLMSAGIECVVVAPSKLQRPVGDRVKTDARDALHLARLLHLGEVVAVTVPSVEEETARDLVRAREDTRQDLMGARHRLSKLLLRHGHVYSGGVAWTAKHDVWVRGHRAGDVAFTTAFDACYEAVAQTSARRDRLDTAIGQMAAVSQFTPMVNRLGCLHGISALTGFALAVEISDWDRFTGNTIGAFLGLVPSEYSSGQSRVQGGITKTGNSHARRLLVEAAWQHRRDYSPNRQSVLHARWERAPEQARLRGQAGNQRLHRQWERFIARKKRPVVANTAIARELAGWCWSLAVMDG

SEQ ID NO: 455826 - protein, 310 aa, unidentified
MKIVGIDVSKERLDVAVRPSGERFSTSNDERGRHELRKRLRRLRPERIVLEPTGGYETLVVQELVSAKLPVVVVNARQIRQFAQATGRLAKTDRIDADVIAHFGEAVKPAIRPLPDAAHRELEALVSRRRQLVDMRADEAKRKQTAPPVVHPNIDDVIAFLTKHIDDVDKDLQRLIRSTPAWREADDLLQSVPGVGPVLSATLTALVPELGSLNRKQIAALVGVAPFNDDSGRRAGKRTTWGGRAAVRAVLYMAANAARRFNPTVGALYARLKAKGKLHKVALVACMRKLIVILNAMARDRRPWTLQLAG

SEQ ID NO: 455827 - protein, 349 aa, unidentified
MAIVGGFDIHRKQITFDYLDTVTGQVRRGRIEPACRAGLRSWLEQRFAGRDDVTFAVEGCTGWLFVVQELQRAGITALLAEPAETATLRGSKSKAKTDKTDARHLRALVADGKVPASWIPPAQVCELRALLQLYRDLAQEHTAWAQRIHATLFHQGVPGMAHRLGSAQARAALASGGDIGLSPAAAQAVAVALRQMQALEAELSPVHARIAAFTRRQAGCKTLQQQLFGVGPLVAAVIWAFLGDARRFSSSAQAVRHTGLDVTVYSSDGKRTPGHLSHQGPPILRWALFEAGHQASRASSPDHRYYADVAARIDADRAALSVARKLARRSHHILRALGDQAYAPVPAGR

SEQ ID NO: 455828 - protein, 394 aa, unidentified
MVLKQWLEPDAGRPARPVLRGRRRSDASLLPDKESITVAYALGAGEVELPGKTGTTKTDIDRLCKRLQSKARHVRVVYEAGPCGYGLYRQLVQKGFDCMVCAPSLIPRKPGERVKTDRRDAVKLVRCLRAGDLSAVCVPTVEDEAFRDLARAWMTAKDDLRQARQRLKSFLLAHGVRYAGHADWGPAHRRWVSQYAFGSEWQQFAFEELRRTIDDRLAQCQRVEGALREAVTNWRFYPAVLGLQAMRGVQFTTAVGMLAELGDLSRFEHPRQLMAWLGVTPSEHSSGDKRRQGSITKTGNGYARKLLVEAAWSYRHPARVSPDIQRRHEGIPKAIIDRAWDAQVRLCRRYRRLAARGKHANTTVVAVARELSGFIWDIGRLAMSLALPSNRPTT

SEQ ID NO: 455829 - protein, 351 aa, unidentified
MLYAGVDAHKKYSKIVLTDDRGRKVAQASLSNDLGCFQEFFNQATEPVKAVVEAGRTWGVIYDLLESIGVEPVLANPLKTRAIAEAKIKTDSIDAQTVAALLRADLIPLVHVPSHEVRAQKNLLRQRFWLVELRTRVKNRTHHILDRNHVTLPCCSDLFGKAGRKLLDQIEIPAPDNLLLKAHLELLDYIEKQIDQAEKWTKEALEDHPGVARLRTIPGIGKILAALVALEIDDISRFPCADKLCAYAGLVPTTYASGGKVRHGNLIPSCNRWLRWAYVEAAWIAQRTSPYCHAYFERIKRRKGANTANTALARRLCEITWHCLTEQRSYEERSPARTERTQPAAFESSWS

SEQ ID NO: 455830 - protein, 322 aa, unidentified
MYKIIGIDISKQTFDVGFMKESIWYHFKFENNEKGFKKLLKKVEVDDWIVMEASGPYYFQLASFFHKENKNVCVLNPLIIRRYSQTRLYRAKTDKKDAQTIAEYGAQYDLKKWKPETEDIIEIKQLYTALELINKEIHQSKRQLDSFVSGGAMNKELASTLKSIIKFLKAKSNKLEQQIKCKAAQHYKSTLERLKSIPGIGIKTAIMLTVITNDFDKFENHKQLIAYVGFSPRLYQSGTSVRGKGHICKMGKSQIRKLMYLCSWSAKRCNPDCIKMYDRLKEKGKPERVIKVALANKLLKQAFSIVKNQTYYSENFLEKACF

SEQ ID NO: 455831 - protein, 312 aa, unidentified
MSEFVGIDVSKLQLDVHAHVSMMRLSCSNDEGGLEELIKRLHNLDVQLVVLEASGGYERLAAAMLTHAGLQVAVVNPRQVRSFAIAAGVLAKTDSVDARVLAHFGAVLRPMARPIPDEQQQLLDELLGRRRQLVGMLVMEKNRLAQARDRRVRRDIKSLVQILEKRIRGCDGELQQLIQESPMWRAQEDLLRSFNGIGPVSARTLLIELPELGRLSRKKIAALVGIAPIADDSGARRGRRHIRGGRAQVRTALYMAAVAAMRTNPSIREFYQRLTAAGKPGKVALIACMRKMLTILNAMVRTNTRWHKPVSA

SEQ ID NO: 455832 - protein, 409 aa, unidentified
MRNNLRKVYVGIDVHSKEHKAAVMPVTLLEQPGTYWKETKPLNLRNNISDFQSLHSHIMEYASHPEEVAIAVDHTGGHYSEPLVHYLLGKGYNVYHLEPKAVKAARERLLDVEDKSDSIDSNGAAYLLYLRDRHGLSFRISAIMPQMNASAAALHLLILQRWQYNKLATQATNRLHQLLLAVFPEGETKYFKKLLEIVPYYPTPKEMLASSGLGDIVKLQRKDKENILRLAADSVGVPGDPYRFLIRDLIVQRMEAIRKRDELAEIVRREVCAHPYGSTLTSFPCLGEIAAATIIGVVKDIERWPNKKKFKKALGVYAVSSQSGTSTHKSRQGKEGSKDARRVLFQVCFGCVRANIRDNDFKDYYLRQVARGKPRLKALASTMGKLAKIIYHCLKVKESYEYRGKYRVN

SEQ ID NO: 455833 - protein, 321 aa, unidentified
MNKSTIFVGIDISKDVFDIYDTKDGHFQFSNNEKGFKLFIKQLTSAHWCLMEATGCYHQQLAIALFENGLQVSVINPLIIKRFIQMKLKQVKTDKSDSKMICRYAEEQALDLWSPEPDYIVECKTLQGVVRLYFKQRTALKNTFHSISTSKRGKGKLKRSIVRQLKCLDKEISLLETEIENLIRVHEQDLFTRLNTIPGVGKKTAMLLIVSTNGFRDFESSRQLSSYFGLAPNERSSGSSIRGKSRISKRGDSLVRNHLFLCSFTACIHNPQCKVLYDRIVIKGKSKKLALIAVCNKLIKQAYGIAKSGLDYDRNYVGKLS

SEQ ID NO: 455834 - protein, 480 aa, unidentified
MIRSVGIDLSRTSGHQVRCLDEQAKPCDSFSFSSTLEGLERLEERIFSNGGTPTIVFEPTGLSWIPMAVFLRARHPECLLVKARLQKVAALRRYLRSRTKSDRIDGMTLAKMPFIDAEQLDEAYLPPAKYHSLQRLTRQRERLMKSITARKNRIGSIIDGYLPGLRKAFSDEWSGRARAFYRQRLNPFTVVRDGQDSLEAFLLGVKARGVRAESHDVYHACLRLTEFYKRSEAAGMINEDFFDDLQEEIACELRLMETDEVEVERVSGRIEELYIQIHPTDLLRTIPGVGVRTAQVFLAVIGDPHRFRSQAAFANWTGIVPGANQSADTESKGLRMTKAGSFMMKRALYQAGEIARRFDPQLAYLYYREMVNHGKNHKQAMGAVMSHLGARILAVLRENRPYELRDIHDQPISNKDAVRLIQSEYQVTELIRQARRRRNSNEGRSIGRRTREAAEAPQSGLFIPPQSPVYGDEHLQSIAG

SEQ ID NO: 455835 - protein, 388 aa, unidentified
MRKRSTGTNGTERTATRSDRTKRSTSGRVVNVLPAEGRTWTVGVDLGDRTSHFCVLDEGGMVVERGKVQTTREGFRKRFEGVTPMRIALEVGTHSPWVSRLLKELGHEVLVANPRKTRLIYENRGKQDSVDAEALARIARLDPKLLYAVEHRPESVAQDLAVIRARDALVRTRTLLVNHVRGAVKATGYRVKKCSTRTFSDQAVDQIPAEVREALSSVLTTIEVVSTQILALDKRIRELGKKKYPETVVLRQVGGVGPIVALAFVLTLEHPSRFRKSRAVGPYLGLVPARSQSGDSDPQLRITKEGDSLLRRLLVQSAQYILGPFGEDCDLRRFGQALSVRGERNAKKRAVVAVARKLAVLLHRLWRTGEVYEPFHKAPTAHDAAAAA

SEQ ID NO: 455836 - protein, 370 aa, unidentified
MLDTTTFVGLDVHARSIKAVSLDVMTGEVRCATFGYDAGAVAEWVRSADPKARCVYESGVTGFDLQKRLSGLGVDCVVGAVSKMIKPSADRRRKNDRNDAEFLARMLSVGNVVEVWVPDDECEAARDLTRALEDARDDLSRSKQRLSKFLLRHGLVFDERTPTGRRKGNWTRAHWSWIESIRFAERADEEVLAYYVDAVRRAAEEKARLERLVEGEARKPRWRRRVDALRCLKGVDTATAADLVFEAGEFSRFRNARSFAAWVGLTPSEHSSGESDRRGAITKAGNRHLRKTLVEAAWHYLTCSGRPKDLAKGQAPDPAARRHAAKGVRRLVERREALLARGVHGNKANVATARELACWVWAVALMAEES

SEQ ID NO: 455837 - protein, 430 aa, unidentified
MGCIVPTAMYRERDDQCMPYEWFVGIDWGSQRHQVCVLDRDRRLVGERAVDHDGASLAQLVAWLWTLSAGQPERVSVAIEVPRGAIVDGLVERGFHVFAINPKQLDRFRDRHSVAGAKDDRRDAFVLADSLRTDQPSFRRLRLDAPQLLLLRELSRAEETLLEEFRRSANRLRDQLHRFYPQMLQLCSAADEPWLWDLLDLAPTPAQAALLSEEPVHRVLKTYRIRRVKAQEVLTCLQAPALPVAPGATEAAQTHCGFLLPCLRVLAEQLQACSQQVSALLHTLAQEPGEGEGPSDVAIVQSLPGVGRKITAWLFAEAAQPLAQRDLQVLRTHGGVAPVTRQSGKRRQVVMRRGCNPRLRHALYHMARVAMQRDAHFSQGYAALRAKGHRHGQALRTIGDRLLRILMAMLRERICYDASRIHREPVVQRG

SEQ ID NO: 455838 - protein, 330 aa, unidentified
MERIYGIDLSKEKFDVNFISSDGSEKHLVVKNTFKGICKFLKDLPSNSLIIAEHTGVYGELLIFLANAMNVKICIETGYNIRHSLGLIKGKTDKIDAKRIREYGERFFDKLKEHKSHSADMFELKELYSLRAQLVKERKMFITHSKEKELAVSNSIIAHKIYLNMINEFNESIKKIEDEIEFIIVNNPAFKKSFEIVTSIKGVGAITTCDLIIKTENFKKIDTSRKAASFAGVCPFQNSSGKMVKKSRVSPMSDKRLKTLLYLCSKSAVKHNKEFNLYYKKKMSEGKQHFLIMNNVANKLLRIMYKLIESGEKWDPNYVCLDPREAKKVA

SEQ ID NO: 455839 - protein, 345 aa, unidentified
MPIVGGLDIHRKQITFDYFDTGTGEVKRGQIAPADRVHLRSWLARFAGRDDVAFALEGCTGWRYIAEELAAAGITAHVAEPADTAFARGRKRHAKTDRTDSRHLRELLAEGRLPECWIPPSRILEYRALLETYHDLRAEHTAWVQRIHAVFFHQGAPALGEAALRTDRALQALRAAAAAHLSPAGQLQVATALDMLAALEARLDVLRHQLLGAARGLTGAKVLASRLYGVGPVTALAMTCWLGGAGRFSSSRKAVRFAGLDVTVWSSDRKGPPGRLSRQGPEVLRWAVYEAGKTHARASAPDHDYYAAVKDRKGGKRAAISEARKILRQACHILTELGDDALTAA

SEQ ID NO: 455840 - protein, 344 aa, unidentified
MLHAGLDLSRRRLDVCLVGEAGELVEHTAAAPDADGLRHLTERLRGVRVRAVIESMTGARFVHDTLEELGWEVLVADAQKVKGLAPLACKTDKIDARVLAELSWRDLVPAIWLPDPSIRRERELARYRLHLVRHRTTLKNRIHATLMTFGHPCPVSDLFGLAGRELLDRLAIPDPWRRNVDASLELIDDLELQIAQLTVELRREGTDHRYIRLLVTAPGFGWINAYTVASEIGDIERFASPAKLCGYTGLCPRVYQSGSSDRRGPISKQGSRYLRWALFEAALHACNHPVYRERYQRTKKRLGRQRGPKVAQIDLSRKLTAAIWHMLTRNQPFAPAGAAFRLAA

SEQ ID NO: 455841 - protein, 405 aa, unidentified
MNAVGIDVSKGKSMVAILRPTGEVVRKPFEVSHDYGALETLAYDLKGLEGETRAIMEYTGRYYEPIARALHEIGVYVSVVNPILIHDYGNNSLRRVKTDKKDALKIAKYALDNWYDLLEYTPMDTVRQQLKTAHRQYQLYTKMKIGIKNNLIALLDQTWPGVNELFDSPVRPDGRQKWVDFVYDFWHYDCVCLLKQEAFIEKYRKWCKRRGYNFSQSKAEDIYVESWGHFNILPKNASTKMLIREAVTALNAISKTVETYNTEMQRLASLLPEYDIVMAMYGVGKATGPQLMAEIGDVRRFSHRGAIIAYAGVDPQPSQSGKQSRGSDPISRKGSGLLRKTLFCVMEAHLRSSPADEPVYQFIDRKRSEGKPYFVYMTAGANKFLRIYYARVKEHLKALDIPLCD

SEQ ID NO: 455842 - protein, 408 aa, unidentified
MGKKKGPALGAPAWAGVDTHKNTHTLALLDSAGRLIGTWEFPTGAEGYAQLERQIGDTSVVVGIEGTGSYGFGLADHLQSCGYDVREVLCPKKDKRRKGKSDPIDAVAAAESVLAGKGITRKDMTGAVGDMFCLMMARDQIVAHMNAIGNCVDALLISGPDELRQEFSCYTGGARMRRLSAIRREGKREQTLKMLAARWLRAEKESDELEAEISELVRQACPALLGTPCVGALSAARLLVAAGANPERMKSEAAFSMLCGTSPIPASTGRTDRHRLNRGGDRQANRAIHDIARARMAHDPRTSVYIEGKMAEGKSKKEALRCLCRYIAREVFKLMTGPQRPLPDPITLAMRRKELGLRQVDVKDLIGLSIATLSRMENGKMLDAEVLFRYDAFLADVARSMEGGVDAR

SEQ ID NO: 455843 - protein, 483 aa, unidentified
MKTKRVEKNQKASCRPTASNWHNMNRKQRREVTRKIQSEDLSLEVVHPDAAGIDIGNESHYVAVPPTRDSQPVRRFGCTTSELKDMAVWLKQCAVQTIALQSTGVYWIAVYDILEEAGFEVYLVNATETKNLPGRKSDVQESQWLMKLHTYGLLRNSFRPSQEIRTMRTYGRQRNDLVRAAGRHIQRMQKALTQMNIQLANVLSDVSGMTGQAIVKAILAGERDPYQLAALRNWRVKASEEEIVRSLEGNWQEDLLFVLQQEQDGYEFCQKQMAECDQRLRQYLQQQEDRSQGAGLPEEKRKERLRKKKKGNAPQFDLRVELFRMTGTDLTQIDGIDVTTTMTILSEAGWDMSKWKTEHHFVSWLRLCPDNRISGDRIIGKGRLPTNNRVTNALRMAASTLRLSNTYLGAQFRRLRTKLGAPVAIKAMAAKLARLVYRMLRYGMPFVDRGAQFYDAQHRQLQINYLKRKAANLGFQIIEAPAA

SEQ ID NO: 455844 - protein, 366 aa, unidentified
MKKSSTVQAFQSEIFKEQKLTIGLDLGDRWSFYCVLDEAGQVILEQKLPTTPEAMKQTFGKIPRSLIALETGTHSPWVSRLLTELGYEVLVAHAQKVQLITKSNRKDDRHDARTLARLARIDPALLGPVRHRSVQAQLHLTVIRARAELVSARTALVNAARGLVKSYGQRLPKCGTYQVSEKLAEGLSAELREVLVPLFKEIESLNEHIKEYDERMEKIAKEVYPEVALLKQVKGVGTQIALTYVLTIEDPYRFSKSREVGCFLGLRPGRRNSGESEPQKGISKEGDRYLRTMMVQGAHYILGPFGEDSDLRRWGLKLAERGGKNAKKRAVVAVARKLAVLLHRLWVGGEVYEPLRNSQKAMREVA

SEQ ID NO: 455845 - protein, 382 aa, unidentified
MSGKRQNSVAVSTPTQLYLSFELGEKDWTLGFTIGLGQEPRKRKLAARDLKALEQEIARAKQRFDLPESAPVQSCYEAGRDGFWLHRYLTAHHIENLVVDSSSIEVNRRAKHAKTDRIDARKLVMMLVRYHLGEHKLWSVVHVPSVEAEDARHLHRELLALKRDQTRHINRLKGLLAGQGVSLPVGAHFLEQLDTVRLWDGSSLPPGVRARLEREYACFQTIHQHILEVEGQRAELLRTADGASVDQVRRLLRLCGIGENCAWLYVMEFFGWREFHNRREVGGLAGLAATPFDSGEQSRDQGISKAGNRPIRAMAIEIAWCWLRYQPDSELSRWYTERFGKGGKRLRKIGIVALARKLLIALWRYLEDGVIPAGAQLKPAST

SEQ ID NO: 455846 - protein, 438 aa, unidentified
MSNKVIFNLDDLFISVGIDVGADFSWMSIALPNQQFVGKPYKILHSSIDSLTTAVSKIKEAEELYSLESRIFLESTGIYHYPLFCYLRDKGFNCSVINPIITKNSTNINIRKVHNDRFDSKKAALVGLKPDLKVSLMPSDLALNCRNLCREYYDLMDNRGAYVNKLQGELRMAFPQYLGIFSKVTINTSLTLLETYTSPSAFLEADKQEIIDIIKSTARFGLTYAQNKYNAIIQAATDANQFGYIIDSNIKRIRLYISFIRKYDEEINNILESLHELVDANEDADFVKQIHLIETFKGAGFLSAVSIMGEIGDFSAFSKPKQLFAYFGLDPAVKQSGKFESTKVQMSKRGSAIARRVIHTLTLQSISISRNGEAKNPVLREYYLKKCDSKPKLVAMGAVSHKVCNMIFAILRDNKPFKIIAPQEHIKQYNAAKCDIAA

SEQ ID NO: 455847 - protein, 403 aa, unidentified
MAKVFIGVDPHKLSATIEVVDDRETVLATGRFGTDKVGYAAMRKHVQAWPERVWAVEGSNGAGRPLAQRLLADGEHVVDVPAKLSARARLFDTGHNRKTDAHDAHAVAAVAVRTRGLRVLSYDEELEALRMLADRREELTRQRVQTVNRLHRLLAELTPGRAKKDITTLQAKAILAGVRPGDMAGKTRRRLAAEQLAELVAVEKKIKALTAELKQMVKASGSGLMDLRGVGPVVAARVLADVGDVARFADRNRFASWTGTAPIEASSGEIVRHRLSRAGNRRMNHMIHIAATTQIRLDTPGRAYYRRKLAAGKTRAEAMRCLKRRISDALYRQLLADARAVPAAGLDAGPGGHRGASHESSAAGSHPHTDTSDQPLPGPAPTTLPAPSPVRKTNTASHLEPAS

SEQ ID NO: 455848 - protein, 325 aa, unidentified
MSSYEMVGIDVGARRLAVAGERVAVKGSYENTPAGRRELVRSLRRSKRPVRVVMEATGIYFLDLACELVAAGIEVMVVNPKATHHFAEATLQRRKSDPVDAAMLREYGRCLDFVAWTPPAPDLFALRAIAREMTALTKGVAAAKNRLHAVGSTTLAAAVVVRALERQIAQNEAIIKELIAAARKLIAADGELKRLFKRTDSVPGFAAKSAIMVMGELVVLPAMKAGQWVAQAGLDVREETSGSSVRRKPRISKRGNKRLREALFYPALTAARCCPQAQAFVDRLVARGKTRLQAIVALMRKLLHGLHAMWRHNEDFDAKKLFAPG

SEQ ID NO: 455849 - protein, 358 aa, unidentified
MVQVKKLDFSGTTIYCGVDVHKKSWRVNIQDSDFELEDFTQNPDAVLLHKHLTNRYPGATYKIGYEAGFSGFSMQRTLSGSGCECWVVNAADIPTSDKDKKQKQDKADARKLCTYLQSKKLKSIHIPEAEWEHARTLVRTRERIVNNQTRCKNRIWQLLHFSGLPVPVEQQEGKYWSKRFIDGLQNMDCAGSIHLQQSLRLHIKDYLQTRQLLLEATRAIRALCREEKYAGDIKLLRSIPGIGEINAAVMLFELQDVNRFKRFDYLCSYVGLVPDTSDSGDTRRTKGITHRHNYYLRTALVESSWSVVRKDPALLMKYKEYCKRMEKNKAIIRVAKHLLSRINFVLKNKKEYVTGVVA

SEQ ID NO: 455850 - protein, 321 aa, unidentified
MMHTLSVGIDMAKAKFDAAILNSEDKYRSKIFPNTSAGFLQFLDWLAKHNALGAHLCMETTGIYGRDLANFLVQKQLLVSVVNPAQIHAFGKTELNRAKTDKADARLIARYCRMHRPAPWAPPAEEIATLQALVQRLEDLLGLQMMENSRLEAATGPARESVEAVLQFIEQQIEMVRLQIQIHIDQHPGLKSQKELLSSIPGIGDNTAATLLAFLSPVERFHTAKQVVAYAGLNPRIRQSGQWAGKSPIAKTGNALLRKALYLPAVVAKHHNPIIAAFCDRLLARGKRPMQVVVAAMRRLLHLVFGVLKSGKRFDPKFGLA

SEQ ID NO: 455851 - protein, 358 aa, unidentified
MQSNKKSFKGQKIFIGIDVHAKTWAVETLTESGFTKRHAQEASAKVLFDFLSKNFPDGEYHAVYESGFSGFSTYYQLKEYGIHCVVVHAADVPSTQYEQVMKTDKIDAGKLARALRKGDIKPIYIRERENLDDRAVVRLRKTIQKQLSGYKTRVKHLLHTNGVKLPARFDKPGTHWSRAFMNWLKDEVVLLSSTRLSLDLLVNQVESIRKNLLEATRGMRILAATDKYKANYELLLSIPGIGFNVAMCLLTEIYDFKRFGNENCFAHYLGLVPTCHDTGDKHSTGGKTFRGNKLLGPMIIEACWVAIHKDYGLSQAYCSYKQKMKPQLAIVKVARKMSNIIFSVIKNGKKYEPYKWEE

SEQ ID NO: 455852 - protein, 343 aa, unidentified
MGEVNTIGLDIAKSVFQVHGVDGSGVVVIRRRISRAKILEFFAALPSCLVGIEACPSAHHWGRAIEALGHTVKLMPPSYVKAYLKRSKNDANDAAAICEAVTRPSMRFVPTKSEQQQSGLMLHRSRQLLVRQRTMLSNAIRGHLAELGIISAKGRNGTAELLEVLAARDDRIPIAARLSLDALARQYANITAEIRVIEKQIHGWHRSCEASRRLEEIPGVGPIVATALVAEVGDWKAFSSGRGLAAWIGLVPRQHSTGGKERLGGISKQGNRYLRWLLITGAMAVIRYARQRGTKRMWLARIMERRPLKVAAVALANKIARMAWAMMVRGERFKEPRLLPAAA

SEQ ID NO: 455853 - protein, 366 aa, unidentified
MKKIITGAKNRNEIFKQQQLTIGVDLGDRISHYCILDETGNVILEQSVPTTPKGIQQVFSKISRSRMALETGTHSPWVSRLLTQLGHEVIVAHARNVRLITESSRKDDRLDARTLAKLARIDPELLGPVRHRSAQAQIHLTAIRARATLVGARTALVNAARGLTKSYGERLPKCGTEQMNREIAKGLSPELRDVLEPLLGEIESLKERIAEYDRRIEQVAKEVYPEVALLKQVKGVGTLIGLTYILTLDDPHRFRRSRDAGCFLGLRPGRRNSGMSEPQMHISKEGDAYLRTLMVQGAHYILGPFGQDSDLRRWGLKLAERGGKNAKKRAVVAVARKLAVLLHKLWVSGEVYEPLRNNHQVVSAVA

SEQ ID NO: 455854 - protein, 399 aa, unidentified
MTNDGIDVYLGLDVGKGEHHATALTPSGKTVLDKRLPNTEPKLREIFAKLQAKHGTVLVVVDQPASIGALPLAVARAAGCRVGYLPGLTMRRIADLYPGEAKTDARDAYVIADAARTMPHTLRSIELADETIAELEMIVGFDDDLATESTRTKNRLRGLLTQIHPSLETVLGPKLDHPAVLALLERYGSPAHLRKAGRRRLVTLIRPKAPRMAERLVEDIFTALDAQTVVVPGTDAAALIVPSLASSLSSVLDQRKLLAARIEQLLEAHPLSQVLTSMPGIGVRTAARILVDVGDGTAFATAGHLASYAGLAPVTRSSGSSIRGEHPSRRGNKQLKRAFYLAAFASLSRPESRAYYDRKRREGKHHVAALVSLARRRIDVLFAMLRDGTFYQAPATSAA

SEQ ID NO: 455855 - protein, 342 aa, unidentified
MNQVDIIAIDLAKNVFQLHGATRTGDVVFRLKLTRARLVDYVASIPPCTVAMEACAGAHHWGRKFQKLGHEVKLIAPIYVKPFVKRHKNDVADAEAIAEAALRPTMRYVAVKSADKQASGMAFKIRDLLVRQRTQTINALRGHLTEYGVITANGTQNLPRLRSILESGESGLPEPVRELSELMLAHIAHLSDPIQLLDKELRQRARKDDVASRLMTIPGIGPICATAIEALAPETPTFRKGRDFAAWIGLVPLQNSSGGKEKLGRISKMGQRDLRRLLIIGASSVVRWAIARGAADGSWLKQMLERKPRQVVIVALANRIARVAWALITNGGTYRIGASAVS

SEQ ID NO: 455856 - protein, 365 aa, unidentified
MKIIHWIGIDDHADKWTIAHVKGQEQKPAHEFELKPDENGYRKLITFAKSLGGEVRIVYEAGPCGYEMYRRLTKAELHCEVAAPSLTPNKPGQRVKTNRRDAEKLARYLRSNELTFVVVPDRGRESLRDLVRARQAVQKDLVSIRHQIVKFLLRYGHRYRQGKAWTTRFWRWLGTIKLEGEYGPIVLAEMKATHSERAARLARYDAEIEAAAKKPENAPYVAALCVLRGIGTLSAMTLLSELGDLRRFASAPQLMAAIGVVPAEHSTGDKTTRLSITKSGNAHVRHIVVEAAWHYQRRIANGPRITRRRKGQAQALLDIAHKCDLRLNRKFFRMTSRGKRSTVAAVAVGRELIGFIWAIGQLVHP

SEQ ID NO: 455857 - protein, 343 aa, unidentified
MQTVTTIGLDIAKSVFQVHGIDAEGKVVFRRQLKRRYVLAFFQKLPPCLVGIEACASSHHWSRELQALGHTVRLMPPAYVKPYVKRHKNDATDAEAICEAVARPNMRFVATKTPEQQSCLTLHRARHLFIRQQTSVINVIRALLAEFGIVAPVGRNGVDQLLGIAADANDRRLPEVARACVIALGAQLRMLKAQILEFDRMIMAWHRSSEASRRLHDIPGVGPALATALVASIADPKVFRSGRDFSAWIGLVPKQNSSGGKDKLGSISKRGDRYLRSLFTTGALAVIRYAKIHGTRHRPWLTALLARRPTKVAAIALANKIARMAWAMMAKRERYREPAALAA

SEQ ID NO: 455858 - protein, 387 aa, unidentified
MYYIGIDISKFKHDCAVIDDSGEIVTPSWSFTNDAEGFSQLKLLLNSLDTETRIGLESTGHYGMNLKLFLESNNFSFMEFNPLLINRFVKSKSLRKTKSDSIDCMMIAHYLMTVEYKPYPSSFYHTEKLKSLTRFRDSLIRLRSRQLVELTNILDKVFPEFKPFFGSRFSVTALYILSNYSSPEKIANMNSKSYEALRKLSRGRFSTVDFAKLKQLAKNTIGTTEDYLLLQMQIVLDIYRQLDSKVDETEVSIKECVSDMNPPMLSVPGIGIESAAVILAEFGDFSKFKNASKMLSFAGLEPGYFQSGTSETTGKMVKHGSSYLRYALMNCAQTVVNYEPTFAMFYSKKRAEGKPHRVALSHVVKKLLRVIYTLQTKNIAYDADFVR

SEQ ID NO: 455859 - protein, 355 aa, unidentified
MSQQKYIGMDVHQATICAAVVDAQGKVLMECVLETKASTIVEFVQGLQGTLSLTFEEGTWAAWLHDLLKPHVSRLVVCDPRKAALLKEGNKSDRIDARKLAEMLRTNQLRPVYHGEHGLRTLKELGRCYLTLSKDVTRTMNRIKSLYRSWGIPCHGSSVYAPRQRAEWLAKIVEPGVRMRAAYLYQQLDGLQPLRLQARCELLRESHKHAAVEHLRQIPSIGPIRAALLVALLQTPHRFRSKRQLWAYSGFAVETHDSGEYRWVRGKLQRNRERITVRGLNDNHNRDLKNLFKGAAISASTRPGPLQDFYLARVAQGIRPTMARLTLARKIATITLTMWKKGASFDPEQLRRQAV

SEQ ID NO: 455860 - protein, 438 aa, unidentified
MKALPILQERATGIDVGSERMHVSIAGQPAKVFGTMTCELEGLVAWLLQERVHTVAMEATGVYWLYLYDVLEAAGIEVLVVNGRHVRNLPGRKSDMSDCQWLATLHAHGLLRSGFVPPAHIRSLRDYLRLRQDHIGLAAGHVQHMQKAMERMNIKLHDVISSLTGVSGLRVVRAILAGERDPQRLLQLCDAQIRKTKAQRVRESLRGTWKAEHLFALRQALSAWEFYQGQIQECDREIERLLAERSGPPDASAPGGDCGPHKPGGVNTPQIEGLHRMLVALCGHQDATRIPGMADGSLLQVLGEVGTELSKWPSAKHFTAWLGLAPAAAQSGKRRKGQSRHRNRAGQIFSAMARSAGRTVDAAFGGFYRRLKARRGGLVANKALARKLAAMFWQVMVYGFDYVEQGLKKYQQRVQLTEQRLLRKLARKLNCEIQPLAQ

SEQ ID NO: 455861 - protein, 344 aa, unidentified
MSEVITVGLDIAKHVFHAHGVDDRGRPIFSKRISRGKLLDFFAAQPSCMVALEACGGAHHWARQLIQLGHQVRLIPPAYVKPFVKRQKNDAIDAEAICEAALRPNMRFVAVKSEQQQAAGLVFRTRDLLVRQRTQLINAIRGHLTEYGWIAPKGPSHVAMLADLIEREAMASSLPEAARAMFRCMLDQLAGLNGKIADLDKEIARRAREDEVSRRLMTIPGIGPISATAIAALAPPAETFAKGRDFAAWLGLTPLQRSTGGKQKLGATSKMGERTLRRLLIIGSSAVVQQASKRGAPKGSWLEQMLARKPRMLVTVALANKMARIVWALLIKRENYKAPVAAKA

SEQ ID NO: 455862 - protein, 382 aa, unidentified
MQTIDTVNPTILLAIELSASTWLVAARVPGLEKPHLHRIDGGDTAALLALISSLQARAARRLDATISVVCCFEAGRDGFWLHRLLTAHGVVCHVLEPTSILVNRRARRAKTDRLDAEGMLRVLAAYLRGDHQACSMVRVPTPEEEDAKRTHREREKLVQEKLRIENRIEALLFTQGIRKRPSLRSWERDLAVLRTGDGREIPRHLRAELDRLRRRLVMTSELIREVEAERDQAAKTKPQDQACHKIAALSRIRGIGENFAAVLTREVFYRSFDNRRQIASYVGITPMPYQSGGMDRDRRISRAGNPRARTTMIQLAWLWLRYQPGSELAEWFRERVGTLAGRTRRIAIVAMARKLLIALWRYAETGVIPAGAEIRAETTVAA

SEQ ID NO: 455863 - protein, 385 aa, unidentified
MVAEIFKYSVGCDISKDAFNVCILEVSQDMQSKVKASHKFKNETKGFKEFDAWVKKHKRHDVQTGFYMEATGVYYENLAWYLFEQEYNVYVLLPYKTKHYLKSIGIKSKNDKIDAQGLARMGAEQKHNPWRPHSKSIYILRALTRQHESVTKLKTSLQNQLHANEYSTVRNAIVKKQLNATIKLLEKQLTELAGEISKLIDADEKLNEKYCHIGSIRGISKLSWATIIAETSGFETFENQRQLVNYAGYDVVENQSGKHVGKTKISKKGNSRIRRILYMPSLVSVRLKEPTLFNLYQRVHERTGIKMKGYVAVQKKLLVLIYHIWKNNKAFQSDYSKPFVEEKSKLLFPFGFGETIKESSPDKRATQDEHSYELSSKVLFPLAQI

SEQ ID NO: 455864 - protein, 425 aa, unidentified
MNLLILKGVPMSLKIVYKICCGIDVHKTFVVACIASTNDIGVTSYESHRFSTYTSGLKTLLQWLLKRNCKDVCMESTGKYWIPVYNILENDCSIVLAHPKYVKAIRGKKTDKKDAKWIADLFKHDLVAGSFMPPADIRQLRDLMRYRFKLTCFQSSEKNRLQNCLTVSNIQLGNVVSDTFGKSAQAILDKLLENPADTSFDLEPLVYKSLKKKLPQLRDAIDGYITPEQAGKLKVIKSHYENLESRKAELEELILALAAPYQQELAILQTAPGIRSDFTAIGIISEIGTNMEAFPSAKHLCSWAGLTPTNNESAGKKKSVRVSKAGCYIKPLLVQCANAVVTSKKHPEIRNRYLRLKKRRGHKKAIIAIARMLLTALYHMLKNGENYNAELYRKSYLPPVDREITVEQAIIIARNQGYKIKSATA

SEQ ID NO: 455865 - protein, 355 aa, unidentified
MRILSLDLSKFKTVACDYEAETGRHGYATVLTTRKALHDLIVDRAPDRVVIEICSIAGWVCDLVRSLGIEMQVASTNDERWQWRKVKTKNDRRDGLKLAQLSARNELELVHVPESEMRQWRALIAYRQHLVQRRTKIKNHMRELLLREGQLLPRHRSAWTQDGLAALEAMVKPLSEVSINELWRGELGVELVQYQAVQAQLAEVVAKLDALGKANHNVRLLQTVCGVGPRLAEAVVTMFDDPRRFRRGASVSAYIGMVPKQWDSGETNRLGHITRHGNRLVRSLLVEVSWCALRHNPWARETYKRISGGKKSRKKIAIVAVGRKLLVRCWAMLRDQTAWHWEGQSAVGVPRARAA

SEQ ID NO: 455866 - protein, 387 aa, unidentified
MPQHNDLSRSLVAFRQDGTLVAVVELSRSSWLVAGVVPGLERHPLKKLEPSEEALLALLRRWRDEAARAGRTITRLAVAFEAGRDGFWLARWLRARDVEAHVIHPTSVAVSREHRRAKTDRLDAELLKRAFLGWLRGEPDHCRMAAIPTLEQEDARRPSREREGLVGERTRIVNRLKGALARLGIRGFKPTLRGAPERLEALRTPEGAPLPPNTLAELRRDMARLRLVRDQIAQVEATRAERLRQPAGGSGDAMVRLLARVIGIGIETADMLVREVLSRDLRDRKALARYAGLTGSPDESGARRREKGLARVGNARVRRGMLQLAWRFLRFQGDSHLAQWYRARTADARGGTRKTMIVALARKLLVALWRLVTGGEAPEGVALRPAT

SEQ ID NO: 455867 - protein, 451 aa, unidentified
MKKEKVNKGVIKMGSGLPVFNHFAAGIDIGDTLHCVAINDGNGGHEVKTTSAFTCDLTEIVDYLKGNGITTAAMESTGVYWLPLYIMLEEAGIEPYLVNAKHVKNVTGRKKDDTDSIWIQKLHTCGLLQKSFQPDNEIRLLRNYTRQRKNLIILGTDAVRRMQKALELMNIKIHTVISDILGKTGMEMVKAILAGEKDPQILATLCDPRIKASQEEIIKSLQGIWKEEYLFMLEQAVENYEFHQKQIKNCEEKIKQQLIKQVAIIKEGDITSLEEMLKKKAKSKRNQFDFAIAPLLNAIAGVDLCMIPGISEVTALGFISEVGVDMSKWNSGKQFAAWLNLTPNTKITGGKIISSKIGRIINKAGQYLRQAASCLSTNKTPIGDYYRRMRGRLGGKGAALTTAHKLSRVIYTMLSKKTEYNPGMMIDNQEKFKEDKIKKLEKQLARLKQVA

SEQ ID NO: 455868 - protein, 338 aa, unidentified
MRMYGGIDLHSNNNYVAILDERMDQVLCRRVRNELAQVLGILEPHRSEIVSLAVESTFNWYWLVDGLKDAGYDVRLVNTTAAKSYEQLKYTDDRHDARWIAKMQVLGILPEGYITPPEERGVRDLLRQRLFIVQKRTSFLLSAKTIYARSTGKSISVGDLQRWNRESVQALISDEMVVESLVTKLPIIKAMNRQIREIEKRVLAECKLREEFRLLQTVPGIGKVLSLTIMLEAGDISRFAKVGNFASYCRCVSSEKRSNKKKKGEGNRKNGNKYLSWAFAEAAQHITTYDAMAKKYYERKLSRSHPMVARRALANKLSRACFYILRDQVEFDARRIFS

SEQ ID NO: 455869 - protein, 422 aa, unidentified
MLEETNDTEELIARVAALDIGKASLVCCVRVPSPDTPGKRLQEVRTYATMTRSLLVLAERLAGLGVTRVVMEATSDYWKSPFYLLEAHGLEVWLVNARDVKHLPGRPKTDRLDAVWLCKVAERQMLRPSFVPPPEIRRLRDLTRYRADLVGVRTAEKQRVEKLLEDAQIKLSVVASDIFGVSGRAMLAALVAGERDPKVLARLARTRLRAKLGQLEEAFTGHFGDHHAFLLARMLSRIDQASADIAELEAKIEEEVTPFQAAVDRLDEITGVGRAAAQVIIAEIGTDMGRFPTPGHLASWARFAPGVKQSAGKPKGKATTGHGNPYLARVLGEAAVAAGRTNTFLGERYRRLAKRRGTKKAIVAVGRSILVIIWHLLADPTARFQDLGAGFYDTRVNAERIKRNHVRQLEALGYRVTLEPAA

SEQ ID NO: 455870 - protein, 337 aa, unidentified
MKSYLFIGIDISKAILDVCVISPSETVTNHYHQFCNNLKGFIQLLKWLKQKSEAVVVEDWRVCMENTGIYSLELNCFLHEQGIWQSMENALQIKRSMGVVRGKTDKADCKTIALYAYRFYDKLKPYVLPGETLLRLRALFSQRERLVSIHSQLLAANQSMKGYARELVKDIQNQNEILLKNLAGEIKAIDKSLKECLQKDRELRSKARLIQSVPGIGQQTAAYLLIVSRGMKSFATAREFACYSGCAPFEHSSGTSVRGKTKVHYIANRKMKMLLHMAALNAITFNEELKTYYQRKVAAGKNPMSVLNAVRFKLICRIFSVIKRNEEYQKEYRKNAA

SEQ ID NO: 455871 - protein, 417 aa, unidentified
MPEGRDEQSVRAFRTFTFDLNALADWLSVCGVTTVAMESTGVYWIPIYEILEDRGFDVNLINARHVKNVPGKKSDVLDCQWIQQLHTYGLLRGSFRPDEDMCALRELIRHRDNLIRYRSGHIQHMQKAMQLMNVQLNNVISDITGMTGLNIIRAIVAGKRDPEKLAKFRNGRCANSEEEIAKSLEGNYKDEHVFALQQALELYDFYNKQIATCDVKIEANYAVIKPQINIDEFPLKPLKTKRSPRRNEPCFDLRSYLYQIAGVDLTQIDGVSALTVQTVLTEIGLDMSKWKTVKHFASWLGLCPQNDISGGRILKTGTKKTQNRANKALRLSAQSLSNSKSALGGFYRRMRAKHGSPKAIIATAHKLARIIYHMLKHKQEYVDPGEKYYEKKYKDRVIKNLKRKAATLGLQLVPAAS

SEQ ID NO: 455872 - protein, 370 aa, unidentified
MSKSSKSYIGLDVHKDSIDIAIAASGEDAEVRHFGTIPGDLASLDKALRKLRHKGVSQHIVYEAGPCGYGIYRHLFEQGVDCIVVAPSLIPKRAGDRVKTDRRDAIKLARLHRAGELTPIYIPDTEDEAIRDLVRARTDARQAQARARHQLKAFLLRNGIHYQGKSSWTPAHMRWLSEIQMPNPAQHVTFQEYIKAVEEPTLRVIRITEHLHYLVQTWRWQPVIEALQALRGVQLINAVTLIAEIGDLSRFDNPRQLMHFLGLTPSEYSSGPSTHRGAITKTGNTHARKALIEAAWHYRWPPRVSRIILLRQQKLHESINVIAWQAQLRLYQRYKMLRARGKCSQKAVVAVARELAAFVWAIARQVERLT

SEQ ID NO: 455873 - protein, 408 aa, unidentified
MKLFIGINVSSTDLETVMISSEDNGIVFQGKFANDITGASEIKDQILKLAQPARFDQIVIGMESTSIYSFHPAFFFKNDAELAKFNVQVVVINPRQTKRYHDIFEDNKNDHIDAFYIADYLRVGRYTIGIVRQENYSALQRLTRTRYELTQSLVRAKQHFLHNLYYKANNLAIGKQKTSVFGATMMDLLIEDMTLDEIVNTPTEALADYFSHKGRGRFADPQGLAKDIQKAVRSSYRLGKVMNDSVDTVLAVYAKEIKTFQKMIKEFDDAIAQIVDVIPEEQILQSIPGIGPVYAAGIIAEIGQIDRFEDETKLAKYAGLTWKQNQSGKFESTTTPLLRTGDSYLRYYLIEAANRVRREDSVFKEYYSRKYQEVQRTPTKRALVLTARKLIRVIFYLLKNHQIYKPKE

SEQ ID NO: 455874 - protein, 310 aa, unidentified
MTRNHIGVDLSKDRLDIHDPRTGRDSQCANSPSAIGRFLAGLAPDDMIVFEATSGCDRTLLDALRAAGRAHIRLNPLHSWHFAQSLNLPKTDRVDARMLARLGQERQPEPAPAIDPAREALAELVHRRDQLRRMETQEKNRLARTADSLVARDIRASLKALGGRIARFDAAITRHLAENDELGAQARLLASIPGIGPVTAAGLLAHLPELGRLDRRAVASLGGVAPRARDSGAFRGRRQVGPGRRHVRRLLYMAALSLWRKPDAHGGFTRRLKEAGKAPKAVLMALARKLLTIANAVLRDATPYRLTPPA

SEQ ID NO: 455875 - protein, 341 aa, unidentified
MEGLYYIGLDIHKKTISYCVKKVDGTVVQQGKIAAERKALHEWIAGLRGPWCGAMEATIFTGWVYDFLKPHAVDLKVAHPEMLKAITAAKKKNDRADAEKIADLLRVNLLPECYMLSEALRELRRILRYRNMVVRTAVRMKNKISGLLMETGAIYSKKRLHGRKYFDDLLERVEDVPESVKGMLKLSRSSLEMFETVQKKLIKTLREDKLIRERVQRLMSIKGVGEVMALTWVLEIGDPSRFHSARQAISYCGLCSAQRESAGKEQRGPISKKRNKHLQTILIESAKLAPRWNPQLAALHEKELSRGNRNRATLSVARKLVEYMLAVERQGKDFEPQQMAA

SEQ ID NO: 455876 - protein, 424 aa, unidentified
MDRLQQFRELRSTIRGNESILVVGIDIAKEKHYAFFGTANGKTLKKKLIFGNCIQGFSGLRSLASDLQVQNNLSSCVYGLEPTASYHKPLAEYLVRHGEQVVYVSNVAAKNNRALLDGRWDKNDTKDAANIADLVGQGRCQFYDLAENDVLELRSLITYRTKLKKQEHGLRMRIRNNLLAQYFPELDKQMPQSGADGLILDIIANGFDPAQIAKLSLAEFRQLYQIQKRHIVQENRLRSIWEASRESIGCALPESAAWEGRMMVEQLRQIRTIKRELEKRLKEVGEKSTAYACLLTIPGFGPIVSAMTLAAISDAGRFTSRKQVLRLAGLDLSASRSGKTSNAAIPVISKQGKAGLRYALVQAAQIASYSDATIRSYYTNMLKGRELERGIKLKMRVKLAAKMLIVAWTLMKRNEPYDSDHFRT

SEQ ID NO: 455877 - protein, 318 aa, unidentified
MKSPINVGVDVSKEILEIAIDGGTGSARVENTAAAIRRWLKELKESCSIGMESTGSYHRTMARLALAAGHTVYVLNSRDLSHYARALGRRAKTDRLDAQLIARYLNKEQSQLHPYRLPSKLQEELDGLIQRRHTAVVAQGMLKQSFSALTPIPRALTQTLRASKKLIGELDARMQALVDRDPALAPIAKNLDTVVGFGPLLSCALANAMTRHPFKHADAFIAFVGYDPRVRDSGQQRGRRYLSKRGSAELRRLLFNAAMSASKTKLWRPFYERYRARGLSTTATLVILARKLARIAFSIVKHGTVFRPELIESACAKP

SEQ ID NO: 455878 - protein, 361 aa, unidentified
MGQSSWLVAGIVPGVERQPLKKLPVDESALLKLLNRWREEAEKAGHRIERIAIAFEAGRDGFWLARWLRARDIEAHVIHASSVAVSRDHRRPKTDRLDTELLKRAFLGWLRGERDHCKTVAIPTLAQEDAKRPNRERESLVGEQSRIVNRMKAALARLGIRGFNPKLKKAVERLDGLRTPEGEPIPPNTLAELKHDMERRRLVRSQIRDIEGTRLECLEQAPGDGPHVMVRLLARVIGVGIETADMLVQEVLSRNLRDRRAVARYGGLTGSPDESGKKRREKGLARSGNARVRRGMIQLAWRFLMFQKDSALAHWFYARTKNAPQTRKTMIVALARKLLIALWRLVREGAIPEGIVLRPAL

SEQ ID NO: 455879 - protein, 310 aa, unidentified
MDSITVGIDVSKDRLDIAVRPSGEVFAIERNPAGLEQLTLRLGALSPNLVALEASGGFETVVAAALAAARLPVVVVNPAQIRAFAKAIGQRAKTDPIDAAVIAHFAEATRPEPRPMLDEATRLLADLVARRRQILEMMVAERQREKRVTVPHLRKSIMRLLKVLERELTSVDTDINDAVRGSPAWREKEDLLASVPGVGPTIARTLIAELPELGQLSRRQVAALAGLAPFTRQSGQWRGKSFIGGGRTSVRTALFMGAMVAKKYNPVLRTFFNRLVAAGKPKMIALIAVARKLLTMLNAILRDRRPWQTA

SEQ ID NO: 455880 - protein, 339 aa, unidentified
MREFIRIGVDVSKGFFQVHAIEGEGSSAVRRKLSRAKFLSFFAGIAPTRIGIEACGSAHHWARELRALGHEGVLTAPAYVKPYLKRGKTDANDAAAICEAMSRPDMRFVPVKSADQQAVLMLHKTRALMIKQRTMAVNALRGHLSEFGLIAARGIHRIKDLLALAETDERLPEAAREATAMLAAEIQGLDGRIDGLEAKIAAASSPMIRHLDEIPAFGPLIASAMVAFNPDPRAFRSGSDFSASLGLTPSQHSSGGKEKLGHITKAGNRYLRTMLVVGCTSVLRVAHKYKGALAEWIVAMRARKPERVVAVALANKLARIAWAMMATGEAFRKELYFKA

SEQ ID NO: 455881 - protein, 349 aa, unidentified
MRYLGIDVHSSASVWCLLDQSGEQIDRGRSPTTYPALCELASRLSRDDELLAGHEVGGQVYLVHDAISAAGVTIQAFNANHLRMIAASRKKTDKRDAYWIAKALQTGMTPHPVYIPNGEVRELRRLLARRRMVMRDRKRWQYRARAILRSYGVRVSPGNSKIRKKIDEILEHPDGADTDLLDSLGLCERAISLFNEECADIDKKISIRTGAIDVVQRLRTIPGVGDLVSANIYAAIGEINRFSNARKLASYAGLVPTVSQTGGPARIGHITKEGSSELRAIMVQAAHIASRPRTKNADELRAYLERIRGSRGRKKIALTALARYMLNIAFHIWRDGTEYDPKRMRCNTN

SEQ ID NO: 455882 - protein, 361 aa, unidentified
MEYATAEGRNVGIDLGKRTYEIKFIGKDGKVTGTNGKTDKSGREKLYAMLRPGDRVALEVCSLGMLMAKEMKEKVGCNVVLLNPSQIALIYRSLKKNDKEDALKIARLVQKYTDEELPTVELPTEHEERIRQILCELRQLKNDRTRDINRLHAVFLESGITEIKRKDLATGSNREDCIKILKGLALENARRILKRLSMTDEQIGEVDELLDRELEGDKNIERLTEIPGVGKQLSAAFIAFLGDGSRYPNASAIGAATGLVPKLDMSSTKLRLGHITKCGNSNLRSLIILAAWSHVRAKGGGALKDKFLYMTRVQSKSRKIAIVATARKLAELMYTLLKTGAPYEKRTSPTIQQLVGEALTA

SEQ ID NO: 455883 - protein, 411 aa, unidentified
MEQIHDRVAGLDVHRDEVAVCVRRPGPRGGAQTDKARFSTTAGGLAAMASWLAEHEVTLAAMEATGVYWKPVYYALEGRFELWLCNAHHVKNVPGRKTDMSDAEWLADVAAHGMIRPSFVPPPAIRELRELTRYRKTQIDVRAAEIARLEKVLQDAGIKLTSVASKVLTQSGRAIIEALIAGQRDPRALAGLAKGKLRPKIPQLTEALCGHFGAHHAIVAACILAHLDFLDAAIARLDEQVAARVADGYQPAARLLRDVPGLERRSIEVIIAETGADMSRFPSPGHLASWAGLCPGNHESAGKRRRVATTPGNQWLRRTMVESARAAARTKGSYFGAQYRQIARRRGPNKAAVAVAHSLLDVIWHILTTGEVFADLGEDYFTSRHDKEHQARWLTVQLEKLGYTVELTTTA

SEQ ID NO: 455884 - protein, 460 aa, unidentified
MSQRRKKQKRAGQGGGAVPSLSCIEPNAAGIDVGATEIFVAVPQDRDPSPVRSFETFTEDLQRLKNWLQQCGITTVAMESTGVYWIPLFQILEKAGMEVCLVNAQHVKHVPGRKSDVIDCQWLQYLHSVGLLRASFRPEERICAIRSLLRHRDSLVQMAAAHVQHMQKALTQMNLQLHHVLSDITGQSGLAILDAILAGERNPAVLAQLRPARVQASEEIITKSLVGDYQREHLFTLRQSLQAYRYYPSLITACDQEIEEQLQNLDSRTPPDASPLPPERYPHRPRKNEFRFDMRSELYRIYGTDLTAIPSINALTGYTVLAEVGTDWSKFRNGDAFASWTCLCPQNKKSGGKILSAHTRRSASRVNRALRLAAQTLERSTSYLGAYYRKMRARHGAPAAITAAAHKLARIIFHLVTTREAYDESLFAAEEQRQRKRMENKLKRTAKQLGYQLIPLRQTA

SEQ ID NO: 455885 - protein, 368 aa, unidentified
MKHDSTVFVGLDVHKDSIAVACVGSLPDDPVVDVGTIGTQQYAIDRLITRLAGRGSLHFVYEAGPCGFWLHRYLAQKQQRCCVAAPSLIPKSPGERIKTDRRDARKLALALRAGVLTPVHVPTPEQEAFRDVVRAWQQAKRDIAAARQRLKAFLLRNDIRYTGRATWNAAHRRWLSELVLPSAPRQIVLQELIDTISQRERRRDRLEAEMDHLAPAWDGYPLACALQAFRGIQKTVAYTVVAETADLSRFNHPARFMAWLGLVPGEHSSGNTRRQGPITRCGNRWARTLLIEAAWAYRYVPKVSAIIERRAQDIDPCIRELAWKAQLRLTHKFRKLKARGKHNNVVVTAVARELAAFIWDADRTLRAA

SEQ ID NO: 455886 - protein, 412 aa, unidentified
MSVVQFTQVLSRGCGMDIHKKVVVATVQGEGICKETRSFDTFTRSLTQLREWLVSLGITHVAMESTGVYWKPIYNVFEGFIPHIWIVNARHIKNVPGHKTDKNDSEWICQLLMAGLLKPSFIPPKAQRELRDLTRYRRKLIQSVSANKNRIIRILEDGNIKLSSVLSDTSGATAVKLIDMLCDGKQITLSDIESVRHGRCQHTKEEMLEACTGCLDEHKVYMLGKIRECNASLKEDILDFDKRIKDVLSSYHDAIERMCEIPGIQNRVCEDLVAEIGLDMSNFPTSAHLCSWAGMCPGNNESAGKKKSGRTNHGDKQVKETLVEAAWAASRAKGTFFMERFNRLAPRKGSKKALIAVGHSLLKCIHYVLSTGGHYKELGDNYVPNKKEQKRKEYLKKELQKLGYSVKLSKED

SEQ ID NO: 455887 - protein, 347 aa, unidentified
MRTLRKTPSYNNSDSQLGLEPVSARRSKLIMNHAINQNEINVGVDTGKEQLDIYIRPLDIYFTVSNDKKGINKALKEINKHDVSRIIIEATGRLEYEFVSACSKADLPFVITNPAHIRRFAGALGQLAKTDKLDAQLIAHYGEAMKPTLSTLRPEVMQRMSDLLSRRRQLLRMQTMEKNRTKIMPKSIASSIKPILTALKNQLVKIDEKLEKLIDECDEYKVKNDIIQSMPGVGKVVSYSLLSNMPELGFITNKQAAALLGVAPVNRESGTYKGKRRIRGGRYQVRTVMFMAMMSAMQCNPVFKATYERLVASGKPKKVAIIACVRKMIVILNTMVKDGVYWDPKMS

SEQ ID NO: 455888 - protein, 345 aa, unidentified
MNKLVFTQQATVFCGIDVSARSLAVAQIGSDGSLVQREFANSAGGHKALLAWLARCNAKVRVSLEATGIYSLDLALALDGEASIELAVLNPKLVNRFAQTLRRSKTDAADAVVLAEYGRRMPFTRWQRPLASHLRLRSVGRYIESLVADQAGLKNRLRTAEGTSTTPRTVLADLRRALVAFERRVAKMRREALELVRAEPVLWERFQLLTSVPGIAQISALQILSELVLLAPTMTVRQWVASSGLDPAHQQSGTSLNKPSRISRAGNRRLRRALYMPALSAARNDPHLRAFYLALRSRHKTGLQALMAVARKLLHAIYGIFKSGRPYDGKRLFPNIHTGVESIAG

SEQ ID NO: 455889 - protein, 316 aa, unidentified
MEISPMFIGIDVSKGRLDVAVCPSGDRDSVFNDEGGIQALIKRLGEIQPTLIVMEATGGFEHPAMRALASAELPVVVVNPRQVRDFAKATGQLAKTDRIDAWVLARFAEAVRPAVRPLPDEVTLELRALIARRRQLTEMIVAETNRLSSASKAVRKSIKAHVRWLEAELKRADKDLDQAIRQSPIWQENQDLLRSVPSIGPVVSRTLIAELPELGQLNRKQIAALVGIAPLNRDSGTFRGRRSIWGGRATVRATLYMAALVASRRNAVISAFYKRLRDAGKAPKVALVACMRKLLTILNAMIKHKTRWSEITLQTS

SEQ ID NO: 455890 - protein, 312 aa, unidentified
MADMVRLAGIDVSKETLEVYVLPSGASRTVSYDRRGLRGLRRWLLDQGVAIVSLEASGGYERQISEALEEVGLVVHRLNPLRVRRFAELRGRLAKTDRLDARTIAEFARAYPQERQLRRDPRRDCLAEHLLVRRHTQQAILDCINQLEHLRDGRLRRLVMARKASMESTLASLDRRLAKLVAEHDDLIELSDRLRSVPGVGPVLATTLIALLPELGSLTRRQIAALVGVAPFDRSSGRHVASKAIQAGRVLVRNTLYMAAMVASRRNPTIKAFAERLAGKPGKVRLVACMRKLIVTLNAMVRDGAQWQPHTP

SEQ ID NO: 455891 - protein, 341 aa, unidentified
MGIVAVGIDLAKNVFALHGVDETGKVVLRRPSVKRDQLLEFFASLPPCLVGMEACGGAHEWARKLKALGHDARLMAPKLVAPYRDGGKRKKNDAVDAEAICEAVQRKKMRFVPIKSEEQQSRLAVHTAREGYVAQRTATINRIRGLLTEVGIVMPKKAATIRKLAHEHLEDLPGYLNQVVNDLLDELARLDLRVAQYDVLIREMARQDSRSKRLMQINGIGEITASAMVALVGNGHDFKNARQFAAWLGLVPRQYGSGGKVQLGRITKVGDPYLRKLLVMGARAVLNAAEGKTDRMSVWALQVKARRGYGKALVAIAAKNARIAWAMLSKGQDFREALKQA

SEQ ID NO: 455892 - protein, 347 aa, unidentified
MEIIIRIGMDTSKNVFQLHGVNVAEEPVLRKRLTRSRMTEFFQKLPPTTVAIEACGGSHHLAQLLGSFGHQVKLIAPHLVKPYVKRGKHDAADAEALCEAMSRPTMRFVPTKPAEHRALLMLVGMRSRLIHNRTQLSNSIRGFAMEFGVTIAAGMSKIEPLLERIAADDTMPELAREIFALHAREFIQLRSEIEKLDDRLMAWHRQSECSRRLAQIPGVGPVGATLLMLKTPDPALFKSGRDFAAWIGLTPRNHSTAGKNRLGGITRAGDQQLRSTLVVGATAIVRHARKLEGRNLTPWLLQLIERKKPKVVAVALANKIARVAWRLMVTGEHYRKSAAVSRLGCAA

SEQ ID NO: 455893 - protein, 335 aa, unidentified
MEHCAIDLGGRKSQICVRASNGEVLVEELCLTPDLKDFLRTRPPSRVVMETCAEAFGIADAALALGHEVRVVPATLVRTLGVGARRTKTDRRDAQALSEVSCRIDLPSVHVPSARSREWKTICGMRDALVSCRTKLINTVRGWLRGRGLRIRRGETTTFARRVRELESIPEHVESQLKAIESLCAEIKVADKRTASLAARDPVCQRLMTVPGVGPVTSLRFVAALDEVGRFPTAHRVESYLGLVPGESSSSESRQRLSITKAGQSGARWTLVQAAWSLRISCRSAGARPMQLWATEVEKRRGRRIATVALARKLAGILFALWRDGTTFDPARTAR

SEQ ID NO: 455894 - protein, 423 aa, unidentified
MDVIHKRVAGLDVHKKMVVACVRITAGNRVSRECRSFATTTAGLLALLAWLTESGCTHVAMEATGVYWKPVWNILDDGSFELIVANAAHIKNVPGRKSDLNDAMWIADLLACGLVKASFVPPADLQELRSLMRTRKQLVREQTSHTQRIQKTLEEANIKLDAVICDIMGRSGRRMIEAMIQGVRDPHELAALADRRLKATPKQLYEALHGRLRDHHRFLLQLHLGQWDALQEAIVAIDREVERHITRIDEQEPPAGQAPFCEVIANLSLSPGISILAARSIVAEIGRDMSRFPSAGHLLSWAGWCPSQNESAGKRKTTRLRKGAPWLKTILVQCAWAAVRKKGSYYQAQFLRLKRRRGPQKAICAVAASLLTAIYHMLKNRIPHRDLGAQHFERHSPEAKAKRLAAQLAKLGYQVQLQPAAAA

SEQ ID NO: 455895 - protein, 341 aa, unidentified
MNIKRIGLDLAKQVFQLHGVDHQEKTVLRKQLRRNQMLAYFANLPPCLIGIEACSSAHYWARELQKFGHTVKLMAPQFVKAYVKGNKNDANDAEAICEAVGRPNMRFVAIKSIEQQDIQFTHRIRSQLVKQRTEKVNQIRGFLAEYGLTVGRCIEKLRKALPLLLEDAENGLSFEFRRLLQELQQDLITLDKRVSEMDKKIHVLASSNAAAKRLQQIPGIGPITATALVCALGDGKQFKRGRDLAAWLGLTPKQHSSGGKECLLGISKRGDTYLRTLLIHGARAVLRVAAKKEDPRSRWLQNLCSRRNKNIAAVALANKNARIVWALLTKETDFLPEGKPA

SEQ ID NO: 455896 - protein, 404 aa, unidentified
MVFVGIDWAEKHHDVCIIDREGVILAKDRVADGVEGISKLHKMVADHIEEPEDAIVGIELDRGLLVGALVAAGYEVFAINPLSVDRYRDRHSTSGAKSDPGDAKVLADIVRTDRHNHRQVAGDSELADAIKLLARTHQNFVWQRQRHINRLRSHLREFYPQALEAFGTDLSFMDAVAILSIAPTPELGRRLSRSKIASALKKGGRQKNIQSRAEKIQLALRSEQLEAPPTVTRAYGTVTSSLMRLIGSLNEQIADLERELESSFEGHPDAKILRSLPGLGTVLGARVLAEFGDDRTRYADARSRRNYAGTSPITRASGTRRVVLARFARNERLFNACYLWAFASLTASPPARAYYDLHRSRGKTHNQALRALANRLVAILHGCLRHGQTYDESIAWPVAVPKAA

SEQ ID NO: 455897 - protein, 343 aa, unidentified
MHKLSGDGFLSCGIDVSAAQLVVALQSEGERNLQRSFPNCARGHQALTLWLRKTGRSVRVCLEATGLYSLDLALALHAASGIEVAVLNPKLVNRFAATLCRSKTDPADAQVLAEYARRMPFQLWQPPPAVALELRTITRHIAALTQQHTRERNRLHAASVSIAGARCVQKDLKRSLRDLELRIDKLRAAALALIQQDRQLAPRLNLLVSMPGIGEVSALNLLGELALLAPSLSVRQWVAHSGLDPAHHQSGISVQKRSRISRAGNRYLRRALYMPALVAARRDPHLRAFYQALVARHKAKMQALVAVARKMLHAIFGMFRSNRNYDGSRLLPNMKLATLSTLA

SEQ ID NO: 455898 - protein, 365 aa, unidentified
MQTVNRSRILFVGVDVHKDTHTAVALSPFGEKIFEMKIGNETEDFISLVEKTKVASEKAELIPSFGLEDVHSWGERLSSFLAEEGLPVRAVAPILVDRRRSKMTHPEKSDSLDAKGVAEVMIQRIDSLPLYKLTEEAQKSKQIRELSLEREWLVKERARLKNQLHILLHRMHNTGYRAKFKDPFSKKALHYWMRSAPKGTDAILGQRMKRAVRRLLDLREEIQEIERELVLMMKENQQTISTASGCGTVIAAEIIGEVGDINRFHSPGALAKYAGCAPREHSSGKTIRWRKTRSGNRRLNRAFHRMALSQISRSGNDAARAYFKRKVSEGKTKAQALVCLRRQLVNVVWMMMKHKTEYRYSQKNV

SEQ ID NO: 455899 - protein, 411 aa, unidentified
MSSLLQRALPAETLVVAIDPGKVANRVWLVRGEEGLVHDPVSLPTLRAGVDELVRLIAANGCRDEPLIAVEATGSLHRAWTRELERRFPGCVRLLAPSETQAARAQLGSRRFKSDDRDCAALVWLARQGLGRVPDEPALEALLGVVRHRRQLVAELKVLRQRLHDQLNRLCPGLSAPQGHGRVLELLQPSGRAVLACAVAFAGRPPAVRSLLARAPGRLTRSNAAYWVERWRACLAPPSDAELRAQRLGLDLERLDGLLSALANADGQLTRLLAQTPGQVLTSLPGVAVVRAAAFAAHSLPIERFPTPERLYSATGLAPASYQSATISRRGGISRQGLADHRDALMAIAWGLSQASPAFRERAQEYRTRGFAPIQTRVALARHACRLCHTLLRTQEPYDEERYRQARRRGR

SEQ ID NO: 455900 - protein, 343 aa, unidentified
MSNDTRIGVDVAKAVFEIAMSDRPGHVVRRERLPRAQFLAFMAQQPQATVVMEACGSAHHWGRKIQALGHRIVLLPPHHVRPYIRRHKTDRTDAKGILEASRNEDIRPVPVKTVDQQVLTSLHRLRSGWMTERTARLNALRGLLRELGVFIPMGAREVVPFVWSLIEDADSDLPEALRPIFAEACLEIREIEARVKQVERQLEATAEQLPAVEHLRTIPGIGLLIATALVAFIGDIRRFPSGRHFASYLGLTPREYSSGLKRNLGRISKRGDGYLRTLLIHGARSVLVHARKQQPDRLREWANNLAKTHVHNKAAVAVANKLARIVWAVWHHQRPFALISKAA

SEQ ID NO: 455901 - protein, 353 aa, unidentified
MHTHQKSSDAVAVIGVDIGKNTFHLVGLDKRGAIVLRIKLSRSQLERRLANVPRCLVGMEAGCGSHHIARQIRALGHDVRLLPAQYVKPFLKGHKNDYRDAEAIAEAVQRPTMNFVAIKTPEQSDLLSLHRVRSRLVGRRTAVINQIRGFLIERGITVRQGPAPLRKALPEILSSPTEALSPRMVRLIADLSEDWRRLDERIEAVSTQIESLAENDGSCQRLMTVPGVGPIISSAVVAAIGNGGGFRQGRDFGAWLGLVPKQESTGDRTKLGKISKRGNKYLRTLFVQAAHVVLIRRPAAAMRGLWPWIERAAKRLAHRNLLAIALANKLARIAWAVLARGRDYEPRITINAT

SEQ ID NO: 455902 - protein, 386 aa, unidentified
MQSMIGGQSHFQPFGLSYWGFEDLNKGVGSMTASYDYHIGVDYHKSYSHLVVQDSSGKTLRSGRVKNDRPSLGGFLERYRENSHAVVEATRNWMVIYDWLDDICDDVVLAHPLKVKAIADAKIKTDKIDATVLAHLLRADLVPEAWAPNDKARELRVALRERMFYVRLRTMTKNRIVTAFDRYPEQTAQLKKLGDLFGKAGRVQLAQVRVSEIDRIQIDRGLDFIDDITVRIKQSEATIRAMTKANANVKLLKTIPGIGEFFARLIDAEIDDITRFRNPKKLAAYAGLVPSTCSSGGKTFHGKIIKQGNKWLRWAFVEAVTPAIASEAQLRAQYEHLKFRGVNKARVAIARKLLTIAFQILRDQRAYEQRRESPMEGASTTSRLSR

SEQ ID NO: 455903 - protein, 393 aa, unidentified
MICVGIDVAKDKHDCFILSSEGEVLADVFTIQNNAEGFDMLLQTIRRCTRPEDKIKVGLEATGHYSYNILGFLLDKGLPTYVINPLHTNLYRKSLSLRKTKTDRVDARTIAAMLMSDVDLKSYTDTAYHNEELKSLTRYRFDRVRERAKLKQSVSRLVTILFPELEKLVPTLHMESVYALLSEFPGAKQVAEAHLTHLKAVLYGASKGRYGRDMATTLRDAARCSVGSVMPAKSLELQHTIRLIRELDAEIEDIETAIQSMMDEIQSPITTIPGIGVRMGAMILAEIGDFSRFGSPDKILAYAGMSPSTYQSGQLSLSGAYSHMEKRGSRYLRYALYNATKYVCLWDPAFAAYLAKKRGEGKHYNVAISHAAKKLVRLIYAMEKSKQSYRNAA

SEQ ID NO: 455904 - protein, 304 aa, unidentified
MAKATLDVHVRPEGSARRVPNTPAGVRRLVARLARLAPALVVADATGGLERALVDALHAAGLPVAVAGPDRVRHFARALGVRAKTDRVDAAVLAHYAERVRPAVRAAPTPDARALAALSARRRQLTAMLAAEKNRLQGAAAALRADVGAHVRWLRARIARLDAQIGAAIAADPERAAAAARLRTVPGVGAVVAPTLAAELPELGRLGRRQVAALVGVAPFPRDSGTLRGTRAIWGGRAVVRTALYLAAMSGARCNPTLRAFYRRLVAAGKPKKAALTAAAHKLLTILNTMARDGSTWSPPPSPA

SEQ ID NO: 455905 - protein, 453 aa, unidentified
MYQNDWKQAHCVVSTSNIDLFGQFAMGKENMESSEVHWDCHKLFMGLDWARDHHDIVVLDRGGTVVLDVQIEHASEGWHQLRESLARLAGANLSVVAATIETNCGPAVERLLEMGCRVYPLNPKAAQRYRDRKAPSGGKTDHLDALSFADALRTDGHGWRRLEPEDPKILELRLVCRDEIGLIGQRTALINQLQQALYDYYPAALEAFDDWTRPSAWAFVERFATPEALKKSGKRNWEKFLHSHRLYRPQTYSKRLDIFTNATEFCASQAVINAKSMLAVSLAKQLRLLEEQLKLYRDRIEQLFKGHPDHDLFGSLPGVGEKLGPRLLSECGDNRSRFEDFQSLQCYAGTAPVSYQSGQMHRVKFRRACNKNLRTAVHMWADLSRMRCCWAQVYYDQKRQEGKSHACALRCLGQRWLKILWKMWTTGKPYNEQLHIRNQTEHGSWVLALMPPK

SEQ ID NO: 455906 - protein, 341 aa, unidentified
MEQMQVYAGLDVHGETITGTIKDSEGNPLRVLKVETSQEGVKKLFNRFKRKQVCAVFEASKNWFYYAQLLRPYCKELIMAHPLKIRAIASARIKTDKIDSNILCDLLRGNLIPESYMPSLEIVELRELLRYRATLSNLRARFKTKVRNIISREGKKCEWKDITAKRARLWLSNILLNDLNRRELDYTISLMDNLNEEVKELDKTIDKEQYKYPEVDLLKSIVGINTFSALLIIAEIADFSRFSSPHKLAAYAGLAPSTYQSSATQYNGRITKQGSKWLRWILTQCTHAGVKSRQSHKLKSFYLRLQRKKGKQKAVVATARKMLVVIWHLLDKNEYYATRYY

SEQ ID NO: 455907 - protein, 413 aa, unidentified
MNEKGKRYIGLDVHKHYLIALGVDENLEVVMPARRVELLHLESWMKKTLTREDAVVLEMTTNTWQLYDELSAYAGSVMVVHPPHVALITRSQVMNDKLAASILARLLAKGLLVGIWVPPQEVRELRGLVAQRQKMTRLATQAKNRLHAVMQRHHLKPPAGNPFAKTNNGWWQALPLGKLEKMNLQSDLETLQFADQQETRLQAEMTGIAAENEEISRLLHIAGVGVITAVTVYAAIGDIRRFAEPKYLVGYAGLGTRVHDSGMTTRTGKITKAGRRDLRVALVEAAHVAANSHPHWKAELARLEPRLGYNRAIVAIARKLLITVWHVLARKVTDRFAEPEKVSKKMLHFAYEVGKANRAGKSAAQFARERMDTLGMGQELTSIPWGSKKPIPLPPSKLLEKKGSDVPNGASAP

SEQ ID NO: 455908 - protein, 352 aa, unidentified
MKILALDLGKFKTVACEYEAETGRHRFATVLTTPKALHDLMVDREPQRVVIEICSLAGWVSDLVRSLGIELQVANTADERWRWRNVKQKNDRNDALKAAQLSAVNQLCSVHVPEQTMRQWRALIAYRSKLVQRRTKIKNHIRDLLLREGQLLPRGRSAWTEAGMAALAEMAKPLAEVGGHELWRGELGVELVQLKELQQQILMVHAKLDELAAADPRIALLRTIPGVGPRLAEAIVTMFDDVTRFRTAGQVGSYIGMVPKSFDSGETERSGRITRHGNRLVRSLLVEIAWAALRHNPWARQTFQRISGGKKSRRKIAVVAVGRKLLVRCWAMLRHQTEWRYHLEATSQSSSG

SEQ ID NO: 455909 - protein, 317 aa, unidentified
MPQGTCVVGLDVAKSKVDACIRSMGLRLSRPSTPEGEAELLAWVRANRVGRAVMEASGGYERCWAKALRAAGVEVRIVDPKRIRHFAKAAGRLAKNDPIDAETIAWFAEAFPDADPQPHDAAREELDRLVQARAALKDEEDRIKQQREHRPPPVVAQALAAVAKAIRIERRKIEAAIAAKIKANPAFARRAEIIDSVPGLGDQTVAGVIAWLPELGHIANEAAAALIGAAPYDDDSGGRKGARHIKGGRRKLRNLLYMPVMGAATQHNPVLKAYYARLRARGKEAKVALIACMRKLIVILNTMLARDETWNPARAAA

SEQ ID NO: 455910 - protein, 408 aa, unidentified
MKTLHQRCAGLNVHKQEVVACLRLGRRGRVEREVRRFPTTTRGLLELADWLEAARCTIVAMEATGVYWKPVWHLLEGRFELVLANAAHIKGVPGRKSDVNDATWIADLLAYGLIRASFVPPQPIHDLRDLTRTRKQLSREIVRHEQRLQAVLEEANVKLTSVITDILGASGRRILKAMIAGETDPSRLAELGSRRLGCSRETLVEALDGHVRDHHRFLLDQHLKTIEQLEETMAAFDARLEAALAPFRDTVECLTQVPGLSTTAAEVVIAEIGLDMRRFPTAGHLLSWAGLVPGLDESAGKRRSTRVTKGAPWLKPVLVQCAWAAARKKGSYFEAQFLRLKGRRGPKKAAIAVAASILTTVYHMLRDGTCYQDLGPNHFIRRDPARTAHKLADRIRSLGYVVEIRSAA

SEQ ID NO: 455911 - protein, 481 aa, unidentified
MSQAKKHSEKPSERTTTAGKGKRGRRRKGMCLEDRPILEANAAGIDIGAREIFVAVPPDRDAHPVRVFSTFTEDLEKMAKWLLSCGITTAAMESTGVYWIPPYDVLEQHGVKPCLVDARGMKNVPGRRTDWHECQWLQFLHSVGLLRAAFRPDGDVCAVRSLMRHRSDLVQMTSQHIQHMHKALTQMNVQIHHAISDITGVTGLAIVDAIIAGQRDPAVLAKLRDPHIKASEETIGKSLVGNWRPEHLFTLKQSRQMYRHYQEQITACDEEIEKLLVAFQPRVDPAEKPLPPDRKKKQRGRKKKNANPKAGFDLRTESYKLFGVDLTQIPGLMAMVLTLFSEVGRDMSRWKTAGHFVSWLALCPDNDITGGRVAWRGMRQVHNRAGDLFRMAAYSLHHDPTPLGDYLRRMKSKLGPAGATTATAHKIAVIFYTMVKKQVEYDATIWAERGAEREKRFEAKLKRQAQQRGYKLVPIEEKLAA

SEQ ID NO: 455912 - protein, 417 aa, unidentified
MTFHFTQGYADKIRWTSGATFFEVITMIFVGIDVAKDTHYAAVSDDSGAVLVKPFAFQNNAEGFCLLLKKLSEFDRSKLLIGLESTGIYSENLICFLYESGFRLAVINPIQTATLRKTAIRKTKTDKVDTMLIIKSLMVNSYRLYSQRDADSLKLKTLCRFRQNLKKSKARLKIQLAGYVNLVFPEFGKFFKSGIHIAASYALLKKYSSPKEIAALRTSTLCTLLSKASHRRFGKDTAEALKSLALSSVGVKNPYISIQIAQTIAQIELLEQQINDLNSAIEEAMESLNSVLMTVPGIGAVNAACILGEIGDIKRFSKPCKLLAYAGLDPTVRQSGQFTAKSTRMSKRGSALLRFALINSAWQLTLNDTTFKAYYDLKCSQGLNHYGALGHVAHKLTRVIFKLLTSDTPFIPAKLVA

SEQ ID NO: 455913 - protein, 424 aa, unidentified
MSSDLEMAAFIGLDWADQQHVIRLRVAGSAPVESQLLDQKPETLRSWIGQLRQRFGGRPVAIALEQSRGSLLYALMNVDFLLLYPVNPQNLAQFRKAFYPSGAKDDPQDALLLLEMLEKHRDRLRVWVPDDADTRCLRLLAENRRKLVNRRTALTNQLTSLLKESFPQALDWAGPLDSLRACDFLQHWPSLQRLQQTATSRLRKFYRDHTHLDSDAIHQRLDQIRQAQPLTRDSAVLAAAELMIPALVRQLRCLIESIQQFDQQLKDRFQHHDDYTLFHSFPGAGPALGPRLLSAFGSNRNRFECAAEVQMLSGIAPVTERSGKSHWVHWRLACPKFLRQSFHEFAAQSILFSTWARAFYDQLRSRGTSHHAAVRTLAFKWIRILFRCWKNRTPYQEQIYLASLRRHGSPLSAALSPPTPGANL

SEQ ID NO: 455914 - protein, 364 aa, unidentified
MIGADTHKQTHTVVAVDAATGQVLGEKTAQARKQGFGELVRFARGLEVDERVWAIEDCRHVSGALERWLIARGERVIRVAPKLTAGMRKSSRERGKSDPIDATAVARAALREGIENLPAAHLDDRALEIRLLLDHHDDLVAQRSDDQRRLRWHLHDLWPELEIPAGALDREKWCAKIARRLARAEQTARVRVARDELAAIRARTRRVRELERELAALVGAYAPQLVAERGCGTLTAAKLIGQIAGIERFSSDAKLARTAGTAPIPVSSGRRDRHRLDRGGDRQLNCALHRFAVNRAKWDPETADYLARKQAEGKSRMEALRCLKRILARRVYHLMRTPLDQANENKNMTTTNTGTAPATTLALT

SEQ ID NO: 455915 - protein, 409 aa, unidentified
MDLLYTRCAGLDVHATTVVACARIATGGTVTYERLTVSTSTRGLLQLADWLMAKGVTHAAMEATGVYWKPVWHVLEGSCTLILAHAHHIRNIPGRKSDKNDAAWIADLLALGLIRGSFVPPAAIQELRDLTRTRKQLVRETARHTQRVQKILEDANVKLTEAISDILGATGRAILQALIDGETDPERLADLTKGRLKASRGQLVEVLHGRVTAHHRFMLKLHLTHIEATEQAVTDLEAHIEETLAPFRAAIDLLITMPGLSTVTASVIVAEIGTDMTVFSTAGHLVSWAGLCPRLDESAGKRRSTRTRPGALWLKPTLVQAAWAATRKKDGYFHAQFLRLKSRRGPKKAILAVAASMLTDVYHMLRDGTEFQDLGSQYFDQRDKEHLTKRLLRRLHDLGVDVEVKEPAA

SEQ ID NO: 455916 - protein, 403 aa, unidentified
MNNVAGIDVSKGKSMVSVLRPFGEVVAKPFSVGHTGSELKELADYLKSLDGETRVVMEHTGRYYEPVARFLHEEGVFVSAVNPKLIKDYGNNTLRKVKTDKADSRKIARYGIDNWAELRQHTPMDTIRMHLKTLNRQQSLYTKTKTMMKNNLIALLDQTYPGVNALFDSPVREDGSQKWVDFATAFWHVDCVRSMSLTAFAERYRKWCKRHGYNFSQSKAVEVHAGAQDLIVMLPKDALTKTMVRQAIDALNAVSASLERLKAEMRTLAAQLPEYPVVMAMHGAGDSLGPQLMAELGDVTRFTHRNAITAFAGVDPGADQSGTHEAKSTRVSKSGPPELRRALFLVMDCLLKTQPQDDPVYRFMDKKRAEGKPYLVYMTAGANKFLRIYYGRVKEYLASLEGN

SEQ ID NO: 455917 - protein, 312 aa, unidentified
MTEHCYCGIDVAKDRLDVQVLPHRQRFSVDNNATGWDELVERLHALPIAAVGIEPSGGYERGIIRALLAAGLSVRRINPSKLRQFARARGILAKNDRLDAQLIAEYVSIMPTRVVQRAATAERLAEVVTMRRQLCDEHVTIENQAAHVEDAILRRLNKRRLARLKADIHLLDKRMGEIVAADAILAQRYELLTSMRGVGPTLAFTLIALLPELGQMSRKQIAALVGVAPYDFDSGKLKGHRCIYGGRMPVRNILYMAALSAARYNPALKVFHNRLAAANKKPKVIIVAVMRKMITTLNAMVRDKAAWQPRAA

SEQ ID NO: 455918 - protein, 407 aa, unidentified
MIFAGVDWAEAHHDVHVQDENGKRLGGGRLPEGVEGIARFHELAARHAQEPGEVVIGIETDRGLFAAALVAAGYQVFAVNPMSVSRYRDRHSVSGAKSDPGDAKVLADLVRTDRHNHRPVAADSDLAEAVKVLARAHQSMIWSRRRQANMLRSALREFYPAALAAFDDLTSGDAVEVLRAAPAPALGAALSRPKIAAALRRGGRQRRIDARAGEIQAALRTPQLHGSPVIAAAMGATVSANAAVIAEMTTQIAVLERQLAADFEAHPDAEVVRSLPGPGTILGARVLGEFGDAPDRYATAKCRKNYAGTSPITRASGTRSVVLARYVRNQRLADALYLWAFSALSASPGARAYYDTRRAAGDTHHAALRVLGNRLVGILHGCLAHHVPYSETTAWAHRTSTYITEAA

SEQ ID NO: 455919 - protein, 425 aa, unidentified
MNKDVLSTLFVGIDVSSSSNYFCAINFEGKHILDFSIANDLPSSEIAIERIFNALKDNDLKFVTMVLESTNVFSFHIANLLASNNSLFNFNSKVFVINPKESSNFRKTYSDMDKTDPKDAFVLADMARCGRINQQPYKASQLFALQRLTRQRFHLVKTITREKAYMMSNIYLKFSSLYIAKKEDEPFSNLFGNTSKSIIADFTPDDIVNMSDEDMITFVMEKGKSRFSNPEENVRLLKKIARDSYRLDKLAYDPINVAISSSFNTIKALEDNLKVIDKAIEKNIKGLCDNEFTILKSIPGIGDVYAAGIISEIGSIEFFKDNNALAKYAGLTWRKTQSGNFEAETTRMTKTGNKYLRYYLIEAVSSLKNHSKDFNEFYTRKYNEVSRGAHKRALARSARKLVRLIFGLLHHNQLYSTIKLDNRNN

SEQ ID NO: 455920 - protein, 312 aa, unidentified
MKEGVFVGIDVAKDSLEVASTTGMKKSFSNTREGHEGIEGFLKPLNPALVVLEATGGYEFAVVEYLAIRGLPVAVVNPRQVRDFAKALNILAKTDRIDAGVIARFALAVKPEPRPLKDAQAQKLDAFVARRRQLVEMIAAEKNRLPLAREWVREDIVATIAWLTKSVEKINKDVEDLIKGSPLWRTKETLLRTAKGIGRVTAFSLVCDLPELGTLNRQKIAALVGLVPFNRDSGKVRGKREIWGGRGHLRSVLYMATLAAKRSNPLIKPLYDRLIAKGKLPKVALVACMRKLLTILNAMVKTNTPFEVRVGA

SEQ ID NO: 455921 - protein, 425 aa, unidentified
MATETTSVIAGIDTHADTHHVAVINEHGKPVADKDFLAVGSGYRKIVDFITSYGTVTAVGVEGTGSYGAEIAKTLRGEGLCVLEVNRPNRAARRLKGKSDPLDAYQAAQSVLDGRTTSVPKAKDGPVECLRILRTGRTSALKARTAAINQIKGLLVSAPDKLRAKYRGLGTSAMITALQRTRPSGHMADPEYVCLLTLKALATRCHSLAAEIATADAALQEILDTYAPMLCDLPGVGTEVASQLLVTVGDNPDRLENEAQFAALVGVAPIPASSGKTTRHRLSRGGDRNANHALYQVVLVRMASCQRTKDYVAKRTAEGKSKREIMRCLKRYAAREIYRQITNPQAAPNNTDLRHKRNDLGLTLASAASHLGQWPSVISRLERGHIRNDDLASTYRQWLTDQTADLVRLPADGRGGWHRRVQARQ

SEQ ID NO: 455922 - protein, 338 aa, unidentified
MKRYPGVDLHRNCFTVCTRTEGGQEALRSRSIHELHRFARAVRSTDEVAVEATGNTRLFCEGLRERGCRLAVVDPRQFEVISRSVKKTDTHDAKVLAEFLAKGLLPEVRMKDGIQARIASLTQTRDKLVKLRTILKNKINNLLAARGILIRKESLASEKGLVGVLRAPVEDLERVELEILVEQIRHLNESIEKVEAVLREQGPKLPGWKNLTSIKGIGDTGASILLSTIGKIEDFADEGKLAAYFGIVPRVSNSNETERSGRITKRGCKLGRTALVQCSLIAMRYSPYLRAYYERIAARRGTGKAIIALARKFLGIIYKTLKNDWVFEDFPNFVLVKT

SEQ ID NO: 455923 - protein, 391 aa, unidentified
MVCVGIDVAKDKHDCCILDSDGMVRADCFTIPNNMDGFKQLLQTIRNCTKKSDKIKVGLEATGHYSYNILGFLLDNDLAVHVMNPLHTNLYRKSLSLRKTKTDRVDARTIATMLLSDVDLKSYTDTAYHNEELKSLTRYRFDKVRERAKLKQSVSRLVTILFPELEKIVPSLHIASVYALLSEYPGAKQISEIHLTKLTNLLATASKGRYGKDKAIQIRDAARTSIGSVMPAKFLELKHTIKLIRELTSEIDEIEVSIQKIMDELNPPILSIPGVGIQSAAMILAEIGDFSNFESPDKILAYAGCSPSTYQSGKLTNCYAHMEKRGSRYLRYALYNATKYVCHWNPVFAEYLAKKRAEGKHYNVALSHATKKLVRLIYALQKSGKAYLAAA

SEQ ID NO: 455924 - protein, 343 aa, unidentified
MSTITLGLDLGDRFSRYAVIDADAQVIGEGSLATTREAMQDVFAALPTARVILEVGTHSPWVSRIVARCGHEAIVANPRRVRLISAAVRKNDRIDAVTLARLGRADPALLSPIRHRGETAQADLGQLRARDALVRTRTLLINHVQGTVKAMGYRVPSSTARTFALRARTALPPVLAPVLASVVDTIAHLTEQIAAADKSIAVLARERYPETARLRQIAGVGPITALCFVLTLEDPTRFADSRSVGAYLGLCPRESQSGDRSPQLRITKAGDPMLRRLLVTSAHYIMGPFGPDTDLRRWGLAIAARGGVNAKKRAVVAVARKLATLLHHFWITDVVYQPLRQAA

SEQ ID NO: 455925 - protein, 374 aa, unidentified
METIYIGVDFHARQQTICYLKTETGELVTCELKHQDKEKVRGFYAEFRRQVVVGLEASGYSPWFERMLEELGCEVWLGHATEIRRRARWRQKNDRRDAELILDLMLHHEFPRLHRGSVQSREVMRMLRYRQKLIKIRTMSKNSLQALALQAGVARRSQLFTREGQQELTAALMSPAMQWQREHWLQLLQPLNQQVLEAMVWLKAQSKGDVEVARLRTHPGIGLLTSLCLAHTLQPIDRFRNTRKVVAYAGFDPVERSSAEHKRFLGISKAGSRLLRHLMVEAANVAVRRDEDLKCFYQRLADRRGKPKAKVAAARKLLIRAYIMLRDEIDYAEFRRRAVAARLARLGHGPKVPEVVIGQPASAERQEPTHNRKK

SEQ ID NO: 455926 - protein, 367 aa, unidentified
MEKSSKVYVGMDVHKESIEVTLAEPGGELRRLGQIGGDRGSLLKMARKLQSRGGERVFVYEAGPCGFWIHRELAALGERCMVVSPALVPRRAGDHVKTDRRDSERLASLARAGELEAIHVPDIRDEAIRDLVRGRDDAVIAQRCVRQQLKALLLRNDIRYVGKTSWTGAHRRWLSELKLPEPAQQIVFEEYVDAIAVATGRIERLTRAIETETLTWRFAPVVAALQAMRGIQFVHAVTLIAELGDLTRFGSARSLMGYLGLVPREASSGEHRRQGSITKAGNSYARRALIEAAWAYRHPARVTRIIATRQTGLPKAACDIAWRAQLRLSAKYRRLNARHLHHNKIVVALARELSGFVWAIGQCVKPQ

SEQ ID NO: 455927 - protein, 421 aa, unidentified
MNMTSKSAQFAALIGIDWASQRHALCLYDCATAKRESSILEHTPEAIAQWARGLQERFKGKKIALCLEQSKGPLIYALLEYPFFVLYPINPATAARYRMAFKTSRAKDDPSDAQVCLELVLHHREKLNPWLPHDAPTRELSCLLQHRRAAVDLRTLLTNMLRDALKSYYPQALELAGQDLFAPLGCQFLLKWPSLQELHKARKESVRKFYYAHNCRRMDVIEKRLDAIAQMTPLCRDLALLEPAMVQVRMLARQLLQLGGALKEYDSKIEQLFAQHSDALIWESFPGAGPTLAPRLACAFGTQRSRYQSAVAIQQYSGTAPVTEKSGKNQHWVHRRWARPHFTHQSFFEYASQSVLHCSWAKLYLKEQMARGKAYPTAIRALAFKWQRIMFVCWRDRVPYDETIYRQSLQRRGSHLARKLN

SEQ ID NO: 455928 - protein, 315 aa, unidentified
MHKQSSFIGIDVSKNSLNVHVLPEDISYSFPYEPQKIKTLIRKLKQHKPVLIVMEATGGYELAAATKINEAELPVAVVNPRQVRDYARAIGKLAKTDSIDAYVIARFARDVRPEARENLTLKEHQLKELIMRRQQLIEMRTAEKNRLGTIYSKEVIKSIKRIIKIFDEQIQSLEDQLDREIKGNPSWDHKIELITSVPGIGASTAQTLLFCLPELGRLNRRQIAALVGVAPLNRDSGKLRGIRCIAGGRAAVRKALYMPVLCASTRWNKKLKLFYEQLVARGKKCKVALTACMRKMLILLNTMLKNDRFYDPEYC

SEQ ID NO: 455929 - protein, 344 aa, unidentified
MWTRGDRGSCYCVLDEAGEILLEQKVATTPEAMKQIFEKIPRGLIALESGTHSPWVSRLLRELGHQVLVAHAQKVQLISKSKRKDDRHDARTLARLARIDPELLGPVRHRSAKAQIHLTVIRARAELVSARTALVNAARGLAKSYGERLRKCGTEQVSRELAVELSAELREVLEPLLKEIESLNERIKEYDARMDKIARESYPQVALLKQVKGVGTQIALTYVLTLEDPHRFPKSREVGCFLGLRPGRRDSGESQPQMHISKEGDPYLRTMLVQGAHYILGPFGEDSDLRRWGLTLAARGGKNGKKRAVVAVARKLAVLLHRLWVSGEVYEPLRNSHQAMRAVA

SEQ ID NO: 455930 - protein, 350 aa, unidentified
MDETIAWLGLDCHSRQCVLAQLDDEGKPVGSWSVPTVHEALVKAVKAIPKAHRRLMLEECELSRWMARLLRPWVERLVVCDPRENHLLSRHHNKRDERDAFTLARLLRLGEYKAVWQPEDPRRVAFRHAAGAYEDSVRHQTRLKLQIKSEYRQWGVMTTGSEVFNPQKQASFLGKLPPEARRPIELFEQLLESALAVEKLARGHLIQLSREFPEVARLRKVPGIGAIGSSLFVAYVQDPRRFAKDAQFMRYCQLGIRDSSSDGKPLGYQRLDRGGYGTLKAISYRAWLTALRRGRGPVWEFYEHSLERTGNAVHARLNTQRKVLATMLHLWRNNQEFDSQRFLSSKPSVV

SEQ ID NO: 455931 - protein, 380 aa, unidentified
MDVHSTNFTLCSFEPGYGFEADKIFGQTQIKEDIFNSTVKYINKLKSMRPDVDVVCGYEAWCLGYNLHRKLKAKEIESVILAPTTMAVARNSSKKKNDYRDAITIAKCLASSAYKAVYIPDEKDENVRDFIRMRDDHKTALKQIKQQLNAFCLRHGHHYDKTKWTGLHLNWLRKLELSKLQRETVEEYLVTYETLTSKITALDIRIEDIASEERYAEKVNKLKCIKGIKTHTALSFVCEIGDFNRFKSADKFAGFIGLVPGECSSGNTERMLGITKAGNRHLRRLVVEISNTYRRGTVGRKSAALKERQKDMPKDVVAYADKATNRCQRKYQRMMFKGKNSNQAVAAVARELCCFIWGMMTGHHSRTAQAEASVYRSELD

SEQ ID NO: 455932 - protein, 322 aa, unidentified
MIKKDLEESNGGRTVVGIDPCSEFLQLAILAPNKKTEFKKLPLSPSITEEIAKSTVPETTQIAIESYGSYGKLFIYDLLKKGYDIREVNPHISKKLSSLYSEEHSDQKDAESLAKALLLIPDLPKISIMDKKQWLAKLTRTRKKLVKDLNGYLNRLHKALTESYGVIYKSFFKILFAKKALKFFEECPTINDSLSDKDVMKRLGETKWNLLKQAGKWEDDFYLETLRTEIRGFIEIIRCINSTKLAIEDKIHEIADQVEEMRILKTFPGIGGISGATLLSEIGDIDRFGQESYLSAYCGVSPVIWQSGTGRIRTKRRKRYSR

SEQ ID NO: 455933 - protein, 400 aa, unidentified
MNHNMLLYIGIDVSKDKHDICIKNNDGNVLKRFQIRNNKSDLNKLYTTVNNLKSGTGNSTRVFFGMEASGVYSFPLYSALKRDGYLVKLYNPIQTNGYRKMEIRKTKTDPIDAAIIADMLRYQEPPVSTAIDNLKLYQLRELCRVRQRNVEKRTKCKIQLVRDLDTIWPGYQSVMKSVYGKTSIALLKEYTVPSNVAVKPFEEVYGLIKKFSRSQMTRARAEEIYNHAENTLAVPEIDSIVSIEIKTLISEIELYNKQILAIEKKMKQIMKQIDSKITTIPGIASILGATILGEIGGVSRFSSAKKLVAFAGLDPIVYKSGKFENKTGHISKRGSPQLRSALFMAANVARQNDENIGDYYNDKIRKGKHHYSALNATASKLLKIVYWVLKNDKEYKVQLN

SEQ ID NO: 455934 - protein, 311 aa, unidentified
MTDDTIGIDISKATLDIHRLNDGKTMSFSNCPAGFKALSRFCAKTAVARVVYEATGAYHGGLERALGAHLPLVKVNPLQARRFAQAQGVRAKTDAVDAKMLAEMGNAFALEPDEPASGIQHDLKELRAFRSGLIKDRTSIINRLKTQTLSITSRQSKARLAQVDKQIAEISAELDRLISSCDTLAHSMKILRSIPGIGAVCAATILIEMPEIGRLDRKQVASLTGLAPMARQSGQWRGKSFIQGGRKIVRDALYMPALVAMRHNPDLKAKYQALIKAGKPPKVALTALMRKLIELANALIKVDRNWVKRGA

SEQ ID NO: 455935 - protein, 359 aa, unidentified
MRTQSNKLNFEGENIYVGIDVHLKSWNVTICTEYLHHKTFNQPPVPSILRDYLNTNFPGGTYYSAYEAGFCGFNIHFELKKLNINNIVVNPADIPTSQKEQILKNDSRDSMKIARSLRANELIGIHVPFIETLENRTLIRTRDVMVKDMTRFKQRIKALLYFYGISYPSEFQRSTNHWSRRFIKWLKEEVSLNTANENDALSLLIREVEQQRVLLLEINRKIHSLAISEKYVKEIELIRSIPGIGLITGVTFLSEIEDIERFPNTDKLAGFVGMIPTCHSSGEVENYGEMTFRKKTILRRCLIESAWIAVRIDPALTRCFSQLCKRMEPNKAIIRIARKLLNRMYYVLKKRQKYEYGVV

SEQ ID NO: 455936 - protein, 422 aa, unidentified
MSYCPVAGIDVSKRFSDMCILSPDNKIFAQEKIYHDEISINRANALLQKAERLFFRKPVIVMESTSHYHLILFQFFSEHGYDVIVVNPLQSNSMKDFSIRKRKTDRVDAFKLAMMYRTKTLRPSQIPQTATRALRQLCRHRAELLNDVSSYKNRLTALLDQTFPGYDKVFSDVGGVTSCAVLVRFPTPTILLVEEESELVEVIAAASKSGYSFAKKKAGLLISAAQKAQTLGIHSCADETLIVCTIQMLRTLSESVLQIEAAIDHLLAQIKEMRNNVSLLQSIPGIGSHSAALLLGEIGDISLFKKPKQLAAYFGLDPTERQSGSFRGTKNKLSKRGSPYARAALHMGVVNAICKHGKDSAANPVLLSYYEKKCKNKPAKVAQAASMHKLVFIIFAVLRDQKPFELKTPEQHAVEQGFVKAA

SEQ ID NO: 455937 - protein, 370 aa, unidentified
MVVPQSDGVNKRSQGSPCSSIIEGTTTMEYYAGIDVSLESSSVCVVDGSGRIVREAKVASEPEALTAWLQGLGFELARIGLEAGPLSQWLYRNMREAGLAVELLETRHVRTAFKTMPVKTDRKDARGIAQLMRLGWFRPVHCKSLPAQELRALLTARKLVLGKRIDMELCIRGILRGFGLKVGKTAPRAFETRVRTLIDGHPTLGAVADALLTARAVLAEQLRKLEKRLISLARWDTRARLLMSTPGVGVIIALTYSAAIDEPARFRSSRAVGPHFGLTPKKYQSGETDITGHISKIGDASVRTALYEAANIILTRPIRGCSSLKSWGMRVAKRAGMRKAKVALARKLSVILHRMLVDGTHFADKAVAKA

SEQ ID NO: 455938 - protein, 341 aa, unidentified
MQIRSIGIDLGKTTFHLVGLGERGKSVIRKKLSRKQLLAFTANLPPSLVGLEACSGSHFLGRALSQQGHDVRLIPAQFVKPFVKSNKNDYLDAEAIAEAVERENMRFVPIKTDDQLDLQALHRVRQRLVSRRTAVINQVRAFLLERGITFRKGPATLRRQMPEILENADAQLSPRMRNLLATLWQEWKQLEEQIDCLSADIETICIADPACQRLRQIPGVGPLVATAVVAAIGNGAAFHKGRDFAAWLGLIPKQYSTGGKAKRLGISKRGNPYLRKMFIHGARAAVLRLKRDGSLLGAWMNGLEARAPRNVLVVAMANKLARITWAVLSSGEPYRAAALAA

SEQ ID NO: 455939 - protein, 357 aa, unidentified
MTRISVGVDVSKNRSTVCIMDQDGKVIMRPFLVWHSTEELDFLADTLKRLNGEVRVIMESTSIYQYPIALHLKEKGIFISIVNAYKVKKFANTDFRGGKTDKKDSRTIASYGISYWDKLVEWQIPKDTYFNLDLLNRTYMNAKKHRQIILQELQHYIDCAMPGMDKELHSLNLNTKKDFMLDFVEKFWHRDEIVNMTEAEFTEVFTAWAKEKGYRPGKGKAAKIYAIAKSCIPYYPANPTVKTILQCIVDKLSGVNRTLVTIVTQMIEEAKKLPEYQIVREMPGVGDPLAARFFGSAGDIRRFKNSKALVAYAGIDSPPDESGDLSSTHRHITKKGSKVFRDTGYEIMMALRSQKRT

SEQ ID NO: 455940 - protein, 343 aa, unidentified
MGEVSTIGLDIAKSVFQIHGVDAGGAVVIRKRISRAKLLEFFATLPTCLVGIEACPSAHYWSRRLQGLGHTVRLMPPSYVKAYVKRGKNDANDAAAICEAVTRPSMRFVATKSEQQQSGLMLHRSRQLLVCQRTMLSNAIRGHMAELGIISAKGRNGTAELLKIIADEQDDRIPAAARFSLGVLARQYAAIREETVAIERRIHAWHRSSEESRRLEEIPGVGPIVATALMAEVGDWKTFSSGRSLAAWIGLVPRQHSTGGKERLGRISKQGNRHLRWLLVAGAMAVIRYARQHGTKRPWLARLMDRRPIKVAAVALANKIARMAWAMMVRGERFKEPKLLPAA

SEQ ID NO: 455941 - protein, 334 aa, unidentified
MDTETGEFGERRLEHGGGEAEKFYRDLQRRGISVRVGMEATGHARWFERLLEELHFELWIGDPLEIRATRVRKQKTDRHDAQLLLKLLLEDRFPRIWVASWENRDLRQLLWHRHRLVQMRTRIMNQLQAVALNEGVRQKKRLWGQAGRTQLESFVLAPWASRRRKELLELLDRLNPSIRELNAAVEQEATRRPEVRRLMTHPGVGSLTALAFVLIVGTPQRFACGKQIASYVGLVPTEESSGGRRRLGHISKQGNSLLRFLLVEAAQATVRSDSDWRRKFMHLAMRRERGIAKVAMARKLAVRLYWMWRKGWDYEQVKRFGSHAGQPGNPLGVQ

SEQ ID NO: 455942 - protein, 330 aa, unidentified
MDKAGVVSVGIDVSARELVVAIAGHQGEYRFGNDPAGHQALMAWLLRQGKQLRVCLEASGNYSLDLSLALHGEKRVQLGVVNPRLARRFAESLGYRSKTDPVDAHALAEYAARMPFTVWVAPSAAGLQLRSLVRTIAALTRMATQQKNREHAVRASQILTTVLAPELARHTRYLEQRMAKLRQKARRLVAKDPELERKWQQLLSTPGIGEVSALQILGELAVLPATLDARQWVAQCGLDPKQHESGTSVQGKPRISKAGNRYLRAALYMPALVAVHHDPGAAGFYGRLLQSGKAKLVALTAVMRKLLHGIYGMFQHGENYDGAKLFPSCS

SEQ ID NO: 455943 - protein, 313 aa, unidentified
MTSEGYVVGIDVSKRWLEVQVHGEAESRKIGNDLDGFTTLVERVKAIQPELVVFEATGGYESRAVKALSEAGFAVAVVNPTRVRRFAEGLGILAKTDKIDARVIAHFASVVRPPVNSRQTPLEEQLAAFVERRRQLLVELTAEKNRLSTCPDCVREDIEEHIAWLEERIDRLETKIQACIAQKPEWRERAEVIDSVPGVGAVTASTMVAELPELGHLNRQKIAALVGVAPFNKDSGPKKGKRRIFGGRSGVRRTLYMAALSATKHNPIIRAFYESLLKRGKEKKVALTACMRKLLVMINAMVRKGEAWRYIPA

SEQ ID NO: 455944 - protein, 392 aa, unidentified
MVVSVGIDVSKDKHDCFIVSSEGEVLADVFTIPNNIDGFHFLLQRIQDCTHAQDKIKVGLEATGHYSYNLLGFLLDNGLTTYVMNPLRTNIYRKSLSLRKTKTDRVDARTIASMLLSDAGLKPYTDTAYHNEELKSLTRYRFDKVNERAKLKSSIARLVCILFPELEKLVPSLHIASVYALLAEFPGAKQIAAAHLTRLKALLETASKGRYKRDMALEIRDASRNSIGSWMPAKSLELQHTIRLIRELDNEIAEIEEQIQAIMDELNSPITTIPGLGFRMAAMIFAEVGDFTRFDSPDKLLAYAGMSPSTYQSGQLRNCYPHMEKRGSRYLRYALYNATKYVCHWDPTFAAYLAKKRAEGKHYNVALSHAAKKLVRLIFAMEKSRQPYCLAA

SEQ ID NO: 455945 - protein, 374 aa, unidentified
MSYVTSIGLDVHARSITAVAFDPATGEVRSKRFGYAPAEVAAWTLAFDSPKAVYESGVTGFHLVRALRGLGVDCIVGAVSKMHKPAADKRKKNDRNDAEFLARQLAARNIKEVWIPDEECEAARDLSRVLEDVREDLTRAKHRLTHLLIRHGYAFDEIGPDGKRKGKWTRAHWEWIRSIELSEAAARDALDFYVSEVRHIEAQKKAIEKEIADYARADRWRGRVEALRRLKGIETMTAFSLVAEAGVFSRFESARAFSSWLGLTPSEHSSGERVSRGGIIKAGNTHLRKQLVESSWHYTRATTKRKRDQRGEEVPLAIENYAARGREAPCREAGSLCKAQSSPGGGQRGHRKRALLLGMGCGLHVGRGSRIETR

SEQ ID NO: 455946 - protein, 371 aa, unidentified
MNTIIYVGMDVHKENFTLSCYSIEEDAIKYQQKMKPDYKQVLKYLGEVRKRYPEEIEFICGYEAGSMGYVLYNQLKELGIKCVILAPTTMVQINNKRVKTDKRDSGNIAKCLAFRTYSAVHVPTVEDNAVKEYIRMRDAQKQSLKAIKQQILALVLRHGCFFEDGKSYWTIKHVNWLKSLDLGGVLQESLSEYLVTYGYLTDKITRLDKRIKELAEAESYQEKVSKLQCLIGVKTHTALSVVVEIGDFKRFSKAERLASYLGLVPGENSSGGKQNRLGITKAGNSQVRRLLVEAAQGYTRGQIGNKSADLKRRQSGNAPQVIAYADKANERLRRKFYRMTLKNNTNRNKAATAIARELACFMWGLMTNNIA

SEQ ID NO: 455947 - protein, 501 aa, unidentified
MATFCGIIGRALSPKYSLVTSITLHEAGLGGFDCGLVAESPMTRVVQPPPRVEVRTDSELRLHPYGVGIDCHSKFVQVCVLDSRSGQVQRHDREFKTTWSDLGRADDWIRTLVGEKPYRYTLESTGCYHRPVVLRLGPKASLVNPLLAGPSRRKTDVLDAYLLAYQSLTGLWPESYIVPLAVEQVRILLALRRKELRHALRCRNTLNNVLLRYGYTFGQLSWFRREDVRALLADLLQGRTPQNDYCSNIPIPNEVRDELARLIHQAEAHEGHAQYLHTRALEIVRRLPGSVLGGRTVNGDELLKRLVEVPGVGVGTALTFIAEVGHPGRFRDKKQVAAFCGCDPSLKVSAGKVTQHVRRKGNVVLHRALVQAGAAILRGDPPSRLGQWGRAIRGRHKKGGFKKACAALARKLSVILWSMWKDGTRWDDRLHGSMLEPVNRPLKGLLRPRVVKLLETAGITTTAHLAANQERLATIKGLGEKSLQDIRQLLSSRELWSSARS

SEQ ID NO: 455948 - protein, 343 aa, unidentified
MKIKRIGVDLAKNVFQLHGVDCKEQVVLQRRLKRASWLKVLLDKTEPGCEIGMEACTGAHHWGRLLQAKGYRVKLIAPQFVKPYVKSNKNDANDAEAICEAMSRPSMRFVEVKSVEQQDIQATHRVRSELITHRTAKGNQIRGLVSEYGLVAPQQMQALRMVIPQWLEDGDNGLTFRFRSLLNGLWEDLKTLDLRVGELDREIELIALNDPIVVRLQTLRGVGPMVATALVAAVGNGQQFANGRQMAASLGLTPRQCSSGNKERLLGITKRGDSYLRSLLVHGARSAVYAARNKEDRLSQWVTGLAARRHANVAAVALANKTVRMAWAMLRNETEYDPDWAIV

SEQ ID NO: 455949 - protein, 392 aa, unidentified
MQPVVGVDVAKGSSVAQAFRKRNEPFGKAVDIMHEKSGFEQFSGMLDMLQIETGLAPVVVLEATGHYHRALVSYLDRSGYTYYIVNPLQSKRAKGTQLRKVKTDALDAWHLAEMYYRGDVKPHRTWDETFTELQHLTRQHEFITGIFVQAKLNSRALLEQVFPRYEGLFSNVFSVTSLTILARCLEGGTADWIKIIQGGTRKSRSQQWAIEKVGKLEEMLLDWKEARRSPSQSQALLGMVTLLLTIIGQLDELEQQMEEMAAGLPEVELVKSIPGIGTKLAAAIVAEMGDIRQFSDAKQLVAFAGLDPGIFSSGKFTATSTRITKRGSKRLRRSLYLAVQCGMRKNANERICSYYEKKRKEGKPYKVVVIACANKLLHHIFAILQKGQPYQV

SEQ ID NO: 455950 - protein, 349 aa, unidentified
MSKIARLGVDTSKGSFELHGVDAKEQVVLRKRLRRKQLLAFLATLEVGEIGLEACGASHHWARALRQLGHQVVLVPAQYVKRYVPRGKNDRNDARAICTAMSQPWVRERLVPIKSLEQSAGQMLLGVRESLIKRRTQLTNSIRGHAAEFGLVAAKGLDKIEPLLVRIADDESLPALAREMFAALGEDYGELARRIARIDKRLLAFQRDNELARRLLEVPTIGPIGACLWVTKVVDPQAFRCGRNCAAWLGLTPKDHSTAGKQRLGAITRAGDESLRATLVAGATAYLRHVRSGRITPSPWLAGLLQRKPPKLVAVALANKTARIAWKLMTSGERYNPEHRRPREIGVAA

SEQ ID NO: 455951 - protein, 373 aa, unidentified
MNYNTVYVGMDVHKETFSLCCYTNEKELAEYSQKVDAHYSKVLNYLEAMRFHYGDDVMFICGYEAGCLGFTLYHQLTSHNVKCIILAPTTMSKPTGRKKVKTDKRDAALIARCLAHHDYSPVHIPTEQDEQVKEYIRMRQDHKLALKKIKQQILAFCLRHNYRYDTTKSHWTQAHLTWLRSLEPEGLYQEILTEYLATYDQLTDKLERLDKRIEELASKEDYQENVSHLSCLLGVKTQTALSTLVEVGDFKRFASAQQFASYLGLTPGEDSSGEDQNRLGITKAGNSHIRTLLVEAAKSYTRGKPGYKSKALKARQKGNPADIIAYADKANEHLRRRYYQLVLGQNKKANVAKTAVARELACFIWGMMTDNIH

SEQ ID NO: 455952 - protein, 370 aa, unidentified
MLENVAVRGSRYREPLTRRAAPVSPLASTAGELWDRCRSHARPNSRQTSIARTRQVTVAQIICGVDVSSISLEACIGLTGPARAFSNTAEGIAELLAFCRQQGVDLVAMEASGGYEKQSFALLWAQGLPVALLNPRAVRRFAEGMGLLEKTDRIDARVIAWFAAVKDSRPCDPASAQQQRLKALVTRLRQLTELQVAQRNQRLLVREETVLTSFSALLALVATQIRILEADIAALIAADPLWRKLDQAFRSIKGVADRTVARLMAELPEIGMASNKAVSKLAGLAPLARDSGKHQGKRPVRGGRRDVRAILFVVAGVVRRYDLDFAAFHQRLSAAGKPKKVIRVALAHKLLVRLNAKARQVRNEFVPLQA

SEQ ID NO: 455953 - protein, 451 aa, unidentified
MTKSKRRHTERDFTPTHPNAAAIDIGSRMHVAAVPPDRDPESVRAFGTCTGDLRRLADWFERCGVRTIAMESTGVYWIPAYEMLEQRGFEVVLVNARDAKHVPGRKTDVSDAQWLRRLHEYGLLRASFRPKGELATLRAYLRQRERLLDYSASHIQHMQKALMQMNVQLHHVVTDVTGETGMRIIRAVVAGERDPAVLATHRDRRCHASEAEIAAALAGNWREEHVFALGQALELYDAYHAKVVECDLRIEAVLRRLRDVAAKPVGRLPPARHRDKTANAPAFDARAALHAVLGVDLTQIHGLGPSLALKLIGECGTNLSAWPNAKHFTSWLCLAPANKISGGKVLSTRTRRSGSRAAALLRLAAVTVGRTQTALGAFYRRLSARVGKAKAVTATARKIATLFYNTLRHGIDYADPGASYYEDRYRARVLANLRRRAKSLGYTLHEMTTPG

SEQ ID NO: 455954 - protein, 323 aa, unidentified
MTIMTYIGIDVSKDSFVAAYPTKSGYTTKSFPNTTSGVRKFISSLPKESHCVMEATGNYSMLLLYLLQQANITVSMENPQKIKHFARAMLSTTKTDEIDAKLIAMYGEKMNPVPYKIPSESIILLKQKRTVLRQLKKQLTATLNLQHALSALPKQDPTSKVTVEKTISFLRKQISKMEEEITNLSNKEFNRQMTLLTSIKGISNTIASALITATGGFTYFSSAKQISRFLGLCPTYQQSGTSINVKGHINRNGDIYLRSQLYIAACASLRCNTACKETYERLRAKGKSGKGAIIAIANKLIRQAFAVVTNNRPYIDGYVSSFA

SEQ ID NO: 455955 - protein, 383 aa, unidentified
MTGTEPHAWETGLMDTITYVGLDVHKATVAVAVAAGGRGGEVRQLGVFENRSEILTKLAARLSKPGRRLSFCYEAGPCGYGLHRLLTRSGHDCVVVAPSLIPVKAGDRVKTDRRDALMLAKLHRAGELTPIWIPDAAHEAMRDLVRARATAGRVLSKARQHLQSFLLRHDQIYRGARAWTLAYRRWLTTVRFAHPAQQIVLQDYIHAVQDAEARLDRLTRQIEELLPSWAMAPVVAALQAMRGVALVVAVTVVAEVGDFRRFANARQLMAYLGLVPSEHSSGTSVRRGGITKAGNVLARRVLIEGAWTYRMPARVSRKLHDRNEKLSPEIRDIAWKGQIRLCSRYRRLAAAGKPKVVVTTAIAREMVGFIWAIARIAQPTLQG

SEQ ID NO: 455956 - protein, 457 aa, unidentified
MRKKSKRTLGVEEARPFAGMSRVNKDAAGVDIGAVEIVACVSQDESTQIVRAFGNYTVDLQNIGKWLKEHKIKTVAMESTGVYWIPLFEELERQGFECLLISSRSLRRVPGRKSDIIDAQWIQTLHNYGLLESSFRPEGELAALRTLLRHRGQLLEHRAPHVLHMQKALLQMNVQLSQALSDVTGDTGQAIIRAIVAGERDPQKLAALRNRNCKKSVEEIGRALTGTWREEHLFVLKQALELYDFYTKQVESCDMEIERMYALTRPDWEAGKVKPLPPKKKQSHSKNAPEQKEEIRQHLKRICRVDLSVVDGIGVSLAQTIIMEVGTDMNKFPSEKHFCSWLGLAPKHEISGGKVLKNKTLKTKNRAGQAFRMAAQSVKGSDCVFGSRYRRLRARLDNRQATVATAHAIARVVYRMLKHQVEYEELSVEEYEQEYKKQQVKYLKKKAEKFGFQLVPA

SEQ ID NO: 455957 - protein, 347 aa, unidentified
MSISMIGLDTAKTVFQIHCVDEAGRAEIKRKLRRNDLIAFFEQQAACTVVMEACGAAHHWARMLSGLGHTVKLIAPEAVKPFVKKGKKNDAADAAAICEAASRPDVKFVPAKSVEQQGVLALHAARSLLVKQQTMLANAMRGLATEFGVTVPKGIRKLDELMALVDTDESIPKQAKQAITGLHDYGNNLSEGVETFEAEIVAHARRDETARRLATIPGIGPITASLIAATVGDITLFKTARQFAAWLGLVPRQNSTGGKTRLGRITKTGNREIRKMLVLGATSMVYRADGWNSAAGAWLRSVLERRPVRLVTVALANKMARIAWAVMTRKEVYRPKGGVVAVAQAAA

SEQ ID NO: 455958 - protein, 381 aa, unidentified
MSAATRRSDCNGETVLFMAIEVSDKTWKVGTTVSPAQKARTKNVPGGDVEALRREIERAKKRFGLTEQTKVVSCYEAGREGFWIHRWLESEGVINAVVDPASIDVNRRKRRAKTDRLDVFKLLSNLMRWWAGEKKTWSVVVVPTKRDEDARHFHRERETLKKERTAHGNRMKGLLKLHGISQMKIEGGFIEQLGKLRLRDGSFLPPQLRQRLEREYQRLVFVENQIELLARQRSEALRQSNDERIAKVRKLTQLRGAGEVGSWTLVMEIFGWRKFQNRRQVGSLVGLTGTPSDSGATNREQGINKAGNAHVRALLIEMAWSWVRWQPDSEITLWFNRKFGGAGKRHRRIGIVGVARRLLIAFWRYLEQDIEPKGAIIFKAP

SEQ ID NO: 455959 - protein, 345 aa, unidentified
MKKRIVGVDLAKKVIQVCVVKANKIVSNDEVSSAQFTSWLAMAKPAIIVFESCAMSNYWKQVAKDKGHDARIISAKLVAQIRQNQKTDKNDALAIVQASQLVDVQFLNGKTFEQQELQSIMRMRELVVKHKVALRNQIEALLLEFNIRISPRSGGLCGTVQGVLEDAENGFCMPFRQALNATWKLYLQTVEDIAEKDKFLVQAIKLHPECEKLLALEGVSTINAVNLYIAIGCAEAGTFKTGRDASACIGLTPLQHSSGGKTKLGSIGKSMKNVALRSYLVNGAMSVINHVDKREPRTKKEKWLKQLLERKSKKCAAVALANKTVRTAFALLTQGTEYKAEPLVA

SEQ ID NO: 455960 - protein, 344 aa, unidentified
MTITTIGLDLAKSIFQVHGVDAKGAVAARKTLRRSQVLSFFSKLPPCLVGIEACGTSHYWAREIARFGHEVRLMPANYVKPYVKRGKSDANDAEAICEAVTRPTMRFVAIKSAEQQAALSMHRTRDLLVKQRTQLVNMIRGLLAEFGLDIPRGIERALLIAKRILDGEALEIPEEAAKVVLMLSQQAFDTHSRIQGIDRDLQRWHRSSELSRRLETIPGIGPIGATALAASVTDPGQFRSGREFAAWLGLTPRQNSSGGKERLGHITKMGDRYLRKLLFVGMMSLVRRAKSKPESVDPRLIDLLARKPVRLAAIALANKTARIIWAIMTRGGTYSASHVPTLTT

SEQ ID NO: 455961 - protein, 309 aa, unidentified
MKKEEVVYCGIDVAKSHLDIALCGERWRVANTQTGIGGLVERLKAAAPKKLQVICEASGGYEQALLGALPEAAVPVTLVQANRVRQFARACGILAKTDRIEAVVLASFGQALKPLPSPAPPLHLLRLRELDRQRCHLSRLLVAEQNRLAQLRCAQLRRLARSLIGKVQKQIASIDQRIASLIEQDQTLSAKAKKLTSFTGVGTRTAALLLAQMPELGRLNRRQVAALAGVAPYNRDSGSMRGKRCIFGGRRALRSGLYMAALAAARRNHILAPFYQRLLAAGKPPKLALTAVMRKLLIALNTALSPYPA

SEQ ID NO: 455962 - protein, 319 aa, unidentified
MQSKLTFGMDIGKNEVVVACHEGAFAILKMANAVAGLRRWLGSVPAGSRLGLEATGGYHEPVAELAYSLGFTVYILNPKDVHFYARALGARGKTDRLDAQIIAAYVAEHCARLHPFTPLSADEKLLRELARRRATLVNAKSMLQQSLRVLPGFEREGRELLRAMGSFADRLERKLAQIAARSSERATLVKRLQTIDGVGTLTSIRCATLFTRVPLHSSDAAVAFFGLDPRPNDSGQHRGRRRLSKRGPSEDRRLLYNAAMSAIRTPAWRPLYLHLRNRGLASTEAIIIIARRIVRIAFAMYQNHSNFNPRLVPRPYCPA

SEQ ID NO: 455963 - protein, 342 aa, unidentified
MDTIGLDLHKRESQLCVLTEEGEVIERRIVTSRERFTAVLGERPRARILLEASTESEWVARHLEALGHEVIVADPNFAPMYATRRRGVKTDRRDARTLAEAGRLGAYRAVHRASAAQRHVRAQLAVRDALIRTRTRYVSVVKALVRRDGLRLPPGDPVHTEAKLAALPLAPALANEVAPLRGLLDPLNAQIAVADTRLAAAAAADPVVERLRTAPGIGPVTAVAFVATLDTVTRFTSAHHVAAYLGLTPREYSSGEQQHRGRISKTGSPRMRALLVEAAWRVLRSPQAAAAPLRAWAERIAQRRGRSVAAVALARRLAGILYAMWRDGTDYRAPRPTPEVAA

SEQ ID NO: 455964 - protein, 338 aa, unidentified
MSKFSGIDLHSNNSVVVVSDEADRIVYQQRMPNELPVILQALEPHRGELVGVVVESTYNWYWLVDGLQAAGYRVHLANTVAIKKYDGLKYSGDFADAAYLAQLLRLGILPQGYICPPARRVVRDLARRRMQLVRLRTMQVLSIENVLSRQTGHRLKSNEIKRLTPEAVAGLGFSADVALSVQANVAVMRALQEQIDTLERRLLERVKLEPAFVLLKSVPGIGVTLATVIMLEVCDITRFASVGDFSSYCRCVGSVHESNNKKKGAGNTRNGNEYLSWAFVEAAHGALRSCPQAKCFYERKKCQRNATVASKALAHKLARACFHILRTGKPFEVQRCFH

SEQ ID NO: 455965 - protein, 332 aa, unidentified
MVIIGCDLHTRYQVIALLDTATGESMTRRLEHESGEARRFYAALEKGSLIGIEATGYTQWFERLMAEVGHELWVGDPAEIRARAVRRQKTDERDAEHILDLLLTKRFPRVWVPTPEERDVRQLLKHRDKLVKMQTSVRNQLHFLAMSQAVCRKRRLWSEHGRTELEGLKLGVWASERRQELLEFLDRLGPRIEELDRAVKAEAAGRPEARELMQELGVGPVTALAFVLTVGPIERFPRSRQLVSYLGLNPREDSSGGHQRLGHISKQGNEMLRWLLVEAGHTAARCDPQFRQQYAHLKFRRGGRIAKVAIARRLAVRLYWRLRRYAAGSHVQ

SEQ ID NO: 455966 - protein, 334 aa, unidentified
MENIALIGIDLGKNSFHIHCQDRRGKAAYRKKFTRPKLIEFLATCPATTIAMEACGGSHFMARKLEELGHSPKLISPQFVRPFVKSNKNDFVDAEAICEAASRPSMRFVQPRTESQQAMRALHRVRESLVQDKVKTTNQMHAFLLEFGISVPRGAAVISRLSTILEDNSLPLYLSQLLLKLQQHYHYLVEQIKDLESQLKRKLDEDEVGQRLLSIPCVGTLTASTISTEIGDGKQYASSRDFAAATGLVPRQYSTGGRTTLLGISKRGNKKIRTLLVQCARVFIQKLEHQSGKLADWVRDLLCRKSNFVVTCALANKLARIAWALTARQQTYVA

SEQ ID NO: 455967 - protein, 420 aa, unidentified
MKSFVPVAGVDVSKRFSDLCVLSPDNNVLLRQKIYHDMVSMKLAEKKLHEIELECGARPVVVMESTSHYHLILFQFFTDAGFEVVVVNPIQSGALKNINVRKVKNDRVDAYRIAMLYRLKVLRPSQIPTSSLRGLRLLTRQRSELKGDVARFKNRMTAYLDQIFPGYGEVFSDVGGSASRAVLHMCPTPEELLNADGSLLAKAICEAGNKGPKFGAEKAAKLREAAGSAQVIGVRSASNASLIKNVLDIIEGLLAAIQRIEGEIKELVTQDTRLDEDVKLLCSIPGIGFSSAVVIAAEMGNISLFRKPKQLAAYFGLDPGERQSGTFKGRKNKLSKRGSPQVRAALHMAAVSSVSRKRDGTYRNPVLAEYYERKCAEKPCKVARVAVMRKLSNIIYAVLRDRRPFELRTPQEHMALLAAA

SEQ ID NO: 455968 - protein, 424 aa, unidentified
MAEQNLAACPEPKFAAYVGIDWADQKHDWAWQPTDGGPKRMGQLAHTPDAIHTWVGQVSAAFGDQPVAVALEQSRGPLLYQLMKYPNLVLYPVHPSTLASYRQSWRPSGAKNDPSDTGLLLDLLQRHRDKLRSLQPDTVATRTLQFLVEERRQWVDDRTCFGHRLTACLKLYYPQVLDWFDDVTAPITLDWLERWPTLEQLQRARPATIEQFLKEHGRRDADKVHQQLQQIQPARPAVTDAAVIDSCRLNLQTLVGQLKPLREAIAGYDRQIESVVQAHPDFVIIDSFPGAGLAMAPRLIAALGTQRDRFDSASSLQCFSGIAPVTSQSGRQCWIHWRWACPKFVRQTFHEWAQHSMKKCEWARSFYQRQRDAGKSHHAAVRALAFKWLRILFRCWKDRVPYDEAKYLRSVRDRLVPKNLLKTI

SEQ ID NO: 455969 - protein, 452 aa, unidentified
MGSARARRIPAQLVEDEEYQLRHERVAGIDIAKASAMVCTRLPAVRDGGRRVSRVGEVPATVAEAAALAGRLLADGVQAVVMESTSDYWRLWYYVLEAHGLAVTLVNSSQARQLAGRPKTDRLDAQWLARLAEMGLLRPSFVPPAEIRELRDYTRGRLHLVHDRTRAWQRLEKLLEGALCKLTSVTSIKTKTARLIIRAIIAGQRDPRALAALAEGSLRGRQGLTGMIISGSFVHMAKTLLDLIAYLDEDVEILEGKIAACLEAIPAAQGVDDGGATGPGAGAGPDAAVLPAAERLAEIPGVSLDLARAIIAEAGLDMTRFRTAAHLVSWAGLAPVASQSGPRSRKPKKGQGNSYLRGFCTQAANGAGQTDTFLGERLRRIARRRGGARARCAVARSILIIIWHLLSNPEARYADLGPDWHARKTDRDKKILGHLRQLRALGVDVTVTERAA

SEQ ID NO: 455970 - protein, 319 aa, unidentified
MQCIGVDISKQELVVFDGRKERVFPNARGLPAFRRFVGQFEKAFIVFEPTSTYSRRLETFCRTKQIPCCQLNPRVVPHLRQVGKGRSKTDSTDAELLYRYGIERGYTETTQLTRDVLVESIQARLAIYRMTQKARVGLQNMREALSHDPEIPTAFLEELVVEIDAMRAKESLQLQQAERLIGDCEDARRSFENLLSVPGIGPITAVTLLMIFRKYPGTNRNRIIALAGLDPVQFQSGTSVHRKSRISKRGHSEVRRRLFEATLSAARCNPGVRSIYRRLKEQGKPDKVARIAAARKLLLIAHAIYKRGEPYEAPIQKEG

SEQ ID NO: 455971 - protein, 340 aa, unidentified
MGEVSTVGIDLAKSVFQVHGSDPSGTVVFRKKLRRAQVLAFFSTLPRCVVAMEACASAHYWAREIALAGHDTRLIPPAYVKPFVKRQKNDMADAEAICEAAQRPTMRFVQGKTAQAQACAVVFRTRDLLVRQRTQLINALRGHLTEFGYVVRQGVGHVGQLVAIIRDQTSDVPAQARPVLAVIADTLQALQAQIALLDREIAQRAKDDAVAKRLMTIPGVGPVIAAALVALAPAASTFRRGRNFAAWLGLIPRQHSSGGKERLGRTTKMGERSLRRLLILGASSATKVAARDPDKAGAWLAGMLSRKPRMLVTVALANKMARIVWALMAHGGCYRAPATA

SEQ ID NO: 455972 - protein, 337 aa, unidentified
MDYFAGLDVSVKDTSVCIVDGTGKIVREGKVASEPEALLTVLRDTAYRFKRIGLEAGPLSQWLFSALAEADLPVICVETRHMRAVLKAQINKTDRNDARGIAQMMRVGLYRPVHVKTLRSQKLRMLLTHRKLLQAKAIAVENDLRATLRNFGLKVGAVGAVKFEARIKELIDNFPDLVALVEPLLVVRRVLREQISILHRRVLAAVRYDEVCRRLMTVPGVGPVVALTYRATVDVPARFRKSKSVGAVFGLTPARDQSGESDRPGAISRCGDQMMRAMLYEAAQAMLLRSAKWSWLKAWAMKIAKHRGMKKAIVALARRLAVIMHRIWIDGTEFRWT

SEQ ID NO: 455973 - protein, 359 aa, unidentified
MGELSKVGMRTVGLDLGDRFSRFAVLDAEGQLVEEGRVATREKALRQRFSGCERMRIALETGTHSPWVSRLLKGWGHEVVVANSRKLGLIYENRNKGDRVDAIYLARLARVDPQLLSPIEHRGAQAQEDLALLRSRDALVHARTQLINHARGLVKSVGQRLPGCSSRAFSKKVLGAIPESVQPGLLPVLEMITCLNDQIKAMNRRLEALAQESYPQTKLLRQITGVGPITSLAYVLILEDPGRFSKSRRVGAYLGLTPGSKQSGDSDPQRRITKQGDSLLRRLLVGSAQYILGPFGPDTDLRRFGLRIAQRGGKNAKKRAVIAVARKLAVLLHHLWRWAEVYEPLYQETRKASRRGQAA

SEQ ID NO: 455974 - protein, 496 aa, unidentified
MSAFLRRSGQNPHRWATKGMKSKKELLAIKKHIKRKSAKAKHNRLLGIHNPHAAGADIGATEIYIAVPPDRLEMNVRCFGTFTQDLRAIVQWLREYKVTSVAMESTGVYWIPLYELLEQEGFEVYLVNARHVKNVPGRKSDVQDCQWLQYLHSVGLLRGSYRPAQDICAMRAISRYRDNLLHFGAQHLQHMQAALDQMNLRLHHVIADLSGLTGMAIIEAILAGERDPRQLAKLRDPRIKASQETIAKALEGNWRVEHLFVLGQALQSWKQVQQQLGQCDQKLEELSSQLEGKIDLANSPLPPSAKYCGREPRSKNQPNGPWREELYRHFGVDLTEVPGLSLGVVQTLFVELGADLSAFPTPRHFAAWMALCPDNAITGGKVIRRGTRRNRQRIRLALRLAATSLHHNKTHLGECFRRLRARLGAPKAITAMAHKLARIIWHLITHRVGYDESIFAEREEQLLRRKQRQLRNLAHSLGFTLVPNPRPAATSNAEVS

SEQ ID NO: 455975 - protein, 346 aa, unidentified
MTNVTIGMDLGDKNHEVCVLDQKGHLMDRFVVGNTRKQLRKVFQPYAGALVAMENGTHSPWISRDLKALGCKVLVGNARKLRMIWARSQKTDVKDAEMLARIARFDRQLLYPIRHRSQQAQIDLEQIKARDLLVSLRTDLINHVRSTVKAIGERLPACSADCFGKRAQTFMPDSLRTALMPLVEQIASLTQQISGYKCKIEQLALTVYPETACLRQIQGVGLITSLAFILTLESPDRFDKSRAVGPHLGLTPRQDQSGSCNKQLRISKEGDVYLRRLLVSCAQYILGRYGQDSDLRRYGERLIARGGRGAKRKAVVAVARKLAVLLHRLWSTGEVYQPLYNARKTA

SEQ ID NO: 455976 - protein, 344 aa, unidentified
MVYVGMDVSSKSFVVHGINERKRVVWRGEVAPTPSGLKGALRALGEQAKLVVFEAGNQMKWIARELKRMRGVTLHVVHPNEVKWISQSSGKTDKVDARKLAELARGDVLPRKVHIVEGHVRELRELVGARHTLQSKRVALINTLRGYLKQEGQRLPEKFFGRRDWQAALAQVKLGESTQQIVVSFKAGIEALAKAEGELTRRIVAIEDRRIELLESIPSIGELSARVVLGALDEAQRFDNKKCVAKYGALSPSIYQSGDVVHLGRINRDGRQEVRRVLLQCAHTLVRMRSPGARPLRAFYERVLKRRGKKIAIVALARKLLTTAYGVLKTGTFYDPQKLLPFAA

SEQ ID NO: 455977 - protein, 351 aa, unidentified
MIVAHHYDHVVGVDTHARTHTYAIVATKTGEILGTKAFPVTTAAIDRAIAWARDLAGGLVLFAMEGTGSYGASLGRALKRAEVAFCEVRPPKKSSRVRGKTDEIDAIAAATSAMGIELDALIRPKADGLRNALRVRLDARRDMEIRRTSARKQLNALVRTADFGLDTRRALTDRGVQKLADLDVHHDDVAQRIIRGEAVRLASTVIELGRQMRENREALAELVELLAPGVQQIYGVGPVTAAVAIAAYSHPGRVRNEAAFAALAGVSPIPASSGNTTRHRLNRGGDRQLNRALDVVARVRMVSEERTRAYVDRRTSEGRTAREIRRCVKRYIAREIFKALEARMGASSATA

SEQ ID NO: 455978 - protein, 312 aa, unidentified
MDAIFVGIDVSKDRLDVAVQPIGESFSVSRTGAGIEELAKRLKAMSPKVVAVEATGGFETVVAAGLAGANLPVVVVNPAQVRAFANALGKRAKTDPIDAAVIARFAEATKPQIRQLPDETTRMLADLVARRRQIVEMIAAESQRARRLTSARLKKSIARLRKALEKELADLDGEISDHVRGSPTWAEKEDLLASVPGIGPTIARSLIAELPELGSLDRRQIAALVGLAPWTRQSGQWRGKSFIGGGRANVRRVLFMGAMVASRFNPTLKLFRDRLVAAGKPKLLALVAVARKLITILNAILRDRRPWQLLSA

SEQ ID NO: 455979 - protein, 320 aa, unidentified
MLNITVGIDISKAKFDAAILFENNKIKTKKFENKPSGFSALTDWLKNHEVLNAHVCLEATGSYSEALATYLFEANYTVSVVNPAQIKGFAQCELARTKTDKADSQLIARFCRAINPQCWQPKSEHIRELQAWIRRLEALQDLYYQEANRLEVAPSYTKSSIQEVCEILAKKVDEVKKQIADLIEKHPDLRNKQQLLETIPGIGEATIAQILAFIGNVEDFKNAKQLVAFIGLNPKQSQSGTSVNGRTKLSKTGDARLRKSLYMPAIVAKRYNPTIKAFCERLKLSGKPTMVIIGAAMRKLVHIIYGVLKSGRAFDANWAA

SEQ ID NO: 455980 - protein, 353 aa, unidentified
MKHYIGSDAHKKYSIFVTVNEKGQASSPERVPHEKDLYRKYLATLPSESPIALESVGNWYWMIEAMERAGHQPILVNPRKAKLLLGNYNKTDKLDAKGLAMLNLNGSLPAVWIPPAELRDQRELSRMRMSMVAVRTKFKNRIQSTLAKYAISFNEEVSDVFGKKGRLLIEKAIQELPPETRHSVEEQLILLDQVSAQIEEIEKHIRQVVEVTPMMQLIKSLPGVGDILAIVIALEIGSVERFGSGEHLASYSGTVPRVNSSGGKTYYGRVKPDVNHYLKWAFIEAASCIGLQQKRMEGRHVVDLLKRVQKQKGYAKAAVAVGRHLAEATYHMLKRNEPYHEPNLKKAVSSSQG

SEQ ID NO: 455981 - protein, 366 aa, unidentified
MFHKLNSAATLIQRTTTEAPRDHMYYIGLDVHKRTISYCVKDAAGHVHQEGKIGSTRCELDAWIKTVPQPRMMAMEATIFTGWIYDHLLPHAEKIKVAHPLMLRAIAAAKKKNDKIDAAKIADCLRCDFLPECHMASTAIRDRRRTLRYRSLLVKQMVQMKNRVSGLLLETGVSYNKSRLHNVGYFADLMSTNEEVNESIRPLLKISREHIVRVQRLDYALVSWLERDPLLQERLRRLRTVPGVGPITALTWALEIGDFTRFRSIKQAISYCGLCGDERSSADKVMRMPLSKQRNKHIQRVLIEAAKLAPRECHELAMVRERELQKGNPNRATLAVARKMVSYMLAVERRKQDFVPAENFKCTAAV

SEQ ID NO: 455982 - protein, 369 aa, unidentified
MAKSITYVGLDVHKDTIAVALAAAGLRGEVREHGKIPNAPGALRALAVKLAAAGRELRFCYEAGPCGYGVQRQLTEAGHECAVVAPSLIPRKPGERIKTDRRDAINLAKLHRAGELTPVWVPDQAHEAIRDLVRARQAAVRTLRQARQQLSGFLLRHGRHYHRPAWTQLHRRWLASLKFDQAVHHIVLEDCIAAVEAAMARRDRLERHIEAVLPEWSLAPVVEALQALRGVRLVAAATLVAELGDITRFTNPRQLMAYLGWVPSEHSSGRTRHQGGITKAGNGAARRMLIEAAWSYRFPARISRELLLRQERQVKPIRDIAWKAQERLCRRYRKLARAGKQPTVITAAIARELAGFIWAIAKQVQPMAT

SEQ ID NO: 455983 - protein, 341 aa, unidentified
MLIIGCDYHPSVQQIAWTDTGTGECGERRLGHCAEAERFYREQKERGASVRVGIEATGHSRWFERLMAELGFELWIGDPAQIRAMQVRKQKNDRRDAEHLLKLMLKDEFPRLWVPIPENRDVRQLVWHRHRMVQMRTRVMNQLQAIAMNEGVRRKRGLWSQQGWAQLESLTLSPWTSRRRQELLDLLDRFDPSIDELTAAVEQEAARRPEVERLQTHPGVGPVTALAYVLVLGTPDRFACGKQVGSYLGLIPCEDSSADHWRLGHISKQGNRLLRYLLVQSALSAARVENDWHRQYAHLAMRRNHAIAKIAMARKLAVRLFWMWRRGWDYQEWKKFGSNVG

SEQ ID NO: 455984 - protein, 362 aa, unidentified
MEKRLFVGIDTSKMGHQVCLMNPTKIKQDVYIENNRAGFDRLATILSQYREEGYQVTVGCEPCGHYWENLGYRLVEDGYAVQLVNPFHVNRYKEIFDNSPQKDDQKDSRIIATLVKDGKSLHNNLPRGGYAELRHLTHLREQLLKEGTRLRNRLHGWIDRYFPEYSTLFCDLLGVTCLGLLKKYGGPRGMVEVCVGELTGEVRSLSRGKLGRKRAQEVQARAARTIGQTIAPRAARAELNWSLTRIESWREEVKGVERLIKAELIQQKEDKYLQSIPGVGWWGSAVFLGEVEDIGKYPRAKSIEKLAGLNLYRKKSGKTESSLRITRRGRSLLRKMAYQLAVSGTHGAEEFREFYQRKLNKG

SEQ ID NO: 455985 - protein, 404 aa, unidentified
MVDTTVSDFMKGRYNLMIYIGIDIAKFNHFAAAISSDGEILIEPFKFTNDYDGFYLLLSNLAPLDQNSIIIGLESTAHYGDNLVRFLISKGFKVCVLNPIQTSAMRKNNVRKTKTDKVDTFVIAKTLLMQDSLRFMTLENLDYIELKELGRFRQKLVKQRTRLKIQLTSYLDQVFPELQYFFKSGLHQNSVYALLKEAPTPNAIASMHMTHLAHILEVASHGHFGKEKARELRVLAQKSVGVNDSSLSIQITHTIEQIELLDSQLFHTELEMANLVTCLHSVIMTIPGIGVVNGGIILGEIGDIYRFSEPKKLLAFAGLDPSVHQSGNFQAQRTRMSKRGSRVLRYALMNAAHNVVKNNATFKAYYDTKRAEGRTHYSALGHCAGKLVRVIWKMLTDEVEFNLE

SEQ ID NO: 455986 - protein, 349 aa, unidentified
MAEPRISYTGERIDVGIDVHKETYTVTCLRQRQIVKTATVPADPARLAESLPRWFPGARLFSAYEAGFSGFVLHRVLTTAGITNIVVNPASVAVAANDKVKTDRRDAKKLARELADGRLRGIYVPTEAEELARLLPRTRAQLVAHRATITRQIKAKLHQFGLITPGSRRLMSSRYLREIAAWELPPELHVSLTLLADQWRFATRQLLEVRRLLREQAKAQAALETVYRSVPGIGEVVARTLATELGDMTRFANERALFSYTGLTPSEYSSGAAIRRGHMSRQGVSRLRHVLVETAWRALSGDPILQAMFDRIAATRGKQRAIVAIARRLIGRIRACFRHGTTYAVGTVG

SEQ ID NO: 455987 - protein, 269 aa, unidentified
MDIIVGIDVSKDRLDIAIVPSGEVFHVGNGHAGIEALVDRLKAKHSADGPCVVALEATGGFEMLAAAELSSAGFAVIVINPAQVRAYANAIGRRAKTDPIDAEENRLRMVVETQAQKSIKRLLAALRRELDSLDADLDEQIRKSPIWRVRERLLVSVPGVGSTTARTLLAEMPELGSLDRRQIASLAGLAPWTRQSGQWKGKSFIGGGRGKVRAVLFMAALVASRHNPMLKVFRDRLVAAGKPRIVATMRKLLTILNAIIRDNKPWQNA

SEQ ID NO: 455988 - protein, 433 aa, unidentified
MSEPDTAGTVAGFGGFTHFGGLDWARYQHQLVVVDPTGRIVLSLAFANDADGWAQFRQKVTAFGRLAIAVETNCGPAVERLLEAAVAVYPMNPKAATRYRDRKAPAGAKDDELDAWSFADALRTDGHGWRELAAQDPLTAELRLLCRDEVKLISQRTALVNQLQAALCEYYPAALDAFDDWTGAAGEGPWKFVVAFPDPQALVKAGKRKWEKFLHTHKLYRPQTAQKRLAVFADAARSASPNPAVTRAKSLLAVSLAKQLCLLQSQLNEYRVRIASLFRDHPDHDCFGSLPGAGPKIAPRLLSELGSNRQVFGSAEALQNYAGTSPLTRQSGKMRIVSVRYACNKMLRSTVHLWAELSRRGCVWAEAYYQKKREEGMAHAAAIRCLGQRWIKILWKMWQENKPYDEARHTLDQVKHGSWVVKLLPQTPPPEPA

SEQ ID NO: 455989 - protein, 358 aa, unidentified
MRGLQKDTIAALKKPIGGAEVKLYGGVDLHSTNSWIGIIDKKEKRIFTKKIPNELPEILHALKPYRKDLVGIAVESTFNWYWLVDGLMDHGYSVHLANPSAIKQYEGLKHSDDEREAFHLAHLLKLGILPEGYIYPKEERPVRDLLRKRLQLVRHRTSHILSFKNLVSRNLGIQMSSNEIKGLKEEDVEVMLREEHLVLAGRANIATMHFLKERITEIEKAVVKKAKLRKEYLKLLTVAGVGKILALTIMLETGDIARFPDVGNYVSYCRCVGSTRVSNGKNKGEGNRKNGNKYLSWAYVEAANFAVRGYPYVRSYYQKKAAKTNAIVAIKAVSHKLSRASYYVIKNQEVFDPQKAFV

SEQ ID NO: 455990 - protein, 356 aa, unidentified
MLAEVVDAVVGIDTHRDTHEIELADRTGIPIATTTIGNDSAGFADLLEWITTHAPGPRVAVAIEGTRSYGVGVARAVAAAGLAVIECEQPNRKIRRGRGKSDPIDAHLAVLTALRMDTTRLPVPRADGDREALRILLGARDELTTAQTAQINRLRALLLDGDDRDRQLARATLPEPVLTALARRRCPPDADRATAVRHHELRRLAVAVRATARQLKANRAQLQAIVDDLAPGLTDRPGIGPVTAAQAITSFSHPGRCRHDAAFAALAGTSPLPASSGRTVRHRLNRGGDRALNSAIHTIAKTRMRCCDRTRAYVTRRTAEGKTDREIRRCLKRYITRELYRALTDAMTPTTTLDNR

SEQ ID NO: 455991 - protein, 351 aa, unidentified
MKQLTIDTIIVGVDIHKYSHTAVAQNCLGQEIDILEFDNETLAKFERWVDGLGRDVLIGLEDTWGNGYHLTTTLSKGGYNFVYINPVITSNERKKTTSREKNDYLDAKRVGKAILNRSEEALPASKIITQNRDKIREIDLLIQERRDLVKDQTKLKNQLHVLLHQHYGNGYRNNFKNIFSKKALTYFKRDLIKDTVTLSSSIIRRIKRLENIQDQVQDIDKTLNILSKEIPEIRKLTTISGCGIINACKIISEIKSINRFPNSNHLARYAGIAPIDKSSGRTKRVITNPGGNRKLNNVIHAIALSQIGNRGCGYGKEYYQRKIKEGKTKLWSLRCLKRQIIKSVYKVLVEE

SEQ ID NO: 455992 - protein, 370 aa, unidentified
MSDVSVSYAAFVGVDLHKCTVSLCAVDPAGEPISALTCDTKCVDRIAQWLAALPRPTHLAVEAVGFVEWFIDRFRSCVDKIDIADATELASRRGKRRKTDRKDAADVARRLARRECPLGWIADEPVMQLRKLGRHWRHLSRTLTRAKHAMQSMLLAANLRGPKFDGASAQKWLLAHGHLLKDVQREAFGNLLDIVCLIERQRECLRRRIILANREAKFCALITILKSVPGIDEIWACIIAAEVGDFARFPNADALEFWSGLTPDNLESAGRTQSGHITKAGSAPLRWALCKAAVTLCRSDARQEAIRQRLIGRMPKPKANVAMGRRLLRILFAMVRDGTLYQGQEPTGHEKAANQARLRKINKRKERIAA

SEQ ID NO: 455993 - protein, 578 aa, unidentified
MSPSSSLDRIGVGIDTARYGHRVSFLRPDHQPAAKPMTVLESRAGYQALLERLQQLHEQHPQAHFHVRLDAAGQYAANLDHFLRGLALPITLSIGEPKRNKDYQKAHFPKRTTDDTESQAMARFAVVELPKATAPVAPAMTLLREVAGRLQAKVKQSTQAINRLHNLLARVFPELATLTDDLSCAWVLHLLDKYPTAQRIGQARLTTLQNIPYLAPEVAEQLHLLAQQSVACLSGDLAETLVRDLVAQVRHTQHAENQMRRLLGAAYAALPASPHLQVVTVPGIGVATAAALIAQIIDIDRFATPDRFVGYFGVFPEENTSGVDKFGTPLPPGTQHMSRKGNDLVRSYLWNAARTAIVHNPAIAALYRRLKAKGKRGDVALGQCMRKLLHLVYAVWKTNRPFDERHNTEEAPPAAPTSNDAPGPDDNEKAVGHKRNMPAEEVVTTANATVAPTPSLVKPSMANRLARPKVDFVFLRQQVTMEQVLRHLGLFDQLRGRGLQRRGPCPIHSQSNESKSTFSAHLGKHIFQCFQADCRAQGNALDLWAAIHKLPPYEAALHLAETFQLLRNREEEPVQGTR

SEQ ID NO: 455994 - protein, 317 aa, unidentified
MSKHSMICAGIDTGKRKLDVAIKGQADEVQVDNSPDGHRALSGWLRRHRVKRVGIEASGGYEQAVVAQLRRDKFEVVVFQPAQVRAYAQFHLQRAKNDKIDAALIADCTAAVEHIHAPPDPRLAPFAKHLTLIEQITEDIARLKNRHESCRDQRIGRLWGEEIARLKGILRSELKQLVAAIRQHPDLAERLALIASIDGVGLPTAVTILVRMPEIGRVTREQAAALAGLAPYDDDSGDHVGARCIDGGRERLRKSIYNATLAACFRWNAQLVAIYKRLIGAGKTHKVARIACARKLLIYVNAVVERGTPWAQNPTAA

SEQ ID NO: 455995 - protein, 328 aa, unidentified
MFFIGIDVSKAKLDCSLLLDTCINKRRAKSVANSKTGFDDLLTWCAKQRVCPQELHAILEGTGVYHEQAALALADAGVTVSIVNPAQVKDFGRSLGVRTKTDGVDSLVLARYGALLNPKPWTPPTPEARTLQALLSRREAIAQDLQRERNRLEKAQATDTPALIHQSLLDSITFLEAQLAKLQIDIDDHIDQYPELKADRMLLISIPGVGPQVSNHLLAVMHNHRFQSAEQLAAYLGLVPVERQSGSSIQGRPRLSKAGPARMRAILYMAAVVGVQYNPHLKALYLRLQARGKSKMSALGGAMRKLVHLCFGVLKTREPYRVDYALHS

SEQ ID NO: 455996 - protein, 331 aa, unidentified
MSHIIGIDVSKATLDCAWLRDPDQNKAKRKNCQNEVSCFESLITWAETFSGVPRQSLAFVIEPTSIYHEQLVQFLHSKGATVYLVNPGRVRKFAEGIGILSKNDVIDADLLARYGLMAKKLIVFEPAPQEINDLRSLLNRLDVLEKNLRREHNRQEKAGKSLTFHHLEQQSITRSIKRHEAEIVSFKNAARDCVNASPWLRRGVELLSTVPGVGEKTAWLMMVILSSRQFKSAAEVASFLGLKPIEKRSGKSEYRKPRLSKSGSSHYRQALYFPAMVASRKNPDVQALYERLVDAGKPKMCALGAAMRKLVHICYGVYKNQQPYQPQVSST

SEQ ID NO: 455997 - protein, 423 aa, unidentified
MIKQTMCHLSLLITVQASLRVPYHVETMKDCNQLTFNLQTKKVTNMKTVLQSKDNAIYSVLYIAFELSDKKWKLAFGNGERTRMKTIAAGDWSALLREIEWAKAKLYCAADARVVSCYEAGRDGFWIHRALQAEGIDSHVVDSASIEVSRRKKQVKTDRIDAGALLRLLMRYCNGEKMALQVVRVPTVEEEDQRRLNRERERLLKERGAHSVRIQSLLVAHGIRLDRLLELPQWLPSARAAVTGYALPADLKAELGREYERYVLVDRQVKELERLQRERAANADSTALQGVQQLRSLKGVGWQSSWLLMMEFFSWRQFKNGKQVGACAGLTPTPFDSGDSSREQGISKAGNKRIRRLMIELAWLWLRYQPQSALSQWFEQRFGSGGKRMRRIGIVALARKLLIALWRYLEHGVLPEGAVLKAV

SEQ ID NO: 455998 - protein, 385 aa, unidentified
MGTQSFSPRDYDVFAGLDVDKKSISVTFTDHQGLLKSMRMPYSVEHLVNHVRKHYGEKKVAFAYEAGPTGYGLYDGLKAQQYPCVIASPSMIPKAPGQRVKTNRLDSRGLSENLRGGQLKSIHVPTTLYRELRHLTQLRDVVVSEMVAMKQRIKSLLLMEGLEFPPAPAGSQWSFRVKDKLRKLPCSSVVCFKLNQLLDNLEFNEKQVLNSTREIRRFCQDDPELSQCIGYLKTLPGIGWIVASQLMARIGDWRQIKNIRQVPAFLGLVPTESSTGERTERGSITHSGDPRLRSKLIQASWSAIRQDGELREFFRTVARKHPRHLGPRVAIVAVAHKLCVRAAVVLMKQRPYEMREKIQSAPLTQEETVPQGTTRRRRVPGEKIS

SEQ ID NO: 455999 - protein, 429 aa, unidentified
MNYNTQNAKIASITEKTLIVGIDVGSETHYARAFNWRNYEYSKKPFAFSNDEAGFASFKAWMNDMVEKHGMETIIPGMEPTGHYWLNLGAYLQEQGMKPVHVNPHHVKKSKELDDNNPSKNDRKDPKTIAGLVNEGRFSYPYIPTGIYAEIRNLSNLRIQTQEEITRIKNRIARWFSIYFPEIKDVYRNPDAVSGLMVIKQAPLPCDIKELGVNGVNKIWRDARLKGAGIKRATTLVTAAEHSIGNTEAPRSARKEIRNLLNDYEIYKNRMDELMQEIKETLSEIPYIDKLMEINGIGIKTVSCFIAEVGDIGRFDNPKQVQKLAGYAIVADSSGKHNGESRISHRGRKRLRYALYEGAISVIGKNKEFKEIHSYYRTREKNPLKKMQSVIAVACKLIRIFYTILTKGVDYDSQKMLNDIVRPEIQLAA

SEQ ID NO: 456000 - protein, 424 aa, unidentified
MSKKKSRVAGLQALYARACGLDVHKKLVVACVRILDSKDVTVQSTLRKFGTMTADLMELRQWLAELKVTHVAMESTGVYWQPVFNLLEGHFKVWVVNAQHIKKVPGRKTDMKDAEWIAQLLQCGLLRPSFVPERQQRELRDLTRQQTKLVQQRNAVDNRIQKVLETANIKLGSVASDVLGVSGRKMIEALMAGEKDVAVLADLAQRQLRGKIPELQRALEGELTDHHRFLLRQLLAQYDFLEKEIASISERLGAVAPPSFRAAVEQLDAIAGVGERGAKALLAETGTDMSRFPTHKHFASWAGRCPGNHESAGKRRSGKTPAANRHLDAVLTEMAHAAVRTKNSYFKAQYHRLAGRRGKKRAIGALKHSLLVTVYFMLRDNRPYKDLGVDYFDKLNPQQRIRYHVRRLQELGQEVELSPIADAA

SEQ ID NO: 456001 - protein, 342 aa, unidentified
MQTVTTIGFDIAKSVFQVHGIDGAGQVVIRRQLKRRYVLAFFQKLPSCLVGIEACASSHYWSRELQALGHNVRLMPPAYVKPYVKRQKNDMADAEAICEAVTRANMRFVPTKTPEQQSGLVLHRTRHLLICQQTSVINAIRAHLAEFGIVAPVGRRGVEELLGVIADPSDNRLPELVRSCLAALGSQLLGLKKQILAFDRMILAWHRCNQTSKRLNCIPGVGPLLATALVASVGDPKSFPSARNFSAWIGLVPKQHSSGGRERLGSISKQGDRYLRKLFVAGALAVIRHAKLHGSKHRPWVTALLARRPTKVAIALANKLARMAWALMARGGRYNYPVALRP

SEQ ID NO: 456002 - protein, 411 aa, unidentified
MVKENFIYVGIDLHKETHTAVMIDCYNQKLGEITFPNRPAAFPKLVTKVKKCNTDGKEVVYGLENAYGYGRALAVWLIDKGYLVKDVNTAISHRQAKHRGAMYRKSDSDDAKAIALATLNMLDKLPDACPNDAYWSLGQLVHRRDNIMKQRTRLVNQLHEQLCIAYPSYKQFFNDISRPTALYFWEHYPSRKYLKGKSVEDLRAELVPVSHNKCSTKTCEKILDAVASDKVKNNAYQDARDMVTLSIVSDLQHYDSQLTEVDKMLEQMYKMLGCTLTTIPGVNVITAVKILAEIGDIKRFSNANKLAQFAGIAPLHLSSSGKGKDVATKQGNRRLQATIYFLAIQMVQLSSKGTPRNPVVRAYYEKRKAEGKTSQQALICISRRLISIIYGMLKNGTEYRMPVVENAGEKL

SEQ ID NO: 456003 - protein, 338 aa, unidentified
MKLYGAIDLHSNNNVTVLIDEQDQVVYQKRLPNDLSLIAQQLSGYQDELQGIVVESTYNWYWLVDGLMDQGHRVHLANTAAIQQYEGLKYTDDHSDARWLAHILRLGVLPQGYIYPKEERAVRDLLRKRGQMVRQRTANLLSLQNLITRNTGSSIRSNRIKTLDAEQVDDLLPNPDLALAVKANLAMIKCANGQIEILERTVTERIKLRAAFSFLKTVPGIGQILALTIMLETGQVQRFTTVGDYASYCRCVGSQKLSNGKKKGSGNTKNGNKYLAWAFVEAANFAIRYNARIKSFYQRKKAKSHGVVAIKAVAHKLCRACYYIVKDQVAFDVAKAFA

SEQ ID NO: 456004 - protein, 351 aa, unidentified
MKSFKFFIGVDVSKLTLDFSIYQSENLIYHKSIPNQILDIKELLKEFRQIPTCKNSNTVFGMENTGVYSNLLISILQKAKANFTVENAVHIRNSLGNIRGKTDKIDSQRIAMFLFKNRDRLNFWKPRRPVIEELKNLVTLRTRLSSIQVALKTPLKENARYISKTNSKQHHDICQNTITSISSDLEILNELIKKVWSSDEKIKNLMKIITSVRSIGEVTALHIILSSNEFEDIDTGKKFACYAGVAPFHYKSGTSVSKKTRVSDIANKKIKSLLHMCAVSAIRYNDEMKDYFIRKTQVEGKNKMLVLNAVRSKLILRVFSCVKANKLYVEGKLPLKSNFEDTKTVYSTTDN

SEQ ID NO: 456005 - protein, 382 aa, unidentified
MKKNTTAKNSQNALSKTRRNQLRHMATKQRLTVGLDLGDRNSRYCILDEAGEVVSEGQLPTTKTGLNSLFEKMPSSRVALEVGTHSPWASRHMAGMGHEVIVANPHKVKLITQSVRKNDRIDAEQLARLARVDPKLLSPIRHRGEEAQADLAVIRARAELMEARTGLINCTRGLAKPMGERLKKCDADQVKESLADGLGEAVQTVIRPLLKTVEAISQQIGVYDRSIEEIAQRYPEVKVLMQVWGVGTLIALTYILTIEDAQRFAHSRDVGPYLGLQPKQRDSGNSQPQLGISKTGDRLLRCLLVQGAHCVLRKGAPDSDLREWGLAKLQSGGKKAKRRTIVAVARKLAVLLHRLWVTGEVYDPLYNRQARQAGKGKAKVAA

SEQ ID NO: 456006 - protein, 343 aa, unidentified
MTRFVGLDVSQKLTAICVVDDSGRRLWRGQCASDPEQIERTIRRHGGEDARIGIETGPMTPWLVHELRGRGLAVTCLDARHARAVLKMQINKTDQNDAEGLAQIMRTGWYRSVHVKSFDSHRARALLGARAQLVGMTTRLSNHIRGVLKTFGMLPGAGRNLAFDRRVETLLTDRAEVAPIVQPMLAAWRQLRQQTATFDKAVRVLVKSSPTCRHLMGVPGIGVLSVLAYVSMVEDPARFGRPRSVGAHLGLTPKQYQSGEIDRSGRISKCGDALARTLMYEAAVVLMTRVKRAHGLKDWAQAIARRSGAGKARIALARKLAVILHSMWRSGEPFRWSEQPAAV

SEQ ID NO: 456007 - protein, 419 aa, unidentified
MKNIETKKVRVINKETLIVTVDISKVTNVGYCRCPNGIDIKPFSFMNNFQGFNIFWDRIMKTRNTHGLKDIVVGFEPTGPYGEPLINFMKKKKVKLIQINPMHTKRVKELEGNSPNKTDQKDPKVIADIIELGHALTVVQPEGPAAELRRLTHTRERAMQRRTAIFNQLQDLVFVIFPEFSQVFKDVKTRSAIFILENCPAPEDIIKYKLKNLTTTLRKISRGQLGKERAGELYSAAKTSVGIREGRQSILFEIKEILSVIKTTEHFVTAIEKEISSHLEKIPYSRFILSIKGVGDITAAGLIGEVGDFREYNTTSEMLKFSGLDLFEISSGRHKGQRRISKRGRPFMRKLLFFAAINTVRKGGIMHEYYQGCLARGMLKMKALTAVSRKLLGVIFALVRDHSEYIENYAAEQELKKAA

SEQ ID NO: 456008 - protein, 416 aa, unidentified
MTESSDYESVQVFIGVDVGKDTHHAVAINRSGKRLFDKALPNDENKLRSLISDLKQHGQILLVVDQPATIGALPVAVARSEGVLVGYLPGLAMRRIADLHAGEAKTDARDAAIIAEAARTLPHALRTLKLADEQIAELSMLCGFDDDLAAQTTQASNRIRGLLPQIHPALERVLGPRLEHPAVLALLQRYPSPEKLASLGEKKLAAQLCKLAPRLGKRLAADIAQALAEQTVVVPGTNAAAVVLPRLALQLITLRKQRDEVALEVEQRVIAHPLYPVLTSMPGVGVRTAARLLTEVACRAFASAAHLAAYAGLAPVTRRSGSSIRGEHPSRRGNKALKRALFLSAFAALRDPLSRAYYTRKMSQGKRHNQALIALARRRCDVLFAMMRDGTFYTRRGHNILDNLIGAPPLLYSYPL

SEQ ID NO: 456009 - protein, 355 aa, unidentified
MRILSLDLSKYKTVACEYEAETGRHQFATVLTTQKALHDLIVDREPDRVVIEICSIAGWVCDLVRSLGIEMQVASTNDERWQWRKVKRKNDRRDGLKLAQLSARNELDLVHVPRSEMRQWRALIAYRHHLVQRRTKIKNHIRELLLREGQLLPRHRSAWTQAGLAALEAMVKPLGEVSMDELWRGELEVELAQFKAVQKQLTEVVAKLDALGAANHNVRLLQTASGVGPRLAEAVVTMFDDPKRFRRGAAVSAYIGMVPKQWDSGETERLGKITRHGNRLVRSLLVEVAWCALRHNPWARETYQRISGGKKSRKKIAIVAVGRKLLVRCWAMLRDQSAWHWEGQSAVVTPPAPTA

SEQ ID NO: 456010 - protein, 410 aa, unidentified
MGLYCGIDWATQHHDVAVIDDDGRVIARGRVSNDAAGFAALLTLLAEAGDSAAHPIPVGIETDRGLWVSALRETGRVIYPINPLAASRYRARYAVSGAKSDATDAVLLANIIRTDPDAHRPLPADTELAQAIRVLARAQQDAVWARQQVGNQIRDLLKDFYPAALAAFDQLPEGGLARADARTILAAAPTPAQAAALTPARLRRLLVKAGRRRHLDRDVERLREIFTDTYLHQPPVVENAMGIQLSALLRQFDAAATAADELAEAAIAHFERHPDAAIITSFPGLGMLAGARVLAEIGDDRSRFADARGLKAFAGSAPITRASGKKTVVLHRHIKNRRLAAVGPIWALSSLRASPSARRHYDTRRAAGDWNHQAQRHLFNKFLGQLHHCLQTGQHYDEHRAFPPPLLLAA

SEQ ID NO: 456011 - protein, 399 aa, unidentified
MFVGWDWASASHDVTVIDDRGIVIDHWAFQHSEDDFETALARLASHGTPAELPVIIERSSGLVVDRLLEAGHPVVPVHPTAFHAARPRWGASGAKSDPGDSYKLADYLRTDGHRLRRLVPVDSGLRELQALVRLRDDHVRARTAAGNQLGALLEQHWPGPRNLFCSLVSDIALNFLTDYPTPQAAARLGEARMAAFCKRHAYRGGKPASALLARLRSAPVAPVSLPTPVLTALITAQVQLLRSLQATITQLETTIKKCLARHPRAVLLARLPGVGTINLAQLLAEVGPILDRVESAEQAAAECGAAPVTKASGKAHGVYFRWAANTRARKAVTAFAHNSRMQSPWAAALYANARARGKRNPHATRIVARAWLRVIWACWHNATPYDPDNHPATQRLKAS

SEQ ID NO: 456012 - protein, 391 aa, unidentified
MIYVGIDVAKDKHDCFITNSDGEVLFKAFTITNNLDGFNDLYQKIETVMKDITKVKVGLEATGHYSYNLLGYLIDKGLPTYVINPLHTNLYRKSLSLRQTKTDKVDARTIASILMSDVNLKSYSDISYHNEELKSLTRYRFDKVKERAKLKSSVSRLICILFPELEKLVPTLHMASVYALISEFPGAKQVANAHLTRLTNLLSEASKGRYSKDTAITFRDAARTSIGSNMPAKSLELKHTIKLIKELDSEIDEIENEIKIIMDEINSPILSIPGINYRMGAMIIAEIGDFSRFDSPDKILAYAGFSPSTYQSGHLYGAYAHMEKRGSRYLRYALYNAAKYVCHWDPTFTAYLAKKRAEGKHYNVAISHAVKKLIRVIYHLEKTNQQYIKAS

SEQ ID NO: 456013 - protein, 409 aa, unidentified
MNKVDIAPFEVFCGIDVGKSLNHIVALDRYDDKPLINRKVPQEEAEIRAALEEAGDFGLALVIVDQFGAFGRLAVGVAKSMDIPVAHMSPRRFRQVAETYGEDKFDEKDAFILADASRTTPRNIEFVGNRAESMAEIKVLSSRRDDIVEERTRCYNRLHDFIHQVSPPLEELFSKRKLHNDLEIRLIARYGGPIGFRQAGRARASTWAAELKYHCVDGPKKVEQVFDVLDRQTVMLPGAAVIEEQIRSIASRIIELLDEEKRLNLMIEQRAKMIPEVDLLQSIPGVGPVYAALIAVEIGDIGRFRNSNHLASYAGVAPRKEESGTSVHKRRKRKGGNRRLKNALMQSSQRSVQCDPVARAYYERKRAEGKKHLQALRALARHRVTVIFAMLNEGTFYEPPVEVDENGRG

SEQ ID NO: 456014 - protein, 423 aa, unidentified
MSSDLEIAAFIGLDWADQQHVIRLRMAGSASVEAQLLDQKPETLQTWIGQLRQRFGGRPVAIALEQSRGSLLYALMNVDFLRLYPVNPQNLAQFRKAFYPSGAKDDPQDALLLLEMLEKHRDRLRVWVPDDASTRCLRLLAENRRKLVNRRTALTNQLTSLLKESFPQALDWAGPLDSLRACDFLQHWPSLQILQKTSTSRLRRFYRVHTRLDSQAIHQRLDQIRQAQPLTSDSAVLAAAELMIPALVRQLRCLIESIQQFDQQLKDRFQQHDDYTLFHSFPGAGPALGPRLLSAFGSNRNRFECAAEVQMLSGIAPVTERSGKSHWVHWRLACPKFLRQSFHEFAAQSILFSTWARAFYDQLRSRGTSHHAAVRTLAFKWIRILFRCWKNRTPYQEQIYLASLQRHGSPLCAALSPPTGANL

SEQ ID NO: 456015 - protein, 348 aa, unidentified
MLTSCGVDFHARQQKIVYSDPSTGEIQRKELKHQLDEVRQFYGQLPKPVIVGLEATGSSQWFEKLLAELGHEVWIGNATEIRRRARSRQKNDWRDAELVHDLMIKGEFPRIHRLSEESLEVLRRLRYRHRLVKMRTMAKNGLHAIALSAGLSMKSKLLTKTGRAKLELLDLSPVLKEQQREWLDLIDQLNHRIARLGSEIEQIGEADPRVQLLRTHHGIGPLTALALVHTLEPVTRFSNSRKVTAFVGLEPCEESSDEKVRWVGISKAGSRLLRFLLIEAAGVAIKYDDELKRFYLRLLHRRDWRKAKVAVARKLLVRAWIMLRDRIDYAEFLKRGVAVGSARTGHRP

SEQ ID NO: 456016 - protein, 348 aa, unidentified
MIIIGVDFHPEFQQIAWVDTETGEFQEKRLAHPDEAEKFYRALAGEKVRVGMEASGHARWFERLVSELQFELRIGDAAEIRTKRVRKQKTDRQDAQLILRLLLEDRFPQIWVPSSENRDLRQLLWHRHRMVQARTRIMNQLQAVALNEGLRCKKKLWRERGRQQLESFRLAPWASRRRRDLLELMDRLNPTIAELTQAVEYEAEKCPQAQRLRTHPGVGSLTALAFVLIIGKAERFSCGKQVASYLGLVPLEESSGNRRRLGHITKQGSSMLRFLLVEAAQVTVRSDPQWRSRYFHLMMRRGRKTAKLAMARRLAVSLYWMWRKGWEYEQFKKFGSHAGEPGNRHGVE

SEQ ID NO: 456017 - protein, 345 aa, unidentified
MKSNTQNAKIEAITEKTLVLGIDVGSETHYARAFDYRGIEYSKKPFKFSNTEAGFATFKEWILELKERHEKDKVVPGMEPTGHYWFNLGKFLQDNEMKPVLVNPHHVKKSKELDDNNPTKNDRKDPKVIAGLVREGRYMIPYLPDGVYADLRTASNIRFQLQAELTRIQNRISRWFNIYFPEYKTVYGKPDAKSGILILKAAPLPEDILTLGIDGVNQIWRDAKLRAVGKARAKTLIEAAEHSVGSKEGAVSARMEIRMLLEDYESRNIRLQEVMTLIEGLVKQIPMAEKLLEIKGVGIKTVSGFLAEVGDISRFNTPKELQKLAGLALVESSSGKHKGETTISR

SEQ ID NO: 456018 - protein, 358 aa, unidentified
MKQTTKYVGLDVHQATTVAVVGDDTGRVIARSVVPTEEAALLEFVRGMRGAVHVAFEEGTQAQWLYDLLVGRVARVIVANRRGEPRRGSKGDWHDAEWLMDRLRTGELRAVYHGSPHRATLKELGRAYRNVVEDATRVMSRLKALFRGRGIRTTGRGVYDPAQRAEWLAKLDGAGVRLRAATLYAELATLHTLRPMAKTALVAEARRDPAWDVLRTIPFLGPVRVALLLATLQTPWRFRTKRQLWSYAGLAVVTETTSEYALDAGGQPVRRRRPPMTRGLNRNHNHVVKEVLKGAATAAVARPGALRDFYQGLLARGMRAELARVTLTRKLAALTLRLWKTGERYDPAKLTIPAVPAR

SEQ ID NO: 456019 - protein, 415 aa, unidentified
MRMETGSKGRIDTRKENIIYVGIDLHKETHTAVMLDCWNQKLGEITFDNKPSVFHKLTRKVSRFVTKEKTAVYGLENAYGYGRALAVWLLEKGCAVKDVNTALSYAQRKSVPMYQKNDSYDAEAVALVLINMLDKLPDAVPDDAYWTLGQLVNRRDNICSHQQRLKKQLHEQLCVAYPSYKGFFGDISRATALYFWLNYPSPEHLRGKTAEELASELRPISHNNCSIKRAEKILERVRTDGQTAREHQASRDAITRSIAGDLEHYREQLKIVESAIETMLPSFRCTLMTMPGVDVTTAANMLSEIGDIHRFPNADKLAKFTGICPINFSSAGKGKDMCPKQGNRRLQSIFYFMAIQMIQVSTNGTPRNKVFREYYLKRVAEGKNKQQVLICIARRLVNIVYGMLKNHTEYREPEQ

SEQ ID NO: 456020 - protein, 389 aa, unidentified
MKIFVGIDIAKLNHFAAAISSDGEILIEPFKFTNDADGFQLLVSKLESFDKNSIIIGLESTAHYGDNLVRYLVAEFYQVCVLNPIKTCQMRKNNVRKTKTDKVDTFVIAKTLMMQDDLRFITFFDLDMMDLKALGRFRQKTIKQRTRLKIQLTTYVDQVFPEIQYFFKSGLHQNAVYALLKEAPSPKEIASMHMTHLANLLKVNSHGHFTKEQAKELRVLAQKSVGANDSTISIQITQTIQQIELLDSQLEKIEAEMTDIMKFNDSVIMTIPGIGYINGGMILGEIGDIHRFSNPNKLLAFAGLDPSVYQSGNFQAKTTRMSKRGSRVLRYALVNAAWNVVRNNATFKAYYDAKRAEGRSHYNALGHCAGKLVRVIWKMLTDEVEFNLE

SEQ ID NO: 456021 - protein, 387 aa, unidentified
MPQPNDLSRSLVTLEQDSTLIAVIEMGQSSWLVAGIVPGIERQPLKKLAADQDGLLQLLHRWRKEAAQAGHPIKRIAVAYEAGRDGFWLARWLRAREIEAYVIHPSSVPVSREHRRAKTDRLDTELLKRAFLGWLRGEPKHCSMAAIPTVEDEDARRPSRERESLVGECTRIVNRVKANLARLGIRGFRPRLAHAPKRLETFRTPEGTAVPANTLAELQRDMAHLRFVKQQIKEIETARAKRLEQASGGGRDAMVRLLARVVGIGIETADMLVQEVFSRKLRDRKAVARYAGLTGAPDESGQKRRERGLAKAGNARVRHAMIELAWGHLLHQKDSALAEWYQKRIVDARGGTRKTMIVALARKLLIALWRLVTTGEAPAGLLLRPAA

SEQ ID NO: 456022 - protein, 338 aa, unidentified
MNSVTILGIDIGKNSFHLHGQDAQGHQVLRKKLNRSQLLPLLAQMPPCKVAMESCGGSHFLAREITKLGHQVQLIAPQHVKAYVTGNKNDFIDAEAICEAASRPRTRSVQVKSVDQQVLSTVHKLRKSLVSRRTGVINQVHGFLLEFGVIFPAGYAALDRVPALMDKHNLPLRLRQTINRMLDDIRQLTSEIKALDTEIKQQVNGSDAGKRLQSIPGIGPLIASALVADVGDASIYKSSRDFSASLGLVPRQYSTGGQTTLLGISKRGDRYLRTLLMQGAQTLLYRIDKRNDALGVWARSLLARKPLNKVACALANKMARIIWALLTKGGTYNGHFTA

SEQ ID NO: 456023 - protein, 356 aa, unidentified
MQTQVTKKIDFTGKQLFIGLDVHKKSWSVTILVDGTEHRTFTQPPDPESLNSYLQRMFPGGEYNSAYEAGFCGYAIHRRLNQLGINNIVINAADIPTSQKDKLQKRDPVDSRKIARSLEKGSIHGIHIFDRELEELRSLNRTRFYLMRDLRRSKTRIKSFLQYYGEPIPVEFDNNQWTLKFVSWLKQVKMQTMSGQDAFSNLISSYEYHRSQLLTLSRQIRQRIREYDRELYTLLKSVSGIGPLTASALITELGDINRFANIDQLGSYVGLIPRIRESGETTYTGGITFRCNSFLRTLLIESSWQAIRMDPAMMQYYHAHLINNKGHKVVIKVARKLLNRIRYVMKNRQPYVTGVA

SEQ ID NO: 456024 - protein, 317 aa, unidentified
MKKTEVSDYIYIGVDVSKEKLDAYRPNTKKNETFLNQEADIEKFCKSLKRFKTPVMVVVEGTGGYEGLLARTLTKHKIDVAIVNARQVRDFANGIGMNAKTDPIDAYVIHRFAEVVKPSPKAMASEQEQKHSALVTRRAQVIDLITQESNRLKQCWDGRSKESIRKTLEFLRNEAKAIDKELEAMLALDDGNKRKLEILDSVKGIGPVTQSMIISKLPELGKLNRGQIAKLAGVAPINRDSGTKEGKRFISGGRSYVRRILYMAALSAIRSNPTIRAFYHRLKSRGKLSKVAIVACMRKLLTILNLMLKTDQTWQTK

SEQ ID NO: 456025 - protein, 346 aa, unidentified
MKFYTGQHKFYCGVDLHARTMFLCILDERGYPLLERNIKTEPELFLKCIAPYREDVVVAVECMFTWYWLSDLCSREKIPFILGHALYMKAIHGGKAKNDRIDANKIAVLLRGGMFPVAYVYPPKMRSTRDLLRRRMFLNRKRSALITHIKCTFAQYNLPEPEQNVSRVSQREGVAEQIPDTGASRNVQLDLDLLDFYDQTLTKLEQELTVIAKDHDPDSYFRLRTVPGVGKILSLVILYEIHDINRFPSVQDFASYCRLVKPAKESGGKRLGSGGAKIGNVHLKWAFSEAAVLFLRKNEAAKIYRARLVKRHGKAKSLTILAHKIARAVFFILKRRTVFEAETFFA

SEQ ID NO: 456026 - protein, 336 aa, unidentified
MRYIGVDLHTTQITVCYLKTDAAKQVKTYRLEQIKEFVSTLESTDEIAVEATGNTRWFVGEVKAVVASVVIVNPRGFEVIKQSVNKTDRHDAINLARFLQAGLLPEVREKSEQAERVASLNETRNKLVRLRTSFLNKIHALTVSKGRKLKKESLSSERGLGRVLAQEWTEVERLELEIIIDEIRHLKESVKKLDKVLEAEAQKLKGYQNLVSITGIGARSAGVLLSVIGEVRDFASADKLASYFGIVPKVSNSNETLHHGRITKRGSKTGRTTLVQCTLVAIRHNEYLKNYYTQVKERRGHGKAKIATARKYLTLIYNTLTNGWVFADFKNFVLAE

SEQ ID NO: 456027 - protein, 413 aa, unidentified
MYFAGIDIAKKQHEACIIDDQGTTVLTMPVPNTQPGAARFLAAVRKRIGDDPHAVAFCLEATGHYWLSLYCFLTQQGYPVHVINPIQSDAIRNLYIRKSKTDRKDAFILADLLRMNQTEETCMASEVVLKLQTLSRTRFAFVNQVSALKQRAIGVLDRIFPEYASCFSDVFIKTSRELLKNHSTPDEIAALDLHELTRFLESHSRGRLGQGRAERIQELARGTFGIGLAVDAFALELRLILSQIEFIEAQISDLESAIKLAMEELQSQHAPGSLEGEQHHVIETIPGIGTILAAAIIGEIGDIHRFSDARKLVAYAGIDATVRQSGEFTGSRNRMSKRGSPELRRAIWLAAVSARRFNAELSAFYEAKKQQGKHPMVATGAVARRLVHLIHSVWSREQPFDPDYRWSPSGSAD

SEQ ID NO: 456028 - protein, 347 aa, unidentified
MKFYNHQHKYYCGIDLHARSLYVCILDSTGKQVKHRNIMARPEDLMKAIEKFNDDLVIAVECMFTWYWVADFCEEHHIKFVLGHALYMKAIHGGKAKNDKIDSHKIATLLRGGMLPMAYVYPKKNRATRDLLRRRTHLMRKRAELMAHIVNLNSQYNLPEMALDLRQQKNRDSLKNHYSELSVQKSVDLDLSLIAFYDDHLSSIEWYIEKTTKITDYQNYMLLRSIPGVGLILALIILYEINDISRFKRVQDFASYARLVKCTKESGGKKLGTSGSKIGNAHLKWAFSEAAILFLRGNPEAQEYVEKLANKHGKAKALSILAHKLGRVVYIILKRRIAFDANKFVTV

SEQ ID NO: 456029 - protein, 412 aa, unidentified
MDVLVERCAGLDVHRDSVMATVRLPAKRRRQREQHTRGFPSTLGGLQALADWLEGFGVTLVGMEATGIYWRTVFDALEPRFRCWLLNARHLRNVPGRKSDVIDSAWICQLVEHGLVRPSFVPPLEIRRLRDLTRLRKTQIEERTRVIQRLEKVLQDAGIKLTSVASQAYSVSARAILEALLAGVTEPAQLAELARGRMRAKIPQLQEALRSRFDLAHHGVLVASLLSQLDSLELSIANLDQRIVHQTEPLAELVELVRTIPGVGLRTGQVLIAECGIDMSIFPSVAHLASWAGICPGTNSSAGKRYSGKTRRGSKWLRQALSESAQSAARTKGTYLASHYAQIRGRRGTHKAIGATRHDILVAYYHIVRDRLPYRELGPDWLARRYSPEHRARRLLRQIEALGFNATIEAAA

SEQ ID NO: 456030 - protein, 444 aa, unidentified
MAFSGMILIREVADAPVIMGISKPAGLKSPCGEVKIVNPLFVGIDVSSKNNVAYLMKPDGSKHSSFSVQNNLGGAKLLSERIVSALGSMQLERVVIGLEATSIYGDSLVYALREDGRLGRFQRKIHVLNPKQVRKFKEAYSDLPKNDWVDAFVIADHLRFGRINREVYMDDYRYKALQTLTRARFDVIQNLTREKQRFANYLFLKCSGMAQDKDIQNTSATTIALMEHFETVDDLANADLEELTAFITETGRGKFADPDATAKAVRAAAKGSYRLPKTVNDTVNQAMAVSIASMRALKGQVKVLDKAIEQQFEIIPNTLTSIPGIGKVYSAGIIAEIGDIHRFDSQASVAKYAGLVWNRSQSGDFEAEHSRMIKSGNRYLRYYLLEAANSVRRCDSEFRRYYDLKFKEVNKYQHKRALALTARKLVRLVFRLLKDNRLYIPSEG

SEQ ID NO: 456031 - protein, 322 aa, unidentified
MQATTIGIDLAKNIFQVHGVDAHGKKLFNKALKREQMATFFVNLPPALVGMEACGSAHHWARKLQSMGHTARLMAPQFVKPYVKGNKHDAADAEAICEAVARPTMRFVPIKNVEQQAVLSMNRVRQGFVRARTAQANQIRGLLSEFGLIVPQGIAHITKRVPTLIEDASNELPGSFRILMDRLLEHFKALQAQIQQLEAQILAWHRSNPASKRLEHIPGIGPITASALIASLGDARSFKDGRQVAAWLGLVPKQHSSGGKQNLLGISKRGDTYLRTLLIQGARSVVYHADQPNRESASATCQWVRGVAQAAQQKHRCCGSGQ

SEQ ID NO: 456032 - protein, 326 aa, unidentified
MVIIGIDVSKTKLDCLWIRDLQAMKIKGKVQANTPAGHQALLAWAMKQTGEDVSGLHFVMEATGVYHETLAYALHDAGAQVSVVNPARVRDFARSLGAQTKTDKRDSVAIARYGMTQSPRLWVPEPVEVRQLKALIARCDAIKQDIQRELNRLEKATASDASEEVRASIETVRSQLEAEKARLESLIEDHIDNHPDLKNDQVLLESIPGVGPVISQHMVAIIRSRSFKQAPQCAAFLGLIPVERQSGTSVYSPPRLSKHGDGRVRAKLYMAAVVATRYNPDIRRQYQRLLKNGKSKMSAIGAAMRKLVHICFGVLKHQTPYRPQPA

SEQ ID NO: 456033 - protein, 315 aa, unidentified
MAMPVSVAKPIVGVDVAKDELVIYHAQTDRLEAIPNTKAAIKKWLKELPAPVDVAIEATNIYHQEFADLAYAQGCVIYMIGGYELSHYRKGVKVRAKTDALDARLLARYLNNEGHQLHPWTPPSPLYCRLISLFRRRAALVQARVSLKQSWSNEPLLKSAFENQIKAMQRLEVLLEKTIQTQLEAAGLGAQLKRCMKVEGIGLLNGARLLTSFQRGGFRNADAFIAFLGLDLRISDSGKKKGRRCLSKRGDPEARRLMHNAAMSARRTAAWKGFYEALRARGLSTTEALVALARKLARVVFALLKNQSEYLPKGI

SEQ ID NO: 456034 - protein, 400 aa, unidentified
MISVGIDVSKGKSTVCILKPYGEIVSKPFNITHTQKDLSELSSMLFRLNDEVKIVMEATGIYHLPILTYLQEKGFFVSVINPYLMKSYRNESLRKAKTDKIDSRIIANYGIDHWFKMKEFQISGVIYEELKLLGQQYRHYMKLHLLSLAELTHLLDLTMPGIKNLLASWNETNRKDKRSDFVERFWHYDIITSMSEQEFTEKYILWAKEKKYVPSQEKAKVIYTLAQESIPTLPSETSSVKMLVTEAVRVLKEVDATLGLILSRMQEIAKTLPEYSVVREMGGVGNTLAPKLIAEIGDVRRFRNGKALVAFAGIDPPPYESGQFVGCNRKISKRGSASLRKVGYETMRSLKMRSRPEDPVYRYVVKKESEGKSKKSAKIAGLNKFLRIYYARVTELYKNI

SEQ ID NO: 456035 - protein, 325 aa, unidentified
MAYIGIDVSKQKLDCLWVRDLSKGKVKTKVFPNRHQDYPGLLDWLVRQTGEDISNLHVYLEATSIYHEPLAYWLHDVGVTVYVLNPAQVRHHAKGMGVRSKTDRKDSMMLARYGIERNPQPWQPEPTEVRELKRLINRLEAVEDDLQRERNRLEKAEFNTDTQASESISYMLVALEREVQRLQQAITDHFEAHPPLKQDRKLLESIPGIGNVLSARLVATLRSRNFRSARQAAAFLGLVPILKESGSSVKLRSHLSKTGAPGIRRKLYMAAVVSTRCNPDISEQFARLKARGKPTLSALGAAMRKLVHIAFGVLKSQSEYRPQGA

SEQ ID NO: 456036 - protein, 427 aa, unidentified
MPYNLAGIDVHKRMLHVVVSDVEVDGEYEFTRRIFGSSPEGLRSLAAWLMEHQVEEVVMESTAQYWKPVWGALERCWKPICQKREGALATSGTLHLAQALSNRGRRGRKKDFRDAERLVKRLVANELILSFVPDAQQRLWRTVMRTKYQLTRNRVQLRNRLEALLEEAHIKLSSLVSDLLGVSARRMLKAIAEGETDPAALAALAHERLRAKPEQIRDVLGVCQELHPVYRRLIQMALDESASIDKRIDQLEQEMADLLRLHEDQVQRLAEVPGLGVDSAQQIIAEAGATAATFPSEKHLASWVGACPGDEESAQVNYSRRSPQGNHHMRRILNQAANAAVKHKGSIFEILYRRHVPRLGNKHTIGIIAHKLCRLIWKILHLGVRYEERGPEVSKTSKQKRTQKMIRELRRLGYRIELTTSQPAMSA

SEQ ID NO: 456037 - protein, 460 aa, unidentified
MALLAKIGQELPQRYYVGIDIGYREHVAAGISLQAFVQGGDGWKRAKTLGFPTTQTGFERLQRYLDRFSTDPQAFLILCEPTGGYYGAALYQYVLDHHYPTFWIDNATTRHMREKIFGNIPKTDEIDARVMARIAYLHEAVGEEFSLRPLRLPSQDDAELLSLCRNSWKLNTMINRVRNQFSQLMAVIFPELKFFYTSSVSSVAPVSLMARYPSPAEIAAAPYEDVYEVLWKARSYPHAKQVHELQAIARQSAGLLPDPERAWRLKWLTDYLLSNFQLLSELEQRIEQVIQNHPGYAYVVGVPYSGPTTLGTILAASGEIRRFPNYRHYVAYTGYFAGLEKSQTIDRTHMSKRGNRDLKRAYFQIIAPMVWFDKGNNPYKKLYERKMAEGRAWYAAMPFACAALARHIYHCLKVQEPYDLDKAFPGSVSSLASRQALADFQADLEEEFEVMDARLSQVDV

SEQ ID NO: 456038 - protein, 327 aa, unidentified
MSKSNIVCAGIDTGKYKLDVALAGAAARRQVDNTAEGHARLSAWLRQHAVERVGIEASGGYEGAVVAHLRREGFVVIVWQPAQVRGYAKFLLQHAKNDGIDAKLVADCTAAAKTIHAPPDPRLLPFAEHLTFIEQLGEDIARAKTRRESCHGEERIRAHWTAEIARLKGLLRTEFKALVAKIRSHADLAGRLDLIDSVAGVGLPTAVAILVRMPELGQLSRGEAAALVGVAPYDDDSGTYVGIRHIAGGRERVRGALYAAAFPASQRWNPALIALYRRLIAAGKPHKVALVACTRKLVIYVNTVVERGTPWTPQGRGRQADPALPAT

SEQ ID NO: 456039 - protein, 448 aa, unidentified
MAKRKIKMDIINPNAAGIDIGSRSHFVAINQEHSDVREFGVYAQDMKDLVNWLLDNDVETVAMESTGSYWQNLFTELQNSTIDVILTNGKFTKNIKGKKTDVLDCMWIQKLHTLGLLSGSFLPDKQTEHLRTLVRHRGNLIDTTSKASKRMSQNMRLMNLRLDVVVNDIVGLTGLRIINEICNGQTSGEELAKLRHGNCKKSEEEIAKALQSNNRQDYLFVLKQELHKYQDAQKLIIECDIEIKKLLDEFINQDDVKKSLYIDKKVHKRINKNTPKNIDLNLMSYQYFYGVDLYAIEGFSHGTVLTLMSELGEKGILKFQNAQHFTSWLRLAPNNKISGGRILSARTPKGSNRLKIALRQAANAIGNLKDTHLSNFFNRIAYRKGRSVAVSATARKLATILWNMLYKNQQYNPPTVYEYLDQKRKRKVLELQKQIANLDARMSKITPA

SEQ ID NO: 456040 - protein, 346 aa, unidentified
MSHHSAENQVVFLGIDLAKQSFQLHGVDHSGKTVLKKKLNRKKLSEFIAQLPVCTIGMEACGGSNHWTRVFEGFGHAVHMMAPQFVKPFVKSNKNDAADAEAICEAVQRPSMRFVPAKSVEQQDMQSLHRIRSQAVARRTAQANQIRGLLMEYGVIIPQGISYIRKSIPQILEDAENELTTLFRELLSALYEEMVHLDERIKTLENKLEALCAQNEDCQRLLSIPGVGLLSATAMVASIGDISAFNNGRELAAWLGLVPKQHSTGGKPTLLGISKRGDTYLRTLLIHGGRTVVRVADKHTDQRSQWITQLEARRGKNISAVAVANKNARVAWALLSHQTTYQARVA

SEQ ID NO: 456041 - protein, 319 aa, unidentified
MAQKELVVAGIDVAKDKVDVCIRPLSLRRMFASTAEGRRELTSWLRRQKVGKAVMEASGGYEREWAKALRDARIEVRIVDPKRVRDFARSAGRLAKNDTIDAEMIGWFAETFDEAQGQVYDATREQLQQMVNARQALKEAQAKLENQGEHAVPAAVQRAHARILKTIGAELAKLDAAISAMIDTTPHFTELARIIESVPGIGRTTSAAIIAGMPELGQVSDKIVAALLGAAPYDDDSGRRRGERHVKGGRRRTRNAFYMATMGAATRHNPFLKAFYDRLVAKGKPKKVALIACMRKLICILNVMIARRQSWDAKRYAVT

SEQ ID NO: 456042 - protein, 358 aa, unidentified
MTAVTVRARGSDLTEIVIGVDTHKDIHVVVVLSLLGTVLASRSFATTAAGCRSLLTWARTLGRVTRAGVEGTGSYGAGLARSLHAAGVEVIEVNRPNRAMRRRRGKSDTVDAEAAARAVLGGEATVVPKRGDGPVEAIRILKIAKDSAAKARVQAINQLRAVLVNSEPAVREPLEKLALPRLVARCATLRHDGPGPAETAVADTLGRLARRIQFLEVEISDARRQLTDLVQRTSPGLLQVNGIGADSAAALLIAAGDNPERLKSEASFAALCGTSPVEASSGKTRRRRLNRGGNRQANAALFRAVLSRMRWEPATQKYVQRRTADGLSKREIIRCLKRYLARTIYKILRSPCPQPAHP

SEQ ID NO: 456043 - protein, 455 aa, unidentified
MPTTPKRIESIEIMHPNAAGLDIGAREIYACLPPDRAGETIRVFGTFTPDLVQLADWLVANQVDTVAMESTGVYWIPVFELLEARGLKLSLVNGRHVKHVPGRKSDVQDCQWLQKLHALGLLTGSFRPDGEMCALRAYLRHRADLVQHRAAHVQHMQKALQQMNLLLPQVVADITGETGMAIVRAIVAGERDSVKLAQFRNVRCKSSEETIAKALTGTWREEHLFALTQALALYDFYTEQVAACDVQIEQHYGVMKPRWELTAADVPSGPPTQRRKKRKNEPGFDVRASIIRLTGVDLAAVDGLGPNLAQLILSEIGTDMSKWATEKQFTAWLGLAPRNDISGGKVLRSRTLPSRNRAGQAFRQAATSAARSSSAFGAYYRRKRAQAGPLFAQVATAHKIARTVYHLLKYRVAYEDMGAEEFARKQQERDVLALRKRAAKLGFTLVAPDELPGAA

SEQ ID NO: 456044 - protein, 343 aa, unidentified
MLEVSIIGLDIAKNVFHAHGADASGRALFSRKIGRGKLLEFFAGHQRCTVALEACGGAHHWGRELTRLGYEVKLIPPAYVKPFVKRNKNDAADAEAICEAAQRPSMRFVAIKSEEQQASGLVFRTRDLLVRQRTQLINAIRGHLTEYGWVAPKGPSHVAMLGDLREDEMALSLPEAARAMVRTMLDLLEELNEKIGDLDKEIARRAREDAVARRLMTIPGVGPITATALAALAPPAETFTKGRDFAAWLGLAPRQMSTGGKQKLGSISKMGERTLRRLLIIGCSAVVLQASKRGAPQGSWLEQMMARKPRMLVTVALANKTARIIWAVLVKEEDYRAPVAAAA

SEQ ID NO: 456045 - protein, 402 aa, unidentified
MTYDYVIGMDVGKYFHHACVLDIDGTQVLSKRINQNEQSLRALFSTFSAHDHKVLVVVDQPNNIGRLTVAVAQELGIDVRYLPGLAMRQLSRIHAGNAKTDIRDAYIIAHAAKNLPESLRSVDRVEEAFLQLKVLNGIDEDLARSYTRLINQIRSALVGCYPQFEQALRGQIIHRKWVLHLLARYGGPTKIKRLGKAKAAAFARRYKARNPEPVLDAIFAAISEQTVAIAGAHYAEMGVAMSAKDALLKLEHRKQIEQEVIELINDIPHTQILLSMPGIGPKTAAQILMTAGDMTDFPTAGHLASYAGLSPRTNQSGTSIMSNSLNRAGNKKLKNALWQSSFASIRFHERSRQFYERKRREGKRHNAAVVALARRRLNVLYAMMRNHEHYHDPAPSQEDLAA

SEQ ID NO: 456046 - protein, 316 aa, unidentified
MSEKLLESFVGIDVSKNTLDVRIEPLGESLHVAYDEAGVSEIVRRLVEVAPALIVMEATGGLEIRLASELAAQGLPVAVINPRQARDFAKATGQLAKTDRVDAAGLAAFARAIRPAVRPLKDADTRALDDLVTRRRQLIAMRVQETLRLGSAASKPLQKNLKAHIVWLDKQIAKLDDDLTKRLRNSEVWKTKDDLLRGIPGVGAVTSVTLLAKCPELGVLNRREIAKLTGIAPLANDSGKHRGKRFIWGGRADVRAVLYMAAVSAIRCNPAIRAFADRLKQAGKPPKVVIAACMRKLLTIMNSMLKNNAPWSLQTT

SEQ ID NO: 456047 - protein, 464 aa, unidentified
MAGRMLPRAVGATAPHIDVLPCVHPNAAGLDIGADEIYACVPSDRDSRPVRAFATFTADLHALADWLEVCGIDTVAMESTGSYWLAIYEILAAPGIRVFLVNARQIKIPPGRKSDWKDCQWIQRLHMLGLLPASFRPDAEMALLRAYLRHRAALIAHRAPHILHVQKALHQMNIQLDRVLADITGTTGMAILRAIVAGERDRLVLAQLRNPGCKSSEEKLAKAMQGTWQAPYLFVMRQRLELYDFYTQQLAACAVELERYYGAMQPRFESDIDSTTLPAAKPGSKSKNKPNFNARAELARVVGVDLVAVTGLSAASVQTIISEIGTDMSKFATVKHFGSWLGLAPHNDISGGKVLRSRTRKVVNRAAQALRQAAQCVGRSETALGAYYRRMRARLGPQQATVATAYKIARIVYTMLKERKPFEAASAEAYDQQYRARAIKYLERKAAKLGFDLAPKILTEPVPS

SEQ ID NO: 456048 - protein, 376 aa, unidentified
MEVAGNAVGLDLGKRTYEMCLVSNDNKINRTGGKTDFSGLDKLCMKLTKDDVVAMEACNLAFRIERILREKIGCRVIILNPGRLAIIFMSTRKTDKEDSMKLAKYIKSHEEEEMPIVTPPSDEEWERRKLLSEYRALRSQRTREVNRLHAIFEHAGFTQFTRKDICVPKNREEILSLLKGYEKEESERLVERLLLLEKQIELLYKKINDETEKDEKVQKLMTVPGIGPITALSYVAYIGDVNRFKNAHQVSNFIGFVPKVDRSCTINRLGHITKQGNSLLRSLLVQAAWSCVRSKNGAALRDKYNYMSATRGIGKGKSIVTIARKIGELLYTLLKNNQCYEPKKFISSDERISKLTEEALFYANNRAGEKINLTCS

SEQ ID NO: 456049 - protein, 755 aa, unidentified
MATWVAGVDLGKKGAHVAVLADESGQQIGPALSFFTSPDDLDRVRAEFKARAPEGTQFVFVMEPTPTWRPVARYLKACGHRVFLANQSQASSLRKLLKRHAKTDRLDALTLAKLPLVSPQAVHPAPVPDDPRWEMLLRGVKREYKLSLHIANLLKWIKEDAEECIPGVADLFPEPERPLDNLVYREYCALERHRGMTRERLREEVQARLGRPLDPQETRRVDRLFSLAQQALRLHGKLVPATAAVAEAIREDLEFLRLLKAEQKRVTERNYELYRELDKKGCVRSLRGVGRVLAPVLLAVAPVVACMTSGKQMRKFSGYVPRVDNSGLKEGKGQSMTKEGPAWFKRALFLASDAGRKCDPQLARVYWRAMVEKGFPHVKAVCEVATHMADRLFRVLKDNRLYELRDADGNPVSAREAREIIATRYTVPEEVRARLRRQKKHGRGSSDERDGAKQHLPAMPTPSAPQVSTEATPRSTGTGQAQRVAAILAEHLGPEFLARLAARQPESLAPEMQPRRKDLPLRRAETATQGRTTATAGAPSQVAIGQQQSPTQGAENVPQPHAAAASRPPAVPVATTGVIPGNGHRQGTQSPLDASINAPTESRPNQSPGVATGPAASATDLPRGISQRQAPEEPPQQPAAALDVPAESTTAPEDLQHGTSAPDSPGDAPESPGPRGQHPFLPPLGKPVATATQASPLDPVTACPEARSMHLAPGPFRNAAETAATPPPVGAALTGPDPTGNGCHPRDRPIPGYPQ

SEQ ID NO: 456050 - protein, 400 aa, unidentified
MYKYFLGIDISKDSFDFCYTDETEKVLYKDHYQMDMTDFTKLSDYLASFSKDEILIVMEATGIYHLTLLSYLLEQELNVSVVNPLFIHAFTKSMTIRKTKTDAKDAHIISIFAKRNYATIRLSNVCDIETIKPIVREKEKLTNQISAIKTDIKSIVNQVFPEMLKNTNIFLKSSLNLLLQAPSKRIIRNLKEKTIASYLSCDTKRGAKPKVDAKEILLMAKNSIGINNQSLEKILVSKIKQLEFLQIQLDEFNETIEEFVDEHHNNDIDLLTSIGGVGKPSAASFLTELGDINNFATYKQLTAFIGTDPTIYQSGTSVNVKGSISKRGNSHLRRTLWHMARAATVWNTTLKAYYDKKRSEGKTFKQSVIAVANKLIRIIFSMLKNNTKFQIDYIPQGVKV

SEQ ID NO: 456051 - protein, 389 aa, unidentified
MYLIGIDISKYKHDCFIATEAGEIIKDSFSFDNDAKGFGQLLDVLQTLDPSQTKRIGLEATGHYGYNLKVFLDRNGFDYMEFNPILVKKLSTGLSLRKTKTDKADARLLSMILLSVDYRTYPVKSYHIQELKSLTRYYKSLVKKRSRELVELTNALDLIFPEFKPFFKNRFSQTAYFILEHYRTPEKIAKMSYQNFEKLHSISKGHLSYAMFLRLKDLAKNTVGSSSDLLVFEMESCIRLLQSVNREIKELEILLKDWTLKIDSPVFSIKGIGFISALSLIAEYGNFTSFDSPAKMLSFAGLEPSIIQSGTSNKQGHMVKRGSGYLRDTLMNVAVPFMMHNPVIYDYYLKKKNEGKPHRVALSHVAKKLLRIIFFLVKSNVQFNETKLA

SEQ ID NO: 456052 - protein, 333 aa, unidentified
MTVLTESGGYKSAFTQPASSKSLFEHLAKNYPDGIYHAVYESGFSGYSSCYELRELGVDCIVAHAADVPTSQKERLAKTDPVDSAKLARELRNGSLKAIYLPPKERLGDRELMRTRQTVMKDMRRVKSRIKHLLYNNGVQYPERFKSSRSHWTRTFIAWLQNDVELLSQKRMALDMEIEELLHLRGMVLKINRSIREMSRSDVYKDQYNLLIGIPGIGMITAMTVLTEIVDPQRFSSLKKFLSYLGLIPTMDNSGDTVKDGSITPRGNQKIRRMMIESAWTTIRYDRELAASFGNYSKYMKKNQAIVRIARKLAGRVWHVFKYGEEYKKCQLE

SEQ ID NO: 456053 - protein, 385 aa, unidentified
MQKDDLSRSLVAFDQNSTLVAVVELSLKTWLVGGLVPGLTRQPLRKQSADPDALAVLLHRWRDEAIKAGCKITRIVVAFEAGRDGFWLARWLLARGIEAYVIHPTSIPVSREHRRAKTDRLDTQLLMRAVLGWLRGEVKHCSMAAIPTLAEEDARRPNRAHEMLVGESTRVVNRMKAILIRFGIRNFKVKLSKAAQRLETLRGPEGELPPNTLAELRREMARLAFIKKQIKEIEKARLAELKQAPREGTHPMLLMLARVMGIGVETADMLVHEVLSRKLRDQRAVARYGGITGAPDESGSKRREKGLARAGNARVRRGMIQLAWRWLMFQKASALARWFQARTEGAKSGVRKTMIVALARKLLIALWRFVTTGEVPAGAVLRPAT

SEQ ID NO: 456054 - protein, 412 aa, unidentified
MKDLLEISCGLDVHKDKIVACILTGPLGKPTNSEIREFTTLIPDMIALRDWIVSQNCHHVAMESTGIYWMPIYEILEEAFGGDITLLVVNARHMKNVPGKKTDMRDSEWISTLLRAGLLNGSFIPEKRIREFRDLNRYRKSVIRDITSQKNRVEKFLQSSGFRLSSFISDIFGASGRNIIRHLTEHGRIDRSALDSCLKTKTRNRIDEILMSVNGTLSEHQKAFLKILMEHYDSLKEHLAEIEKSLEADMAPFALQVEQLSSIYGISTTASCAIIAEIGIDMKPFKTAGHICSWAGLCPGNNESAGKRKSTSVTKGNPYIKSMLCEIAWVIAGKRNTYLSAWYWRIKQKKGAKKAIIALARKLLVIIYTMLKQGTLFDESCFEARRKSCEQKQLSRYIRELEKHGYHVEAQA

SEQ ID NO: 456055 - protein, 421 aa, unidentified
MSSRTLSKKLASVKPGTLFVGVDLALDRNVAVVLSERAERLARFGFPNDRDGYDYFYRRLKAVQERQQAPAVLIGMEPTNYFWKLLASDMEQRWPDYGYRLVNPYTVKKNREGDQLDRSKDDNRDAFTICDLLRTGKYTQTRLLHGAYAELRQYVTLHTRLKRDIRRQKTLIRNVAGQLFPELPGVFKDFSGETALAMLRHHASATVVQRMSEKAFIASVRANFSGRRLQVAKLRRAHGLAARSVGLKDGVEALQLALRLHIGMLEALRRQVEKVHAALIDVFLALPESDYLLSVHGLGLITAATILSEIGDPKHYSNGNQLIKLAGTQPVLNTSGRKTRSRTPMSHKGRPRLRTALFFAVMRLVQVDEAFACQYLHLQTREKNPLTKMQALGVLMNKLLRILWALMHNRTFYNPDFQRVA

SEQ ID NO: 456056 - protein, 342 aa, unidentified
MEHYAGIDVSLEQSSVCVVDAIGKIVREAKVASDPWSLAAWFGSLGVEVRRIGLEAGPLSQWLFAGMAEAGLAVELLETRHVRNAFKTMPVKTDRKDARGIAELIRLGWFRPVHCKSLGSQETRAILTARTLVQSKLHDIEMSLRGILRGFGLKVGKTTSNRFAGRIRDLVDTHPSLQVIAEALLAVHEVLLREVKGFEKRVRIMARDNAQARLLMTTTGVGAVVSLTYASAIDDPGRFKSSKIVGAHFGMTPKKYQSGETDITGRISKIGDKSVRTALYQAAHVILTQPVKSSALMIWARRLAKRIGMKKAKVALARKLAVIMHRMLVDGTPFNFAAGAAA

SEQ ID NO: 456057 - protein, 324 aa, unidentified
MIESKLTVIKYFIGIDVSKATFNYCLRYGGGHVLNGKVANNVESIKEFVITLKEISGFKLGYAIFGMEVTGVYGLILINTLTKMKAKVVVEPSMRIKNSLGIIRGKNDKLDAARIARYLIKNLQELKLWVPRRKIIDELSSLSTLRERMVKVGVIITTPLNEDTNFIDPAISAANINLCNPSIIQIEHLITTIDIKIKALYTNDDHCNRLMKIMLSVMGIGPVTALQMLIHTNEFRSITNARTFASYCGVAPFEHDSGTSVKKRARVSPLANKRIKSLLHNGVRTCIANDPEIKAYYKRRVQVDKKNKMSIGYSDLYYTTHSEA

SEQ ID NO: 456058 - protein, 423 aa, unidentified
MEVMHKCCAGLDVHKNVIAACVRLTLGRKVERECRTFDTTTTGLLALLSWLSASGCTHVAMEATGVYWKPVWNILSDGTFELIVANAAHIKNVPGRKTDMNDAMWIADLVACGLIRASFVPDERTQELRSLLRTRKQMTREQTSHIQRMQRTLEEGNIKLDSVISDIVGVSGRCMIEAMIAGETSPVRLADLAHRRIRAPREALCEALRGRVTDHHRFLLRLHLRQYDALATAIAEIDQQVEMLIEDIDEQIEAGQATFRALIMLLCSIPGVGTLAAVVILSEIGRDMSRFPTAGHLLAWAGLCPGQNESAGKRKSSRLRKGAPWLKTLLIQCAWAASRRQDSYYKAQFSRLKARRGPKKAVCAVAASILTAIYHMLKDGTGHRDLGASYFDRRSIDAKAKRLVSQLTKLGFQVQLEQIAKAA

SEQ ID NO: 456059 - protein, 411 aa, unidentified
MASLSIGLDVDMQKVVACIVDEKGNKVVPTFSFPNTPQGGSEFLQFLQETVLTRKKVSSIKFGTESTGIYDWHLANFLTEAKLPCEVKVFRLNALRINRFRKSLPELSKTDKIDAEVLAQYLRISSALPFPHVSSDPYQPLRFLTRYRFHLVKSIVRETNIFFTYVFLQASRILQNKPLSPLTGKTISTILSSFSQEELISTPLPELTDLVIRESKNRFARPSHIAHLIKTAIRESYRLRPELSRTLNFILSHQVYTIRTFKSLLKELNRAISSELSSFSQTLTTIPGVNNILAAGIIAEIGNIRKFSSHDQLAKLAGYVWPEKQSGSFQAENRRMPSSANKYLRYYLAEAANLTRKYDPVFARYYWKKYKEARTHHHKRALALTTRKFIRLVFTLLLTNQPYHRRNNVRS

SEQ ID NO: 456060 - protein, 347 aa, unidentified
MSISMIGLDTAKTVFQIHGVDETGRAEIRRKLRRNDLIAFFEKQAACTVVMEACGAAHHWARMLTGLGHSVKLIAPEAVKPFVKKGKKNDAADAAAICEAASRPDVKFVPAKSVEQQGILALHAARSLLVKQQTMLANAMRGLATEFGITVPKGIHKLDELMAVVDADEIMPQQAKQAITGLHDYWNNLSEGIETFEAEIVAHARRDETARRLATIPGIGPITASLIAATVGDITLFKTARQFAAWLGLVPRQSSTGGKTRLGRITKTGNREIRKLLVLGATSMVYRANGWNSAVGAWLRSVLERRPVRLVTVALANKMARIAWAVMTRKEVYRPKGGVAAVAQATA

SEQ ID NO: 456061 - protein, 409 aa, unidentified
MIFVGDDWSEDHHDIEVLDEDGATLERRRLPEGLNGVGQLHELLAGFASDPGEVVIGIETDRGLWVQSLVAAGYQVHAPNPRMVARYRERHVTSGAKSDPGDAKVLADLVRTDRHLHRQIAGDSELAEAIKVIARAHQRQIWARQRQVNALRASLREFYPSALVAFGNDLAHPDALGVLGKAPTPAAGRGLSHSTITACLRRGGRRRFVEDTAKKIQEALRAPQMEPTTTLADAFGATVRSSVAIIGELNRQISTLETELRSHFEQHPDAEILHSLPGLGSILGARALAEFGDDPNRYQDARSRRCYAGTAPIAITSGKRKTVLARFKRNHHLADLCYWWAFCALTHSPGVRAFYDARRVGGNTHDQALRAVGNRLVGILDGCLRHRTLYDEAKAWGLRTDLSGEGAAA

SEQ ID NO: 456062 - protein, 418 aa, unidentified
MDAMVERCAGLDVHRDDVVATVRVPGEGRRRWDQETRTFRATLGGLAQLAAWLAEAGVTLVGMESTGVYWRTVFQALEERFECWLLNAHHLRNVPGRKTDVKDSEWICQLVQHGLVRPSFVPPPEIRRLRDLTRLRKAQSNERGRTIQRLEKVLQDAGIKLSSVASTTYSKSARAMLEALLSGVTDPEQLAELSKGKMRAKIPQLREALASRFQIEHHGIMVAQLLAHIDTLDIALQNLTERIEFVLEPHAEIIELLCTIPGVQAHAAQVLIAECGLDMSLFPTVGHFASWAGACPGHNESAGRRRSARTRPGPPWLTSQLTECARAAVRTKGTYLAAHFAQLRGRRGEPKAIGAIRHDLLVAYYHIVRDRVPFRDLGPDWQRKRYSVEHRAQRLQRQLEALGYAVTLEQTEPAEQAA

SEQ ID NO: 456063 - protein, 387 aa, unidentified
MPQRNDLSRSLVALDQDSTLIAVVEMSQSTWLVGGVLPGIERQPRKKLEPSPERLLGVLHRWRDEAVRIGCNVTRIALAFEAGRDGFWLARWLMARGVEAHVIHPSSVAVSREHRRAKTDRLDTELLKRAFLGWLRGERGHCSMARVPTIDEEDAKRPNRERECLVKERTRLVNRVKGTLARLGIRNFRPSLRNAAEHLAALYTPEGSPLPPNVSAELERDIARLGLVIGQIKQIEQARQQRLEQEPERGRHAMVRRLARVVGVGIETADMLVHEVLSRPMRDRKAVARYAGLTGSPDESGAKRREQGLARAGNARVRRGMIQLAWRFLRFQQNSALARWYRVRTADSRRGTRKTMIVALARKLLIALWRFVTTGETSEGVILRPAG

SEQ ID NO: 456064 - protein, 359 aa, unidentified
MNTKPVVTPATATQSIAVGLDVSKDTLDVCLLLENKQGLNKRHEKQFANDTAGHRQLLRWSQSLAKESSCHFCLEATGPYSQGVALFLVEHEQKVSVINPARIRFFGLAQNQGNKTDKADARLIAQYCRMQSPPPWRVAAPEVRYLQEMVRRLHALSDLTAQEKNRMQAPGQCKAVVASSQRVVTALGKELLRLKKEVRSHVKVQEDLFRDSKLLQSIPGIGEITSWDILAEMPDVEEFDSAQSVAAYAGLAPREQRSGSSVRKQTQLSKRGNSRLRKAFYFPAVSAMQWNPVVKAHYERMREKGKPKMVALAACMRKLLMICYGVLKHQKPFDAQWLSHASSPSSSEMTVSSNLLPVM

SEQ ID NO: 456065 - protein, 385 aa, unidentified
MTIQIEGRRFIPREYDVFAGLDVDKKSMSVTFADHAGSQRALRMAHEVTPLLNYVRKHFAGQRVAFAYEAGPTGFGLHDELVRRAYTCVVVAPSKVPRAPGERVKTNRLDSRKLAESLRGGQLHSIHVPSGVYRNLRHLVQMRDTHVRQLTSSKLRIKSLLLYEGIAFPDPHEKWSARALRELQTLPCSETVRFKLDDLLDTLHFHFQAAARATKQIRQYCLDDPELQQSIEMLLSLPGIGWIVASHLVARLGNPQEIKNGRQIAGFLGIVSSEHSTGEKENRGEITRCGDSRLRNKLIQSAWTAIKKDPELREFYRRIYQRHPQKVAARKAIVAVARKLTNRIYVVLKEQRPYVVRPDTSIAPLTTEETVGPRERLDGAQNDQS

SEQ ID NO: 456066 - protein, 313 aa, unidentified
MENQTYIGIDISKRHFDLYVLPESKEYQFENNNQGIRQCLHRLCEARSKLIVMEATGGYEVALATELHLAGLAVAVVNPRQIRDFARAVGQIAKTDKIDARVIARFASTVEPPAKDVLDAKARQLKALVARRDQLVGMHVAESNRMEHAEDKDIVRSIEAVLKTIERQIIQVDSQIAEHIVQDPQLKRKADIIDSAPGIACTTASMLVTRLPELGLLNRRRIAALVGVAPMNRDSGTFKGKRMTGGGRRRIRTALYMPTLAAIRHNPVIREFYNRLLAKGKKKMTAVIAAMRKLLTILNTMVAKNQCWNPNIA

SEQ ID NO: 456067 - protein, 343 aa, unidentified
MTKISMIGLDLAKNVLQVHGVDASGAVVLRRQLRRSQVEKFFASLPRTIVGMEACGGAHHWGRVIGKYGHEARLMPPCYVKPYVKRNKNDGRDAEGICEAMSRPTMRFVPVKSVEQQATLVLHSTRALLVRQRTMAANALRAALGEFGIVAAQGLKGLRELMQQVATPCASIPDVARDALLLLARQWEALDAAERALQRQIAAAARADQDARRLMEVPSVGPIIASAVIAKVPDAHVFSTGRDFAAWIGLTGRDRGTGGKHRPGPISKRGDRMLRSLLITGASAYLRHQRARGVTDPWLREMLARRPYKVVMVALAAKTARIIWALLTKAERYRNRAPTPVAA

SEQ ID NO: 456068 - protein, 360 aa, unidentified
MDVVIGVDAHKKTHTLVAVDKAGRRLAQKTIATTSAAHGEGARWARSRFGTNLIWAVEDCRTLTARLERDLLAEGLDVVRVPPHLMSRTRASSREQGKSDPIDALAVARAVLREPHLPVASHDPVSMELRLLVDRREDLVGQRTATINRLLSRVHYLDPEQPVPANWNVKSARDEIQAWLATQEGLVAELAGDEAADIARFSDDIAKLGRQITQRVRAVAPTLLAVKGCGELSAAKIVAEVADIRRFRSEAAFANYIGLAPIPHSSGETNVRIRKGRHGNRQLNMAVHRIAVTQIHHEGPGKDYFQRRLAEGNDRHHALRSLKRRLARVVFNRLRADQSRARADTQDQSIQGEHRQPTGQ

SEQ ID NO: 456069 - protein, 408 aa, unidentified
MADKVAGIDVHKKVLMVVVIDARAPESKPERRRFTTMPGELRRLSTWFREQGVDEAVMESTAQYWRSVWLELEPHMRLHLAQAFSNRAPRGRKHDFKDAERLVRRLIAQELILSFVPDEEQRIWRNLTRMKQQLIRDRVRLQSQIECLLEEMRIKLSVVVSDLLGSSGLRILHALAQGETDAKSLASLGDDRLKCSKEQLIEALTGRSQPMHRQMLALQLERLRLLDEQIAKLNNLIAQALKPHQDAIIRLAEVPGLGIDSAQQIIAEVGVTASTFSSAAELTSWVGTCPGKEESAEENSSSRSAKGNKYMRRVLNQAAHAAAKSKGTHFQGVFRRLLPRLGYQSAVWAIAHRLCRLVWKILHEGIRYIEQSVEYEPKLLIQRTQNLARQLRKFAYNVQITPANATPA

SEQ ID NO: 456070 - protein, 355 aa, unidentified
MSQEKYIGMDVHQATISVAVRDSAGKLIMECILETKAATILEFIAGLRGSLSVTFEEGTSAAWLHDLLKPHVSHLVVCDPRRNALLKDGSKSDRIDARKLAELLHGNQLHAVYHGEHGLRTLKELGRSYLTITKDLTRVMSRIKALYRSWAIPCSGTTVYAPRHRVEWLAKILEPGVRLRAERLYQQLDLLQPVRQEARRHLLLESHKHPAVKLLQQIPSIGPIRAALLVALLQTPHRFRTKRQLWAYSGFAVETHDSGEYRLVRGKLVRNRERITVRGLNPNHNHDLKNLFKGAAISASARPGPLCDFYGALVEKGMRPTLARLTLARKIATITLTLWKKGVQFDAKQLNRQAA

SEQ ID NO: 456071 - protein, 309 aa, unidentified
MKYYIGIDVSKLKLDICILKSLDSKDFKQIKNDKKDIKDFFISFENLNDLIVVFETTSTYSYNIAKVLTDLKIKYSELNPLKVSHFLKYISNKKNDKIDSYNLAYYSLKFENEIVFDSFNDKSKLLRSYQTLIELLNKINVQIQNYDDSQIHIYDENIKSVIDEFLDISNDNKRMLEDKAFDLVCDLLPQTKTILANEKGIGKNLAIYLFPVFYFNQDKNYKQIISYLGLSPKVFESGSSVKKKSIIDKKGNSNIRKALFLSSLSCVRYNPKFKRYYEHLLTQNKNKKVALVAVCNKIIRHLKNQYFRY

SEQ ID NO: 456072 - protein, 347 aa, unidentified
MKDVTTIGLDLAKHVFQAFGADADGTTLFNRKLRRAEVLRFFEKLPPCMVGMEACASAHYWAREISALGHEVRLLPPQYVKPFVKRGKTDAADAEAIAEAMSRKTMRFVPVKTAEQQAAVMVLRTRALLVRQRTQAINALRAHMGELGIIAPTGIANVKSLAPIIRDEKDTRLPPAARFALTEIVDQIERLSVQIDKLEREIVVQARQDDEMQRLTTIPGVGAIIAMTVKAFVPDPAGFKSARHFAAWIGLTPKAHSSGGKERSGRISKMGNPMLRSLLTTGAASVLRHVQYRDRVWPWLKNMLTRRPFKVVAVALANKIARMIWALLTRGGIYRDPTGIEAGSSAA

SEQ ID NO: 456073 - protein, 316 aa, unidentified
MSESTSFVGIDVSKSVLDVHVLPAGEHWQVSNDEAGCAQLIERLKPLGQGLLVVMEATNVFWRMAATALAGAGLACAVVNPRQVRDFAKSMGKLAKTDAIDAQVLALFAQRVNPPVRALPGAQCQVAAEMLARRAQLMGMRVAEKNRLATASAKRVRKDIEATIAFLEKRLAALDEQIDQWLKSTPIDQSRANLLQSFTGIGQNTARSLLITLPELGSLSGKQIGALAGLAPFAKDSGSKRGQRHIAGGRSTVRAALYMPALSAIQHNPVIRALYQRLLHAGKHHYVAITACMRKMLVILNAMLRSNQPWKAPQNP

SEQ ID NO: 456074 - protein, 315 aa, unidentified
MAMPVSVAKPIVGVDVAKDELVIYHAETDRLEAIPNTKAAIKKWLKELSAPVDVAIEATNIYHQEFADLAYAQGCVIYMIGGYELSHYRKGVKVRAKTDALDARLLARYLNNEGHQLHPWTPPSPLYCRLISLFRRRAALVQARVSLKQSWSNEPLLKRAFENQIKAMQRLEILLEKTIQTQLEAAGLGAQLKRCMKVEGIGLLNGARLLTSFQRGDFRNADAFIAFLGLDLRISDSGKKKGRRCLSKRGDPEARRLMHNAAMSARRTAAWKGFYEALRARGLSTTEALVALARKLARVVFALLKNQSEYLPKGI

SEQ ID NO: 456075 - protein, 340 aa, unidentified
MHATTYGLDVAKRVFQMYWVDGDTGEIVNRRFGRDDLIRYLSLRPPGRVALEACGSAHWWARKIKALGHDVVLLHAKFIRPFVQTNKTDAADARAIWTAVQQPGMRTVAAKTEDQQAMLSLHRIRSLLVKFCTMQVNQLRGLLYEFGASFRAGRVAGLAEIRARMVELQEALPGAMMCCLQDQLGRIDGLQTEIEQLEQRIGASHKQDADCVAIASVPGIGRLTATALVATLGDAGTFKSGREFAAFLGLVPRQSGTGGKVRLGAMSKRGDPYLRTLLIHGARSVLCHTKAPTQWQSAIQERRPANVAAVAVASKMARTAWAILAHGQAYRRDHVSVRPA

SEQ ID NO: 456076 - protein, 344 aa, unidentified
MEPMYYIGLDVHKRKISYCVKDSSGKVFAEGSLPATRLDLDLWMKTLPQPWSAAMEATMFTGWIYDHLKPHAAALKVAHPLMLRAIAAAKKKNDRLDASKICDCLRCDFLPECYMAPTEIRERRRTLRYRNLLVRQMVQMKNKISGLLMEAGVSYNKQRLHRAGYFRELLATNSDIDEGLCSLLRLCRETVVRLQKTESAMVLSLERDSLLMDRVERLMTIPAVGPITALTWALEVGDAQRFSSIKKAISYCGLCGAEKSSGNTVQRTPLSKQRNKHLQTTLIEAAKMAPRYSPNLAMLYDKEKQKGNANRATLAVARKLVAYLMAIDRGQRNFQAVETNCIAA

SEQ ID NO: 456077 - protein, 348 aa, unidentified
MKRIVKQVVGIDVAQNELVVCLGKMLDDWTPELYASKSFANTKKGFISFIEWVNKLTNVSIPVRYVMEATGVYHELLAYYLDDRGLELSIVLPNKISNYARTLDVKTVTDKTASEAIARFGLERKLDRWSRPKDLFKKLRQLTRERGQLVDERTVLKNQLHAEQAEAEPNKKSIERIKKRIALLDKQEKEIRQEIEELIKSDAEIRQLIILICSIPGVGLLSAATVLGETNCFDLIRNKRQLTSYAGLDVKEKQSGTSVKGKPRISKKGNKHLRKVMQMPALSAIRHDERFKAVFVRLVSKHGIKMKAIVAVQRKVLEMIYTIYKTNKPYDKNYFKNQEQEERNLVIQ

SEQ ID NO: 456078 - protein, 385 aa, unidentified
MKPNSQMTMGEFFRQCVGIDISKDKFTACLYMYDRASDEGCCTKSINFANTKSGFNQMVRWSRKEAIKGYSLTYLMEPTGVYYEHLAYHLHKIGQTVYVVLPNKARQFCESEGIKTKTDAMDARCLALMGCVSRKLKAWSPPAAIYRELRQMTRFHADLWEVRTSVTNRLEALRHMEGLSKTVRRNCEKLIEEIDTLIEKNDKAIMQKVAEDKELEARVKRIATAKGLGEATIVCVIAETEGFHLIENRKQLTSYAGLDVEARQSGNDDPRHRISKKGNAHIRAALYMPALVAIRYNRQIRAAYGRVCQKHPKEKMIGVAAAMRRLLLLIYTLWKSGEVYDETRDTTRTPRKKSPELEHGPKDSITTTKEHVDWNAVGENGQALF

SEQ ID NO: 456079 - protein, 433 aa, unidentified
MPTNHPYDLVIGLDRSDRKADLHLITPASGQRRSETIDTSPEALWEWLLELRQTHPQGRVALCLEQPAAHLIAFLEAYPWITLYPINPITLQKYREAFVTSRAKDDGKDARYLAELLLNHHDKLKAWAPEDSPTRAVQHLVFHRRAVVDERTGLSNRLIALLKQYFPQALVLCGEDLWRPLATRFLLKWSSLQAVQKAKPPTLKTFYYLNGSRSAKLLERRLALVQGAVPVSDESSLINTFSLRVQLIARQLQLLHQTIQSFDQQIAAAFAQHPDHAIFASLPGAGPVLAPRLLASLGSQRERFAQAASLQRYTGVAPVTKRSGASCHIHRRYLCPKFHRQSFHEYAKESVLWSRWAAAYYLQQRTKGAHHHSAVRALAYKWQRIIWKCWQSRTLYREEIYEAALRKNGSRLVGLLDQIELGKSPFKTREKKS

SEQ ID NO: 456080 - protein, 408 aa, unidentified
MQLFVGVDWAEDHHDVCVMGADGQVLSKGRVSNDLAGIARIHDLIGRAVPAELDEDPEVIVGIETDRGLLVRALVAVGYRVLAVNPLGVDRYRDRVRVSGAKSDPGDARVLADMVRTDAHQHRPVAADTDLAEAIKLVARSHQSAIWSRRRLANQVRSALREFYPAAQQAFGDLTSGDAVSVLAIAPTPELGRALSRSKIASALRRGGRKLNVDRKAAEIQAALRTDQLAQPTVVADAYGAIVASLAKVVAAHNAQIAELEEVLEAHFSQHPDADILRSLPGLGVVTGARVLGEFGDDPDRYESAKARRNYAGTSPLTVASGTRRVVRARHIRNKRLADALHWWAFNATNQSPGARALYDHRRAQGDTHSGALRVVSNRLVAILHGCLRTRTHYDETTAWAHRNDIAA

SEQ ID NO: 456081 - protein, 363 aa, unidentified
MKIMVGIDLHSNNALCGLMDESGRRLVHKKLPCDLTAILQLLEPYKASIATVAVESTFNWYWLVDGLQDHGYHVVLANPARMQPYSGMKYTDDVSDAYFLAERLRLNLLPTGHIHDRKTRPVRDLLRRRLLLVRQRTRLILSFKSLNERTLGQRVSLARVKSMKVEEAQARFTAPADQLLSGTEIELMGHLTAAITKLEQHLLGVAGKGPVYQRLQEMPGIGKILGLTIALETGDAQRFAAAGNFASYSRCVKSLRTSNGKKKGENNRKCGNKYLAWAFVEAAHFACRYDDQCRRFYDRKKQQTNPIIATKALACKLAKAAWHVMSQDVPYDAARVFGPARKSDFGETGREPAKGSGHPSQQD

SEQ ID NO: 456082 - protein, 407 aa, unidentified
MMIKLSGSKQLPNIFKGCGSMIYVGIDIAKQKHFAAAMTADGEVLIPPFGFTNDAEGFKLFLSKIKSFKKENTLIGLESTAHYAENLICHLFDLGYHISVINPIQTSTLRKTNIRKTKTDKVDCLLIIKSMIVNKPRLYSKSDIDSLRLKSLCRFREKIKKAKAKLKIQLVAYVDIIFPELQYFFKSGIHTNTCYQLLKKHSSPDDIAALHLTYLANLLQKASHGRFGKEEAIALKGLAKSSVGTDNTAVSIQITQSIAQIELLEQQLADLDGIIESIMLEMDSVILTIPGIGFLNGAMILGEIGNISRFSNPSKLLAYAGLDPTVNQSGKFNAKSTKMSKRSSKLLRYALINAAWNVSLNNKTFNDYFNLKRSQGNNHYAALGHVAHKLVRIIFKMLKDNVAFNLD

SEQ ID NO: 456083 - protein, 348 aa, unidentified
MLADQLDYVVGVDPHRDSHALAVVDVVSGAVVFEATVAASSNGYAHALKLADQHAAGRRAFAVEGTGSFGAGLTRFLTGQGERVLEVGRLRRERRSGGKTDALDAIRAARAVLAQGRPATPRASGEREAVRALMAAREGAVNARRAGLCQLQDLLVTTPEPLRSELRPLTRARLLRRLAATRPQQRGHDPELRGALLALRSVARRVLQLTAEERELAREIETLTRKLAPQLLDQPGVGPLAAAQLLLSWSHPGRITSEAAFARLAGAAPIPASSGQTIRYRLDRSGDRRLNRALHMILVTRRRTHRPTIAYITRRTEEGKSRREANRCLKRYLARNLYRLLENPPMPT

SEQ ID NO: 456084 - protein, 343 aa, unidentified
MSEISTIGLDLAKNVFQVHGVDRSGAVVLRRQLRRGAVEKFFAQLSPCTVGVEACGTAHHWARVIGRYGHHVRLMPPAYVKPYLKRNKNDGRDAEAICEAVSRPTMRFVAVKSIEQQATLAVHTTRALLVRQRTMIANSLRAALGELGIVAAPGFEGLRQLMTGLEAPNEEVPEIMRGALLLLAKHWQALDADERVIERQITKAARADGEARRLMQVPCVGPIIASTVLAKVPDARVFRSGRNFAAWIGLTGRDHGTGGKHRPGRISKQGDRMLRAMLITGASAYLRQQRMRGVSDPWLRDLLARRPYKVVMVALAAKTARIIWAMLAKGEPYRGRASALAAA

SEQ ID NO: 456085 - protein, 347 aa, unidentified
MTHFAGLDVSLEETAICVVDETGRLIKELRAASEPLALIAALTGLGLPLERIGLEACSLTAWLHDELRAAGLPAVCIETRLANAAMKTMPNKTDRNDARALAQIMRTGWYRQVHVKSRQSRLWRSLLVARRTVLNEMRAIENVVRGILREGGIKLGTPARAAFAERVREMAGDDPLILPLVTPLLAILATMLEQLDRLTRQVLAIVRGEMVCRRLMSVPGVGPITALAFRATIDQPERFRHSRNVGAHLGLTPSRYQSGETDIQGKISRCGDELARTALYEAAHSLLTRSRKWSSLRAWGMQVAKHRGMARARVAVARKLAVILHRMWSDGTEFRFGKEPAAAVAAA

SEQ ID NO: 456086 - protein, 412 aa, unidentified
MDVIYPQCCGLDVHKKTVVACCLISTEGPETVKEIRTFRTMTADLLALADWLQERGCTHVAMESTGVYWRPVYNGLEGQCDLLVVNAQHIKAVPGRKTDVKDAAWIAELLRHGLLRGSFIPSKPQRQVRELTRYRSTLVQDHARALNRLQAVLEDANLKLASVVTDIYGVSARAMLEAILAGQRDVEVLADLARGRLRAKRDQLKEALEGRVTAHHSFLLTEHLSTLEYLDEAIERVSAEIDQRLTAEQEAIALLDTIPGVGQRAAEILIAEIGTDMSRFPSAKHLASWAGMCPGNHESGGKRLSGKTRKGSRWLRQILVEIAHVASKTKNTYLAAQYRRIAARRGKKRALIAVGHTILTIVYTLLTRKQSYQDLGAAYFDQREQHRVERRLVQRLERLGYEVALQPKALAS

SEQ ID NO: 456087 - protein, 400 aa, unidentified
MISVGVDVSKGKSTVCILKPYGEIVCSPFEVQHEEGAMEAFVGLLAKLDGEIRVVMEATGIYHLPVLAFLQDKGYFVSVINPFAMKKYAKDNSIRGAKTDKLDSMMIANYGIEKWYKLQKYEGDEETYAELKLLGRRYRYYMELHVKALQELTHILDYVMPDIKKMFNSWNEANGKDKLSDFVEKFWHYDLITSMNLEEFTEEYLSWAEEKKYHRSRSKAEAVYELACNGIPTLSSNTPSTKMLVQEAVSVLRAVDSSLALILARMQSLAKSLPEYSTVREMGGVGDVLAPKLIAEIGDVRRLHSAKALIAWAGIDPPPYESGQFIGAKRKITKRGSSTLRKVGYEVMRVLKSHPAPKDDAVYNYILKKEAEGKGKKHAKIAGLNKFLRIYYARVTEVYQ

SEQ ID NO: 456088 - protein, 329 aa, unidentified
MSKNTIKTMETKTAVVYAGVDVAKATLQLHLQGRQSEFSNTPKGLHQLCAQLQKVPSVQVVCEATGGYERALVKALQQEQILVSVTNPARVRAAAQAQGQRAKTDRIDAQVLTDYGQRYQPKTTPPTSATQDQLVALTQWLKQLIHGRALAKTQNEHHQDPFVCRQHAKLIRHLDSQIEAVEKQIKALLEQDAALQQRVNCLEEIQGVGPRTAWMVLAHMPELGRLNRHEVAALAGLAPWTRESGTMKGMRCIGGGRPEIRLALYMAALSAARCNPVLRDLYKRLRAKGKMSKVALTAVMRRLLIYMNQCIKALISQTATAQTEALEKA

SEQ ID NO: 456089 - protein, 326 aa, unidentified
MSTPIVHVGLDVAKKSLDFDLCGSAVHLSYDPAGCQKLLARLNAIPGRIHVICEATGGWERTVVAALHEAGIPVSVVNPRQVRDYARASGRLAKTDQIDAQVLSAFGQAIKPRPTAPPEPVQAQVAAWVTRREQLQLMLNAELCRQMPGLPKAVVAHLAKSIARLEKELKKVVETISTLVASNPKLNEAAVRLHAFQGVGPGTVAVLLGHLPELGTMADNSIAALAGLAPLNNDSGPRRGQRHIAGGRASVRTALYMAAFNAARFNPILRPFYQRLRANGKPFKVALIATARKLLTALNTALKDPSFVPVASANLTSSTTETHIPA

SEQ ID NO: 456090 - protein, 405 aa, unidentified
MNKLKRVCGLDVHKDIIFACIKKGKYQSEVKQFSTTTQGLSELSHHLKGEHVYKVAMESTGIYWMPVWRALENEFELLLVNPYFIKQMPGRKTDVQDSQWIATLLDKQLLKGSVVPEKMIRVLRSYLRRYAQLQGQTTRCLQQIEKQLSQCNIKIASLSSTIGSKTVIDIVESISKDNYAPKQLIALVHGRILNKHGAKVQQSLEGIIEEHDVFLLRQIYEDYIHIERQCNELLVQAQKIAEVHYKEQLELLQTIPGIKQLSAVIILAELGGNIKLFETAQRLTGWCGLRPKNDESAGKIKSRSITKGNKYLRRILVQTAWAASRTKNCYLKTKFEQLAIRKSSKKALIAIARKQLVIIWNVLTKQEEYKEPQIKLSAEQIGRKQKYYQDKLSRLQLQQVIEKAV

SEQ ID NO: 456091 - protein, 414 aa, unidentified
MEKERINIYHKRNTCFVGIDMHKDAHCAVVIDCWMNKLGEVNFENRPSRFPAFVEDIRKICGIKEIVFGLEDTRGFGRNLAAYLVGRKFEVKHVNPAYTSAVRLANPIIYKDDSYDAYCVARVLRDMVDTLQDAKHEDIFWTIRQIVKRRDLIVKSNVMNKNQLHSQLAYSYPSYRKFFAMIDSKSALCFWENYPSPEYIWNTTPEEIYQTIKPVHQALKIQRIHEIITMIERDGDTRKDYQPERDFIVRNIVKDIRHNKELIAEIDDELRKLIPLTGYKLHTIPGIDLVTEAQIISEIGDINRFPDSDKLARFMGLAPVQFSSAGKGKDQRCRNGNRALNAIFHFLAIQMVAVSASGKPRHPVFREYFEQKVKEGKNKPQALVCVARRLVRIIYGMMKTKTEYRPYEKADDKS

SEQ ID NO: 456092 - protein, 336 aa, unidentified
MKKNYEFVVGLDVSKDKLDYCIINQSTLHQDFGQLANTAKGIAAFLSSVVKKLKGKREGILFCLENTGVYSMPLCYWLQASQFDYWVVSALEIKRSKGIVRGKTDKADSRDIALYAMSHLHQLKLSSLPEKDFVELRLLLTEREKVIKAINLFNMTNESKNFLPNSVLKTTLQHNKRMMTFLKKQLKQIEQSIENLVQSNPVFKQQDDLLQSIPGVGKQTSVLLIAYTQAFTLFQNHRQFACYAGVAPFEYSSGSSIKGRTKVSNLANKKLKTALNMAALSAKKHDTQLKVYYEKKVSEGKNKMLVLNAVRCKIISRAFAVISRNSKYVDTMKAVA

SEQ ID NO: 456093 - protein, 387 aa, unidentified
MPQPNDLSRSLVALDQNSTIIAVLEMSQSSWLVAGMLPGIERQPRKKLEPSPERLVAVLHAWRDEAVRAGRTITRIALAFEAGRDGFWLARWLEARGVEAHVIHASSVAVSREHRRAKTDRLDTELLKRGFLGWLRGERGHCTMARVPTIAEEDAKRPNRERECLVGERTRIVNRIKSTLARLGIRNFKPTLRKASERLASVHTPEGMPLPPNTLAELQRDMARLGFVMSQIREIEVARQKRLEQQPETGPHAMVRLLARIVGVGVETADMLVHEVLSRPMRDRKAVARYAGLTGSPDESGAKRREQGLARAGNARVRRGMIQLAWRFLMFQKESALAVWYRTRTVDSRIGTRKTMIVALARKLVIALWRFVTTGETMEGVILRPAG

SEQ ID NO: 456094 - protein, 347 aa, unidentified
MIIVGIDAHSRSHAAAAIDEQGRLIEGIDIDAGVRGLERLCAWLETLPQPRLVAIENARGYGLAIVRRLLAQGEELVDVPASLTCDGRRGSGQRGKHDQGDALVIARIGLRDRERLPRLDASVLDDELKLLVDARDQLIVEAGRWRNRVHALLRVAAPGYQAKTGALASAGNVRRARSIARRAAQHDPTRGRLALQALDRLAVLERDADGLEQEIKDLLKTRGCTHLLAIRGVGPIVAAKILGETRGIGRFRSAPAYAAHTGTAPVPASSGRVQRHRLNRGGNRQLNRALYTIAMVQARWEPAARVYLEHKIGEGKSAAEARRCLKRHLSNVVYRALLADQEARGLT

SEQ ID NO: 456095 - protein, 338 aa, unidentified
MYFTGIDLHKKTSFITTVDEQGHVRARRNLPNQLPVILNYFSSLAHPTQVVIESMGSWYWLYDALNETGHAVIISNPCKTKAIASAKIKNDKIDSHMLAQLLRAELIAPVHVSRLETRQLKELLRHRSKLVNDARRMKNRIHILLMKNNIQQPFSDLFGARGIEYLRQLPLPESYQAQLNVYLALYLQLEQQIEPLTQQIRQLAKQHPMAKLLMSIPSIGPIVAMTFVAEVEDITRFASYRKLAAYAGIVPSLDSSAGKDRRGRITKQGSKYLRTALIEAAQCVARLRNCRLNAYFRKRIVRSGYSKAVTATAHKILQIAYYVLKNQQPYQEQYVARA

SEQ ID NO: 456096 - protein, 276 aa, unidentified
MDHFAGLDVSVKETSVCIVDETGKIVREVKVASEPDALVEVLTSPSYHFKRIGLEAGPLSQWLYNALAEAGLPVICVETRHMRAVLKAQINKTDRNDARGMAQMMRVGLYRPVHVKTLRSQKLRMLLTHRKLLQSKAIAIDNDLRGTLRNFGLKVGMVGTAKFEARIKELVENLPDLAMLVEPLLVVRRVLREQIGVLHRRLLAIVRDDDVCRRLMTVPGVGPVVALTYRATVDVPARFKNSKAVGAVFGLTPSRHQSGESDRPGSVSHCGPENVH

SEQ ID NO: 456097 - protein, 356 aa, unidentified
MAKRNTRGRGVTIGLDLGDKWSEGAVLDARGELSERARVRTTQKGFAQAFTGYEGARLVLEVGTHSPWASRSFAARGFEVIVANPRRTRLIAESDKKNDRFDAEQLARLGRIDPDLLSPIVHRGEEAQRDRILLLSRAGMVRARTQLINQARGFAKSLGTRLPSSSSEVFAKRVRAAVSEDLFPGLSTMLGMIEQLTQEIRTMDREVERLCRDRYPETALLRQVSGVGPQTALAFVLTLEDPWRFAKSRSVGAYLGLRPRHRDSGGQRPQLRITKAGDGLLRCLLVSAAQYILGPFGPDTDLRRFGLRLAEHGGKSAKKRAAVAVARKLSVLLHRLWVTGEGYEPIGYGERHEQAA

SEQ ID NO: 456098 - protein, 355 aa, unidentified
MVVIGVDAHKRTHTASAVEEATARALGDVTVPADGDGHLRLLEFARGHGEERVWAVEDCRHVSGALERFLLGAGETVLRVPPNMMSGARKTERTRGKSDPIDATAVARAAIRQPDLPRAFLAGPEREIALLVGHRAHLVHERTRLAKRLRWLLHDLDPQLEPADRTLSQLQTIKRVDRRLARRAPSVAVRICREHLARLRDLTRRIDALRRELAPMVRRHAPQLLLMPGCGTIVAARIVAEVANIDRFQTDAQLALYAGIAPLDASSGKQQRHRLNRTGNRQLNHAIHIIAVTQARIYAPAREYLARRKANGKTNKEALRTLKRLLIRRVFTLMRTTTSRKPIAVDTAPFTPCLT

SEQ ID NO: 456099 - protein, 419 aa, unidentified
MAGSNDNGIVNVVHPICCGLDVHKEKISACLISSSVFGGTYTEVQEFGTFTDELMRLRDWLLKNDCPIVAMESTGIYWRPVHNVLEGYVEVILVNARHIKNVPGRKTDICDSKWLGGLLRHGLLRGSFIPPKEVREWRDLTRLRRTYVETLGDYKRRTHKLFESANIKIDSVVSDLFGQTGRNLMRLLGQGSFPIRQEDMEGCLRGKLKAKREELYRSVQGFFTDHHGYLLHSLLKTIATIEGEIEAINDRLRQVMKNHESLLRMLMEVAGISEVSARGILSEAGSTMDPFRTSAALCSWAGVCPGNNESAGKRHSGKSPVRKHHLKTIMVEVAWAAVKVKGSYYREKYYRLKARRGARRAIVGIAHRLLKAVYHIIKDGVPFKDPGEDFLNRANGLQNKVRRLRNQAHQLGYALVAQI

SEQ ID NO: 456100 - protein, 415 aa, unidentified
MALKIVYKICCGIDVHKTFVVACIASTNSKGITTYERHRFSTYTSGLKDLLQWLLKRNCKDVCMESTGKYWIPIYNILENDCSIVLAHPKYVKAIRGKKTDKKDAKWIADLFKHDLVAGSFMPPADIRQLRDLMRYRFKLTCFQSSEKNRLQNCLTVSNIQLGNVVSDTFGKSAQAILDKILENPEDTSFDLEPFVYRSLKKKLPELRDAIDGYITPEQAGKLKVIKAHYESLESRKAELEELILALAAPYQQELAILQTAPGISSGFTAIGIISEIGTNMEAFPSAKHLCSWAGLTPTNNESAGKKKSVRVSKAGCYIKPLLVQCANAVVKSKKHPEIRNRYLRLKKRRGHKKAIIAIARMLLTALYHMLKNGENYNAELYQKSDLLPVDREITVEQALMIARNQGYKIKSATA

SEQ ID NO: 456101 - protein, 457 aa, unidentified
MPARRKKPRSGAVSPARTIDPNAAGVDIGATEIYIAVPSDRDPHSVRRFATFTEDLMAAADWLQRCRVTNVAMESTGVYWIPLFQILEARGLKVCLVNARHVKNVPGRKSDVCDCQWLQHLHSAGLLRPSFRPSSQVCAVRSLVRYRDSLVQLSAVHLQHMQKALDQMNLQLHHVISDLSGKTGMAIVEAILDGERNPQQLAKLRDPRTKASEETIAKSLVGDYRREHLFTLRQSLTGFRQNSQLIADCDLEIELLLKEFAPGDGPGAGAVPEPQAELKRKPRRNEMSFDLRTQLHRIFAVDLTEIPGINTLTAHALFTEVGRDLSKFANVAAFTSWMGLCPDNRVSGGKILHAQTRRVNNRVARALRMAAQALSRSHGWLGQYYRRMRAKLGGPKAITATAHKLARIVYHLLTTGQAYDETIFAQQEAQNKQRNESRLRHQARNLGYELTLIPTEV

SEQ ID NO: 456102 - protein, 346 aa, unidentified
MEKITRIFIDTSKQIFQLHGVNAAEVVVLRKAVRRSQMLAVFGKLEPCVVGLEACGASHHWARVLRELGHEVKLIAPQHVKPYVKRNKNDGRDAEGGCEAMSRPTMEFVPVKTAQEQAGLMLLGVRERLVRTRTQLTNAIRGHAAELGLIAPRGLDKIEPLLARIADDESLPALARALFALQAAEHAELVARLKIVEAELVAWHRQNALSRRLAQIPSVGPVGAAMLALKTPDPKAFKSARHFAAWIGLTPKDHSTAGKLRLGRITRAGDEALRSTLVVGATAVIQQARAGRGRPSPWLVALLKRKPPKLAAVALANKVARIAWRMMATGQDYDPSRLTRPLAEAC

SEQ ID NO: 456103 - protein, 348 aa, unidentified
MRTYNTQHAYYCGVDLHARSLFVNVLDHTGQTRLEQELPASPAAFLDALKPYRDGLVVGCECMFAWYWLADLCARESIPFVLGHALAMKAIHGGKAKNDRLDAQKIAGLLKGGFFPMAHVYPKDKRETRDLLRRRSFFVRQRAQLLAHIQNTNSQYNLPPFDKKLTYKGNRTAGIAERFEHPSTRLSITADLELIESYDARIAALETHLVKSARVDDPATFAFLRTVPGIGPILGLVMLYEIDHIRRFAEVGNFLSYARLVACTHESAGKVKGVGGRKIGNAHLKWAFSEAASLMLRSFAPAKAWMQRQSKKRGAKKAHAILEAKIGRAVYHLWRKQVAFDGKKFLAS

SEQ ID NO: 456104 - protein, 422 aa, unidentified
MESIEAHAGESLIERVAGIDVGKAEVVCCVRVPDAARRGRRGQEVRRFSTMTAALHQMCDWFAELSVQRVVMESTSDYWRPPFYVLEARGFEPWLVNAREVKHLPGRPKTDRIDAVWLAKLAERQMLRPSFVLPPDLRELRELTRYRVDLVVMRNSEKQRVEKVLEDAQIKVSLVASDPFGVSGRAIMAALIAGERDPERLADLARGVLRKKTPDLVEALTGRFNQQHAWLLAKMLQRVDDHDRDIADVDARIEELLAPFAEAVAVLDQIPGIDRVAAAAVIGEIGVDMSRFPTAGHLCSWAGFAPLAHASAGREKKRKTGHGSRYLARAMGNAAAGAARTQTHLGQRQRELARRRGKDVANVATGRAILVAVWHLLSEPSGHFNDLGPQWREHKRSPRGQARRYVRQLQALGFNVTITPAA

SEQ ID NO: 456105 - protein, 400 aa, unidentified
MLSIGIDVSKGKSTVCGMKPGGEIVYAPFEVQHTREGMLELVSLLRSSGEEVRAVLESTGSYHCPVVAALLENGIFVSVVNSLRMKRFCSQSIRKVKTDRIDAMQIALYGLAYWQELQPARLPEDTYRELQLLARQYYQMTSMLIKAKVDFNAICDQVLPGMQELMNDHAGRHKLSDFVLRYRHTTHILEMGETRFRKDYCKWAEKKGYRNCERMAALIFATAQNGIPVLPNAPSTQIVITEAIRVLHTVEASRDAILTQMQALAKTLPEYSLVREMPCIGDTLAPRLIAEIGDVRRFHSKRALIAYAGIDAPPYQSGKFCANNRHISKRGNRYLRKTGYEVMQSYVMHKPANDPIFTFIEKKRGEGKSGKLAMVAGLNKFLRVYYGKVTELYRSLPAIE

SEQ ID NO: 456106 - protein, 341 aa, unidentified
MKLKRIGVDLAKQVFQLHGVDSHEQPVLRRQLKRGQMMNFFRALEPTLVGMEACGGAHYWARELRKLGHEVRLIAPQFVKPYVKSGKNDAHDADAICEAVSRPSMRFVEVKSVEAQAMQALHRIRARLIKSRTALVNETRGLLAEFGLTEIKLGVSALRHWIPQVLEDGENGLPGLMRELLRGLHAELQTVDERLEVLNACIDRQARADERVQRLLKIEGVGPITATAMVAGLGDGKQFRSGRDMAAALGIVPRQHSTGGKERLGSISKRGNPYLRTLLIHGARAAVNSSLKPTKTDARSRWIQALVARRNKNIATVALANKNARIMWAMLARTESYRIAH

SEQ ID NO: 456107 - protein, 340 aa, unidentified
MEKSDQIQSHTWILGIDVSKETIDACLVRSVDGQLFESKFHNNLSGFRHLKQWCKQQGCECDATTLCCMEHTGLYTRLLVHYLISREVQVWLESSLQIKRSQGLIRGKSDKIDAQRIARYAHVFSAKANVLQIGAFTLEKLKDLQTNRRRLMKALQALRTSVSELKQFDPASGKLMEQTNRDAIRGLEKSLDKVDGKILSYISEDQELKQQYDLMLTIKGVGKVLAAMLLIYTHGFTRLNDTRKLACYSGVAPFVYESGTSIRGKTGVSKFANNDLKKTLHMAAISSIQHNPELHQYYKRKVEEGKNKMSVINAVRNKLLHRIVAVVKRGTPYEAELKNS

SEQ ID NO: 456108 - protein, 381 aa, unidentified
MIHRVGVDLHSNNAVVVIIDDSEQWVLKRKFKPDLPTILSALEPYKETIKEIGVEATYNWYWFVDGVKDAGYNVRLAHPPAIENKSGKKRTNDFHDAANLAHLLRMNNFPDAYIYPKEDRPLRELLRKRSLLVRTSTQYMVSFINSVNRNLGVSISGNEVKKLSHEDVEKMLENEYLVLSGQVNISVINHLKVEIEKLEKVILKKARLKLEFKRLLTVPGIGVVIALTICLEIGTLSRFKDVGNFVSYCRCVDSAQLTNEKKKGEKNRKSGNKYLCWAFVEAANFAKRWCPYAKAYYQHKFKQTGNTVVATKALASKLARATYYMMKNDVDYDPEKLFERFKAEAQTLALIQKKGRGSKPGKGTGSGSSSSSNPQNQKPIV

SEQ ID NO: 456109 - protein, 346 aa, unidentified
MLRSKIKSKHGKINSDKYDYYIAIDWSQKNMAIATLRKDLDKPKITDTNSDLDNLKAYLRSLSGRKIVTIEETTSTHWLYVELYNYAEKILICDPYRNKLLSDGAKTDKLDAGKLSLLLRGGLLKEVYHGLEKTYELRQLVCDYEQLVKLGTRILNEKSAIYRASGKSYKALEEIGDKTLKWILIQKDKRLELYKIQKAEYEKKFREILKQNKDLRHLTGINGIGIIGSVKILSSVINANRFETGGKYLSYCGLVKHQKMSGGRNYGKKKTRYSRRLKTVYKTAAMSVISSNNSPLKEYYDSLIDKGLSEEKARNQLARRIAIITYGILKTGTKYEPYKWRELRQK

SEQ ID NO: 456110 - protein, 450 aa, unidentified
MREPEEIEDEAYERVLERVCAIDVGKASGKVCTRVPHPSRPGQRRTRVWDVEATTNAIVELGEYLAGEEIEKVTLESTSDYWRIWFYLLEAAGLDVQLVNARDVKNAPGRPKTDKLDSVWQAKMTERGMLRPSFVPPVEIRQLRDYTRLRVDLTRERTRYWQRLEKLLEDSLIKVSAVASTLDTKSVRDMLEALIAGERDPKVLADLARGRMKAKRAALIEALTGRFDDHHAELTRMLLDQIDQLTVQIDRLTTRIEELIAAIPTAQGADADGTTGPSAGRGPDASVLPAIDRLDEITGIGREGAQAIIAEIGLDMGRFPTAGHLVSWAKLSPRTIQSGATSRSGRTGKGNPYLKGVLGEAAAAAARTDTFLGERYRRIVKRRGKLKALVAVARSILVIIWQLLADPTARYQDLGPDYYASRTNKDRRARSHIRQLEALGFTVTLTQAAA

SEQ ID NO: 456111 - protein, 385 aa, unidentified
MSYYADFVKSCPLLRRGLTNCQPQSYQLKKKGDAVKLATIDYSGKKVFVGMDVHKKTYAIAAYCDGEIVKKWTTKADPVATAAQLNRYFAGAEIHSAYEAGFSGFKLHRVLSDVGVLSRVIHAASVEVKSNDRVKTDKRDAKKIAEQIAVGKLRAIDVPSEEVEQRRALTRGREQVVERRKAIGNQLKMKLSYLGIDYPDKFKISENFMKWVEKLEINGSHRFAIKELIDAWRQESKRIKRFEQELAKQAANDPLEKIYRSAPGIGAISARTLSNELGDMTRFDNERQLFSTTGLTPGEYSSGDRVRKGHISRQGSSRIRGLLTEVAWRAISEDHSLKAFYKRVAQTRDGKRAIVAVARKLLGRLRYCLKHKVEWKDLAASNVAA

SEQ ID NO: 456112 - protein, 446 aa, unidentified
MPSKQSSPFSVVHPHAAGIDIGSTFHVVAVPPESDDIPVRRFQSFTADLRRLSQWLREVGVTSVAMESTGVYWVPLFEILESDGFEVILVNAREVKQVPGRKTDYNDAQWLQKLHQFGLLKASFRPAEHIASLRAYLRHRERLIEYAAAHIQHMQKALMQMNLQLHHVVSDITGATGMRIIRDIIAGERRPEALAVHRDIRCKEPASTLIAALTGNYRDEHVFALRQAVELYDAYQERIRECDREIEKSVSRLTLGKKGPDAPLSKPRHKTKQRHEPDFAVREALYTITGVDLTRITGFGPYTALRLIGECGADMSKWPTEKHFASWLSLCPGNKISGGKVLSSKTKRSRSRASTLLRIAAVSVGKTDTALGAFYRRLAARAGKAKAVTATARKLAILFYSVLKHGSAYMEKGADAYETHYRSRMVLNLKKRAKQMGYNLVAMQVS

SEQ ID NO: 456113 - protein, 406 aa, unidentified
MFQRENKKACVSLDVSKGSSHVQAFYSVGQKATDVCVIKHTKSGFEKLKEIIVTLENSTGEKCVVVFECTGVYSKPVENYLQKIGKKYFLIPPLLSAKVRKSDIRPTKTDSKDCETIANVYFLKKLRPAKPFEKLHDKLKSFGSYYLFLINRTSCMKTKYRHYLDNVFPRIDEYFNVYSPFFMDLIIKNPNPQKLKKKTDEFLYKFITSYDYFGNGKATVFINSFHRYFEDAAIDINEDDAAIDVLSSSAKKLKEDMKSLDDLLEEIILLGMKTEEYKYLITIPGMTKNTASRIAAEVSGIDRFPTASKFIAYAGIDPTVKESGKMTGEHLPITHKGNQRLRCLFYLVASGTSKSKSEGNPVRDFIIKKKSDGLSAKAAIIAGCNKLARIIYAVCSKREPFSLQNQ

SEQ ID NO: 456114 - protein, 417 aa, unidentified
METYAALIAIDWADRQHAVCLYDQRTGKREESVVKQTPESLQQWVLSLRARFAGQPLAVCTEQSRGPLIYALLQYDFLVLYPVNPATLAKYRQAFSPALGKDDPSDADYLLDLLQHHRDRLKAWRPDDEQTRTLRLLVEQRRRLINDRTRISNRLTAQLKSYFPQVLDWFPDLCTLLVCDLLTRWPTLTALQKARPATLLKFFQAHHSVRAATNERRLTELKTAVALTSDAAVLNCSTLMVKVLVAQLRTVWAAIAEYDRHIEALCQTHAEYELFASLPGAGPVYAARLTAAFGSDRSRWKSADELLCLTGIAPALERSGKQQWIRWRYFCPKFLRQSFHEYAAESVHHSFWAKAYYNMQRLKGKKHHAAVRALAFKWIRIIWKCWQTRTAYNELFYLESLRRSSSPLLKFIANNQG

SEQ ID NO: 456115 - protein, 320 aa, unidentified
MISSDPIYVGIDVAKDSLELATWPAQSHQSFTNDGTGQDAVVGHVKGLGAALVVLEATGGYEMAVACALQAAEVAVAVLNPRQARDFARSMGRLAKTDRIDALGLAHLAQVLSLRDDLHKIVKPLPDDQQQLLAAIVVRRRQLIAMQTAERQRLQTCHAHSRQSIKTVLELLKKQLDDADAELQTHLIEHHADLSALLQGVRGIGTKVAATLICECPELGTLTRREVSALAGVAPIPRDSGQYRGKRSIHGGRPALRNALYMAALVGMRYNPVLKAFYTRLVAAGKPKKVALVACMRKLLTILNAMVRAGKPWDDAIHLA

SEQ ID NO: 456116 - protein, 373 aa, unidentified
MPRYSTAFGMDVHLRSTTVCALDAETGEAVARRFRGNPWGEVAEWMSGFPGPSLAAYESGYLGFAPQRELSALGVDCVVAAVSKVPRSAADLSSKNDRNDAARMAKAILSHDVTPVWVPSPEIEGLRDLAAAYDAATARLAAAKQRLLAFLARRGYVYGGTTPAGNPRKYWTYGFLRWLDKVRPADDGGIRALAALRNEVEAADETREALLAEYRAAVAAGPLSAEVEALQSIKGCGFVLAAAFASEVGDFSRFRSGRQVTAYFGLAPKQRSSADSVRLGGISGAGNALVRRLAVEGSWRYAQAGHQPKLMPKGSGVPLEIRMHGRKGSERLLRRREEMLERGMPQAKANAATAAELVRWLWALGMMCREAGE

SEQ ID NO: 456117 - protein, 319 aa, unidentified
MNTSVGIDVGKRELVASIRDTDGNSAIAAPFPNTSIGLKKLVVHLEQNKIGTDDPILLESTGPYHWKPARTLADSGFFVKVANPLHTKQMARHSIRKRKTDKVDASQLAFLASQGYGYRFTETKERAQGKALVRHFWKLRATATNLLIHERYLKEYRGIRRTSASALLVEQCEKLKKEIVKKWSKGNDVKYLDSIPGVTPFLAAVILAELLPLERFERIEQIVAFAGLDPSVKQTGGRKGSHGPISKRGSPTLRNALFLAAFGSFQREPMRSLYLRHKARGLHHNAILCVLGRKILRIGVALLKKRRVFDAKYLSTEKD

SEQ ID NO: 456118 - protein, 350 aa, unidentified
MPRKFDTAVVTIGIDPGKNTLHLVGLDARGEIVLREKVARTKIVSRLANVPPCLIGIEAGMGTHYVTRELLALDHDVRQVPPVYAKPFRQTHKNDFRDAHAVAEAVQRPTTRCVPPKTDEQLDLQALHRVRYRLVGQRTAIINQMRCFLLEHGITVRQRLHWLRHALPDILAQRTDVLSPRMVRILEDLAQDWRRLDDRIEAVTDELDALSKNTEPCRHLMTIPGIGPIISSAVVAAIGNGTAFACGRDFSAWLGLVPKQISTGDRTILGRITKRGNRYLRMLFMQAARVVLLRPRNWMKHGFGPWLTAAAQRLHHNVLATALANKLARIAWSVLVQHREYEARLSVAAT

SEQ ID NO: 456119 - protein, 375 aa, unidentified
MEKLIRIGVDTSKSVFQLHGVDVLEQPALIKKLHRGQVIAFFKKLPPLKIGLEACGGAHHWGRELEGLGHEVFLIPPQHAKAYLRRGKHDAADAEAICEAMSRPRTRFVPLKTSEQQAAQMLAGVRDQLIRRRTQLSNTIRGHAAEFGLIAPTGLARIEPLLAQIASEETVPALAKELFAVLAEDYRALGSRIGKVDAKLMVFHRQDEVSRRLAQVPSIGPIGATLLSIKVSDAKAFRSGRDFAAWIGLTPKNHSTAGKTRLGAITRAGDAMLRRVLVVGAMAVIQQLKRRKEPPPSWLGELLKRKPAMVAAVALANKTARIAWKLMVTGERYAPRPNQAIVAPCSAPSRPLRAADRGGLRPALTAPALRALAHS

SEQ ID NO: 456120 - protein, 458 aa, unidentified
MADVMIGVDPHKRSHTAVAIGLSEQPLGELQVRACPSQAEQLLAWAAGWPERAWAIEGAAGLGCLLAQQLVAAGEQVLDVPPKLAARVRLLQSGDTNKNDPNDAFSVAVAALRSPAPRPVLAEDYAVVLKVWAKRHRDLARARNQACCRLHAVLCDLVPGGVRRGISAGRATAILEQVRPPDAVAVARCELAAEFLADIRRLDDQLREAGTKLAAAVRASGTSLTGLFGVGPVIAGTVIGDVRQVFRFPGRDHFAAYNGTAPVEVSSGGRQVYRLSLRGNRRLNHAIHMAAITQISHKHSQGRAYYDKKLAEGKTHKEALRCLKRRISDAIYAALVADARRASGACAEGPGGQPGNHSASRAAGSHPAHRHFGQATPGPGHHPTTAAGTRGRAGHSPVAAPLPPAKPQVQVERPQRSEDERPGGAARRRPYSAARKAPMGPRTRPLKPRLRTNPVTTA

SEQ ID NO: 456121 - protein, 340 aa, unidentified
MTITTVGIDLAKNVFAVHGVDQNGRTVLVKPKESRAALPELIASLPPCVIGMEACSGAHYWARLFRQYGHEPRLMAAKFVSPYRMAGKSGKNDAADAQAICEAVRRPHMRFVPVKDESQQAMQCLHRTRQGFIEEKTATYNRLRGLISEFGVIAPQSADALRHMVSVQKSSLPLQVQQCVDDLMEHVDRIEANITEYDRILSHIAKTDHRSQRLMELKGVGPTTACALVASIGNAHDFKNGRQLAAWLGLTPSQYSSGGKSKLGRITKAGDSYLRTLLVQGARSVLIGAGKRTDSFSRWVCMLVERRGYWRAVVAIAAKNARLCWASLHYGDDFRLYSVN

SEQ ID NO: 456122 - protein, 410 aa, unidentified
MKVLHPRCAGLDVHKDTVVACARIAQIEGGARHEVVTFGTTTRELLRLSDWLTAHGCTHVVLEATGVYWKPVWQVLEGSFELVLVNPGHVRNVPGRKTDVNDATWLADLLAHGLVEASFVPPVAIQELRTLTRTRTQLVRERAQHVQRLQRTLETANVKLASVLSDIVGQSGRAMLKALIAGETDPEVLAALGHHRLRSLQAERVEALRGRVTPHHQFLLKLHLDQVESLERTLAELEAEIERAFEPFRRPFEHLQTIPGVRHVVARIVLAEIGTDMSRFPTVGHLISWAGLCPRNDESAGKRRSTRVRPATPWLKVALIQAAWSAVRMENTYLRAQFLRIRSRRGSRKAVVAVAASILTAAYHILRDDVDYRDLGPDHFDRRERAHRTKHLVRRLRDLGYEVTLRDAAA

SEQ ID NO: 456123 - protein, 392 aa, unidentified
MVVSVGIDVSKDKHDCFILNSEGEILSDVFTIPNSLDGFTILLQRIRDCSSSQDNIKVGLEATGHYSYNILGFLLDNGLPTYVLNPLRTNLYRKSLSLRKTKTDRVDARTIAAMLLSDAGLKPYTDTVYHNEELKSLTRYRFDKVKERAKLKSSVSRLVCILFPELEKLTPTLHMPSVYALLDEFPGAKQIAEANLTHLKAILHNASKGRYNRDKAIDIRESARASIGAVMSAKSLELRHTIRLIRELDAEIEDIEAAIQSIMNEMHSPITTIPGIGTRMGAMILAEVGDFSRFDSPDKLLAYAGMSPSTYQSGQLKNCYPHMEKRGSRYLRYALYNATKYVCLWAPTFAAYLAKKRAEGKHYNIALSHAAKKLVRLIFAMEKSRKPYCSAA

SEQ ID NO: 456124 - protein, 391 aa, unidentified
MSMYFVGIDISKYKHDCCIISAVDQQIVSKFTITNDKDGFEQLLISLNSLSNPEDIKIGFESTAHYALNLELFLENANHSFMEVNPVLIKEYKKSTTLRRTKTDSVDCESIARWLMTVEYKPHSKGFYHAYSLKSLTRLRDRLIRQRSFYLVKITNVLDHTFPEFKPFFNERLSKTAIYLLENYGSAEKMAHMNSASYDKLRCISRAKFSIQQFLHLKELAANTVGVNNSIFDIELNSLLTLYNSLCKEIKNLEAEITRLIEEVHPHYMSIPGIGPISAAVIYAEYGDISNFSNPSQMLAFAGIEPGINDSGTESHGGRMVKHGSSQLRYVLLNACLPLIRFDLTFATYYAKKRAEGKKHRVAITHVAKKLIRVIYALERQDVDFNAQKIR

SEQ ID NO: 456125 - protein, 348 aa, unidentified
MKNKSFVGIDISKKVIDVSIFREDTNIKMFPHEVFNNTRKGFGDMCSWLKKSRVVLSQALFGMEFTGCYSLDLEKFLTSKNYSFCMLSTRIVKHHPMGTIDKSDKNDSAKIADFLYRYDGTECAKPYKLPSKAMQQLKQLVNERKFLVEQRTNFMNRMQMFETKEDSAMYESYIKKLNHDIENIDQEECELMSKEEDVLDTFQNLLTIPGIGFVNATNIIAITRNFTAFDTARQYARYVGVAPCSHTSGTSVKWRARPSAHCNGQVKADLSMAALRAVEYDVEMQIFYNRKLGGRKDSDTKRKALNAVKFKLIRRMFAIGKQKRKWEVLNTSDDRKNLHIEKSKASEL

SEQ ID NO: 456126 - protein, 343 aa, unidentified
MQAVTTIGLDIAKSVFQVHGIDAEGKVLIRRQLKRRYVLAFFQKLSPCLVGIEACATSHHWSRELKALGHNVRLMPPAYVKPYVKRQKNDATDAEAICEAVTRANMRFVETKTPEQQSCLMLHRTRQLFIRQQTSVINAIRAHLAEFGIVAPVGRKGVEHLLAIGTDGSDQRVPEVTQACLAALGAQLRMLKAQILEFDRRILAWHRSNETSRRLDAIPGIGPALATALVASVADPNAFRSGRNFSAWIGLVPKQHSSGGKDKLGSISKQGDRYLRSLFTAGALAVIRYAKIHGTQHRPWLTALLARKPTKVAAIALANKIARMAWALMAKGERYNEPVALAA

SEQ ID NO: 456127 - protein, 390 aa, unidentified
MDVLYQSCAGIDIHQANIVVCILHGPLTSTRPKREMATFDTTTKGLRACHDFLSQFHVEAVGMESTGVYWRPVWHALCDDFELILAQPAHMKAIPGQKTDKKDAHWIAKLTRIGLLPRSFVPDETIQELRELTRQRKHYVESRNRETNRIHKILQSGGIKLTTYIEDIMGLSGRNLLQLLVDGTPITPRIVHQSVYTSLKKKVPQLMEALDGYFSDHHRFMLKQSLEIYDFYQKQIELLEERINIYLSQYEKHVEILDSIPGIDVITASVIISEVGVDMSQFPTAGHLAFWAGLCPGNNESAGKKRSTKIRHGNSYLKKCLCQATFAVKKQKGSPLADRFYQIQSRRGSQKATIALAHQLLKIAYILLKEQITYPEFLVQKKTTRDELVA

SEQ ID NO: 456128 - protein, 421 aa, unidentified
MIEAVLECCAGIDVGKRFVIVCVMTGPADGEALEQTRKYGTNTGNLENLRDWLKACGCTHVVMESTGSYWKPIFNVLEPTPGMQVVLANSKLVKNLRGHKTDPSDSRWLAHLLRHGMIRPSFIPPLAIQELREFTRRRKQLIRAGTQERNRVQKILEDANIKIGNVLSDIFGLSGQLMLEALVEGKATAGQIAQLAQKTARRKIPQIQAAIERHRMTDTQRILIRFSMAHLAFLEEQIAELDQQIVRHIEQTNLQRPYALLQTIPGVKKLAAAAIVAELGTNMDVFGTSRRCSSWAGLCPGNNESAGKRKRSPVLRGNPWLRTTLIECAWAASGKRRSAFQARYQRLAPRIGHKRAIVAVAHSLVLTVFDVLSRDQPYTGSGADNMPATQLQRLIRHHSKREATLRRWLLRTSKNSAFLVT

SEQ ID NO: 456129 - protein, 345 aa, unidentified
MEPMYYIGLDVHKRTISYCVKDSGGKVYAEGSIPATRLDLDCWMKTLPQPWSAAMEATMFTGWIYDHLKPHAASLKVAHPLMLRVIAAAKKKNDRIDASKICDCLRCDFLPECYMASTAIRERRRTLRYRNLLVRQMVQMKNKTGMLLMEAGVSYNKQRLHKAGYFRELLATNPDINEGLASLLRLCRETMVRLQKTESALVRSLERDSLLMDRVERLMTIPAVGPITALTWALEVGDVQRFSSIKKAISYCGLCGAEKSSGSTIQRTPLSKQRNKHLQTTLIEAAKMAPRFSPALAMLYDKEKQKGNANRATLAVARKLVAYLMAVDRGQRNFQLVESTNCVAA

SEQ ID NO: 456130 - protein, 436 aa, unidentified
MEEVTDEPLYRDRAGGIDIGKAEMHATIRVPSDKDPARRASETRSFATTRRGVLALADWLRSWQVPAVVMEATSTYWMGPFFRLEAEGFECVLADARQVKNLPGRPKRDPSDSSWLAQCFERGAVRPCFVATKEFRVIRLHTRYRRDLINERSREKNRAEKLLETAAIKLSSVITDLHGITGRDIMEHLIAGERDPKVLAQLARTRARAKITELQHALEGAEFFTGHHARLLKTMLERIGQIDAQISDLTAVTEELLAPYEEQLAQAESMPGWGRRSAEDAVAETGADMTRFATAGHLVSWAGRAPLDHQSGKRKGQARHKKGNTYLGGVLGETAVCAGRTQTREGARYRKLARSRGKNKACVAVGNTQLKVYHQLLSNPGMRYRDLGPDYYQRRAQNRRKIGYHVRELEALGLEVTLCRIPGPDPGPGQAATPAA

SEQ ID NO: 456131 - protein, 455 aa, unidentified
MAQRQMRGRSSGQWSTINPHAAGLDVGATFHVVAVAPDRDEQPVRTFGTFSGDLHRLADWLQRVGITTVAMESTGVYWIPAFEILEARGIAVVLVNARHVKHVPGRKSDVNDAQWLLQLHQYGLLRGSFRPREEVTRLRAYLRHRERLVEYAAAHIQHMQKALMQMNVQVHHVVSDITGVTGMRIIRAIVSGIQAPETLAEFRDARCTASMDTIRAALMGNYRPEHVFALRHALELYDVHQDKIAECDTEIETVLRTLNAERPIPEAPLPAVRHAKSRNEPNFDARPALYTLLGADLTQIHGFGPYTILRLVAECGDDMSKWPSAKHFTSWLSLAPGNKVSGGRLLSSKTRRSANRAAVLLRIAAVNVGRTQTALGAFYRRLAARIGKAKAVTATARKLAVLFYNALRFGLAYADPGASYYEARYRQRVLDNLRRRAQQMGFTLLPTPASHGGVS

SEQ ID NO: 456132 - protein, 427 aa, unidentified
MPYKMGSIDVHKRMLAVVTSDVEIDGEYQFERRRLGTNPAELRLLADWLLEQQVEEVVMESTAQYWRPVWEALEQYWKPVCQKRQGARPTSGTRHLAQAHSNRALRGRKRDFADAERLLKRRVASELTLSFVPDPEQRLGRTVTRAKYPQTRNRAQLQNRLEALLEEAHIKLSSLVSDLLGASARRILKALADGETDPAALAGLADYRLRATPEQLRDALGACQELNPVYRRLLKAVLEELELIDKQIAQLDQELADLLRPYQDQVERLAEVPGLGVDSAQQIIAQVGATAATFPSEGDLSSWVGACPGDYESAGVSYSHRSPKGNRPLRRILNQAANAAVKQKGSIFELLYRRYVPRLGHNQTIGLIAHRLCRLIWKILHQGVRYKEFGPAVSGKSKHRRAARMIRELRSLGYRIELANPQSAVPA

SEQ ID NO: 456133 - protein, 318 aa, unidentified
MNVIGLDISKDTIDVTLITAKGEMDYIKIGNSHEGFEKLIAWIKTKRVRKIAISMEATGVYYEQAAEYLSAVYTVYVINPLKIKDYAKSQFSHTKTDKADSKLIADYAKRHLDKLKPFRLSENPILYKLINLLQQLKQQKHESQNRLHAAKDPFIRSTHESIILLLSKKIDETSKCIDSVIKQQKSLNAEYKNLQTIPAIGKDTAAILLRHLTDKTFETANQFVSFAGLSPKIEQSGISVNKKGRLSRYGHRQLKRALFMPALVAYRINAFPKLVKNLEAAKKPKMVVIVALMRKLAKIAFYIHKAKTPFDKARHQTV

SEQ ID NO: 456134 - protein, 354 aa, unidentified
MHKDTIAVAVLRSGTTTCDERVIPNTPEAVRKLLSRHADPSLLRTCYEAGPTWYDTHRLVTSLGIACDVIAPSLIPKRSGVRVKTDRADARNLARLHRAGELVAVRVPTPAEEAVRDLVRVREEIKADRRIARQRIRSFLLRYGKRYPKPTDRWSFRFEVWLRALRFEEPLSQATFEHLLGAYFVRDSQLAAIDRQIEELALLDPLAEPVARLRAFRGIDTLSAVTIASETCDFRRFGTAASYMAFTGLVPSEHSSGASTRHGGITKTGNQHIRRVLVEAAWAYRYAPAVRGKLKKRLEGQPPEVVAYSWAAQCRLSGTYRKLAAKKGANKAVVAVARELSGFVWGAMTGNMGA

SEQ ID NO: 456135 - protein, 402 aa, unidentified
MKASKQYLRFCGIDMAKQKHVACIVDQDGRYLVRPKSIRNDADGYQQILNCLKQSGRTKSILTGMEATGHYWYSLHDFLTRQGYTVAVLNPIQTAQQAKQAIRKCKTDKYDAFHIANLLRTGQYKAAVIPGEFAMTCRQITRLRYRIVKQAAMIKQLVNSRLYPAWPEYEGLFSNKFGTTSMKLLQTASTPKELMELDPDDLSELIRKASRGRFGPAHTQKILHSAKNSVGMQRGHYGISIGIKFLLEQIVALEPVRKKLDVEIEKLAAKLPEYLFTLPGATELTIVSLYGEVDPIETFKRPSQLTAFAGLDPKVFQSGQYDAPRRHVSKRGSSYLRRTLWQMAYRAVCNEGDLRDFWRRKHRQNKHHLVAVTAAANKLCHIVWRIMTDRRDYIPKDYKHKS

SEQ ID NO: 456136 - protein, 355 aa, unidentified
MPKTASTEIAVIGIDIGKNSFHVVGHDQRGSIVLRQKWSRGQIEARLANMPPCLIGMEACVGAHHLSRRLKALGHDARLMPAKYVRPYAKGQKNDFNDAEAIAEAVQRPTMKFVATKTADQLDLQALHRVRERLVSQRTGIINQIRAFMLERGIAVRQGVRFLRTELPIILATRTDTLSPRMLHVIEDLAGDWRRLDERVENLSSEIEAIARHDSGCDRLMSVPGIGPIISSAVVAAIGSGDVFSKGRDFAAWLGLVPKQISTGDRTILGKISKRGNRYLRVLFVQAAWVVLVKPMSWERHGLKSWIEAAKKRLHHNVLAIALANKLARIAWAVLAKGRGFEVTRKETLAASQST

SEQ ID NO: 456137 - protein, 423 aa, unidentified
MVVEGSDGVSAGEAVHLLRRSELAAWIIDRPPALLSHAVENPRPLEPAFTRSAREVVQGRGAGAQSNPVVEVVMKKSTKAKAAVQVCVGIDVSAHDLSVGMRRDIEDRVTVTTFANSAAGHKALLVFLLPGNARVRVCLEASGNYSLDLALTLQAHRQVEISVVNPRRARRFAESLGERSKTDRVDARVLCEYAARMPWVPWQPPSPVALHVRALTRAIVDLSCIHTQQNNRAHAAAASHALPGLVVKEMQRHQKYLEQRMTRLRREALRLVAGHLELDRRYRLMLTATGIGETSALQILGELAVLPDTLDARQWVAFSGLDPRLFKSGKSVEKRPRISRGGSRHLRRALYMPALVALRRDPHLRRFYQNLLARGKARLQAVVAVMRKLLHALFAMFRTNQPYDGSKLCCAVNMPGNAIAACA

SEQ ID NO: 456138 - protein, 412 aa, unidentified
MLKIVYPVCCGMDVHKSFVVACIASTNDHGVTTYRSGRFSTFTGDLRRLAAWLHAHSCTDVCMESTGKYWIPVYNILESSCEITLAHPKYVKAIRGKKTDKKDAKWIADIFKHGLVCGSFIPSADIRQLRDLMRYRSKLTGFSTGEKNRAQNCLTVSNIKLDDVFSDVFGKTASAITQRLLENDAPFDVTFFLNKNLKASADHIQAAVDGHICTHQAGKLRVIRSHMENLTACKKSLETLILGLAENYLSTLDLILTVPGIQVFAAVGILSEIGADMSVFPSSKHLCSWAGLTPQNNESAGKKKTTRISRAGAYIKPLLVQCALCAIRKKSNPEIRSRYLNLKKRRGHKKAIIAIARMLLTAIYNMIKKNEKYNAALYRKADTPPKNREVSVNEAIYILQRQGYLVTAPQSA

SEQ ID NO: 456139 - protein, 362 aa, unidentified
MRIIGCDLHARQQTLAMLDTTTGEVVEVTLKHEGDNVREFYSSLPGPVRVGIEATGSMQWFVNLMEELGIECLVGHPAQIRAAEPRKQKHDRRDADLILKLLAANRFPAIWVPSKELQDLRSLLRHRHQWVRMRTRIQNALQSIALANGLRRGTALWSHDGQSRLASLPLAPHTAYRRSELQALYEKFEAEIEKLNQRVEEQAGKRLGARLLMTHPGIGPITALATEVFLGDPVRFADSKALASYVGMIPREYSSGGRQRLGGLSKQGNPLLRFLWGEAGTHAARKDPELQRFYRRKLVQKGLGKASVAVARKLGIRLWIMLRDQIEYNEFCRRGQKQQKSSDACAGMPETRNGAKSHRPVD

SEQ ID NO: 456140 - protein, 336 aa, unidentified
MTGGVDTHADNHVAAALDGIGGLLGVREFAATPAGYARLLGWLQGFGTVCLVGIEGTGSYGAGLARHIAAAGIGVVEVDRSDRQDRRRAGKSDPLDAVSAARAALSGRASGAPRGRDGQVEAIRALMVAKRTARAQRTQTINQARALIITGPDDIRTRFTGQAPAGLVAELAALRPRPGSMVRYHTLLSLRELGRRAAYLDGQLTRLDELITPLVTARAPGLLRLFGVGPDTAAVLLIAAGDHPGRLRSEAAWAHLCAAAPIPASSGKVARHRLNRGGDRQANHALWRIVITRMGSHPPTRAYVARRSKEGLSKPEIIRCLKRYAARETYRHLRPS

SEQ ID NO: 456141 - protein, 375 aa, unidentified
MEKIIWVGLDVHKDTIAVAVAEPGRRGEVRGLGVISGDLQAVEKLTARLRRQYEAKLSFCYEAGPCGFVLARRLRQLGHECIVAAPSKIARAAGDRIKTDRRDAAKLARAHRAGDLEGIYIPEATDEAIRDLCRARTDAVDDLRRSRQRLKSFLLHHGYHYQGKGHWGAAHMRYLRELVLPHPAMKAILEECLMAINDAASRVERCEKAMGDLLVDWRLRPAVEALMAFKGFQIVAAMITVSELGALARFEHPRKLMAYLGLVPSESTSSDKRRQGSITKCGNPHARWLLIECSQHYAMPPKVSKELSRRQDNVAPEIIKVSWAAQNRLHRRFMSLMARRIHRNKVLVAVARELTGFIWHALRNLPCYEQSTQPA

SEQ ID NO: 456142 - protein, 353 aa, unidentified
MTDIVTHTDRIATIGMDLGKRSFHLIGMDTRGKVIMRQQLSRGRLERHMANLQPCLVGIEACAGAHHIGRRLSTFGHNVRLIPGQYVKPFRKGQKNDYRDAEAIAEAVQRPTMRFVPIKSAEQLDLQALHRIRSRLVSHRTAVINQLRGFLLECGVIVPQGPARLREILPSVLAQRTDVLSPRMIRLIEELADDWRRLDDRVDAVTSEVQTLARQDECCRRLTSVPGIGALTASAVVAAIGNGAAFSKGRDFGAWLGLVPKQLSTGDRTILGRLSKRGNKYVRTLFIIGARAVLAKPGSWAKFGLQGWLAAAAKRLHHNVLAAALANKLARIAWSVLYHGRSFARDFEPQSVS

SEQ ID NO: 456143 - protein, 326 aa, unidentified
MEHELHYIGIDTAKEKLDVDVLRPDGRHRTKKFANTTKGHDELVSWLKGHKIDHAHICIEATGTYMEPVAECLYDAGYIVSVINPALGKAFAQSEGLRNKTDTVDARMLAEFCRQKRPAAWEAPHPLERALRALVVRHHALTDMHTQELNRTETAREVQRPSIDAHLLWLEAELKRLEKQIKDLTDDDPDMKHRRKLLESIPGIGEKTSAVLLAYIGLKDRFAHARQFAAFAGLTPRRYESGSSVRGASRMSKAGHVSLRRALYMPAMVATSKTEWGRAFRDRLAANGKKGKVILGAMMRKLAQVAYGVLKSGVPFDASRHNPVAA

SEQ ID NO: 456144 - protein, 317 aa, unidentified
MNFVGIDVSKSQLDIAVRPGNKRWSVVNAEADIVKVVETLNALSPKVIVIEATGGMEMPLAAALSQARLPVVVVNPRQVRDFAKAVGRLAKTDRIDAEILAHFGEAVNPDVRLLKDEDTKTLAALVTRRRQVIEMLTAEKNRLGISPKVVHKDIQQHISWLQGRLEDIDRHLDSAIRKSPVWREKDDLLRSVPGVGQVLSVSLITGLPELGTLSRRQIAALVGVAPLNCDSGLFRGKRTVWGGRAHIRSVLYMATLSASRVNPAISCFYSRLIKAGKKPKVALTACMRKLLGILNAIIKNRVPWQAEYSTCPIPNIP

SEQ ID NO: 456145 - protein, 342 aa, unidentified
MEKVSIIGLDLAKRSFQAHGARADGGVGFRKKLSREKVLAFLAEQSRCVVAMEACGSAHHWGRAIRELGHDVRLIPPAYVKPFVKRQKNDAADAEAICEAASRPTMRFVAVKTQEQQARAMLFRTRDLFVRQRTQLINALRGHLSEHGLVAPQGPANVKVLAEAIEEVTTSLPLLVVELSRVFLEQIDLLSKKIVELEKATVHEAARGAITRRLQTMPGVGPITAMAIETFAPPMTVFKRGRDFAAWLGLVPRQHSTGGKQLLGKTSKMGQRDIRRLLIIGAIAVVRWACRKGAPDGTWLHRMLACKPRMLVAIALANKMARSIWAMLTKGEDYRVPGAATA

SEQ ID NO: 456146 - protein, 312 aa, unidentified
METKFVGIDVSKLTLDFDCLPVSAAQQFANDAVGISALVALLQGSGVERIVIEATGGYETAVASALAVAGLPVVVVNPKQVRDFAKAMGHFAKSDRLDAKVLALFAERIKPALRTLPDEAQRALADVLGRRTQLVVMRAQEKARLATVAAVARKNVEQHIAWLDKCIAKLDADLGNRLRQSPVWCHKAELLDSVPGVGDVTTFSLLAQLPELGTLNRQKISALVGLAPFSDDSGKRKGARYIRGGRADVRCALYMATLSAIKHNPPIKAMYERLTKAGKPFKLAMTACMRKLLTILNAMLKKNQTWKIQPSS

SEQ ID NO: 456147 - protein, 453 aa, unidentified
MRVMYERCCGLDIHKASITACALITEKGKTQEETRRFGTMTDDLRALAGWLQQKEIRHVAMESTGVYWKPVWNILEPAGLELLLANAQEVKVVPGRKTDQKDSQWIADLHKHGLLRNSFVPPRAIRDLRDLTRTRAMLTQEHSSICNRIQKVLEDANIKLGSVASDVFGVSGRAILRALMNEENDAEALANLSKGTLRKKIPQLRRALEGQVTPHHRLLLTEHWDRMEFLERQIADFEIQIADRMKPTPEERALMMQDATEDAPAPLSPREEAIQLWMEIPGVGWTAACSMVAELGINMDQFPSAAHVASWAALCPGNNESAGKRLSGKTRKGNVWLRRTMCEVAWAASHTKDTYFAAQFRRIASRRGNKRALMAVAHSILVTAYHMLKHKRHYTELGADFFDVINRDKVRDRLVQRLSKLGFDVTLKSKGTLESVDHLADNSHPVVPASPKS

SEQ ID NO: 456148 - protein, 343 aa, unidentified
MQSISTIGLDIAKSVFQVHGVDAAVQVVIRRQLKRRFVLSFFEKLSPCLVGIEACASSHYWSRELQALGHTVRLMPPAYVKPYVKRQKNDTTDAEAICEAVTRPNMRFVPTKTVEQQSGLMLHRARHLFVRQQTAVINSIRAYLAEFGIVAPVGRRGVEQLLEVVADTADRRLPEVARACLAALGSQLRALKAQILEFDRRIIVWHRSSATSKRLDAIPGVGPALATALVASVADAKAFRSGRDFSAWVGLVPKQNSSGGKDKLGSISKQGDRYLRSLFTAGALAVIRYAKIHGTGHRPWLTELLARRPTKVAAIALANKIARMAWAMMARGERYREPAALTA

SEQ ID NO: 456149 - protein, 329 aa, unidentified
MSNLLKKVIGVDVGSKFLTLSFLDDEKGEQVLNLPNNERSILSFLSKISPSDYCFVIEATGNYSSRLLHFSIGKGFESSLINCMSVKHFARMKNIITKTDAEDAKLIRNYGEMFRPEFYIPKTQDIEYLDQEIKLLNDLEEEKRRYAVKLKALRFHPVLNPSTEKHYEKRLKQLEKEIKEVEARLPQLQDEEFTETKNLLQSVSGIGEKTSLQLMTATSGFRNFHSSKSLVKYFGLAPRIYQSGKKSYSPGKCRTSKTYIRSILYVCSWTAIKHNQKCKELYLRLLEKGKAKKLALIAVCNKLLRICFSVVKNKTAFQQDFQNKLKIST

SEQ ID NO: 456150 - protein, 309 aa, unidentified
MKEELVYLGVDIAKAYLDTAIGNEKSRFSNDALGHRQLINWIKQKPAKVQVICEPSGGYERALVRALVGAQLKISLVPANRVRQFARAKGILAKTDRIDAKLLCSFGEAMQPGTISASQLEQQHLRELESQRRHLTHLLVMEQNRAALMSDLCVCKMNRRLITQIKKQIEQLDLLIKGHIDQSHELSAKAAKLTAISGVGARTAALLLAQLPELGELNRREIAALVGVAPFNRDSGRMRGKRAIYGGRKPVRHGLYMAALVAAHHNPILRNFYLRLRAAGKPAKLALTATMRKLLIVLNSALKPDLNYA

SEQ ID NO: 456151 - protein, 386 aa, unidentified
MAHSTNILPRSADYDQTLVLAIELSNKSWVLAAQVPGLSQTKAKRTIDPDKNDLLAAIDGYRTRAAAAGRSVKRVITSYEAGWCGFWLARWLMAHGIEVHVVQPSSVPVDRRMRRGKSDGIDAELLLRTLLAWLRGEPRVCSMVPIPDEADEDARRCVRERSELVSERVGLVNRIGAILATLGADDYNPLLQSRRRRLTELRTGLGDPIPPNALAKITRLLTRLELVLAQIAELELERDAVARTDAPDHAGKMIQQLISLRGIGVQSATVLVREAFVRRFANGKALGSYAGLTSTPYSSGGIDREQGIGKAGNRRLRTVMVELAWLWQRYQPGTAQVVWFRERVGSTGRRVRKVMVVALARKLLIALWRFIIDGVMPEGAVTKPSI

SEQ ID NO: 456152 - protein, 396 aa, unidentified
MSTTATAAAGRVVIGMDPHKRSATIEVMTADETILGGGRFATDRDGYAEMLRYAQRWPERVWAIEGCAGIGKHIAVRLLADGEQVVDVPPKLSARARVFATGQGRKTDATDAHSVALVGTRMSGLRPVVTDEQLEVLRLLVDRRRSLGEEHTRKTCQLHGLLLELIPGGAKRDLSAAQAKALLARVRPRDVVGKTRRRVAAELVADLERIYARKKAANKELTDLVKQTGTSLLDLHGIGPTGAARLLVEVGDITRFPSKAHFASWNGTAPIDASSGDQVRHRLSRKGNRQINRVLHTMARVQLRNPTEGRAYYDRKKADGKAPMEAMRCVKRRLSDIVYRTMLGDAIRPAGTGPGGHRGASLQSSAAGSQPHTGTSDQSLPGPATNDPRATLPTAS

SEQ ID NO: 456153 - protein, 435 aa, unidentified
MEEVTDEPLYRDRVCGIDIGKAELYATIRVPSDKDPARRASETRRFAATKRGVLALADWLRCWQVPAAVMEATGDYWKGPFYRLEAEGFECVLADAKQVKHLPGRPKRDPSDSSWLAQCFERGAVRPCFVPDPEFRIIRLHTRYRRDLTDERTREKNRTEKLLESAAIKLSSVITDLHGVTGRDIMDHLIAGERNPKVLAQLARARARRKITELEHAVEGAEFFTAEHAALLKAMLERIDGLTAEIGKLSEVIERLLAPYEEQLQQAESMPGWGRRSAQDAVAETGADMTKFPTGGHLSSWGGKTPLDHQSGKRAGRARHKKGNKYLAAVTGETAVAAGKTATREGARYRKLARSRGKAKAQVAVGNTQLKVYHKLLSNPGMRYQDLGPDYYERQAATRRKIAYHVREIEALGLDVTLARIPEPDPDGPASTQAA

SEQ ID NO: 456154 - protein, 349 aa, unidentified
MIRNKPRGATVYGIDLGKNIFHVVGTDSAGNVVQRVKFRRDTLRAFFERAERAVVGMEACPGSQWLARKLQAMGHTVRIIPAQFVKPYVKSHKNDTIDAAAIAEAVTRPTMRFVQVKQPEQVDLQSLHRIRDQMVGSRTRLICQMRAFCLEYGVAIRQGAGLFKSDLPRVIADVCNDLTPTMRRLLNELFEDLMRLEKRIAEITREIEALAASDEKARRLMTIPGIGPLGATALLAAAGNGQQFKKARDLAAWLGLVPQQYSTGGKPQMFGISKRGNRYLRRLLIHGARSCVMHLDRSRDRLGAWLRQLHSRMHVNKVTVALAAKIARIAWVVLNRPGAIYERRDPALA

SEQ ID NO: 456155 - protein, 310 aa, unidentified
MTRNVGIDISKETLDVHRTDDGAHAQFQNDSMGRRALFRWIGDKVALVVFEATGAYHRGLEVDLADASVPFAKVNPKQARRFAQAIGKLAKTDRVDAAMLAKMGAVLDLSPQTPATSELHDMRELLAARRALIKDQTAARTRLATAAVGSVQTILRRRLRQIVKDIDQIDDALRNLSSLDVTFARKVAILASIPGIGQLTAITLLIDMPEIGGIDNKQAASLAGLAPVSQSSGKWQGKERIQGGRAQLRKALYMPALVATRVNPDMARKYNQLINAGKEKKVALTAIMRKLLVMANALLRGNRMWTETRP

SEQ ID NO: 456156 - protein, 382 aa, unidentified
MTGTEPQAWGTGLMDDITFVGLDVHKATVCIAVAEGGRGGDVRQLGVFENRPEILSKVVSRLSKGGRRLSFCYEAGPCGYGLHRLLTGYGHECVVVAPSLIPMKAGDRVKTDRRDALMLAKLHRAGELTAIWIPDAAHEAMRDLVRARATAVRVLVKARQHLQGFLLRHERIYRGARAWTLAYRRWLTTVRFEHPAQQIVLQDYIHAVQEAETRRERLTQQIEELLPNWSMAPVVAALQAMRGVALIVAVTVVAEVGDFRRFANPRQLMAYLGLVPSEHSSGSSVRRGGITKAGNALARRVLIEGAWTYRMSARVSRKLHDRLEGLPAAVRDIAWKAQLRLCARYRRLAAMGKSKVVVTTAIAREMVGFIWAIARLAQPALV

SEQ ID NO: 456157 - protein, 343 aa, unidentified
MQISTIGVDLAKNVFQVHGVDGQGKIVLVRQLRRQQIMEFFRRLPSCLVGMEACATAHHWARELMKLGHTVRLIPPNYVKAYVKRSKNDAADAAAICEAVTRPSMRFVPIKTAEQQATLTVHRTRDLLISQRTQLINALRAHLAELGFVTNQGRDGVTKLIAIVIAENNLQALPAMMREALRVVVAQLASLQQQIRELERSIHAQHRASDVSQRLESIPGIGVIGATAIAATITDPNVFTSGRDLAAWIGLVPRQSSTGGKERLGGISKQGDRYLRRLLVVGATAVVRHARRHPDKHPWITKLLAKKPAKLVAIAVANKTARIAWAIMNKGGIYRTPALAAAA

SEQ ID NO: 456158 - protein, 402 aa, unidentified
MNAVGIDVSKGKSMVAIMRPFGEIVSAPFEIKHTTSDINSLVELINSVEGESRIVMEHTGRYYEVLAHQLSEANLFVSAINPKLIKDFDNDSLRKVKSDKADAVKIARYALDKWQNLKQYNVMDELRNQLKTMNRQFGFYMKHKTAMKNNLIGILDQTYPGVNTYFDSPARSDGSQKWVDFASTYWHVDCVRKMSLNSFIDHYQNWCKRKKYNFSQSKAEEIYGKAKELVPVLPKDAITKLIIKQAVNQLDNASTTVESLRTLMNETASKLPEYPVVMAMKGVGTSLGPQLMAEIGDVSRFTHKGAITAFAGVDPGVNESGSYEQKSVPTSKRGSSDLRKALFQVMDVLIKTHPQDDPVYQFLDKKRAQGKPYYVYMTAGANKFLRIYYGRVKEYLSSLPEV

SEQ ID NO: 456159 - protein, 334 aa, unidentified
MSMNNQTILYAGIDVAKASFQLDWRGASHHLPNNAKGHATLLRLLGHPGHCHVVMEATGGYERPIASALHAGGYTLSVAEPGRVRAFARAKGLRAKNDPIDAGAIRAFGEAIRPAPTPAPGKNQERLAELVTRRAQLVGLKVAEANHVEHYRDALVKRQAAALLRTLAGQIARCEKEIASLLAADAPMHARAERLQQVPGVGPIVAATLQAFMPELGTLSPETAAALAGVAPYDRQSGPWAGQRRISGGRAPVRCALYLAALSAVRHDPVLKSFYIRLRAAGKKPLVALTAVMRKLVILLNRLIQVPSFQLRGVVPPVPCSPTTPGSGAGEAQV

SEQ ID NO: 456160 - protein, 404 aa, unidentified
MIIVGLDWSRYKHDFVLMNLQGDILERGTIAHNMNKLEELASRIEQHVDSANQVRVGLELNDGALLAWLATKGYTLFGIQPKSAQRARDIYRPSGSKDDKIDAFVLAEFVRTNAVRLRPWSPLSEITLKLRELLRWREELVHQRTAAYQRLRALLAEWSPQLSELCNNLECIWQLDLLSQFPTETRLCQAHGNRIRSFLRNHRMRSKKQQQIEDIRQSVPMPVPAGRVDIVEKQTAFLVEQIRMLTAEIKQIEDDLQQLTAQHPDFNVFKSLPVKGTATIAGLLAIFGDNHKRTTSPDELAALCGVAPVTIASGKARKVRQRRACDHTFRQTLVHFAFNTAFCQGCWAGPFYQRKRSEGATHYAALRCLAKRWLKILYRMWKDQVAYDEQLHQANQKRNQNHAA

SEQ ID NO: 456161 - protein, 339 aa, unidentified
MKLYAAIDLHSNNSVLVILDEHDRIVYERRLPNELPFILAELAPHRKNIEAIAVESTYNWYWLVDGLMEAGYTLKLVNTAAVKTYDGLKYTGDEHDARHLAHLLRLGVLPTGYIYPKEERAVRDLLRKRAQLVRCRTAQILSIQNLVSRNRGKGISTDEIRKLDDEAIGQACGGDATGALAVQSNLAVMRCLDEQIRGLERVVLTQAKLKPAFEKLMTVDGIGKILGMTIMYEAGNMERFAQVGNFASYARCVSSSRWSNGKKKGEGKRKNGNKYLAWAFVEAAHFAVRYNERIGRFYQRKKAKKNAAVAVKAVAHKLARACYHVINDQVPFEEARAFA

SEQ ID NO: 456162 - protein, 334 aa, unidentified
MEIKVLGIDIAKRVFQLHGVDAKGKVALKKRLPRHQLLNFMAHLPPCLIGIESCGGAHYWARQFQTYGHEVKLVPPQYVKPYVKTNKNDANDAEAICEAVSRPNMSFVSIKSVAQQDIQSLHRFRQRVVQQRTALVNQIRGLLTEYGIVISQGIGHIRKVLPQILENQEGDLTSLALEVFHDLHQELLSIDEKVKSLDKSLNQLCQKIEACQRIQQVEGIGPLTATALVAAIGDVSHFKNGRHLAAWLGLVPRQYSSGNRQVLLGISKRGDRYLRTLLIHGARAFISLAKKRSTWLEKLIKRCGKQKAYVALANKNARVVWALLAKQSVYQSAH

SEQ ID NO: 456163 - protein, 358 aa, unidentified
MQHQVKELNFGGQNIYVGLDTHRSQTTVTVLGENLHHKTFSQPTAADILARYLKKNFPGANYYAAYEAGFSGFWLQETLQSQGINCIVVNAADVPTKGKERNQKNDNVDSRKIAYALRKGDLDAIYVPSKECQRDRGLLRARQKIVSNQTRCRNRIKGLLNFFGIVYPEKFSKSGTHWSRKFMDWLKSVNLGGSGNDTLAIYLEEAEFLRALLAKTMKKINHLSNQERYAKNVKLLISVPGIGRLIAMILLTELERIDRFKTRDSLCNYVGLIPDVYSSDQTVHVGDITQRGNKSLKKFLIESSWVAARTDPALVMKYNQLCSRMNGNKAIIRIARMLLSRIRYILMHEQEYQMAVVA

SEQ ID NO: 456164 - protein, 341 aa, unidentified
MQLFVLPKIKVMKKVQHVIGADLAKKSIDLSCHLLKSHIQIENTEKGYKEMIQWLGKQKIDLSTTMIVMEHTGLYSFCLETFLHQHQIMFVKVNALSIKRSLGLVRGKTDQIDAARIAAYGYEKRDQLIIEAPVDDDLKRLQMLYSTRERLVKQRAALLCAIKEYRNIAILDKDLIMQSQLKIVKELDKQIERLENETGLIIEKQDALKQNFTLLTSIKGVGKVLALASIIKTNNFTRFDNARKFACFCGTAPFEHSSGTSIKGRTRVSHLADKKMKTLLDLSAKSAIQYDKELREYYLKRIGMGKSKMSTINIVRNKILYRMFAVVKRQTPFVQDYLQAA

SEQ ID NO: 456165 - protein, 385 aa, unidentified
MIHPRQIANFIPRDYDIFGGLDVDKKSMAVTFTDHGTMRKSLKLPYSASQLLNYTRKHFPGQRVAFVYEAGPTGFGLHDELTAANHPCLVVSPAMVPTAPGQRVKTNRLDSNKLSEGLRGGQLRSIHVPAESYRELRHLVQLRDTQVAQLTASKLRIKSLLLYEGIAFPAANGKWSGQALRRLGSLPCNATVRFKLDQLIDTLQFHFLSAAKVQKQIRHFCQSDPELSQCLSFLTSLPGVGTITATHALARLGDWRQIKDVRQIAGFLGLVSSEHSTGDKQNRGEITHIGDKRLRSKLIQCAWTAIRKDPELRAFYRRIYERQPKKVAARKAIVAVARKLTTRMYAVLKEQRPFEIRANSSIAPLTAEETAGSRERLDAAQNDQP

SEQ ID NO: 456166 - protein, 343 aa, unidentified
MRTYIGVDYHRKYSYMTVMDEKGKIIDQRQVANNAEAVKMFLNRAGVNGDSAAVMEATRNWTVMHDWLEEMVDEVHLAHPLKVKAIAEAKIKTDKIDAGILAHLLRSDLLPEAYVPGPAAREARNVLRQRMFFVRVRTMIKNRIWGLLDRYPDLAESRPCKELFSKQGLGWMETLSLKERDREMLDEDLRLYHALEERIGQSERLVEKMADGDRRVELLRTIPGIGKFFAVLIANEVDDIGRFASEKKFFSYIGIVPSTYSSGGRTFHGRLTKQGNKYLRWALVEAIWPAVRSDPELGAYYQKIKARKGANPAKIATARRLATIVYRVLSRERPYRVYGSRLP

SEQ ID NO: 456167 - protein, 407 aa, unidentified
MEVLYPRCAGVDVHAGSVTACVRIASGADVTYQHRTVAATTQGLLELADWFAANGCTHVAMEATGVYWKPVWHVLEEQFTLVLANAMHIRNVPGRKSDTNDATWLADLLAHGLIRGSFVPPAPIQELRDLTRTRKQLVGEIARHTLRIQKTLEDANLKLTQVVSDILGTSGRAILKALIAGETDPARLADVTTGRLKASRAQLIAALHGRVTAHHRFLIELHLTQIEALDAAVQKLEGHLGDALAPFRAAADRLTTMPGVSDTAARVLIAEIGVDMTRFPSAGHLVSWAGLCPRLDESAGKRRSTRIRHATPWLKTTLIQAAWAATRKKGSYLQAQFLRVKNHRGPKKAIVAVAASMLTAAYFMLRDGVQYHDLGGRYFVERDKQQLTKSLLRRLRDLGVVVEIKAA

SEQ ID NO: 456168 - protein, 400 aa, unidentified
MSGSRKPFQGFVGIDVSKDKFDACGIREDGAKLFQFSAPMDRNGFEKLKSHLSSIPIDSVLIGMESTASYHVNLFSYLVSEGYAAVVLNPLLISNYVKMQLRKTKTDKKDAWVIAQFLLANRDSLIRRATSPLISDLRELARQRESLVDQMTSLKSDIKRILNVTFPELEHMAGIFTKSILKLLQRYPSAYALQEVDPDQLTRMLIEDSYGRKRGAFAEALLKAARSSIGTPSPMKDVILKQKVSLHFHLEEALQEITDMLLQTSRGMMGDDMDILNSIKGIGEKSAASFLIEMGGDIRQFDDPNKIIAMAGIDPAVRQSGKHEGSSRITKRGNRHLRRIIWLMTTQVIHFCDVFRVYYQKRRKDGLPYKKAVLATSHKLIRVIYAMLTQRTFFCQAANS

SEQ ID NO: 456169 - protein, 425 aa, unidentified
MNYKQNEKINQVKESTLVVGIDIGSTTQYARAFDWRGIELGKVFTFSNSREGFEAFKAWMQHLQDKYRKSDVIVGIEPTGHYWFDLGAYLEDEGILLVMVNPYAVKQTKELDDNSQSKNDRKDPKVIAKLVTEGRYSAPYTPDGVYADLRIMVANRKRLIREMTQIKNRFARWFAIYFPEYTDVFGDYEAQSSMLLLKKVCTPEAIVELGAEKINQIWRDAKLRAVGMKRATTLCETAKRSIGLKKGSSAARYEMKLLLEDYEYKKAQLGSIMEEIESLCKKIPESEQMLAIKGIGVITVAGFLAEVGDVRRFESPRQIQKLAGLSLRENSSGKHKGQTTISKRGRSKLRAVLFNAAIPLIAKNPEFKSLHEYYTTRANNPLKKKQSVIAISCKLIRVFYAILANGVTYDAQKMLSDIHRQPQAA

SEQ ID NO: 456170 - protein, 372 aa, unidentified
MESIIYVGIDVHKDTYYLSSYLPEKNLIFAQTEMKADSKSVMKYLDRVSEMNDGAIVLSGYEAGPTGFKLCRDLIKWNYNCVVMAPTSIAKTTRDKMVKTDRADSILLAKSLAFHSYKQVVLPNENIEALREVVRLRHTAQKECKRAKQAFLSFLLSNGFAYPYGGKDSHWTKSFMLWVNTIHFNSEYLNFCKDEYLAEAVRMIQKVKALDKKIEELQEVDEIRDKVKALKCISGINTLTAMTLVTEVGDFNRFETAGNFASYTGLCPGSHSSGLTDRTTGITKQGNRIIRRLLIESAKAIRRSGTQKSYGLLKRQDGVPSEIINYADKASNRLRHRLRRMDNRGVNYNKVSAACARELACFVWGMMTNHIA

SEQ ID NO: 456171 - protein, 332 aa, unidentified
MMAQSDLVVVGLDVAKDKVDACIRSLSQRQTFPSTAEGRRALIRWLRRHKVSKAAMEASGGYERDWARALREAGIEAFIVDPKRVRNFARSAGRLAKNDPIDAQMIAWFAEIFVEAKGQTYDADREKLAQIVSARQFLIEMRTRLRNRREHSAPEVVRKMQAQLMKSIALELAKIEAAIAATIKAVPAFVERAAIIESVPGLAKGTSGGLIAGMPELGQASNNGAAALLGAAPYDNDSGKRRGERHIQGGRHWVRKLFYMACMGAATRHNPVLKAFYDRLIAKGKPKKVAIVACMRRLIVILNVMIARGEKWDPSRYRLSEPARLPPSACAA

SEQ ID NO: 456172 - protein, 317 aa, unidentified
MKDSSSISVVGIDVSKDSLDLFHTINGQQQKIAYQQDSLKLLARQIIKLNATVVMEATGGYEKKLVKYLQSQGIACAVVNPKLIRDFARACGKLEKNDAIDARIIASFGQMMQPRTMGKIDQNREKLKLLATRREQVQSMINQESNRQQQIEDRQIRALIQRAIQLYQKQLKKLDNEMLKVIEADQDMKEKSKILLSAKGVGPTTTANLIAGLPELGQLNRQQIAKLVGLAPLVRDSGKFKGQRRTYAGRSQIRRILYMATLVATRWNSRIKAFYLSLLERGKPKKLAITACMRKFITILNSMMKNNQTWDQNLLAS

SEQ ID NO: 456173 - protein, 347 aa, unidentified
MKNSNSESISNQSVGIDVACQSLEARIGTRDSINGYMFGRTRSFSNSQKGFDKLLGWVRSHTGDCDVWFIMEATGSYYERLAWFLYQQSYQVCVLVPHRANHYAKSLPQASKTDVIDARKLARYGLERTPTAWEPADIQLREIKQLLRERQALKKDLTRVTNRMHAADQAYRHPESSLQRWQAQQELLQEHIDQIEAELWNQLQQTPELYQPVTRIAKVKGLGWLTVLIVVAETNGFALITNRQQLASFSGLDVVLDESGDRKGATKISKQGSGYIRGALYMPVLSVIQHNRALKAFYQRIAGRNQGNEQVAVVAVMRKVVLLIYSLWKTGQSYDPEFHYQQITNNA

SEQ ID NO: 456174 - protein, 348 aa, unidentified
MNATAKVIGLDIAKNVFVAVGRDVHGKVVLKRTLSRGEVLNTFANMSQTTIGIESCAGSHYWARKLIALGHDVKLIAAQHTRAYVSGNKNDSNDASAIAEARSRASTKYVPINSEAQQDLQMMHRARRALMVERNAMIYRIRAFAGEYGQVFPVGVARFRTAFAAWVADTQNGLSGSAINTFGDLTTQLDDKEERIATYDRRLLQASKSDERAKRLQEVPGIGPLTATAVIASVADAHHFGSGRDFAANLGLVPREHSSGGKQRLYGITKRGDVYLRTLLIHGARSALRCAGEKPDRLLRWAVKLAEKRGMNVAAVALANKLARVVWALLAHGREYVPIWSNNTTRSA

SEQ ID NO: 456175 - protein, 318 aa, unidentified
MKTQQATEFVGVDVASDHLDVAVHGQPTVRRFANTIQGIAQLLRMVPPSSVLGLESTGRYHTQLAMAAHAAGLCVHVLNPLDARRYAQSVGQRGKTDRIDALVLARYICPEHAHLQQWQPPTACQAALRELLADRATLVRQRSALAQAGCHNKALARLDEPVLAAMQQAIAQIDEQLASTVQADPASQEAFEHITSVPGLGLVCGSLLVMLFGRMQTRSADAVIAFTGLDPRPNDSGKKTGQRRLSKRGWPEIRRLMYTAAMSAARTKTWNSFYRAQRDKGLSTTAALVVLARKLLRVAFSLFKKRVKFDATLVAASA

SEQ ID NO: 456176 - protein, 338 aa, unidentified
MKLYAGIDLHSNNSVIDLLDEKDKVIYDKRLPNDLPTILSALSPYQAQIQSIAIESTFNWYWLVDGLIDVGYCVHLVNTAAVQTYSGLKYTDDNHDARWLAHLLRLNILPTGYIYPKANRAIRDLLRKRSQMVRIQTMNILSIQNLVARNTGHSIKSNTIKRMTAEDISLQLPNDDHALALSCNLSVLQQCHEQVKILESAILKRIRLRPEFQSLLTVPGIGKILALTIMLETGDIHRFNKAGNFASYARCVQSKRVSNGKKKGENNRKNGNKYLAWAFVEAAHFSIRYSDTIKSFYQRKCAKTKKVVALKAVAHKLARACFYVMRDNVEFDVNKAFT

SEQ ID NO: 456177 - protein, 341 aa, unidentified
MLIIGCDYHPSVQQIAMMDTETGECQERRMAHRAEAEHFYRELRQQGVSVRVGIEATGQSRWFERLLAEFSFEVWIGDPARIRAKQVRKQKNDRKDAEHLLHLMLKDDFPRIWVPSAENRDVRQLVWHRHRLVQMRTRVMNQLQAIAMNEGIRRKRGLWTQRGRAQLEELSLPSWTSRRRQELLELLDRFDPNIEQLTEAVRQEAERRPEVERLQTHPGVGPITALAYVLVLGTPDRFRCGKQVGSYLGMIPCEDSSADHWRLGHISKQGNGLLRFLLGQSALSAIRLDDDWRRQYAHLTMRRNHAVAKIAMARKLAVRLFWMWRRGWDYEQWKKFGSHAG

SEQ ID NO: 456178 - protein, 338 aa, unidentified
MTYYAGIDVSLEYASVCVIDAEGQRVREGKVLSEPEALMNWLASVGVGLTRIGLEAGPLSQWLYAGLRQAGQPVELLETRHVRRAFEIMPVKTDRKDARGIADLMRLGWFRPVHCKSIDAQETRAVLTARKRVQKQVLEVESSLRGILRGFGLKVGKTTPVRFEARVKELVAEYPSVERIATSLLAARAVLRREFNGFERQVRAMARNDTRARLLMSTPGVGTIVALTYAAAIDDPCRFKSSKTVGAHFGLTPRRYQSGETDYSGRISKLGDSSVRAALYEAAHAILTKPLKGCTALKSWAMKIARRAGMNKAKVALARKLAIIMHRMLVDGTTFQSA

SEQ ID NO: 456179 - protein, 341 aa, unidentified
MNIKRVGIDLAKQVFQIHGVDGQEKVVLRKQLRRAQLLDYFKKLPPCLIGMEACGGAHYWARELQKLGHTVKLMAPQFVKPDVKSNKNDANDAEAICEAVARPTMRFVAIKTIAQQDIQAIHRIRRELVQQRTAKVNQIRGLLAEYGIVVGRRVDVLRNALPQLLEDAENGLTADFRVLLDGLKQDLVTLDERVDDLDKNIKTLANSNPGAKRLQQIPGIGPIIATALVCAIGDGKQFKRGRDMAAWLGLTPRQHSSGGKDRLLGISKRGDAYLRTLLIHGARSALKVAGKKDDPRSRWLQNLCSRRNKNIAAVALANKNARIAWALLSKEADYLPEGEPA

SEQ ID NO: 456180 - protein, 410 aa, unidentified
MPHNIAGIDVHKKLLVVVIVDAAEPDVPLLSRRFGTGSAELRHLSAWLRQYDVVEAVMESTAQYWKPVWMELEPHMRLHLAQAQSNKAPKGRKSDLADAKRLVRRFAAGELMLSFIPEPEQRAWRMVTRGRLQLIRERVQLQNQIESLLEEGRIKLSSVISDLLGVSGRRILRAMAGGQRNPETLAALGDQHLKCGRDVLVDALTGLMGDIHCQLLTQHLDRIELIDRQVDELNKLSAAQMQKHQDAVTRLIEIPGIGAEAAQEILAEIGPEAAAFPSAPQLASWIGVCPGSSESAGQNHSGRCAKGNRFMRRLLCQAAQAAVRTKGSHLQSVFQRLIVRLGYVKAIWAVAHRLCKVIWNVLHQGARFVEFGEAINPKAVQRSINHHLKALRRLGYQIPTATAPNVAARV

SEQ ID NO: 456181 - protein, 402 aa, unidentified
MYNAVGIDVSKGKSTVAVLQPAGVIIRKPFNVNHTSSELDELAKYIGSLEGETRVVLECTGRYHEPVVKTLSEAGLFVSAVNPHLIKNFGNNSIRKVKSDPADAKKIARYTLDNWIELRQYSSMDNTRTQLKTLNSQFSFFMKQKVAAKANLIALLDNTYPGVNKLFDSPVRDDGSEKWVDYAYSFWHVDCVRKIGLKTFTERYQAFCKKHHYNFQPAKPAELFLASKDLIAVFPKEASYKLLIQQSIQQLNLASSHVEELRSKMNELASTLPEYATVMGMYGVGKTFGPQLIAEIGDISNFSHREALTAFAGVDPGVDQSGTHNSKSNKASKCGSNRLRKTLFQIMSTLLQTAPEDDKVYQFLVKKCAEGKPYYVYMTAGANKFLRIYYGKVKECIRNLEQ

SEQ ID NO: 456182 - protein, 339 aa, unidentified
MQLYAGLDLHSRNTYIGIMDKEFKRLFGKRVLNKLPVILDTLAPFRDQLKGIVVESTFNWYWLIDGLMDAGYQCVHLANPSAMKQYEGIKHTDDQHDAFFLAQMLILGILPQGYIYPKEDRPVRDLARKRLFLVRHKTSHILSLQSLIARCCAQRISANDIRKFTVEDLQQLLKQEYIVLSAQANLDTIVFLKQQIKRLEKTIQKKVKLNKAFQQLMTVPGIGLILAMTIMLEVGDIGRFAQVGNFASYSRCVSSQRLSDGKSKGHGNRKNGNRYLSWAFTEAAHLSRRYNEHFRSYYNRKVAQANTSLATKALSNKLARICYYIMRDQVCFQENLLSQ

SEQ ID NO: 456183 - protein, 406 aa, unidentified
MSKCNTKLHVGTDVSNKSIDLFETKTQGGQTVIKYNFDLYIGADVSDKLIELFALSANGRGEKSWQIANSRKAILEFCDSIKDPSRTLIAMETGTHSAWQSELLEKGGFKVVVGDARKLAAVWMSKNKSDRKDAEMLARLVRSDIKLFCPIRHISTSVRADLAVVKTRDAVSKCRTKLMNTVRGLLRSFGVDTSEITTDNFTLEASKVIPAALRPAMTGILKEIRSMQLAIKAYDKQVTKLNKKYPDTVKVGQPGGVGELTALAYVLIIEDPKRFSDGSRVGKYLGITPKRDQSGNVDKQLSITKEGNNLMRWLLVQSANYIMGRGPDCDLRRFGERIAARGGKIAKRKAKVAVARKLAALMHKLWITGEVYDPDYKAHCKEQRQKKEAEKKNKAEMSEQLIPQTV

SEQ ID NO: 456184 - protein, 389 aa, unidentified
MKIFVGIDIAKLNHFAAALSSDGEILIEPFKFTNDNDGFQLLVSKLESFDKNSIIIGLESTAHYGDNLVRYLVAEFYQVCVLNPIKTCQMRKNNVRKTKTDKVDTFVIAKTLMMQDDLRFITFFDLDMMDLKALGRFRQKTIKQRTRLKIQLTTYVDQVFPEIQYFFKSGLHQNAVYALLKEAPSPKEIASMHMTHLANLLKVNSHGHFTKELAKELRVLAQKSVGANDSAISIQITQTIQQIELLDSQLEKIEAEMTDIMKFNDSVIMTIPGIGYINGGMILGEIGDIHRFSNPNKLLAFAGLDPSVYQSGNFQAKTTRMSKRGSRVLRYALVNAAWNVVRNNATFKAYYDAKRAEGRSHYNALGHCSGKLVRVIWKMLTDNVEFNLK

SEQ ID NO: 456185 - protein, 387 aa, unidentified
MASVMIGVDPAKRSHAMAVLDERETQLAALQVGNDSAGYREMVRLARRWPERTWAVEGAAGVGVQLAQRLVADGETVLDVPPKLSTRARIFDVGHGRKNDPGDARTVAVVAIRTKGLHRVVPDDDMVALRLMSERRRDLVRSRTQTVNHLHQLLMELIPAGAHRNLTAKKAKTLLATVRPRDVAGRTRRQLAADLIDDLVGLDRKLADLDKRLKAAVTATGTTLTDIKGVGTATAAMILGEVGDVRRFPSRHHFATYTGVAPIEVSSGEVERHRLSRAGNRQLNHALHIIALSNKRYDPRGAAYYVKKVAAGKGRKGALRCLKRRLSDSVYRHLVDDQHQRAQGSPGGHLGATLQSSAAGSHPNTDTSEQPHTGLHKNPTPGLPAAS

SEQ ID NO: 456186 - protein, 431 aa, unidentified
MKNRMNQKLEEITVGTLIVGVDVAKSVQWARFVDYRGVEIGKAISFKNNRQGFENIVARIRDNCNMKAKQYRFDKVIIGMEPTGHYWKALANYLMEAGFKVVGVNPYHTKKSKELDDNSPTKNDKKDALTIARLVKDGRYFDPYMPQDDYAELRNLTNTRVSILKRSNEIKNTITAILDEYFPEIWTVFKKPIKGKASRQVLRSCPFLSFILAMGEEKVLAEIKKAVKKTVGLKKVHQLLCTAEASIGVRYGLNTAKMRLGWLLDELELIEDQLHEVEREMEQMLFRTGHAERLLSIKGIGVVSAAAFLGEVGNPLRFQNARQIVNYAGYNLVEDSSGQNKSGTCISKRGRKQLRSVLYQMAFTMVSNNGEMISLYRYLTTRRVNPLKKKQALVVISKKIITVIYSLLKKQAVYDPTLVLGAAMKERMMAA

SEQ ID NO: 456187 - protein, 348 aa, unidentified
MELFAGLDVSIDETAVCVVDAAGEVVMRASVATDPQVIAQALAPFAASLRRVGHEACALSPWLQPGLKALGLPAVCLETRHVRAAMAAQRNKTDATDALGLAHLMRTGWFKTAYVKTDACYRLRQVLTQRRALKRKFLDLENTIRHSLKSFGVRLNKVGRVGFAAAVQAACADDPLTAELMDAMLEARAALWRQYLKLHAMVLRLVAGDEVCRRLMEIPGVGPITALTFVTAIDDPARFRRSRDVGAYFGLTSKRWQSGASIDIQGRISKAGDAEVRRSLYEAASAMLTRFKGQTRLKAWGQKLAKRCHKKAVVAVARKLAVIMHAMWRDGTVYEDAPLSAVAARPVS

SEQ ID NO: 456188 - protein, 315 aa, unidentified
MSDEPCFVGIDVAKAQLDIAVRPSGERWAVPNDAGGVVTLVERLQALHPTLIVLEATGGLERVATAALATAGLPVVIVNLRQARDFARATGQLAKTDALDARALAHFADVIRPTPRPLPDAQTQALRALLGRRQQLIGMRTAEQNRLAGTSERLTQDIEAHIAWLNARIATLDDDLETMLRASPLWRENDDLLQSAPGIGPVCARTLLLELPELGTLNRQQIAALVGVAPLNCDSGTLRGRRIIWGGRAHVRTVLYMGTLVATRYNPRIKAFYERLLAAGKVKKVALTACMHKFLTILNAMLKHRTPWQSQEVQG

SEQ ID NO: 456189 - protein, 312 aa, unidentified
MDALNIGIDVSKDALDVAANGPAFAPFRVARTADGLADLIERVKPLGAARIAVEATGGFETVVAASLAAAGLPVVVVNPAQVRAFAQAMGKRMKTDPIDAFVIARFAEATRPEIRPLPDAELQALADLVARRRQIVAMIGAESQRLKRASPRTARSIERLLEALKRELADIDQEIGGAVRRTPAWLEKAELLKSVPGIGDQIARTLLAEMPELGDLDRRQIAALAGLAPWTRQSGQWRGRSFIGGGREAIRKALFMGAQVAAQHNPILKAFRDRLVAAGKPKMVAIIAVARKLLTILNAIIREKQPWRAEAA

SEQ ID NO: 456190 - protein, 347 aa, unidentified
MDQKAWQMTIAARDVMALTRAIGKARQRLGLPSDCPVFSCYEAGRDGFWIHRLLLKMQIHNIVVDSSSIEVARRARRAKTDRLDAAKLLSMLQRHHAGEKKLWSIVHVPTPEQEDGRHLQRQIRTLKKEQTRQLNRIRGLLANQGVAVRANRGGLLEPLDSIRIWDGSPLPVGLRRRLEVEIARHAFIHRQLLDLELERDARIRQSQDRAAQIARHLMRLRGIAQVGAETYSREFSWRGFTNRRQVGSLIGLTPTPHQSGDSSREQGISHAGNRHMRGIAIDLAWLWLRQQPHSELTLWFNRRFAHASPRLRKIGIVALARKLTIALWRYADFAEIPKGALLKSKAI

SEQ ID NO: 456191 - protein, 358 aa, unidentified
MEIKRSDVRFDGQEFCLGIDVHHRTWKVTVRTMGMEVKTLAMPPDPRVVHGYMTRSFPGGRYRSVYEAGFSGFWAHRQLTELGIANSVVHPADVPTSDKERRQKEDARDSRKLARSLENGELKPIHIPDPGIEQLRSLCRLRGRSTSHIHRLKNRIKGHLKYYGLPMQEDSAYRHWSGPFIDRLQALCAEPGPRSDYLSITLDALREESCRLALITRKLRAHCREGEGARITSLLRSISGIGPKTAFALYTELQDIGRFPNLDKLDSFLGLIPSTDSSGEDETTTGITPRTNRGMRALLIEASWVAIRHDPELLRAFSVLSCRMKKQAAIVRIARKLAARVAYVWRTGTPYKRAVPTA

SEQ ID NO: 456192 - protein, 280 aa, unidentified
MNSMNYIGLDIHKKSISCCVRQADGTIIQESTITATRHALDEWMRQLPDPWIAGMEATLFTGWIYDHLVSGGAVVKVAHPAMLQAIAVGKKKNDRVDARKIADLLRCDYFPECHMAPREIRDRRRVLRYRNLLVRQAVQMKNKVSGLLMEAGVPYNQQKVHQKKYFAELLQKQKKDMPPSMPELLRLSRSTVEALTGMQRQLIRALESDALLAARVERLASIPGVGRVVALTWALEMGDISRFASVKKAVSYCGLCGAEKSSGGKTERTPNRETSTCIPC

SEQ ID NO: 456193 - protein, 456 aa, unidentified
MKIPQSTIRLLTGRLVKILLNREVSTMKSNTQNAKIEAITEKTLVLGIDVGSETHYARAFDYRGIEYSKKPFKFSNTEAGFVTFKEWILDLKEKHEKDKVVPGMEPTGHYWFNLGKFLQDNEMKPVLVNPHHVKKSKELDDNNPTKNDRKDPKVIAGLVREGRYMIPYLPDGVYADLRTASNIRFQLQAELTRIQNRISRWFNIYFPEYKTVYGKPDAKSGMLILKAAPLPEDILTLGIDGVNQIWRDAKLRAVGKARAKTLIEAAEHSVGSKEGAVSARMEIRMLLEDYESRNTRLQEVMVLIEELVRKIPMAEKLLEIKGVGIRTVSGFLAEVGDISRFNNPKELQKLAGLALVENSSGKHKGETTISRRGRKRLRYLLFEVAMSLVAKNPEFRELHNYYTTRRLNPLKKMQSLVAIAAKLIRVFYAMLTKGVDYDPKKMVSDIKRPAVYLQAA

SEQ ID NO: 456194 - protein, 340 aa, unidentified
MSIVCGFDVHRAQITFDLVDQLSGELRTGRIVPATREGLRGWLASLNSSHLRVALEATTGWRFVVEELERAGAEAVLAEPAETRALRGPKRRAKTDRADARHLRELLEREAVPQSWIPPAHLQELRALVRLRHSLAAERRVWLQRVQAQLFHQGAPPVRGRLLGPGGAAVRAPLSPAGRELVECAERVCAQLEAEIAQLDARLGVWARRHPACRALQKLYGVGPTIAVTLYAEIGDARRLGSSRKLVRLAGLDVTVSESADKRSPGRLSRQGAPVLRWAAYEAALSACRHSSPDRDDYQLLRERIGHGRATLTIARKLLRRAHHALVAVGDDLLAPLPEL

SEQ ID NO: 456195 - protein, 330 aa, unidentified
MKSWNVILGVDVSKLTLDICWAEGNLHVKIDNCSKGFAGLKKWCKTNGINLKKTLLVMEFTGGYEYKFIQFCESLSISYCRIPGLQIKNSLGMTRGKSDRADAFRIGQYGEEKIKKLTPSGPLDKNILELKQLLSFRKRLVREKAGFESTVKERGHMYGENKADTVNHIAKAKIKANERYIRQVEQEIMGLIGNNEMMLLNYRIITSIKGIGPVNGWMTLAYTENFTSFTDPRRYAVYVGVIPFEHTSGTSIKGRRRVSNLAHKELKQELNQAAKTAITHDKEISAYAERKLKNKCYPLVLNNVKFKLILRMFSLVKRGEMFVENYKRVA

SEQ ID NO: 456196 - protein, 453 aa, unidentified
MARKAEKERTKDGLKLKIVNPNAAGIDIAYGEMQVCVPEDRDGENNRCFGSFTCDYEGIASWLKACGITTVAMESTGSYWVGLYFFLEEKGFDVLLANAKDVKNVSGKKTDEADAEWIMLMHSYGLLKPSFHPDAAARNIRELARHRDNMLRSAGKEIQHMQKSLVLMNIKVDTVISDILGKSGKAIIEAILEGNHDPKSLAQLADRRCKASRETIEKSLEGTWDAVHLFELKQSYDLYKYIHTQIADCEAEMDRMLSDYTDGCGTDMTGYKATEKRVAKKNAISFDAEKHAFSMWGVNIMEMPGMSLGGLSVLMGELGSGFVEKFPSAKSFCRWCNLVPNNKISGGKLLSSKVPKQKNRVGQVFRLCANSVKGVKSGLGVYFRRQKSKGGHLQAIVATANKMARIFYTMVVSKKPFDETKVGLDEKTLLQRKISIAQRSLEKLNLRLSVAQG

SEQ ID NO: 456197 - protein, 352 aa, unidentified
MNSDGFTQFLKALSPKGEGLDQVLVAMESTGCYHINLYSFLTSQEIRTMVINPLLIANYAKLSLRKTKTDKKDARTIAKFLLDHRQEISQLSVSQDLQDLRDLARERESLCHLISATKVEIKRVLRTTFPELESIGDLYTGVMLLFLQEYPSARLVRAAKPKAIAKILKQPYVGNKLSFSAEDILRAAKSSVATVSPAKEIILRGKIATLLHLQGRLDEVTKLLTDLCKSTKVDDLEILRSIKGVGPKTAAPFLAEMGQVKNYSSYKKLIAYAGMDPSVHQSGKFIGMSKLSKRGNRHLRRAIYLMTASVVCQNAFFKAYFVKRKREGLPPQKALFATAHKLIRVIFSMLSQ

SEQ ID NO: 456198 - protein, 345 aa, unidentified
MNKISVIGLDLAKNVFQVHGIDADDEVVVRKQLRRSEMCKYFARLEPCLIGMEACGGAHFWSRELTRSGHTVRMMAPAFVKPYLKSNKNDRNDAEAICEAVQRPSMRFVQPKLPEQQAVLHLHHGRQLLVRQRVALSNHMRGVLSEYGIVVPQGVKVLSRQLPEILEDAENTLPMLARHLLAELKAEHDQLIERVDRFEKQLKAWHANSAVSQRLASIPGIGVLTATALAATVGEGQDFKNGRQLAAYLGLVPRQSSSGGKDRLLGISKRGDGYLRSLLIHGARAVIHHIRRRLKAGRPGGNPWVEQLLLRCHVNEAAVALANKMARTAWVLLARNETYCLARPA

SEQ ID NO: 456199 - protein, 392 aa, unidentified
MIYVGIDVAKDKHDCFITNSDGEVLFKSFTISNNRDGFETLFQRIESVSDDFSKVKVGLEATGHYSYNLLGFLLDKGLTTFVINPLHTNLYRKSLSLRKTKTDKVDSRTIATMIMSDLNLKSYSDISYHNEELKSLTRYRFDKVKERAKLKSSIARLVNILFPELEKLVPTLHIASVYALLSEFPGASHVASAHLTRLSNLLSVSSKGHYGKDTASLFREAARNSIGSVMPAKSMELKHTIKLIQELTAEIAEIEAAIRQIMDEEIKSPILTIPGISYRMGAMIIAEIGDFSRFDSADKILAYAGMSPSTYQSGQMDNCYSHMEKRGSRYLRYALYNATKYVCHWDESFGAYLEKKRSEGKHYNIALSHAAKKLVRLIFAMEKSGQAYRVTT

SEQ ID NO: 456200 - protein, 350 aa, unidentified
MIILGVDAHKRTHTFVVVDEGGRKLAERTVSATEEGHVEALAWARRWDDRRFAVADCRPVTRRLEADLLAAGETVVRVPTKLMAGARRSGRTPGKSDPIDALAVARAAIREPDLPIAHLDCATRELRLLVDHREDLVAGRTRLQSRLRWHVHELFPGLEIAPASLGRHRHIAALEARLVDATGTVAEIARELLKRCRELTLRANELERQIGRLVRVLAPTLLGLPGCGGLSAAKIVGEVAGVLRFRSKATFARWNATAPIPVWSGNADRHRLNRGGNRQVNAALHRIAITQQRGVGSGRDYVQRRLRAGNTKTEALRVLRRTISDEVFRRLSVDEQRRATTTPNAIPLAA

SEQ ID NO: 456201 - protein, 342 aa, unidentified
MKHYAGLDVSLEETFICVVDESGKRVWRGATKSDPQTISRVIRKRAPKLVELGFEAGPLCTWFWHEFKEMGLPVVCLDARHAKAALSMQVNKTDANDAYGLARIVRTGWYRAVEVKSIESHVVRSLLAVRSQLVGIRTRLSNQLRGILKTFGLVVGKVSGRSLESRVRELTAGNLMLKDVVESILNVWRTIYDQLAVIDKKLRQFSHSNEVCRRLMSVPGVGPVTAAAFMAAIDDPDRFKRSSSVGAYFGLTPKRYQSGEVDRSGKISKCGDSRVRSYLYEAAGVLLTRVKKWSKLKAWGVRLATRVGLRKAKVAVARKLAVILYRIWVDNSKFQWGDAPSL

SEQ ID NO: 456202 - protein, 343 aa, unidentified
MENYVGLDVSLKYTAICIVDEVGDVIREGTVKSNPEAIAHYIDTNASLVQRVGIESGPTSTWLWRELKEHGLPVICIDSRHAKAALSMQINKSDRNDAVGIARIMQTGWYREVQVKSPHSHAIRALLHSRALLVKFRRDLENQIRGLLKNLGLVIGRGKAGVFSRRVEKLLANEPDIAIVIRPLMKARESIAKQLSKLDREVKMIVRKNSQVRVFMTVPGVGPITALAFMAAIDEPGRFEQSRNVGAYLGLTPRRYASGEVDHSGRISKCGDSLARSYLFEAAGVLLTRTQKWCKLKSWGLRLAKRSGGKKARTAVARKLAVLLHRMWCDGTNFQWDSQEETA

SEQ ID NO: 456203 - protein, 356 aa, unidentified
MKNDNTRLPGSGLTVGIDVGDKYSQICVLDVAAEVIDEGRVRTTWSAMGGRLGAMARCRVVIEVGGHSPWLSRLLEDLGHECIVANPRRVRLIADSAKKNDRIDAETLARLGRADPALLSPVFHRSEQAQADLAVIHSRRALVETRTGLVNRVRSLAKAYGARLPPCDARYFPERVAEHVPPQLGEAIRPLLEVVATVSAQIKTLDGRLESMIAERYQQARLLEQVTGVGPVISLGYILTIGDPHRFKSSRQVGAYLGLVPRQHSSGEKTPELGISKTGNVYLRQLLVNGAHYILGSRGPDCDLRRWGLRKAEGGKNAKKRAVIAVARKLAVLLHRLWITGEVYTPLLHEEEVKAA

SEQ ID NO: 456204 - protein, 483 aa, unidentified
MAKRKMSTFERLNSGEMNRRQRRELARKVAADDPELLIVNPNAAGIDVGNESHFVSVAPDRDPHPVREFGCWTAALRQMAEWLKSCGIDTVSMQATGVYWIALYDILEQYGIRVVVSNAQHTKNVPGRKSDVQECQWLRKLHTYGLVRDSFRLAEQMQSVRTIWRVRDRLVKDAGRAIQHMQKALTKMNIQLANVLSDINGVTGQAIIGAILKGERDPYKLADLKNYRAKASREEVARSLEGNWREDVLFELQQAVDSYHFLHQQMQECDRKLEGYMASLPTRTLNAPAQPESAPAGTPPKKKKAKKPRGNEPAWDLSAELARIYGVDLTTIDGINVMTAQTVLSEIGTDMSRFENEHHFASWLGLTPSKDKSGKTVRKGKKKVKNRVAEALRMAATTLLKSDSYLGARYRHLRRQLPTAAAAVKAMAHYLALLVYRMLTRGEAWVDRGRQHFERKRNQRELASLKSKARVHGFQLIPISQAS

SEQ ID NO: 456205 - protein, 444 aa, unidentified
MTKAKSKLEIVNPNASGIDIGSAVHYVCVPEGRDKQRVQKFGCFTADLHNLARWLKKCKVATVAMESTGVYWISLFQILESYEFEVKLVNARHVKNVPGRKSDVQDCQWLQQLHSYGLLRGSFRPDNQMCVLRSYVRQRKKLTESASTHVLRMQKALIQMNIQLHKVISNITGVTGMKIIEAIIEGEKNPEKLAEFRSSNIKNDKATIAKALTGDYREEHLFVLKQELELYNIYQEKIAECDENIENYYKTFETKFCGNKQCSKIKNRSTKNRPNFSIHEELHRVTGMDFTKVPGLDALSIQTIISETGINHNKWPTEKHFSSWLGLSPANKITGEKVFSTRTCRVINRAANAFRMAAHCVSRSNSGIGAYCRRLKKRLGAPKAITATARKLACIFYSMLKHGQEYVEKGIDYYEKLYKERVLKNLSKKASELGYVLTKKHELI

SEQ ID NO: 456206 - protein, 351 aa, unidentified
MMIIGVDYHPSFQQVAVLIEETGEYDEQRLNHEGGEAERFYRDLKRKGIRVRVGMEATGYSRWFERLLAELDFELWIGDPAEIEAKRVKKRKTDREDARLLLRLMREDRFPQIWVPSPENRDLRQLLWHRHRLVQMRTRIMNQLQALAMNEGKRWKSKLFSQKGRAEFEKLALGPWASRRRSELLELLDRLNPSIEELTTAVQQEVNMRPEALRLMTHPGVGPITALAYVLIIGTPERFTRGKQIGTYVGMIPIEESSGGKQRLGHISKQGSSLLRYLLVEAAQAAARYNPHWRRRYIRLAIRRHRSIAKVAMGRRMAIRLYWMWRNGCDYSPSFEFGSYAGQLEKRHGGK

SEQ ID NO: 456207 - protein, 341 aa, unidentified
MQPTTISLDLAKHIFQVHGINAAGKVIIRKKLRRSELKAFFEKLPPCLVGMEACGTAHYWGRELGALGHDVRLMPAAYVKPYVKRGKNDEVDAEAICEAVTRPTMRFVPVKSAEQQSILMLHRTRDLFVRQRTMLVNSLRGQLAEFGLIAPQGIWRIPELHALAQNTDNSVLPEPARACAELIMMQIEDLQAKIKAIERTLMARHRANEMSLRLATIPGIGVITATAMVATVVDASAFKSGRHFAAWIGLVPQQDGTGGKVHLGSISKKGEPYLRRLLVLGATAVVRYARNKPEFAGSVNALLARRPARVVTVAVANKLARIVWAIMRRGGSFRQRPLGIA

SEQ ID NO: 456208 - protein, 403 aa, unidentified
MYSSFVGIDIGKWNHQAAFLEVSGKETARSLAFQNTSEGFQSLLDSLAPFDKGQTVIGLEATGHYWLALFSFLVDNGWTVKVINPMQSDALRNMNIRKAKTDRKDCVVIADVLRFGRYTETVLPDEDLLQLRELSRCRVAHVELLGDLKRRALGILDRIFPEFASCFSTVFGAAPTELLQECTDPEELADYDVDKLIKLLEKESRGRHSREKAEELKAKASRSVGTRFGRDALKFELKMLLEQLDFIKGQVKELDKFLKKLMKNHELIYTIPGISVTLGSAILGEIGDVKRFGTPQQLQAFAGMDPSVTQSGNFQGTQGKMSKRGSPYLRRAVYLAANAARRFDPVFKEFYDRMIARGKHPKQALAAVGTKLLRVIHAVMTSQKPYNPQKLLPPSTRISQLNP

SEQ ID NO: 456209 - protein, 345 aa, unidentified
MQPMYYIGLDVHKRKISYCVKGSSGKVFAEGSLPARRLDLDLWMKTLPQPWSAAMEATMFTGWIYDHLKPHAAALKVAHPLMLRAIAAAKKKNDRIDANKICDCLRCDFLPECYMATTAIRERRRTLRYRNLLVRQMVQMKIKISALLMEAGVSYNKQRLHKAGYFRELLATNPDIDEGLRSLLRLCRETVVRLQKMESALVRTLESDSLLMDRVERLMTIPAVGPITALTWVLEVGEVQRFSSIKKAISYCGLCGAEKSSGSTVQRTPLSKQRNKHLQTTLIEAAKMAPRNSPELAMLYDKEKQKGNANRATLAVARKLVAYLVAVDRRQKEFLTVERENRTAA

SEQ ID NO: 456210 - protein, 392 aa, unidentified
MYIVGIDIGKNHHEASIVSPEGKQIGRSLRFATTHKGADSLMSFIFKNIGNSPCVFGMEATGHYWYPIYSFLKAKGYTICVINPIQSDSLRKMYIRQTKNDSIDSFLIAEVIRFGQFGTTSMADENILAMRQLCRYRDSVISSRTEIKLRIGTIMEQIFPEYEKQFSSLWMSTSMGILEKYLTPENIENAPIDELFEIIKDKSHNRLTKAKAISIKEAAADTFGIKIAQDAFSFQLKQLIDRMNFLDKQIEALDCQILEYYEKFDCYLHTIPGIGMIAAATILAEIGDINRFKSSSALVAFAGIDPTVRQSGEFSSTHNHMSKRGSPYLRHAIFLAATTCSFHNSPLNAYYKKKREQGKHHLTATGAVARKLTTIIYAVLRDSKPYEPKKFC

SEQ ID NO: 456211 - protein, 451 aa, unidentified
MARAKRSRPDRDISPTHPNAAAIDIGARMHVAAVAPDRDAEPVRSFGTFTGDLQRLADWLEHCGVRTVAMESTGVYWIPVFEVLDQRGFDVVLVNARDAKHVPGRKTDVSDAQWLRQLHEYGLLRASFQPKGEVATLRAYLRQRERLLDYAASHIQHMQKALMQMNVQLHHIVSDITGATGMRIVRDIVAGERDPAVLAAHRDRRCHASAEEISAALAGNWREEHVFALGQALDLYDVYQAKLADCDARIEQVLGRLQAASERPAGRLPPARHRDNTANAPAFNARALLHSVLGIDLTQIHGLGPSLVLKLIGECGTDLSAWPDAKHFTSWLCLAPSNKISGGKVLSARTRRSGSRAAALLRLAATTVGRTQTALGAFYRRLSARIGKAKAVTATARKIAVLFYNALRHGMDYSDPGTSYYEERYRARVLVNLRRRAKNLGFVLQEASSPA

SEQ ID NO: 456212 - protein, 369 aa, unidentified
MGKYSEVFVAFDVAKKKHAVAIAEGGRTGEVRFMGDVENNPAPIERTIKRLANRYDRLHVCFEAGPTGYGLYRQVQALGHDCMVVAPALIPKRAGERVKTNRRDAVTLARLHRAGELTGVWAPDPAHEAVRDLARAREAAADDLRRKRQQLLSFLLRHSRIYSGGGHWTMAHRRWLAGQKFDHVAQQIVFQEGIDVIEDALQRLRRLEKQLALVVPEWSMAPVVEAYQAMRGASFLVAVTFAAEIGDVRRFDTPRQLASFLGLVPAESSTGDTIRRKGLTLAGNRRARRVLVEAAWTYRYPARVSETLRARLEGLPKPVRDIAWKAQVRLCARYRRLSATGKKLPIVVAAIAREIAAFLWAIGREVAPA

SEQ ID NO: 456213 - protein, 328 aa, unidentified
MFYLGMDVAKAKLDCCLLLDEASGKRKTKVVKNTQSGIVDLLAWVAKQNVSSEALHIVMEATGIYHEQAAMALADAGVIVSIINPAQVKDFGRGLAVRTKTDGVDSVVLARYGALLKPKAWVPPPLEARVLQALLVRREALVQDLHRERNRQEKAGATDTPALIHKSLEEGIAFLAKQLAQIQKDIDSHIDKHSDLQKDRALLQSIPAVGPQVGSNLLSVMHNHDFGSAEQLAAYLGLVPVERQSGSSVLGRARMSKAGPARIRAVLYMAAVVGTRYNPHVKAVYERLLARGKSKMSSLGAAMRKLVHLCFGVLKTQQPYQHNYLKYA

SEQ ID NO: 456214 - protein, 341 aa, unidentified
MKLYFIGLDLHKKIIVFCIKTRTGKVVAEGTIAARPTALRKWAEELQRPWQGAMEATMFTGWVYDLLKPYATELKVANPLMLRAIAASKKKNDKVDASKIADALRANLLPECYMASTGIRELRRLLRFRNLLVRLAVALKNKAGGVLMECGVEYNKKKLHGKRYFDDLLERLTEVPDSLRPMLRVNRNLLNALLKTQNKLVKKLSREPLIRERLERLLTIPGVGVILALTWVLEVGDPHRFGSQRRAVSFCGLCSAESSSAGVSKRGPLSKQRNKHLQSILVEAAKLGPRWNPQLAQVHEREVQRGNKNRATLAVARKLVAYLLYVDKSGRPFELREPTAG

SEQ ID NO: 456215 - protein, 343 aa, unidentified
MLYIGLDVHKEFCQACVMNKSGKVISNERFLSTQEALDKFLDRFDKAKFVLESTGIWEFIYEGIERRGFEVVLAHPLKVRAISEAKVKTDKVDAETLAHLLRADLIPRSHVPPRDIRNLRQLVRHRAYLVRQCTSIKNRIHAELLRRGIRRPESLKKTFTFKHVEWMRSLGILTIDSSLNCLEGIQAQIREVESFLLAEYNSRPDARLIATIPGIGFYGALLILAEIDDIHRFSHPEKLCAYAGLVPTVHQSGSRGHNGSITKNGSPHLRWILIEAVHVHTNYCPESKLSKFHAKVAQRRGKQRATVATARKLLHTIYWMLLTKEKFHCQGFNLVEKAATLIA

SEQ ID NO: 456216 - protein, 413 aa, unidentified
MEEVRWFVGIDWGATHHQVCVLDEKRKEVENKSVAHDGAAMSALVERLMILAEGKSERLAVGIETRWNAIVDTLLERGIRVYCINPKQLDRFRDRHTMAGAKDDRRDAFVIAESLCTDAAAYREIKLGDPRLLELRELAHMHDELGQEHRAVASRLYQQVLRIFPQLLELGSIHTDEWLVSLLDRAPTPEEAKRLSLAKIGTILKAHGIRKWTAEQVRELLQKPAVYVADGVTRAAQTHMRMLLPRLKLINEQRHETRKAIEGLLDELEKPSDDANRIEHRDVTILRSLPGVGMYVAATMLSEAREALEQRDYHQLRGLVGVAPVTRQSGKSHKVMMRKACSRRLRTAVFFLAKTIVRYDDRLQALYKTHRARGHSQGHALRVVGDRALAMLMAMLQAGTEYDPSKRTVRLAA

SEQ ID NO: 456217 - protein, 414 aa, unidentified
MDQIYDRVAGLDVHRDNVVACIRSLGPRGGVVFEKERFTTTTTGLRELEAWLTDRRVELVAMEATGVYWKPVLYALESRLTVWLCNARNVSKVPGRKTDLSDAEWLADVAAHGMIRPSFVPPPPIRELRELTRYRKTQIDARAAEIQRLEKVLQDAGIKLTSVASRVLTQSGRAMIEALIAGERDGARLAELAKGKMRPKIPALTEALTGHFDSHHAVACRRILAHLDFLKESIAALTEQIDSRTATFAPVYTLLSPVPGFDRLSIDVIIAETGADMSRFPTPRDLASWVGLCPGSHESAGKHRRVATAKGNPWLRGALIESARAAARTKRSYFGAQYRQIARRRGPNKAAVAVAHSLIELVWHLLSTGELFTDLGDTYFTRRQDPERRARRLVAQLEELGFNVTLKAAAALPA

SEQ ID NO: 456218 - protein, 410 aa, unidentified
MQTMVERGCGLDVHQATVVACLLIVLQKGKVQKQIRTFGTTTRELMSLREWLLSEGCTHVAMESTGVYWKPIYAILEGAFEIVVANAQHVKKVPGRKTDVKDAEWIADLLCHGLLRSSFVPPKPIRELRDLTRYRRKLVESRSAERNRLLKLLETANIKLASVASDVFGVSGLLMLQALVEGKATPQEMAELAKRQLRKKIPELELALEGKMEEHHRFLLNVQLRRLQAVEEDLRVLEHRIQEKLKPYTAELTLLDEIPGVDETLAAGIIAEMGVDMSVFGSVSQLASWAGICPGNNESAGKRKSSRIPKGNVYLKTTLVEAANAAAKAKGTYLRDKFYRLKARRGYKRAAVAVAHKILVAIYQMFSHRVCYNELGDLYLDKLNKHHLTRNLVHRLERLGYSVTLEQIAA

SEQ ID NO: 456219 - protein, 323 aa, unidentified
MIHAIVKRCAGIDVHKSSVTCTILVETPDGSIDKETRSYRTFRAELSQLAQWMVDREIELVAMESTGIYWKALYEILESSSVNLVVVNASHVKHLPGRKTDVTDSEWLAELARCGLLRASFIPPKDLREIRLLTRYRRKIVGTHASQKNRLHKLLEDGGIRLGSVVSKLDGKSSRDMIDALIRGDQIPERIVKLARGRLKKKSRELQLALDGQLSDRHRFVLKKIRSHMDYLETELDELNRQIVAAMEPYKEEWKLLQTMPGIDKMSAAVLLAEIGTDMSVFGSQQRFCKWLGVCPGNNESAGKKKADEAPKATTSSKQQPAK

SEQ ID NO: 456220 - protein, 355 aa, unidentified
MEGTKYIGMDVHKDSFSIAVLNSSGKLVMESIIETKAITILEFVHGLCGSLHLTFEEGTWAAWLYNLLKPHVTKLVVCDPRRNGYLKQGSKSDRTDARKLAELLYSNMLRPVYHGEHGVRSLKELARSYLTITRDQARVMTRVKAVYRSWAIPCAGKQVYGQRHRLEWLGKIQEPGVRRRAEFYYAELDALRSLRLVVRSELLLESKKHNVSTLLSQIPSIGPIRAALLIALLQTPDRFRTKRQLWAYSGLAIETHDSAENQYVNGQLQRSKKKSSIRGLNSNHNPDLKNLFKSASAVAAVKTGPFQKFYAALIGKGMKPEMARLTLARKIAAITLIVWKRGVSFDARYLNPQTA

SEQ ID NO: 456221 - protein, 261 aa, unidentified
MNITTIGFDIAKNVFQLHGVDANGKTVLRKQLKRNQVLAFFANLSPCRVGLEACSGAHYWARELIKLGHDACLISPQFVKPYVKGNKNDANDAEAICEAVGRPTMRFVPIKSIEQQDIQMLHRVRSGLVKERTALANRIRGLLAEYGIVVAIGIVKLRQQLPDILEDAENNLTAAARQIFADLQGQLMELDKQVGAYGDKIQAVHRASEVSQRLSDVPGIGPITATALLASLGDGKAFASARQVAAWLGLVPRQDSSTQRA

SEQ ID NO: 456222 - protein, 400 aa, unidentified
MLLFFEVITMIFVGIDVAKDTHYAAVSDDSGAVLVKPFAFQNNAEGFCLLLKKLSEFDRSKLLIGLESTGIYSENLICFLYESGFRLAVINPIQTATLRKTAIRKTKTDKVDTMLIIKSLMVNSYRLYSQRDADSLKLRTLCRFRQNLKKSKARMKIQLAEYVNLVFPEFGKFFKSGIHIAASYALLKKYSSPKEIAALRTSTLCTLLSKASHGRFGKDTAEALKSLALSSVGVKNPYISIQIAQTIAQIELLEQQIKDLNSAIEEAMESINSVLMTVPGIGAVNAACILGEIGDIKRFSKPCKLLAYAGLDPTVRQSGQFTAKSTRMSKRGSALLRFALINSAWQLTLNDTTFKAYYDLKRSQGLNHYGALGHVAHKLTRVIFKLLTSDTPFNPAKLVA

SEQ ID NO: 456223 - protein, 343 aa, unidentified
MGEVSTIGLDIAKSVFQVHGVDDAGTVMLRKRINRSRVLQFFGDLSPCLVGLEACPSAHYWGRELQALGHTVKLMPPSYVKAYLKRSKNDANDAAAICEAVTRPLMRFVPIKSEPQQSGLMLHRTRQLLVRQRTMLSNAIRGHMAELGIISAKGRNGTVELLQIIGDVADDRIPPVARFCLDLLARQNLTLVAEVASIDKRIHAWHRSCEESRRLEEIPGIGPIVATALVAEIGEWRAFRSGRSLAAWIGLVPKQHSTGGKERLGSITKRGNRYLRWLLVAGAMAVIRYARQRGTKRPWLTRIMDRRPAKVAAVALANKIVRMAWAIMVGGERYREPTLLLAA

SEQ ID NO: 456224 - protein, 367 aa, unidentified
MSSVASQAGLIHLGMDTSKNAIVVATLLPGQDSPATDRIANEETAIRRLIGRFADRSVLRAWYEAGPGGYELYRLLASMGVACQVVAPSLIPKGSSDKVKTDKRDSRRLARLGRAGELTPVRIPSPAEEAVRDLARARAVVLEDRKRARQRLTAVLMRHGRIWRGATYWTAAHRAWIAAQRYGEPALASAIGHYRAALAVREAELAALEAELMPWAGREPLAGPVARLGCYRGIAELGGLTLAAEVVDWRRFPAARAFMSYTGLVPAEYSSGERTRRGHITKAGSEPVRTALTEAAWAYRHDPAIGAGLRRRQAGASPETLARSWTAQRRLHDRYVHLVHHGGKAAPEAIVAVARELAGFVWAEMTA

SEQ ID NO: 456225 - protein, 422 aa, unidentified
MQTLLSQKFTAYIGIDWADTKHDVCLQVAGQAQRSFSVIRHTPEAIDQWAHGLYQRYGGPIAIAVELDKGPLIAALQKYDFFCLFPINPATLAKHRKAFVPSGAKDDPSDAQWALELLLKHPDRFPQQEKQSPAIRHLASLTEHRRTLVDERVRISNRLVCMLKQYYPLVLELFHDHDTLVFCNFLERWSTLEALKRARPTSVLKFLNAHNVRHAELNQERLALILKATPLTEDPGIVNPSALYVRTLASQLSGMLVAIKQFDAAIEETANTLADYSLSKSLPGAGPQLAPRLMVAFGEQRDRFKNAGAVQRYAGIAPVTERSGKKKIVRWRYLCSTFLRQTFVEWAAHSINQSAWAGAYYRQQKAKGCSHQAALRALAFKWIRIVYRCWKARVPYDESIYLQALTRHNSPLMTTPETTKAC

SEQ ID NO: 456226 - protein, 373 aa, unidentified
MPKYSTAFGMDVHLRSTTVCALDADTGEAVTRRFPGNPWGEIAGWMDGFPGPSLAAYESGYLGFAPQRELAGLGVECVVAAVSKIPRSAADSASKNDRNDAARMAKAILAHDISPVWVPSPEVEGIRDLAGAYDGATARLATAKQRLLAFLAKRGFVYGGTTPAGNPRKYWTYDFLRWLDKVRPEDDGGVRTLAALRNEVEAAAEARADLLSEYRAAVDASPIAAEVAALQSIKGCAFALAAAFSAEVGDFTRFRSGRQVTAYFGLAPSQRSSGDSVRLGGISGAGNALVRKLAVEGSWCYAAARHQPKLMPRDTGVPLEIRVHGRKGSERLLRRREEMLARGMPAAKANAATAAELVRWLWALGMMCREGAE

SEQ ID NO: 456227 - protein, 343 aa, unidentified
MDYFAGLDVSVKDTSVCIVDDAGRIRREVKVASEPDALLAVLRNSAYHFKRIGLEAGPLSQWLFSALAEADLPVICVETRHMRAVLKARINKTDRNDARGIAQMMRVGLYRPVHVKTLRSQKLRMLLTHRKLLQAKAIAIENDLRASLRNFGLKVGVVGTVRFEARIKALVENLPDLEALVEPLLVVRRVLREQINILHRRLLAVVRDDEVCRRLMTVPGVGPVVALTYRATVDVPARFRKSKSVGAVFGLTPARDQSGERDRPGAISRCGDEMMRTTLYEAAQVMLLRSAKWSWLKAWAMKIARHRGMKKAIVALARRLAVIMHRIWTDGTEFRWTREAAAA

SEQ ID NO: 456228 - protein, 323 aa, unidentified
MNKDIKYFGIDISHLVFDVTDSEGNYYQFKNSISGFRKFIKLLGLNSHCVMEATGYYHYQLAYYLLESGIKVSVENPLAVKRFIQMKLSKIKTDKSDSKLICEYGKQVELKLWKGNSKHQTECLQMTRLLAVYTKQSTMLKNKIHGEAVLGNPSKAVVSSLKRSLKQVQKEMKTLEDKLLILVKEVHQDLLTRVKTIPGIGAKTSLMLVVLTDGFERFTSGSELCSYAGLTPMIRKSGSSVNGRSRISKIGNQKLRNLLFMCSFNACKYNKACRDIYDRIVAKGKSKKLALIAVCNKLLKQAFAIAKSGLVYDDSYRSTLAKN

SEQ ID NO: 456229 - protein, 412 aa, unidentified
MEVLYPCCCGLDVHKKSITACVLWARQGGRSCKEKRRFETFTRDLLRMADWLRECGVTHVAMESTGVYWKPVWNILEGQFEVLLVNAQHIKAVPGRKTDQKDSEWIADLLQHGLLRGSFVPPRPTRELRDLTRYRVSLTQEINRIANRVQKILEDANIKLASVATDALGASGRAMLEAMLAGEEDSSRLAEMSKGLLRNKMPELKLALEGRINEHHRFLLRQLYDHLRFTEGKLREIEQEIAKRMRPFEAEVARLRTIPGVDRVTAYGLLAEIGLNMEQFPSAAHLASWACLCPGSFESAGKRLSGKMRKGNVSLRRCLAQAAWAISMTKNNYLSALYRRIAARRGAKRAVMAVAHALLVIAFHMLKRGENYRELGADHFDRIDANRIRRSLVRRLERLGHKVTLEPLAQIA

SEQ ID NO: 456230 - protein, 347 aa, unidentified
MDHVGMDLGKRESQLAILTEDGELINMRIRTERHRLVEMFGRRPKARILMEASTESEWVARCLEDLGHEVIVADPNYAPMYAQRTRRVKTDRRDAHALAHACRTGTYRPAHRTSTERCELRARLAVREAVVRTRAAWITRIQSLVRREGCRLRTGAPETFLTRVEELALPPALTTVIAPLLELLDPINKQIEALDEELERIVAADEVPRHLTTVPGVGPVTATAFVATVDDVTRFRGAHQVEAYLGLIPCEWSSSEVQRRGHITKAGNGRMRWLLVQAAWCILRRRKRPETAALRDWAERIAGRRGRCIAAVALARRLAGILFAIWRDGTVYDATKVRGPLPARRAA

SEQ ID NO: 456231 - protein, 395 aa, unidentified
MERLMVGVDISKDSFSVVGLDGEGKEYFSGIYSMDSDGFGKVLEKVTASCPDREKVLVGMESTGCYHLNLFSFLLSQGIHAVVINPLLIANFAKRSLRKTKTDKKDAKTIAKFLLESREEISQLSVSPDLQDLRDLARERESVSHLITATKVEIKRVLRTTFPELESIGDLFTRSMLRFLQEYPSARRVKMEKVRNLAKVLNQRQVGNKPSYTAEEIFHAASRSIAAVSPAKEIILQGKIATLLHLQERLEELTKLLTDFCQAMRDEDWKILRSIKGVGPNTGVPFLAEMGSVENFSSHKKLIAFAGMDPSVCQSGKFIGKSRLSKRGNRHLRRAIYLMAAAVVTKNAFFKAYFLKRKKEGLIPQKALLATAHKLIRVIFAMLSHHTFFQPKMAE

SEQ ID NO: 456232 - protein, 387 aa, unidentified
MPQPNDLSRSLVALDQNSTIIAVVEMSQSSWLVGGVVPGIERQPRKKLEPSPERLLALLHRWRDEAIRAGGNITRIALAFEAGRDGFWLARWLAARGVEAHVIHPSSVAVPREHRRAKTDRLDTELLKRGFLGWLRGEQGHCSMVRVPTLAEEDAKRPNRERECLVKERTRLVNRMKGALARLGIRNFKPTLRNAAEHLAALSTPEGSPLPPNVAAELERDIARLGLVISQIKQVEEARRQRLEEQPESRPHAMVRLLARVVGIGTETADMLVNEVLSRPLRDRRAVARYAGLTGAPDESGAKRREQGLAKAGNARVRRGMIPLAWRFLRFQKDSALARWYQARTADRRAGTRKTMIVALARKLLIALWRFVTTGETLEGVVLRPAG

SEQ ID NO: 456233 - protein, 370 aa, unidentified
MLDTTTFVGLDVHARSIKAVSLDVMTGEVRCATFGYDAGAVAGWVRSVDPRARCVYESGVTGFDLQKRLSGLGVDCVVGAVSKMIKPSADRRRKNDRNDAEFLARMLSVGNVVEVWVPDDECEAARDLTRALEDARDDLSRAKQRLSKFLLRHGLAFDERTPTGRRKGNWTRAHWSWIESIRFAEGADNDALAYYVDAVRRAAEEKARLAGLVAAEARKPRWRRRVDSLRCLKGVDTASAADLVFEAGEFSRFRNARSFAAWGGLTPSEHSSGESDRRGAITKAGNKHLRKALVEAAWHYLTCSGRPKGLAKGQAPDRGARRHAAKGGRRLVERREALLARGVHGNKANVATARELACWVWAGGLMAEEA

SEQ ID NO: 456234 - protein, 341 aa, unidentified
MQAITTIGLDIAKSVFQVHGIDAEGCVVIRRRLKRHYVLTFFEKLAPCLIGIEACASSHHWSRQLRALGHTVRLMPPAYVKPYVKRQKNDATDAEAICEAVGRANMRFVPTKTPEQQSGLVIHRTRHLFIRQQTSVINAIRAHCAEFGIVAPVGRRGVEELLNVIANEKQVPGIARACLLALGAQLRRIKEQILEFDRMIAAWHRSCETSRRLDEIPGVGPALATALVASIADPRAFRSGRDFSAWIGLVPKQNSSGGKPKLGSISKQGDRYLRGLFTAGALAVIRYAKIHGPGHRPWLTALLTRRPIKVAAIALANKIARMAWAMMARGERYREPVALTA

SEQ ID NO: 456235 - protein, 321 aa, unidentified
MSAPSFVTVGIDVAKAHVDVALLGARLDAQRFNNDADGHTALATALQTLGIDLVVMEATGGYEAELACALQGAGLPVAVVNPRQARDFARAMGKLAKTDSIDARMLAEMASVLVRREDLSRLLRPVSDERQQWLAALLTRRRQLITMLLSERQRLQITPERLHPSLQAIIAAIQAQLDDIDAQMVGHVREHFAELDRLLQSTRGIGPVSSACLIAQLPELGKLNRRQIAALVGVAPVACDSGSRQGRRRVQDGRFEIRRVLYMATLTATRHNPAIKAFHQRLKAAGKLPKVALVACMRKLLTMLNAMVKSNTPWDDSLHLA

SEQ ID NO: 456236 - protein, 372 aa, unidentified
MNYNTVYVGMDVHKESFTLCAYTIDAEKGSHFQRTEADYKNVLKYLEFLRTVYGNDANFICGYEAGCLGYTLYHQLTEHDVNCVILAPTTMLEQRSKRRIKTDRRDAEIIGKCLAQHNYSPVHIPTATDEETKEFLRMRDDHKLALKKVKQQILAFCLRHNYRYDGNSHWTAAHIKWLKSLNPEALYKEILDEYLLTYTTLSDKVERLDKRIEELASKDEYRESVKKLCCFIGIKTHTALSVLVEVGDFQRFASAQNFASYLGLVPGEDSSGDGQTRLGITKAGNRHVRMLLTEASQCYARGQIGFKSKELKSRQAGNSPQVIAYADKANERLRRRYYKMVLGKSKKHNVAKTAIARDLACFMWGMMTEHIA

SEQ ID NO: 456237 - protein, 318 aa, unidentified
MSEPVVVGLDVAKATVDVALRPSGECWSVPNTDAGAAELVTRLRLLTPALVVCEATGGFERATIAALATAGFPVVVANPRQVRDFARATGQLAKTDRLDAGILALFAERVRPTPRPLPDGAAQLLDAVLTRRRQLLEMLTAEKNRLGFAPKPLHRGIQAHIRWLERQLDDVTKELAGLIEASPVWRAKDDLLQSVPGVGPIVSSTLLGELPELGTLSHKQAAALAGVAPLARDSGTLRGKRMVWGGRASVRTALFMAVLCGRRWNPVLKVFYERLIAAGKPKKVALIACARKLLTILNAMVRNNTRWMNPHAKIQYSC

SEQ ID NO: 456238 - protein, 347 aa, unidentified
MDVHQASTSIAVSDATGKLVMECVVETKASTILEFLRGLRGSLWVTFEEGTSAGWLYDLLKPHVAQVIVCNPRKNALLKAGNKNDRVDARKLSDLLRAGLLTPVYHGESGVRTLRELTRSYLTITTDLTRVMNRIKAVYRSWAIPCRGQEVYSPRRRATWLEKIQETGVRRRAEKLYQQLDALVQIRRETRSELLAESKKHPAHQLLLQIPRLGPIRVSLLIALIQTPHRFRTKRQLWAYSGLALQTRSSGEYRYMGGQLKHSGKLPALRGLNVNHNHDLKSVFKSAATRAGTSKDPFVIFYQNLLAKGIQPQMARLTLARKIAAIVLNVWKKGEHFDPAQLNQHAA

SEQ ID NO: 456239 - protein, 465 aa, unidentified
MRDKTKPNREGASFSMTMIHPNAAAIDIGATMHMAAVSPNRSSEPVRSFGAFTADLHRLADWFAECGVKTVAMESTSVYWIPIFELLEERGVEVFLVNARDAKHVPGRKTDVSDAQWLQRLHACGLLRASFRPSGDIVELRAYLRQRERLLDTAASHIQHMQKAMTEMNLQLHHVVSDITGATGMRIIRSIIAGERDPAVLASMRDTRCHSSAEVIEKALTGHYRAEHLFVLEQAVALYDVYQHKVAACDVRIEAVLKQLGSVRAHEGDPRREASGPPPKRQSRQSNGLAFDVGAALHSLLGKDLTKIHGIGPYLALKLVSECGDDLSAWPSAKHFTSWLCLAPGNKISGGKVLSSRTRRSGNRAASLLRLAAVTIGRTDTALGAFYRRLSARVGKAKAVTATARKIAVLFYNALRHGMDYVDPGASYYETRYRERVIGNLQRRAKAFGFVLQAAVAPVAEPAVS

SEQ ID NO: 456240 - protein, 401 aa, unidentified
MQEPLQHNSIDVFVGVDVGKGQHHAVALDRSGKRLYNKALPNDEAKLRALINELKAHGQLLFVVDQPATIGALPVAVARDEGVLVAYLPGLAMRRIADLHAGEAKTDARDAAIIAEAARSMPHTLRSLRLADEPLAELTMLCGFDDDLAAQVTQTSNRIRGLLTQIHPALERVLGPRLDHPAVLDLLERYPSPAALAATSEKTLANRLTKLAPRMGKRLAAEIAQALGEQTVVVPGTQAATVVMPRLAKQLAALLQQRDEVASEAERLVHAHPLYPVLTSMPGVGVRTAARLLTEVAHKAFSSAAHLAAYAGLAPVTRRSGSSIRGEHPSRRGNKVLKRTLFLSAFAALRDPISRAYYTRKIQQGKRHNQALIALARRRCDVLFAMLRDGTFYQPQTATNA

SEQ ID NO: 456241 - protein, 369 aa, unidentified
MTQHTLWVGLDTDKKHVDIAVAEALPGGDVRYWGKIENTPVALDRVIRRLRKDGRHLVVCYEAGPCGYGIYRQLNGKPGVTCQVVAPSMIPRRPGDRVKTNRRDALSLVKLLRAEELTTVEVPDVAHEAIRDLVRARGAARGDLVRCGQRIGGFLLRQGIVYIGKPWTKKHRVWLGQRAFAEPAHRLMFGELLDAFDQAQARRDRLTDHIAELVPSWSLAWLVEAVQAMRGYKLVNAATVVAEIGDPRRFANPRQLMGFLGMVPSEHSTGEDIRRGGITKTGNTRARKALIEAAWTYTRPAKATKAALSATPAVRAIADKARHRLSQRYRKLRARGKPSPVAATAIARESLGFIWAIAHAAAPTPWHKP

SEQ ID NO: 456242 - protein, 364 aa, unidentified
MFIERTSVGLDVHARSIAAAAIDGVTGELVKRRLAPAHDAVLEWMTRLPGPVAATYEAGPTGFGLARAIRASGVRCEVAAPSKIRRAAGERVKTDARDAVLLARLLRMDEIVSVRVPTVNQEAARDLVRAREDTRLDLMRARHRISKLLLRHGHVYYGGKAWTGAHERWLRGIRFDPAGEGGGTRAAFDADLEAVDFAVARRDRLERAIGQLAADSEFTPVVARLCCLRGVSTLTGLALAVEIGDWTRFTGAGIGAYLGLVPSEHSSGEARRQGGITKTGNPHARRLLIEAAWHHKPRYVVGATMRRRWDAAPPAARTRGHEGNQRLHHRWTRLAARNKTHTVANTAIARELAGWCWSLATLTD

SEQ ID NO: 456243 - protein, 423 aa, unidentified
MDILYDRVAGLDVHKQTIVACVRLATGDKPSRECRTYATTTADLLALLAWLRESVVSHVAMEATGVYWKPVWNILSEGAFELIVANAAHIKNVPGRKTDVNDATWIADLLACGLIKASFVPNEAFQQLRSLLRARKQLLGEQTRHIQRLQKTLEEANIKLDSVISDIMGVSGRRMIEAMIAGVRNPAKLAALADGRLKAKPKDLYDALHGRLTDHHRFLLRLHLDQYDALDVAIVKIDREVETHIDGMDKEVENGQAPFRSLSALLETIPGVAASSATMILAEIGRDMNRFPTAGHLLAWAGLCPGQNESAGKRRRSRLRKGDRWLKTTMVQCAWGAQRKKDSYYRAQFTRLCAKHGKRKAICAVAASMLTAIYHMLSRGVDHHDLGAKHFDRRSTDFKAKRLVAQLSKLGFSVELQKIDQAA

SEQ ID NO: 456244 - protein, 361 aa, unidentified
MFSERTSVGLDVHARSVVAAAIDGVTGEVFRARLTPGNDEVINWVRGLPGPSAVVYEAGPTGFGLSRAFTAAGIRCEIAAPSKIQRPSGDRVKTDARDAMHLAKLLRLDEIVSVAVPSVEQEAARDLVRAREDVRGDLMRARHRVSKLLLRQGIVYYGGHAWTGTHLVWLRRQHFDVPGLQLAFDAEHEAVLQAEARRNRLDTAIEVMAADSEFTPVVHRLGCLRGVSTLTAFGLAVEVGDWDRLTGSTIGAYLGLVPTESSSGQSRSQGSITKTGNTHARRLLVEAAWHHLKPYRTPGATMRARWELAPAAARARGHAGNQRLHQRWLHFTDRKKRPVVANVAIARELAGWCWSLAVMDD

SEQ ID NO: 456245 - protein, 426 aa, unidentified
MNATTDFAATIGLDWADQKHDLWLRPSEGAKAEHLRLEQTPEALHEWVAKLRERFGNRRVAISIETSRGPVISAFLAYDFIVLFPINPKALKDYRAAFSVSGAKDDRTDAMLLEEFVRLHRDKLRALEPDTELTRKLGGLTENRRHLVDERTRLANQLHSLLKTYYPLAETLLDGHMTKPMAAAFLTRWPDLPTLQKAEPKTLRAFFYKHNSRGAKKMEARLDAVKKAQALTTDAAILAPARLLVTALAGMLKPLHQAVASLDQAIAQAFDPHPEAALFRSLPGAGPALAPRLLVAFGTQRSRFASADEVAQFYGLAPVVKQSGNTKTTHMRSRCPKFGRQTFHENAGCAFKQEPWAREYYDAHKARHEGKHHQACRALAYKLIRIYYACWKQNSLYDGQRYLQALEKHGSPLHKKPPTPTSKASE

SEQ ID NO: 456246 - protein, 463 aa, unidentified
MSLTGSSPNDTKEDVVSKSNRLSRGDKRRNAKLAELRRLVPFDHAIVSIDLADKKQVLVVCNHDSQVLARTTVKVHAWDMGPVLDWAQQQAHKHGFAGMTVGCEPTGHRWMVLGQLAAQRDMTVVCVNPMLVGRAREAEDYTRDKSDDKDAMLIARLVAGLHCYAPERSEETWARLRQLGARRERLITEATACVQQVRDLLECAWPGVLEAAAKPFDSTNWCAALAVVLDRCNGRPERLARMGLARFEAAVRRELPRWGGSRRRRAIIEAVYTAVVDSRGVVAQRRGALERCRYVLADWRSATTRLAEVEARMVEVLDELGLTELVTSIPGLSALGAAAIVAETGDLTRFDSPRALVKHAGLCPRDNTSGTYAGRSRISRRGRPGLRLAAWRATWGALHHNPVMGARYRYLIGRQHNRLTDGQARAAIAAALLRWIHVVVTNGVRWDAAIAGAGVHALPAAAA

SEQ ID NO: 456247 - protein, 366 aa, unidentified
MKKNSTVAIRRKQIFRRKTLTIGMDLGDRFTYYCILDEAGEVMVEQKLPTTKQAMEHVFGAMPSSRVALETGAHSPWVSRQLTQLGHEVIVAHARNVRLIGESSRKAARLDARMLARLARLDPRLLSPVQHRSAEAQIHLTVIRARAALVGARTALVNAARGLAKSYGERLRKCGTQQVSKNLAAGLSAELRAALEPLLAEVASLNQRIAEYDRRIEQIATEVHPEVALLKQVKGVGTLIALSYVLTVGDPHRFRHSRDVGCYLGLRPGRRNSGHSQPQLHISKEGDGYLRTLMVQGAHYILGPFGQDSDLRRWGLKLCERGGNNAKKRAVVAVARKLSVLLHRLWVGGEVYEPLRNHSGVAGAAA

SEQ ID NO: 456248 - protein, 343 aa, unidentified
MKIHALGIDLGKTVFHLVGLDASGQVVIRKRCSRTQLLAFTTNVQAQLIGMEACSGAHFLGRALRAQGHDVRLMPAQYVKPYVQTNKSDYIDAEAIAEAVQRPRMRFVPIKTEEQLDLQALHRVRERWVMRRTAVVNQVRSLLLERGLTVPKGRRHLNQALPRILEDAELPLSGSFRVLLAQLKLELEQLAARIAQIDAVIEQEARENEACQRLTTIPGVGPVTATALIGAIGNGSAFGKGRDLSTWMGIVPGEFTTGGKQKLLGISKRGNKYLRRLFVQGARSVLQQRDKQAPGLSLWLAQLLASKHQNVVVVALANKLVRIAWAVLCKDESYRAPVLAVST

SEQ ID NO: 456249 - protein, 345 aa, unidentified
MSESYAGRQFVGIDLHRRRSVIARMTDAGDRLNWVRISNDVPMLTTAMADAGEAPEVVLEATYGWYWAVDALRELGAQVHLAHPLGVKAFEYRRVKNDERDAFDLADLLRMGRLPQAWIAPPATRELREVVRHRAKLVGIRSGCKAQVHAVLAKCGIQVSMTDLFGLAGTQLLDRLELPAPYAARINSLRRIISVLDFEIDAAAGQARARLIGDPGYQAVQTIPGIGPILGAVFVAEVGDVHRFGRAEQLTCWAGLTPKHRESDTHVHRGRITKQGSRLVRWAVIESVQILPRTSMIGQIREQVGQRRGRNIGVVAAARRQLELVFYALRDHRVRALQSTRAVAA

SEQ ID NO: 456250 - protein, 343 aa, unidentified
MQTVTAIGLDIAKSVFQIHGIDAGGQIVIRRKLKRRYVLMFFQKLPRCLVGIEACASSHYWSRELVALGHTVRLMPPAYVKPYVKRQKNDAADAEAICEAVGRANMRFVATKTPEQQSCLMLHRTRHLLIRQQTAVINSIRAHLAEFGIVAPVGRNGVEALLTIVGDPNDQRLPDIARACVAALGVQLRALKAQILEFDRMIMAWHRSSETSRRLDEIPGVGPALATALVASIADPRIFRSARDFSAWIGLVPKQHSSGGKDKLGSISKQGDRYLRSLFTAGALAVIRYAKIHRTRHRPWLTALLSRRPTKVAAIALANKIARMAWAMMAKGERYKEPVALAA

SEQ ID NO: 456251 - protein, 412 aa, unidentified
MEVLYRSCCGIDVHKQFLVACLLVVDEAGCQHKELRRFSTMTGDLLTCIDWLKAAQCRAIAMESTGVYWKSPWNLMEGHFEIVMIVNAEHMKRVPGRKTDKKDAEWIAELLQLGLLKPSFIPPRPQRELRDLTRLRTTMTAERTRLVNRLHKTLEDTNLKLSSVLTDIRGQTGQHILGAVVRGEDDPIVLANMALRRAARKRDALVLALRGRVNDHHRLLFRELLEMIQHHDQAISRLDQEIEERLRPTAPLIQRLDAIPGCSRRVIEILFAEVGWELSPFPDAAHLASWVGICPGNNESGGKRFSGRIRKGNRWVKAILVQAAQAAARTKNTYLSAQYHQIAARRGNKRAAVAVGHSILVIYYHMLTTGEPYQEKGANYFSELDRHHAERRATKQLERLGYQVTLIPAQIA

SEQ ID NO: 456252 - protein, 316 aa, unidentified
MDHFVGVDISKLTFDAEWLEEGQRRHQQFDNNESGCIDFIAKISSEAHVTMEATGTYYLTLATFLYENEIKVSVVNPVQTRYFAQMQLKRAKTDPVDAGICRTFGASYQPSLWVPPSKVISELKQLDSYLQGLVQERTRVHNRLEAIHQRPDICQYVLMDLESNLKGIGERIKACEDLIADSIQAHYARQYELLVSVKGIGPRIATMLIVLTEGFLRFTDAKKFSSFIGLSTFIRQSGTSLSTSSITKMGQSRLRHLLYMGSMPAMRWNRGCKEFSTRLLENGKPYKVVRIAVANKLIRQAFAVINKGEKYSAEYT

SEQ ID NO: 456253 - protein, 344 aa, unidentified
MDNHTQYLGFAGVDLAKKVMQIHFVTEDGEITDKSAKRAEFLDFFRNRGKCLIGMEACGSSQDWARKLEAMGHEVHLMSPKAVKPFVSGQKNDHNDAIGIYKAMFNGVRRVPVKSTEIRDLQTLRRIRSQVTKDKVKEINHVRGLLAEYGIVMGKSITAFNKGISSALESLKERGDVSPLVAEELQTTVESIKTKIERQKRLDREIEQLARGCKNYENFLKTPGVGPFTAAMLCVLLCDPAIFANGRQFAAYIGLAPRSRGSGGKNFIIGIPSKFNCDSESRAVFVECAQALARYKNKSPWVDGILRRKPKKVAVIAIANKLARQVWAMANKGESFKQMTILTA

SEQ ID NO: 456254 - protein, 370 aa, unidentified
MKKHSTTPKSPKQASACKGGPITIGLDLGDKTSRYCVLGANGEVMSEGSVGTTRKAMAEKFAKMRRCRVAMEVGTHSPWLNRWLSSLGFEVIVANARQVQLISASSRKNDRLDARLLARLARVDPQLLRPIRHRSETAQADLMRIRVRAALVEARTRLVNAARGFAKAMGERLPACDTDSMGVERMESLPEGLRDTLKPLLEQVESLTEKIKESDVKIEQIARTQYPETELLRQVSGVGTLIALTFVLTLEDRERFRKSRDVGCYVGLRPKQSESGQSQPQLRISKEGDVYLRTLLVQAAHCILSRRGPDTDLKRWGLKLASRGGKNAKKRAVVAVARKLAVLLHRLWVCGEVYEPLRNSQASGSSKKAA

SEQ ID NO: 456255 - protein, 408 aa, unidentified
MEQPQPGLGQVWVGIDIGKHAHHAAAVAADGQVVWSRRVANDQAAIAELIGQAASSAAGVCWAVDSTGGSAALLLALLVAADQPVVYVPGRVVNRMAGAFAGEAKTDAKDAVVIAQTARLRQDLQAARPKDELVAELAVLVGHRTDLLADWVRTVSRLRGLLTASFPGLERCFDFTSRSALVLVTRYQTPEALRAVGHRRLVSWLRRQVPAQLSDARVEQMADAALAAAAAQRIRLPAQEVTAQLITQLARDLLALDRRIKDLDKTIGQRLARHPQAKIITSLPGMGPLLAAELLVAIGDLGSFPDADHLAAYAGLAPVPRDSGRRTNNLHPPRRYNRSLRRVFYLSALSSLSSPGPNRDYYRRKRAQGRKHQQALMALARRRVDVLWALLRDNRCFELAAPIKATTA

SEQ ID NO: 456256 - protein, 321 aa, unidentified
MKNVPKAIHVGIDVAKDSFDCALGVGGEVNSFANDGAGAEDLLLRLREFDVRLIVMEATGGYEAELACALQAAGYQVAVVNPRQARDFAKSMGYLAKTDRIDAAVLASFAQALDVHPKRDSFILALPDPEREHLAALVNRRRQLVEMRTAERNRLAMSHQASRKSIEKIIKALQREIDDVEAKMAKHIKEHHADLAALLESAKGIGNASSAMFIGTLPELGKLSARQISKLVGVAPLNCDSGKHRGKQRIQGGRADVRSALYMPTCSAIQYSPVIRAFYNRLVAAGKPKKVALVACMRKLLVILNAMVRTDKQWDNSLHGA

SEQ ID NO: 456257 - protein, 354 aa, unidentified
MLIIGCDYHPSFQQIAFVDTDTGELQERRLEHREEAEKFYRELAVQGMKVRVGMEASGQARWFERLLAELNIELWIGDATEIARKRERKQKTDRQDAQHILRLMLKDDFPQIWVPSWENRDLRQLVWHRHRMVQTRTRIMNQLQAVALNEGIRCNKRLWREKGREQLESFRLAPWASRRRHDLLELLDRLNPTIAELSQAIEQEVEKCLEAQRLMTHPGVGPLTALAFVLIIERADRFQCGKQIASYLGLVPLEDSSGNRRRLGHITKQGNSLLRFLLVEAAQVTVRSLPEWRSKYIHLTMRRGRKIAKVAMARKLAVRLYWMMRKEWDYEQVKKFGSHAGQPGNRDGVKSNIE

SEQ ID NO: 456258 - protein, 408 aa, unidentified
MNTLYVGIDVSSKSNVVYLMLPNRDKHSNFSVANSHEGSTLLVKKIYSALTSHSLDTVLIGLEATSVYGDNLVYFLREDATLAPFNRKIHVLNPKQVKKFHDTYNDLPKNDYVDSFVIADCLRFGRINKEVYMGDYRYKALQNLTRARFFAVQNLVKEKQRFMNVLFKKYSTMTQEKVFSDAFSTTALAVYDEFESAEALANMDLHELTDFIIEKGKNRFPDPDAVAKAIQKAARSSYRLPKTVNDSVNQVLSISITSMKALESQIKEFDKAIKALMELLPNVLISIPGIGPVYSAGIMAEIGDINRFDNQASLAKYAGLAWKQHQSGGFEAEVTRLIPSGNRFLKYYLCEAAFSLVRCDKEYSDFYHLKYKEVNRCQHKRALALTARKFVRLVFRLLKDNRLYCPAK

SEQ ID NO: 456259 - protein, 446 aa, unidentified
MPVVRPNVAGIDLASEVHWVCAPSQDRTGREVEKFGATTPELERMAEWLKARQVESVAMESTGVYWIAPYEVLERHGLEILLVNTRELARVPGRKKSDHVDCKWIQRLHSCGLLMGSFRPKEAICMLRTLVRDRGTLVATAADWLRRMQKALDQMNVRVHRAVKDIDGLTGMAIIRAIVKGERDPRKLATLRHPHCKKSEKEMADELTGHWREDHLFSLQEALKMYDAVQAGIADYDGEILRKLGEMEQEECRGQQAPKLKNESKARAIKTRGEEPLRQALYRMSGVDATAIDAIGVGTIQVVLSEYGPDLSCFPTEKQFVQHATLAPHKPTSGGKAVKNKRRNNASSRVSAALRMAATSLHHSQTALGAYYRHMARRKGDDIAVFATARKLATLIYRLLRWGQPYLDEGADAYEKRYQADRIKRLTATAKALGYQLTPNACEAST

SEQ ID NO: 456260 - protein, 445 aa, unidentified
MFIQSQDDSQCCYSLFIKVVILMMKLKYSICCGLDVHKNVIVATIVTTNKDGISEYKQKSFSTINSDIQKFHNWLIENNCYHVCMESTGKYWIPIFNYLESDIDVCLTHPKYVKAIKGKKTDKKDSKWIADLYKFDLVRCSFIPPKDFRQLRELSRYRFKLVCMKSSEKNRIQNCMTVSNVGIASVLSDPFGKTATEIISYLLEHTADSMDEKAVRKLIKKGAKSKSDEIIEAIKGYTIETDQAKKLELARGHLEYLDDMITQTEVELYVRIKSYYEFVEFVSTMPGMTELSSTIVLGETGVDMDIFDDAKHLCSWCGLSPANNESAGKKKSVRIAKAGDYLKPMMVQCALAAIKSKKQPYFAIKYGRIKKRRGHKKAIIAIARMMMVCIYHMVSEKKPFTPTDYEELMDPQNHVERVVLNENNVFAYLESLGYDSSKLVKRNDN

SEQ ID NO: 456261 - protein, 436 aa, unidentified
MTLINFVAANQKYYAFNLLSVFIMVFWSVQYLLQHLLVQTQVSHQLLQPLILILQLPQTPQFRHARPGKFFLPVNGMDYFLPLRLTVRNVLTRRITMNIVFLGIDLAKNVFQLCGLNQAGKPVYTKRTGRKELLQTLANIPACLIGIEASTGAFYWQRELEKLGHKVKVISPQYVRPFVRGQKNDGNDAQAIAVALMQPTMQFVPPKSPEQQDIQALHRARQRIVNHRTATVCQIRGLLLDRGSPIGSAVSRARRAIPLILEDAENGLSSRMRRTIAELYDLFNDLGRRIHFFDKEIETVFRQSEACPRIAKVKGIGPKTATAVVAAIGKGTEFKNGRHFAAWLGLVPRQHSSGDRQVLMNMTKKGDKHLRTLFIHGARAVVRVATNNNDGHMNQWVNQLKERRGFNKTTVAVANKNARIIWSMLRNDTGYQVVCN

SEQ ID NO: 456262 - protein, 379 aa, unidentified
MSTTLRVELCVMLAVAVEISAAKWVVASCGGGVGRIRRKVLSEESATARFEALVQEVVEARRRLGVGEGARVVVAYEAGQEGFWLVRALRDRGIEAEVIDPVSLQVDRRRRRAKTDRLDAEALALALFRWMGGDTRALRMVRVASVADEDNREWQRERDRLMSEQRACVDRVRKKLRTQGIWIALDQHERQQLREGKLRGFDGQPLAPMLQAALLIELDRAETAQAKARELEQQLAELSPEAVERIDRLMQLRGIGSVSARQLALRLFWRTFDNRRQVGSCTGLVGMPYDSGTMRQDQGISKIGDPRIRGLLIELAWMWLRHQPNSAIAQWFIARTQGDGKRGKRIMIVAVARRLVIALWRYLAHGEMPQGAMLKPARA

SEQ ID NO: 456263 - protein, 375 aa, unidentified
MAKHRLVFVAFDSAKEKHAVAIADDGRDGEVRYVGEIANSPDTIKKLVRRLSRQYEQLHFCYEAGPTGYGLHRQLSDLGHVCDVVAPSMIPRRSGDRVKTNRRDAITLVKLLRAGELNAIWVPDIVHEAVRDLTRARETAMIDLKVKRQQLLSFLLRHSRNFPGKKNWTKMHARWLATQKFPHPAQQIVFQDQIEAINAAQVRLLALEQQLREIVPTWTMAPVVAAYQALRGVSFLVATTFVAEVGDVRRFAAPQHLMAFLGLVPSEHTTGDTVRRGSITKTGNRRARRVLIEGAWTYRYPARVSETLRSRLEGLPLGVRTIAWKAQTRLCARFRRLIANGKTAPVVATAIARELAAFLWAIGHQIAPENNQLKA

SEQ ID NO: 456264 - protein, 366 aa, unidentified
MTIMRDKGPIWLGLDVHKDSIAAGILGVGDTTPRIEAIGSGEDAVRRLVDRVGGQRTALRVCYEAGPTGYELHRLLTGMGIHCEVIAPSLIPKAGGDKVKTDRRDAARLVRLLRAGELVAIRVPTAAEEAVRDLCRARADVVDDLRRSRQRLGKFLLRHGQVYRGRSTWTLAHHQWLARVSFQEPALTQTLRHYLAILDEREACLAAIETDLRPWCAREPFAGQVAQLACYRGVGALAGLTFATEVCDWRRFATAPNFMGFTGLTPSEYSSGGSQRRGHITHAGNEHLRTQLVESAWAYRFPARIGAELARRQAGAPAYTLARSWVAQRRLCGRFRRLSDRKHVRTVVVTAVARELAGFLWAEMTA

SEQ ID NO: 456265 - protein, 408 aa, unidentified
MKTLHRRCAGLDVHSDSVVACARLTVRTKASHEVRRFSTTTRDLMELADWLAAQGITRIAMEATGVYWKPIWHILEGRFELVLANAAHIRNVPGRKSDVNDAVWISDLLAHGLIRASFVPPAQVQDVRDLTRTRTQLAREIAQHIQRIQKTLEDANIKLTSVISNIIGTSGRRMLKAMIAGETNPAKLAQLGSTRLKCPRDELTAALDGRLTAHHRFLIAHHLSLIEELERHIEAFDARIEKLLAPLRDAVAQLITIPGVSQVSAQVILAEIGAEMTPFPTAGHLLSWAGLVPRLDESAGKRRSTRVRKGAPWLKPVLVQCAWGAARSKGTYYQAQFFRLKARRGPKRAAIAVAASLLTAAYHMLKNGTFHQDLGADFLVKQDKARIVSKLASRIKDLGYDVSITPPA

SEQ ID NO: 456266 - protein, 341 aa, unidentified
MQPYFVGLDVHKQLIAFCVKTADGKIVAEGTIAATRAALTEWVKTVPGPWHGAMEATMFSHWIYHHLKPHATRLQMGHAARMKAISAGKKKNDKIDARTIADLLRCHLFPECFVISPELGALRQQMRFRRLVIEQEVMFKNKTAGLLMGAGVEYQRRRLHGKRYFAELLRESQWIAGEMRPLLEFNRGQIESLQAMDRRLMQMLERHPRLEARVQFLRGIDGVGPVTALTWALEVATPERFGSIKRAMSYCGLTSALRESAGQQKRGPISKQRNRHLQCVLIEAAKIGPLYNEKLREIYQKACAKGVHRNRATLAVARKLVAYLLAADRTFFSTPVPAVPA

SEQ ID NO: 456267 - protein, 448 aa, unidentified
MNPVVGLDVSKGESQVQAFLDKGKPYRKSFSIKHTLDGLDRLLEFLREIEKLADGKQPSVILESTGQYHMPVIQFLEEQQYVYIIVNPLISHRARSTNLRKVKTDAIDAYQLCELYYKEELEPYKKRGIHLLNLRNLTRQQETVSSTAVQTKLQLQSILDQIFPEYRGVFGDLYSKISLQILSIFPTSKEVLSVSESDLTNKIAELCTTRSEKWAKEKAIKLREAALRNPFQNNLYQSHIFNLRMFINIVLQYQEHLSKLAAEIDALAKEIEEYEIIQSIPGVGEKIAATIISEIGEIERFNHPKKLVAFAGIDPSVYSSGRFTASINRITKRGSSRLRQALFMAVQCGIRDARKQKTSEEIIPRNKKLRKFYDKKREEGKPFRVAIIACANKLLHWIYALKRSLPKCGLKITFKHIRKTLPILKRKAYLLYPFLVYHASFNFFIEKS

SEQ ID NO: 456268 - protein, 347 aa, unidentified
MTEAYDGRQVVGIDLHRRRSVIVRMTEDGRKLETVRITNSPAALRAVIAKAGKNPNVVIEATYGWYWAVDVLEAAGAEVRLAHPLGVKAFSCRRVKNDERDAADLADLLRMGRLPEAWIAPAEIRELRELTRYRHKLVKARTSYKDQVHGVLAKLGVPVTHTDIFGVHGQAWLDELPLPQPYAGKVASLRQLAGGLTAEIGLLEQVLGDLLAGHEGYAAIQQLPGIGPVLAAVIVAEIGDIRRFPGPGQLGSWAGLTPRHYESDTKVIRGHVTKQGSRMLRWAVVEAIQRQPAGTRPRQVRDGVIARRGKEAKNIAKVAAARELLTLVFYGMRDGHVRRALQRGQAA

SEQ ID NO: 456269 - protein, 316 aa, unidentified
MPPKREVHVNGGIDIGKRQLDVFIRERELHFSVANDPKGIRHLLGRLARYHLARVVLEATGRREYDVVLALAERGWPVIVCQPIKVRRYAAARGTLAKTDKLDAALLADYAAVMQPEVRPVAAGKLRLLRDLVARRRQLMTMRTMELNRLDVMPKGLLADIRRHVRHLDAQVAKLDQHLTELIEAIDEWRDKRTILLSVPGVGPQVVATLLADLPELGTLTNKQIAALAGLAPFNRDSGTFRGRRRIRGGRASVRTVLFMGMMSAIQCNPKFKAMYANMVAAGKHKKVALTACMRKMITVLNAMLRDGKPWSLSNA

SEQ ID NO: 456270 - protein, 448 aa, unidentified
MAKGNGITRGDRNRNRQKAGLREVVRRDCVILAVDLGEDKQAAAVMDHEGRVLGRKTVLKKAHRLGGLLEWAAGVAARKGFAGVTVACEPTGHRWKALMGLADAAGLGFVCVQPLAVARARESDDYTLGKTDNRDTLLIGTLARELKCYLPEREDACWARLRHLGARRAGVGCDLRACGQQVLDLLGCCWPAALETARHPADSVTWLAAVWVVASGCGGRPETLRAMGYEAFRAAAREELPRWGAKRTCGRIVRALWDALADPAGVAAQRPGALERIALIMGDWRDLRHKLADTEQRMLAALDDLGLTRLAGSIPGISALSAAAMLAESGDPSRFASARALVKHAGLNPSEHTSATLAGKTRISRRGRPGLRTAAWRAVWAALNHNPVLQAKYQHLTSRDTNRLAPGQARAACAAAVLRWLYSVITTRQAWDPAVAAGQAAPAVAAAA

SEQ ID NO: 456271 - protein, 371 aa, unidentified
MTEAVKYIGLDVHKETIAVAVADGERGGEVRYVGTVPNEDDAVRKLVKRLTGAGTKLQVCYEAGPCGYGLHRLLTGLGQSCIVIAPSMMPWRPGDHVKTDRRDAMTLARLLRAGELTAIWVPDEAHEAVRDLIRARRSAKEDATGAKQTVKSFLLRHDRRYGGKGTWTKMYWRWLSEQRFDFPHQQLAFEEMQKRVLEAQARVGRLEAALGEAVEGWRFAPLVRNLQALRGIQLVSAATLVAEVGDLTRFDNPKQLMAYVGLVPSEYSSGARKQRGRITRAGNGQARTMLVEAGWAYRLPAREERRYRERVADLPDEVQAIGWKAQVRLCQRFRRLAATGKPQPKVITAIARELIGYAWDIARRVSPAVAT

SEQ ID NO: 456272 - protein, 378 aa, unidentified
MSKVRFVGLDVHADTIAVVVAEAKSTEVRSWGTVPNRPEAVRKLIRKIGEGGKLKCCYEAGPTGYVLYWQLVQLGVECEVIAPSLIPTKAGDRVKTDRRDAERLARCYRAGELTPVYVPDAAHEALRDLVRAREVAKQDQLRHRHQLGKFLLRHGKRPVDAGPAWCAKYLNWIKAHVRFDQPALEATLADYLHEVEHAAERIVRLEQCIEDAVAHATPEIRAVIDALQALRGVALTTAATVVSELGSLTRFENPRQLMGYSGLVSREYSSGNRTQRGAITKTGNAHLRRVLVEAVWAYQYRPAVNGRLLRRQRALALSEEARRISWKAQQRLHKRYLALTARGKHKGQIATALAREMLGFLWAIAVHTETQFKSMKAA

SEQ ID NO: 456273 - protein, 450 aa, unidentified
MSPLALDVVTKTGKTPVLGRMLSKYVGRKTSSIENDITKARNHLRQRGKIMRVVFGIDVSKASSEVAILVNGEKIHGYTIPNDAIGFNRLLEDLGTVYQPEIVFEATGVYSRRLQAFFEDNSYAYIRLNPLESKKQLDSLRVRKTDKIDAEKLATSQFILNRKPSYVQEALYQELRDLSRFYQNLTEDIVCSKNRLHKVLQVTFPELENILSSPTGKQYWNLVMAFPCNSFVLELDDAALRAIIRQSTSKHISENRVTYLVDKLTKLANHSYCAVKKTSPMMEEVKYYAGELLRLSEYRQSVLEKMITLAQPLPEYEILLSIPGIAETTATSIIGELGDIRRFHSANQINAFIGIDLRHYESGDFLAKEHITKRGNPYARKILFKCIHNIASASHTNPCHIADFYEKRKRQSQVTSTKPHTIASIHRLIRTMYYLITHNKLYDYTSTQNR

SEQ ID NO: 456274 - protein, 338 aa, unidentified
MALYAGIDLHSNNNYTGIIDDQIQKVFGKKLANSLPLILDTLAPYKSELKGVVVESTYNWYWLVDGLQEEGYRVHLANPSAIKQYEGIKYSDDKWDALWLAHMLKLGILPEGYIYPKKSRALRDLLRRRMLFVKQRTSAILSFQSMIARVTGKPFSVNNVKKLKVESATQLFDHPDHVFMAQRYLSVILLLSEQIRIIEKEAKERVESSEAFKYLLTIPGIGKILGMVISMESGDISRFPKVGNYCSYCRCVRSERISNGKKKGEGNRRNGNKYLSWAFVEAANFCIRHHDPAQRFYQRKKAKRNSAIATKALSNKLARASYYIMRDQVPFNSDMLFA

SEQ ID NO: 456275 - protein, 365 aa, unidentified
MPTIAQSGVARSVLGGVDTHKEVHVAAVIDDLGRILATAEFSATRHGYRRLLAWLRGFGELVVVGVEGCDSWGAGLARYLSARGVRVVEVNRPNRQHRRRRGKSDPVDAEAAARAVLAGEATVIPKTGTGPVEALRQLRVARAGAMKARTAAANQLHSLIDTAPDPVRAQLRDVTFKKKITVAAGWRPTITATPEGASRYALASVARRWRDLALEITELDRRIKTILDDVAAPLVAVHGVGYDTAGQLLVTAGDNPDRLRHERSYAALCGSSPVQVSSGKTDRHRLNRGGDRHANSALWRIVIVRMTSHQPTKDYIARRTAQGRTKQEIIRCLKRYVARELFPHINNVITPTGIEPAPTDQQIAA

SEQ ID NO: 456276 - protein, 364 aa, unidentified
MQGREPVSSLLSLIRFRQIPMTSIELNATAHDACLSLFAGIDVGAEDLVLVIRKNGKPFDPQKYANTPADRRRLVKKLSKLTGIIVCLEATGIYHFDLSIALHDAGVLLMVVNPKSSHNFAKVLMKNSKTDAVDAHTLAEYAARMDFVAWTRPTTEKLALRSFARRINALTGQKAAAKNHLHALNATQETPKAVLRDANLAIAQLEKRIDRLTAEALLLIAAHPELKRTLSLLVGIKGIAETSAIALMGELLLLPPGLSHREWVKFAGLDPKAFDSGKSVHKKTRLSKAGNRQLRSALYMPALSAKQHDPHVRAYFQHLVDNGKKPLQAVCAVMRKLLHAIHGMLKHDQPFDNSRFYTIPSAVG

SEQ ID NO: 456277 - protein, 348 aa, unidentified
MAIIGGFDVHRAQITFDYLDTQTGEVEAGQIRPATRLVLREWLGRFEGHHDAAFAVEGCTGWRFVVEELVRAGVEPHLAEPADTATQRGRKKRAKTDRADARLLRELLAQNRLPESWIPPAHVLEARTLGRLYVALMDERRAWQQRIHAALFHQGVPRVQGLLTGEGRHALAAAQLSPAGRQMVETALTAIDSLTEQIKPLRAQLAGIGRSQPGAQALLAHYGIGALCAAIIWAELGDCRRFRSSDQAVRFTGLDVTVYSSDGKRSPGRLARQGSPELRWALFEAAKSAARTTAPDHDYYVELRDRLGGKRPALSVARKLARRCHHTLRELGDEAWSEPAIHSEQEAA

SEQ ID NO: 456278 - protein, 407 aa, unidentified
MPDYDWYVGVDWGGERHQVAILDATGARVAEHQVAHSGAGRESLVEHLARLGADPGRVAVAIEVPRGPVVDTLLMRGYHVFALNPKQLDRFRDRYSVAGAKDDRRDALVAASALRTDQLAFRQLQPDDPQVIRLRELSRTYDELLGEERRLANQLREQLWRYYPQALTHCPGADESWLWELLHEAPTPAHAQRFTRPALRALLARYRLRRITGDMLYETLQARSVTLTPGAAEAAAEHVELLLPRLRLVHEQRQQWERRMDALLDALGPPVEGRQEHRDVTILRSLPGVGRVVAATMLAEAWGLLAARDYQSLRAQSGVAPITQQSGKQRLVLMRRSCNHRLRTAVFHWARNSVRLDPRCRAQYQRLRQRHSQARALRSVADRLLSVLVAMLCSGTTYDITRYPNAA

SEQ ID NO: 456279 - protein, 336 aa, unidentified
MSYIGVDLHTTQITVCYLKTEEDFEIKKYQLGEIDKFVSSLLATDEVAVEATGNPRWFYEQAAEKVRRVVIVKPRGFEVVKNSVRKTDKNEALNLARFLRADLLPEVRAKRQEAMTVQSSVNPRIKFVRLKTSLINKIHALFVATGRKLKKTGLASEEGLEKVLQEQWATIELTELEIIIEQIRSLKASSKKLDKAIETESEKLPGYESLVSMSGIGSLSAGILLSVIGEVKDFGTAEKLASYFGIVPRVSNSNEKVNHGRITKRGTKTGRTTRVQCSLAAIKKSEYLKKYYEQVKARRGPGKAKIALARKYLSIIYTTLTNGWVFADFNNFELAE

SEQ ID NO: 456280 - protein, 408 aa, unidentified
MYFVGIDWADQKHDVTIVDESGTCRVKNFSVKKSVQGFTQLLDKLRSLSEDSQAFKIGIETPHNLVVDYLVDLGYAVFAMFPGSMKSFRKRYRSSSARDDEFDSYVIADVLRTDKACWRLVDFGSEKIRQIRLYAWHHHQMVEDHVALSNALRATLKEYYPEFLEFFADVACANALAFLCAYPDFDTAAQLSHEQFTTFFKEHHLRNRKIVQHIYARLHQRHLRVPPAVIEVKKIKVVSCAKRLLTLAPDIKHYRQRLTALVDQHPDGKIFLSYPGAAHVTAARLLALFGDNRERYQDVSELQSLTGTCPVTESSGKNFRAIYFRRACNKFHRDTMQNLAFSSLKEAPWAMAYYQKHKAMGKKHSHVLRCLANLHLRILFTIWKNRSCYDENLFLAQRTRNQIANQKN

SEQ ID NO: 456281 - protein, 348 aa, unidentified
MDHIGIDVHKKESQIYILAEGGEVIEQRIRTEPERFAAVLGSRPRARILIEASTESEWVARCLEALGHEVIVADPNFAPMYATRSRKVKTDRRDARALAEACLLGAYRPAHRLSDPQRHIRGRLLVRDALVRTRTRYIAVIRALLRQQGYRVPSGSAEHFIDRVQALPLPGRLRSVVAPLLALMRPLNQQLAYCDERIEHLAVQDPRVPRLRSVPSVGPVTAAAFLAAIDDVGRFRHARQLEAYLGLVPREYSSGETQRRGPITKAGPSRTRWLLIQAAVSILRRHPPQAEELRAWALRIAARRGKHVAVVALARRVAGILYALLRDGTMYTPRRPAALPQPVAAPHV

SEQ ID NO: 456282 - protein, 348 aa, unidentified
MTVPIVESRAITGGVDTHADTHMAAALDPVGGLLGVQEFPATAAGYARLLGWLGGFGTVCLVGIEGTGSYGAGLSRHVTAAGIRVAGVDRSDRQDRRRQGKSDPLDAVSAARAAQPGRARGAPRGRDGAVEAIRALMVARRTARSERTQTINQARALVLTGPDDLRARFAGYAAAGLVAGLASLRPRPGDVVGYATRIALRELGRRAEFFDDQLERLDELIVPLVAARAPGLLALYGAGPDSAALLLVAAGDHPERLRSEAAWAHLCAVAPIPASSGKRTRHRLNRGGDRQANHALWRIVITRMSSHPPTRAYVVRRSKEGLPEKEIIRCLKRYVAREVYPCLRMTAG

SEQ ID NO: 456283 - protein, 339 aa, unidentified
MTVKTVGLDLAKDVFQVHCVSATGRRIINKKIKRAKLIAFFETLPRCVVGMEACGSSHHWGRELRKLGHDVRLMPAAYVKPYVKRGKTDAADAEAICEAVRRPTMRFVEIKSEDQQAVLAIHRARDLVVRQRTQVVNMIRSILREFGHILPTGIEAVSKFAREHDTEEQLEMPEIANGILGVMCHQLNGLNARVDGLTKLIEQHAWLDADARRLMRMPGIGPITASAVVATIGDAKQFETGRDLAAWLGLTPLNKSSGGRERLGRITKKGDRYIRKLLIVGMTSRALMAKNSPEKADTWTAKLLDEKPFRLATVAMANKSARIIWALLTKQQEYRQPIA

SEQ ID NO: 456284 - protein, 365 aa, unidentified
MYYPISIGLDVHLNSISASAFNADTGEVIQHGFDGKDQEGLIKWIKSFTGNVRAVYESGFCGFTLARTLDAAGIPCIVAAISKLSRPVGDRVKTDKRDATFLARQLAVGNVVPVHIPSLEREGMRDLSRTLDVVRDNLTAAKLRVMQTHHRYGLRPVMCKTKKAWTLEWTSWAKSLEMPSTGAQQAYETHLSEALRLIDEKKRIEKLICKWCDEDSIKGKVNALTAIKGISKTAAFCLVSEIGEFSRFSKGSGFSSYLGLVPSENSSGDIVSRGGITHTGNGHVRKTLIESAWCYARMKTPYKRAPDGVSPQIAAIASKANTRLFDKRRQMEKTKKPCVINTAVARELACCIWAIGVTVEKEASE

SEQ ID NO: 456285 - protein, 449 aa, unidentified
MSRPQVIDDEEHERVHDKVAAIDVAKDAGVVCTRTPHPSRPGTRRSTVWTVKARMNTIRALGRQLKRDGVEIVTLESTSDYWRIWFFVLEAAGLAVQLVNAAQARNLPSRPKTDKLDAQWLARLTEMGMLRASFVPPKAIRDLRDYARMRARLVQERTRCFQRLEKLLEGALVKLSAVASKLTTVSAQDMIKAMIAGQRDPRVLAALARTGMKAKHDELVQALDGMFDDHHGELAGLLLDQIAALDGKITQLSTRIGQVVAAVPAAWGINADGTTGPEAGTGPDAAVPPAVARLAEIPGVSENLARAIIAETGLDMGRFPTAGHLVSWAGLCPTARQSGTRTRAGKKGRGNTWLRASLGQAAIGAARTPTFLGERYHRIARRRGKAKAQVAVARSILVIIWHLLADPTARFTDLGYSYYQDHTDKDRKPRNHIRQIEALGYTITLTKAS

SEQ ID NO: 456286 - protein, 351 aa, unidentified
MPRTSMVYAVTAIGMDIGKNTLHMIGLDSCGAIVLREKVSRERVTLRLANVPPCLIGIEAGMATHYVARELAALGHDVKQVPPTYAKPFRQGHKNDFRDAHAVAEAVQRPTTRFVPIKTDEQLDLQALHRVRSRLVSERTAVINQIRGFLLEHGIIVRQGLRFLRQQLPDILAKRTDVLSPRMTRIVADLADDWRRLDERIETVTDEIEALAKSDDGCRRVMTVPGIGPIISSAMVAAIGSGAAFARGRDFSAWLGLVPKQMSTGDRTILGRISKRGNGYLRMLFMQAARVILLRPTNWPKHSFGAWLVRAAQRLHPNVLAAALANKLARIAWTVLAQERSYEARVTKAAA

SEQ ID NO: 456287 - protein, 427 aa, unidentified
MSPNRLNRQRVKDGFRLQIQSNGGTVMNAVGIDVSKGKSMVCVMRPFGEVVLEPFEVLHTAQSLNDLAGKLKALDGETRVVMEATGNYHKPVAFVLHDAGLFVSVVNPVLIHDYDNNSLRRVKTDRKDAVKIANYTLDKWTRLRQYLPEDDTRLALKNCYRQYQQAVAVRTMLKNNLISSLDLTFPDANKLFSSPAKSNGCEKWVDFIGDFWHSECVSSLSSDAFAKKYLKWCQKHGYNFTRSKSDTIYACAVNAASLPKSPTSKLLIQQQVAQLKAVSQSVAAFQQEMLRLSQQLPEFDTVMEMYGVGPSLGPQLMAEIGDIRRFSSKKLLIAFAGIEPQPNDSGKIVGNDSGISKVGSAVLRRTLFLIMTVILKTQPQDEPVFQFMNKKRSEGKPYKVYMMASANKFLRIYYARVKAVMDSKHSK

SEQ ID NO: 456288 - protein, 312 aa, unidentified
MKVAGIDVHKKVLMVVVVDAGMAEEKPVRRRFVTMPSELRRLLTWLREQGVEEAVMESTAQYWRSVWLELEPHMRLHLAQSFSNRAPRGRKHDFKDAERLVRRLIADELILSFVPSGEQRIWRSMTRMKLQLTRDRVRLQNQIECLPEEMRIRLSIIVSNLLGASGLRILYALANRETDPKKLAQLGGERLQCTEEQLVDALTGRAQPVHGEMLALQLQRLHLIDQQMEWLNSMIAAAMKPHQDAVIRLAEVPGLGVDSAQQIIAEVGAQASTFPSAAELTSWVGTCPGKEEARRRTIAAVLQKAINTCAAC

SEQ ID NO: 456289 - protein, 353 aa, unidentified
MEYIAFDAHKHYTLASVARPDGQLVREQRITHERGALQQFLQRCERGSPVAVETVGNWYWIVDEIEAAGCVPRLVHARKAKLMMGQINKTDKLDVRGLNQLQRNGTLPTVWIPPGELRDQRDLPRTRMVLVRQRTQLKNRIHATLAKYALHDLEVSDLFGARGRALLRQRLELLPPCTAYTTQHLLEQVERLDHQVREFEQRLRAMFKPTPAIQRLLTLPGVGLTLAVVIALEVGDVARFPTAEKLAAYAGTTPRVHASGGKTRFGPSRPDVNRYLKWAFVEAANAICLNRGRAPHRHVTRLYERVARRKGHQKAIGAVARHLAEATYWVLTKQEFYREPQPPTVSSTGDKRG

SEQ ID NO: 456290 - protein, 344 aa, unidentified
MEHYAGLDVSIKETSVCVIDGTGRVVREVKVPTEPEAILAVLSDEDFNIKRIGLEAGPLSQWLYGELAEAGLPMICVETRHMRAALSAQVNKSDRNDARGIAHMMRVGLYRLVHVKTPASQKRRMLLTSRQLLQAKARDIENDLRGTLRNFGLKVGIVGAIKFEARIRELVANHPDLATIVDSLLVARRVLREQLSVLHRHLLAVVRDDEVCRRLMTMPGVGPVVALTFRATVDVPARFTNSKTVGAIFGLTPRRHQSGEIDRMGGISKCGDAMMRTVLFEAAQAMLTRTIKWSWLKAWGMKIARHRGMKRAVVAVARRLAVVMHRMWVDGTDFQWKREEVAAA

SEQ ID NO: 456291 - protein, 412 aa, unidentified
MQVVYQRCAGLDVHKKTVVVCVMISATTGTTTQEVRTFGTMTRDLEAMSAWLAQAQVEQVALESTGVYWWPVFNILEEAGLAVTLVNPQQTKGQPGRKTDVGDATWLADLLRHGLVRASFIPPAEIRALRELTRYRAAQVRARAKEVNQLLKTLESANLKLASVATDPVGVSGRQMLTAVSAGEDDAGTLAQMAKAGLRRKLDELEQAFVGRVKPHHRTLIRASLDHLRFLERTIEQLDQEVEQAMIPFAQAQALLQTLPGISEVAAAAIVAEIGVDMDRFPSATHLASWAGVCPGNKQSGGRRLSSATTKGNVWLRRILAEVAWAAIHTRNSIFRARYYRLKPRLGTQQALVAIMHQLLKVIYHLLKTGEAYHELGSDYYQPADPQRAARRLTKRLERLGYRVTLAPAPAA

SEQ ID NO: 456292 - protein, 365 aa, unidentified
MMIVIGVDVHKRAHTLAAIDGISGREIAQREVAASDAGHVEAIRFAAGLGGEVVWAIEDCRHVSRRLEQALLGAGSEVIRVPPAMTGESRKGQRQPGKSDPIDALAVARTVVREGVERFAVAFLDEQAMEIRLLHDHREQLVGERTRAINRLRFHLVVLDPELEASLAPRTLHFAGAQARIRRHLAKLGQTAQTRVAASELAHIAKLTKEINALHADLDRLTAAHSPALRAEAGCGPVCAAMLIGHTAGARRFATDAKFARLSGAAPIPAMSGNTRRYRLHRGGDRQLNRALHTIALSRARNDPETRAYLKRKRGEGKTNPEAFRCLKRHLARRIWKTMFAAAPPAQLPNNRVTVGAPALMPCTG

SEQ ID NO: 456293 - protein, 337 aa, unidentified
MEVWSGIDVSKAFFDASWVGPGTGIEDFQKIPHARFERSRAGVRKYLRWLKQRAASTAAVRVVMEATGRYSLELQIWLVDKQPSLAPAIVNPKQAKHFHKSLGLRNKTDSVDSRALGLMGKDRRPQPYEPLPAEYQKLREFMRQRRDLIQIQVGERQRLGELPKDHREVRSLVQSHLRHLEKLLQRIDRQTHQLLKASPQLAQDFALLDTIPGVGRIIALTVMGELGDLRRFNRSRQVSAMAGISPSNYQSGKSPGRSRLNKNGHPEARSVLYMGALTSTRKSSDNHLARTYRHLINDQGKCKQQALVAVARKTLVIMRALLITQQPYIDHFATTAS

SEQ ID NO: 456294 - protein, 408 aa, unidentified
MSEFDVYVGVDWATVTHQVCCLDPGGRILKQVQVPHSGAGLAMLVTELTSFGIAADRVAVAIERPDGAIVDGLLQHGFQVFAVNPKQLDRFRDRHTVAGAKDDRRDALVAGDALRTDPAAFRRVTVEDPRLVQLRELSRLHDELEHELVRLANRLREQLLRFYPELLKLSPAANEPWLWQLLTMAPTPQDARRVPLARWRALLREYRIRRFTAEEVVAVVHAPPLPVAPGTLAAVTEHIGFLVPRLRLVRDQLTQCGRRLDTLLTALATGEAEAREHRDVTVLRSLPGVGRVVAATMLAEASQLLAARDYQTLRAHAGVAPVTRQSGKGHHVMIRRSCNHRLRDAVFHWARNSIRLDERCRAQYTRLRKRHGYARALRGLGDRLLALLMAMLASGTMYDPARRRVVHA

SEQ ID NO: 456295 - protein, 312 aa, unidentified
MDAIYVGIDVSKDRLDVAVRPSGESFTVSRTGAGIDDLIERLKPLSIKLVAIEATGGFETVVAAGLAGAGLPVVVVNPAQVRAFAQALGKRAKTDPIDAAVIAHFAEATKPRLRQLPDATTQLLADLVARRRQIVEMIAAESQRARHVTLPRLKKSIARLRKALEKELSELDDDISDHVRGSPAWAEKEDLLASVPGIGPTIARTLIAELPELGSLDRRQIAALAGLAPWTRQSGKWRGKSFIGGGRASVRRALFMGAMVAARHNPTLKLFRDKLVAAGKNKLAAIVAVARKLLTILNAILRDKTPWQLKIA

SEQ ID NO: 456296 - protein, 434 aa, unidentified
MKKVRTDSQPREAAAATSPAPFAAFIGVDWADAKHDVSLRAADADVCERSVVAHTPEALHAWAQSLRARFGGRPVALAVEQSRGALLNALQRYEFLTIFPVPPAKLADYRKALGSGAGAKDDPVDADLLRDFLERHPERLRAWKPGDAQTRELELLVEARRGLIDLRTCLSNQLTAQLKQHFPQALGWLDHGGFTRAGGALLRKWSTLDALQAARPGAIRRLLKAHGARQATVETLLAELPQAQPLTTAAASLQAGTLLTRALAAQLRTLADSIGEYDRRIAAVFEAHPEAHLFDGLPGAGAALAPRLLAAFGSDRERFASAVEVQSYSGIAPVTIRSGKRCTVQRRLACPHFLRQTFHEFAGWSVRYCRWAGVYYARVRAAGKLHHAALRALAFKWIRVLYACWRDRRPYDEARYEERLLQRAPEKWAALRGV

SEQ ID NO: 456297 - protein, 327 aa, unidentified
MSEVWVGIDVSKEGLDVAVRPGDEAWSVRNDQAGIKVLTREMKKLSPQRIVLEATGGYEYELALRLGKAELPVAVVNPRQVRDFARAVGRLAKTDPIDARILAHFAEAVKPPCRPVKDQQLDELDQLVTRHRQLVEMIVAERNRRMSLRGDAQNDIDVTVRFLKGRLKQVDERLKALIDKNPEWNRKAELLNSVPGVGPVLISSMIAELPELGTMNRKQIAALVGVAPFNNDSGKSQGRRHIWGGRAHLRALLYMSVVAGLRFNPTVRGFYQHLRKSGKPAKVALVACMRKLLVQLNAMVKSAQTWNAHLSSTSLSSNPLPTTSFQA

SEQ ID NO: 456298 - protein, 345 aa, unidentified
MESKLEQLQERPSRPFTPRGGPAWPARILEAGVIYHVKEELVYCGVDIAKAYLDAAIGKEKRRWPNDSKGHRELISWINQIAGPVQVICEPSGGYERMLLQALVRAQIAVSLVPANRVRQFARAAGVLAKTDRIDTEVLCSFGKAMRPPSLSGARLEQEKLRELDSQRRHLMHLLVMEQNRGARLSDAAVRRFNRRLVNQIKKQIDAIDLLIQNHIEQSQELSAKAEKLTAISGVGERTSALLLAQMPELGQLNRRQVAALVGVAPFNRDSGKMRGKRTIFGGRRFVRHGLYMAALVAARHNPILRTFYQRLRASGKPAKVALTATMRKLLIDLNSALKPDPIYA

SEQ ID NO: 456299 - protein, 410 aa, unidentified
MLVYIGIDWSQKKHDLCFLNQAGARLAEQTIPHTQTGFSQLDVVREKLGLELTDCIIGLETAHNILLDYLWDQGYPQVYVLPPNRVKSSRGRFRQSRARTDLSDAWLIADILRTDLARLQPWAPDSSLTQQIRSRVNYVQLMTKEIVRLTNYQRAILLRYYPVAADLFSGLKTLIAQHFIRTFPAPETTKDLDLETFQTFARQHAYTRPEKLPATLAKLHQVHPIASSETVETFQSQAQSLARLLLPMIRAKRTALRELNNLFLQHPDHFIYASLPGAGDFLRPALLSKFGDHRYRFPSASRVQAVAGTCPVTISSGKYKSIRFRYACDHQFRQIVQQWAKASLTSSVWANAYYSRVRPRCDSDNHAYRCLANRWLAVLWRLWQDRKPYDETYHLQQRTLRSQPREIMTV

SEQ ID NO: 456300 - protein, 347 aa, unidentified
MLYAGLDLSRKRLDVHLLEQSGATREATAVSPDADALRTLVSATARYGEPVRAAIESMNGARFVHDTLELAGWDVEIADAQKVKGLAPLACKTDRIDAWVLAELARRDLVPTIWLPTPEVRAERERARFRLHLVRHRTALKNRIHATLIAFGHPCPVSDLFGASGRELLERLAIPEPWASTVKASLVLIEELEVGIDLCERDLRRLGAGHPYVPRLMTAPGIAWVLGYTIASEIGDIARFSSPKKLAGYTGLCPSVHQSGGKDHRGPLSKNGPKYLRWALIEAAIHAARHPCYQEHYERTKRRLGRQRGSKVARVEIARKLAEAIWFMLTRNEDFAPAGPPSVSLVA

SEQ ID NO: 456301 - protein, 462 aa, unidentified
MKRKAKSQATHSGLAVVNPNAAAIDIGATMHVAAVGADRASDPVRSFGTFTADLHRLADWFAECGVKTIVMESTSVYWIPIFELLDERGFEVILVNARDAKHVPGRKTDVSDAQWLQRLHSYGLLRASFRPKGEIVELRAYLRQRERLLDTAASHIQHMQKAMTEMNLQLHHVVSDITGATGMRIIRAIIAGERDPAVLASMRDTRCHSSAEVIEKALTGHYRGEHLFVLEQALALYDVYQQKVAACDIRIESVLKELSSIRGRKEDARADGSGSPRRRSRQSNGPDFDVGKALHSLLGKDLTRIHGMGPYLALKLVSECGDDLSAWPSAKHFTSWLCLAPSNKISGGKVLSSRTRRSGSRAASLLRLAAVTIGRTDTALGAFYRRLSARAGKSKAVTATARKIATLFYNALRHGMDYVDPGASYYETRYRERVVKNLHRRAKAFGFILQAAEMPAAEQAVS

SEQ ID NO: 456302 - protein, 426 aa, unidentified
MNYTQNQKISQVTETTLIVGVDIGSETNFARAFNWRGQELSKKVFRFNNSQEGFQSFLAYINTYTTIASAQQIIVGCEPTGHYWFNLARYLEENNIKLALVNPYHVKQIKELDDNSPKKTDLKDPKTIAKLVVDGRYSYPYLPEGIYADLREAVSSRERIVKELNAITNRIKRWLKIYFPEYLVVYKNFSAESGLTVLETVPLPQDIVQLGPEGVNQLWRDKKLRAVGMKRALTLVEAAHNSIGLPGGNCARMEIQLLLEDFRTKQSQLEMITEVLEEETLSVPYADKLLAIKGVGLITVAGFLAEVGDVRRFDSPKQIQKLAGLEVKENSSGKHRGRSSISKRGRKRLRKILFQVMLPMIQNNAEFGEIYQYFTTRQKNPLKGKQAIIAAGCKLIRVFYAILKHGVDYDPGKLRADIIHPELEAA

SEQ ID NO: 456303 - protein, 342 aa, unidentified
MDKMAACGMEVSAQELVIALLGKKGEAVLLRFANTAAGHGQLLRTLTRGGKRVRVCMEATGLYGLDVALVLRAQEGVELMVANPRAVRSFARAMMQRSKNDQLDAVVLREFAARMPFKAWVRPTENALALWGIARRLEALSKEHTAEKNRQHAAGISQAIPECVRRSIARTLRAQQREMQQLRGEARRCIAAEARLRRWYQLLRSVKGIGENSAIQILAEVALLPEDRDVRQWVAFAGLDPREYSSGTSLRKYTRISKVGNRHLRQALFMPALVASRHEPHLRAFYEHLLASGKKKRQALVAVARKLLHAIYGMFHSDQPYDGARVYPLPAPLATAQVAHTS

SEQ ID NO: 456304 - protein, 356 aa, unidentified
MIGTMTWAAMDVHARSTYAASLDVMTGELTRRRFDTGAVEPVVAWLAGLPGPVRACYEAGPTGFGLYRAAGAAGIDCQVIAPSKTPRASGDHNKSDRRDTDLLLRQLMAGALTPVAVPAPTFEAARDLARAREQVRADLMRCRHRVSKLLLRHGRVYDRKAWTQAHRQWLAAQSFEQVNTELAFIDNLAACDGLVARKQALDERLSRVAREPEFWPLVARFRCFRGLDTLSALMIVLEVSDFTRFARAVQLGSWLGLVPSREQSGESDRHGAITKTGSKYARRILVEASWHYARPPRIGQALAERHDGQPDHILQIAWRAQHRLHRIHKRKKPANVITVACARELSCFLWAAATAP

SEQ ID NO: 456305 - protein, 435 aa, unidentified
MTLIKYGYELDTAFDWSFPIRLHSLKPTVLSLYINHRKAGFIMILVGIDVASIKNDIVITNHLGEVFNKHFTIENSRLGYKKLLSEISLAKEFFKDSNVRIGLESTGHYSRNILHFLILEGYNVMFINPLLTNMDRKASSVRKTKTDSIDAKAICMFLIRNQNDFKPYTLLSYHIDELKILVRQRKSLKKQLNKTSNQLKAYIDQAFPEYHKIFKNTLSNASLTLLESYASLSELKRVRTNTLTELLKKSSKGRHGLTKAEVIKEFVKASIGIDSESLSLSIKQSVQTIKSIELQVSQINDLLEHHLNQSKTTLLTIPGIGIQTGAIILAEIGDINRFKSDDALLAFAGLDPSVYQSGKYEGSFKISKRGSSILRWAIFQAAKITVMHDPIFNAYFLKKKSQGKHYLTIIGHVTKKLLRVIRSILKNNSVYTVSH

SEQ ID NO: 456306 - protein, 373 aa, unidentified
MGEDSEVFVGIDTSKLRHAVAIAQGGRGGEVRFLGEIEATDAAVTKLVRRLAAKHGKLFFCYEAGPTGYGLYRLIKELGSDCVVVAPSMTPRKPGDRVKTNRRDAVSLARLLRAGELTAVWAPDERHEAMRDLVRARSTAVADLRRKRQQASAFLLRLGRHFPGKKTWGRAHMKWLLGQKLAHREQRVAFEEMMLAISEAQGRVGRLEQAIGAAVPDWSLAEMVTALMALRGVDLISATTLLAEIGDLGRFSTPRELMAWLGLVPSEASTGDRVRRGSITKAGNSRARRTLVECAHSYRYPARVGLAKQARVAAAPRAVREIAWKAQTRLTARYRALIKRGKLRNVVVTAIARELAGFIWAIHRALTEPRTAA

SEQ ID NO: 456307 - protein, 424 aa, unidentified
MDIAYPVCCGIDVHKKFFVATVIKTTNNLKADYIKERFSTFNSSIRRFKQWLIENKCYDVCMESTGKYWIPVYNLLEDTIRVTIASPKWVKAVKGNKDDVKDSKWIGDVFRLGLVPGSYIPNRLIRVLREFTRYRAKLVGCKSSEKNRFQNAFTVCNIALDSVVSDMFGKSASLITDYLLKSDDEFDPEYCKSLLQKSLKKKADDVIESIEGYSMTSDQKNRMLIVKNHLAYLEKTIEKIDGMLSEMIEPYESTIALICTIPGIDRISAVTIISEIGVDMANFDSSKRLCCWAGLTPGNNESAGKKKSVKITRAGVYIKPALVQVAHAAVKSNVSDYYRIKYERIAKRRGKKRAIIAIARMILTAIFNMLTTGEVWNPTDLFKVDMPQDLKEKQKQKQINQAIKFLRNNGVILPDVVSAVETAT

SEQ ID NO: 456308 - protein, 330 aa, unidentified
MSEHLMLKTFTQPAQPDKLLNYLVRNYPGGNYHSVYEAGFSGFWSHYKLKEMGINNIVINPADVPTTQKEHLLKDDPTDSRKLARSLHSGVLRAIYVPEPLTMEDRSLVRTRSALVKDMGRYKSRIKSQLNLYGITYPEEFEKSGTHWSKRFLKWLNGTDFFQSDTGALSLRVKVQEAEQQRQLILDTTRAIRKMSQGEKYASNMKLLTTIPGVGLITAITFLTEIENIERFTNSDHFAGFIGLIPNRHSSGAKESTGEMTFRGHENIKKMLIESSWIAARCDPALTLSYHKYTRRMESNKAIVKIARKLLNRIFYVLTFKKEYVPCVVK

SEQ ID NO: 456309 - protein, 400 aa, unidentified
MRVVFGIDVSKASSEVAILVNGEKVHGYTIPNDAIGFNRLLGDLKTVHQPEIVFEATGVYSRRLQAFFEDNSYTYTRLKPLESQKQLDSLRVRKTDKIDAEKLATSQFILNRKPSYVQEVLYQELRDLSHFYQNLTEDIVCAKNRLHKVLQITFPELENILSAPTGEQYWNLVITFPCNSFVLESDDATLTAIIRQSTAKRISEKRVTYLVDKLTKLANQSYCEVKKTSPMMEEIKYYAGELLRLSEYRQGVLEEMVTLAQPLPEYEILLSIPGITETTATSIIGELGDIRQFHSANQINALISIDLSHYESGDFLAKEHITKRGNPYAIKVLFKCIHNIASASHTNPCHIADFYEKRKRQSQVTSTKPHTIASIHRLIRTMYYLITHNKLYDYTSIQNR

SEQ ID NO: 456310 - protein, 392 aa, unidentified
MDSPPPRHHSATVAFEEANGSEGETMKKHSSKHQSLSSTDVELCTTICVDLAKQVFQLAGEDATGRVIYEDRIKSRQAFHELLLKLPVTVTVLMECGPGAQAWARLLQAKGSPVRILPAQRVAEHRSGAKNDRNDAHAILRAGRDSSIASIPIKSTTALAIQALHRVRRGNIKRHTALGNQMRGLLLEHGVSMPQGDAAISKHVPQALEDASLPLPDVLRELLNELLADWLALGERITTLSRRLEKTAQEDEVAQRLVTIRGVGPIIATAIVAKQTEPRRFASGRMYSAFFGIVPDQHSSGNKIRLGRMSKRGDGYIRSLMIQGAHAVLSQLRPDSDQPDDRRLLRWLSRLGRKEAAIRLANRNLRIIWSLLQSDQVYQRKPKDHTEAAMSS

SEQ ID NO: 456311 - protein, 350 aa, unidentified
MNVNHYIGFDVHKKSISYCVKTADGTILEEGKLPAKRAILRAWARKRTEPWHGAMEATLFSGWIYDTLKPFAAELQMGHPAMMQAIGASKKKNDQLDARKIADLVRCHLLPVCYVAPAELRELRRRLRYRNLVVAQAVQMKNKMSGLLMEVGAEYNKQQLHGAKYFTELLEGLEEVPESVKDLLRLSRGALETFQTTQQQLLARLEQHPRLAERVKRLKSIPGVGQVTALTWALEVAEPQRFGSIARAVSYCGFTSALDSSAGQEHRGPISKQRNAHLQTALVEAAKLAPRWNPQLAAVHEQEVQRGDRNRATLAVARKLVAYLLAVDKSGKPFQIRTPATAEQEVGTAA

SEQ ID NO: 456312 - protein, 387 aa, unidentified
MAEVLGKLTAKLDAPTVSTRAQENRKGNTVSPNRDRLTVGVDLGDRWSQYCILGLEGETLGEGQLRTTREDVGEFFVGLTTARVVVEVGTHSAWVQDVITELGHEVLVANPRLMEGSKRRKRKSDRIDANKLARLGRVDPQSLYPIRHRSREVRQDLVVLRARDALVSVRTELINTTRGLVKSMGTRLPGCSSPSFAEKVKDAIPIEVGEALQPLVQLVETVNECIERYDEKIEELGRKKYGHTTLLRQVKGVGPITSLAYVLTLEDPQRFANSREVGPYLGLVPKQEDSGDCQPQLGISKTGDRMLRRLLVGSSQYMLGAFGPDSDLRRYGLRLCERGGKNAKKRAVVAVARKLAVLLHHLWGTGDVYEPLHRRETGTGIAQAAAA

SEQ ID NO: 456313 - protein, 351 aa, unidentified
MTTMTHPPSTDQMMIGGIDTHRDSHTAALLTHDGRVLGVDQFPTTTAGYQQLLEWLTGHGPLDRVGIEGTGSYGAGLAQVLQAAGIVLVEVDRPNRANRRRVGKSDPTDAIEAAWAVISGRATGTPKTRTGPVEALRYLHLTRRDAVATRARCQTQIRSTLVTAPDPIRQQLASLSPTALIRVCATLTTDHDDQVSAAVATRLRSLAREHQWLTTEITALDHQILPLVRQANPQLLATHGVGPTTASQLMITVGDNPDRINTEAAFAMLTGVAPLPASSGNTHRHRLNRGGDRQANHALWRIAMTRLATDPRTQTYRNTYRTQGHTNPETIRQLKRYIARELFPILTRTTG

SEQ ID NO: 456314 - protein, 328 aa, unidentified
MEQQLHFIGIDVSKAKLDVDVLRPDGRHRSKKFANTPGGHEALLSWLRSHNVAPAHVCMEATSTCMEDAAASLSDAGFIVSIINPALGKAFAQSEGLRSKTDAVDARMLAEFCRQKRPAAWEAPHPVERALRALVLRHQSLTDMHTQELNRRETAREVQMPSIDAHLLWLEAELKRLEKQIKDLTDDDPDLKHRRKLLDSIPGIGEKTSAVLLAYVGLKDRFGQARQFAAFAGLTPRQHESGSSVNRAGRMSKAGHVSLRRALYMPAMVALYKTEWGKGFRARLEKNGKGAKLIIGAMMRKLAQVAYGVLKSGRPFDATLHQENACVA

SEQ ID NO: 456315 - protein, 352 aa, unidentified
MAVTIVETRAEIRAITGGADTHADVHVAAALDPIGGLLGVREFPTTAAGYGRLMSWLGGFGTVAVVGIEGTGSYGAGLARHITTAGVRVVEVDRSDRQDRRRQGKSDPLDAVSAARAAQSGRARGASKGRDGAVEAIRALMVAKRSAASERTQTINQARALILTGPDDLRARFTGHTAAALVTELASLRPRPGSTVGYATRMALRELGRRAEFLDGQLERLDELIGPLVAGRAPSLVALYGIGPHTAALLLIAAGDHPERLRSEPAWAHLCGAAPIPASSGKTVRRRLNPGGDRQANHALWRIVFTRLGSDPATRAYAERRTAEGKSKKEIIRCLKRYVAREVYPHLRATVG

SEQ ID NO: 456316 - protein, 497 aa, unidentified
MRRIGLDLALRAPHRAAVFDDDRAIGRPFPVVSTKAGIDSLVERATAGTEGPCEFVMEPTGLVWMPLAAELARRGHRTYVPKPQKTYDLRKFYAKHTKTDGEDASALGRVRHVDPEGVYELKVPTAAQTTLKFLVKQRARLVANASKAKQRIRSWLQLGNPLLIEAFGDNLFAKVGRAFLRRHLDAFRVCERGLPQLRRFFAQHTRGPVDEQQLEQVWAACQESYALYAELRAENRLPFDSAALHELVILELDSIEFLEKQAGELETKITAMFRELDPDQTLLSVPGVGDVIAPTLEALIGDIERFPNINAFCGYTGLVPGTKLTGGKAKPGQRMTKAGPDLLKQYLFLAAEVARRQDPELAATYARMIARGKHHDSVIVIVAHQLARRIYAVLKQRAASRRHTSDAASEPARYKLRHSADGAELTKAEARDYVRKHYPSKHQQQKEKAAQIAPANSGSSEDAAIRMRPTSPATALASIATCGNPAESAVLNSRSHH

SEQ ID NO: 456317 - protein, 339 aa, unidentified
MDHVAIDLGARKSQICVRNADGQIVDERRWDTCDLKRYLAERPASRVVVETSAEAFGVADAARALGHEVRVVAATLVKTLGVGARRTKTDQRDARTLSEVSCRVDLPSVHIPKTESRERKTFCGMRDALVGARTKVINTVRGWLRGKGRRLGKGSRATFTVRVRAACGTELPDYVERQLRVVEMLTVEIDAADEAVEQKAKVDEICRRLMTVPGVGPLTAIRFVAALDDVSRFETAHQVESYLGLVPGESSSSERQQKLSITKAGPTALRWVLVQAAWALRTRCRKPEAIPLQLWAHRVEQRRGKRTATIALARKLAGILYAIWRDGTVYDGSRGAKMI

SEQ ID NO: 456318 - protein, 412 aa, unidentified
MEVFCGIDWAEDHHDIAVVNRDGQLLARRRISDDAAGLAQLLGLLTDCGDTAEDPVPAAIETPRGLLTACLRATGRPVYPINPMAVARYRDRHSVAGRKSDHGDAVVLANILRTDAHAHRPLPADSELAQAIAVLARAQQDAVWARTGAHNKLRSHLREYYPGFLAAFAESRGGITRPEARAILAAAPTPAAAAALTLTQLRALLKKAGRSRGIDAEATRLRQALRAEQMRQLPLVEQAMGRQALALLHQLDAACAAAGDLEQAVTESFNQHPDAEIITSFPGLGTLTGARVLAETGDDRSRFADAKGLKAYAGAAPVTRASGKTTAVLHRRVKNQRLAAAGYVWAFAALTASPGARARYDRRKAAGDRHAAAQRNLFSRLLGCLHHCLATGQPYDENTAFPPKTGNLPQAA

SEQ ID NO: 456319 - protein, 392 aa, unidentified
MYIVGIDIGKNHHEASIVSPEGKQIGRSLRFATTHKGADSLMRFIFKNIGNSPCVFGMEATGHYWYPIYSFLKAKGYTIYVINPIQSDSLRKMYIRQTKNDSIDSFLIAEVIRFGQFGTTSMADENILAMRQLCRYRDSVISSRTEIKLRIGTIMEQIFPEYEKQFSSLWVSTSMGILEKYLTPENIENTPIDELFEIIKDKSHNRLTRAKAISIKEAAADTFGIKIAQDAFSFQLKQLIDRMNFLDKQIEALDCEIMKYYEQFDCYLHTIPGIGIIGAATILAEIGDISRFKNSSALVAFAGIDPTVRQSGEFNSTHNHMSKRGSPYLRHAIFLAATTCSFHNSPLNAYYKKKRDQGKHHLTATGAVARKLTTIIYAVLRDSKPYEPKKFC

SEQ ID NO: 456320 - protein, 363 aa, unidentified
MRISVGVDLHKTQFTVAARGAETLHGQYATTKEGYAAFLEQLGRLRKRGAEVRLAVESTGNARYFKRQMAQEGYPVVVINSLKFKVINESVKKTDRHDAATIAEFLEKDMLPEAWLCDEQTEALRRLLKTRSVLVRARVTIQNQIHGMLVSIGMEDKKAGLQSKRGRQEMLDALKSAGYGLEVHALMETIDMLSERVKMLEQEIAKKVRGDRDVQLLRTIPGCGLLTASTIRAYTDDIRRFVSYKQYAAYAGLVPWVQRSNETVHYGRITKRGPEALRTAFVQLVLGMVRNRRKTGSYRLMHDYTAMKGSKSTGKAIIATARKLAKIVWSMLMEGKAFDPSSMRDRRIWEKADAMRTSIAQSA

SEQ ID NO: 456321 - protein, 411 aa, unidentified
MRLFVGDDWAEDHHDVELMDEAGRVLAKARLPEGVAGMARLHELIGQQLGEDDQDAEVVVGIETDRGPWVAALIAAGYTVYPVNPLQASRYRERHGVSGAKSDGADSHMLADMVRTDSHQLRAVAGDSPEAEGIKALARTHKTLIWDRTRHVQRLRHQLREYFPAAIEAFEDLAAPDALELLGKAPDPGRGARLTRAQVAAALKRARRRDIAGTTTAILAALRSEQLGQPAAVTAAYAATVRSLIAVITTLNEQVKVLQGQVGDHFGRHPDAEIYRSQPGMGAVLGARVLGEFGDDPHRYADGKARRNYAATSPVTRASGKKKVVAARFIHNDRLIDALMAQAQSALNASPGARAFYDELRAKGTDHNDALRRLANRLVGILHGCLKTRTLYDEATAWAHRENLPQSSVAA

SEQ ID NO: 456322 - protein, 419 aa, unidentified
MRGPLWAGLDVGVETTAICVINAAGSTVHEATCPTRLKSVHRELACLRRRKSARVGLEAATGTMLARGLRNLGYQVDLYEQRQLSKFLRLRRNKTDAGDALGIAEAGRLGAATISKVHIKNLDCQCLSSRLTIRRHLIRQRVALVNLLGRQLEVFGGRLQRRNLGSLRRNVEREISSIFGRAPNEFVAELRSLVAHCEILIDYQRKVDSELKRVASGNQICRRLMEIPGVGPLCALTFYAVVSEPERFARSADIGPYLGLTPRLNQSGLSSKTGRISKMGNRAARTLLVSSSNAFMRWATPDSDLRLWAAKVESRRGTMKARIALARKLSIVMLAIWKNGTSYRDRLMPVNDDADQRSVGLDLVQCEAEKHDLPSKTSPADRAGSGAACGFDGLSDRLGDRDESAGRRHVPELVREQLT

SEQ ID NO: 456323 - protein, 474 aa, unidentified
MQTKTRPDLQVIPMLAHESLYIGVDIGKFQHIAGFVSTTLLARFQRFEGCPALVFEQSREGFRELVDRIGAYVPIQQAYVLLERTGHYHQALQHYLLDMGISVFVIHVQRRPAGMLKSDKRDALSLANQLYSQLELGAQVADQLHLVRRAVPPTDAAAQLRGMIRHREELIMESTQRKNKLTALCDEIFPELTRVLKDPNSQTALALREAFPSPQVLATASLSALQAVRLNRQLTETKLVELQQRASVSIGVKDPPRLRGLVFEQGQLIRELKVIHEHLGQLETEVRQIVAHSREGKILTSIPPVGPIQAATIIASIGHIANFASAAKLKSYFGWAPASDQTGVSYDRARLTPRGNRAMKRMMYLIVWQAIQMKDTEWARLYERLVPRLCSYDERKQKHTGKGKVIGRLAGQITSVMYALLKKDDEMLRALAPGEIPPEPVLYDPEIHRQHRSGQYHAPSTGHQPRKIIQLPIH

SEQ ID NO: 456324 - protein, 342 aa, unidentified
MMIIGCDFHPGFQQIAYVELETGEYGERRLNHPTEAEQFYRSLAGKQVRIGVEATGGLRWFRKLMHELGHELLLGDASAIRASSPRKQKTDMRDARHMLRLLEENRFPAIWQPPMENEDLRQLLLHRCRMVRMQTRIKNQLDMMAKNEGLVSSRSWSKKRRQQIEALPLSGWHVQRRKDLFELMEELDKRIEPLDKAVLEASKQSPEAVLLMTHPGVGPVVSLAYVLILGDWRRFPRGKQVGSYLGLIPAEASSGKRQQRLGHISKQGNTLLRWLLVQAATKAQRHDPSWHRQYLRLSIQKHHGVAKVAIAHKLAVRLYWMLRSGQDYKQVKERGSHAGQSV

SEQ ID NO: 456325 - protein, 344 aa, unidentified
MIIIGCDFHPSWQMISWLDTETGETGERKLMHATGEAKLFYEGLTGPVRVGLESTGNSHWFVDLLTELGHEVWIGDAARIRASQVRKQKTDRRDAEHILDLLVKDSFPRIWTPSRPERDQRQLLIHRYKLVTLRARVKNELQHLALNQGMQKGRSLWSKEGQKQLLDLPLQFWAGTRRKNLLELLKQMDQQMVVLDQAVKKAAEENEKACLLMTQPGVGPITSLAYVLTLGDVTRFRRGKQVASYLGLIPREYSSAGKQHLGGISKQGNRFMRMLLVEAAQIAVRFDPGFRNEYLHRCHHKPKGVAKVAAARKLAVRLFWMLRTNTPYPEVVRIESSSRVPLAG

SEQ ID NO: 456326 - protein, 392 aa, unidentified
MSQHVRFDASRSLAALEQHSTIIAVIEMSQTKWLVAALVPGIERQPLKKFDANEEELLKLLHRWRHEAGQAGRNIKRIVVAFEAGRDGFWLARWLRARDVEAYVIHPTSIAVSREHRRAKTDRLDTELLMRVVLGWLRGERRHCSMVAIPTIEEEDARRPNRERQSLVTEQTRIINQIKAIFTRLGIRTVCPTKRKLAEGLEDLRTAEGTPLPQNTLAELRRHLARLGFVRDQIRAVEQERLRKLAVAPAAEKESPDAMVRLIARVFGVGVETADMLVNEIFLRHWRDRKAVARYAGLTGSPDESGSRRRERGLARAGNVRVRSGMIQLAWRFVRFQKTSALVQWFAARTADGRASTRKTMIVALARKLLIALWRLVTRGEVPQGVLLRPAS

SEQ ID NO: 456327 - protein, 391 aa, unidentified
MFLLGIDIAKLNHVASCIDSSTNEIVFSNFKFKNDFKGFSTLLDKIKTFDTKNLIIGLESTSHYGENLINFLFKQHFKVALINPLQTSHLRKANIRDAKNDNLGSLNIAKSLIFAKLNFISEKNINCFSLKKLTRFRSSLIKQRSKAKIQLTSLLDLLFPELQYLFKSKIHSKAIYSLLKKYPSAEEIAALKDDEISNLLYASSKGHFKKEKSIELKSLAKTTVGIKDTSISLHVIQLIELIELYDKQIKDIVTKIADTVDKLDTKLLSVPGISIIACAIILGETNNFNNFSDSTKLLAFAGLDPKIRQSGNFNASSCRMSKKGSPYLRYALIFTAWNIVRHSEKFNKYYCLKRLQGKSHYNSLGHVAHKLVRVIFTLIKKNIVYQEENLE

SEQ ID NO: 456328 - protein, 338 aa, unidentified
MYYTGIDLHKRTSFITTIDQNGKVIFRRNFPNVEELILDYFRNLDGPTKIVIESMCSWYWLYDLLSANNFTTVISNPLKTKAIASAKIKNDKVDSHMLAQLLRADMIATVHVCNIKTRKLKELIRHRRRLVQDSARMKNRIHMLLMKNNINIPVSDLFGKRGMKLLKEVSLPGYHQQQFNSYLALLRYLTEQIEPLTEQIRDLAKKDPMARLLMSIPGIGFLTAMTIIAEIEDIGRFPSYRNLASYAGLVPSLDASADKCRTGRITKQGSPYLRAALVEAAQAIPRTKQSRLNIFFRKRIVRAGYRKAIVATAHKILQYVYYVLKNQIFYSEEYLARA

SEQ ID NO: 456329 - protein, 331 aa, unidentified
MKILDTVGIDMSKLTFDTRIHSNQDYKEFENSKSGFSRLLKWVYKNSTFSKENILFVFEHTGLYSHQLSVYLTEKKVPFSLIPGLEIKRSLGIARGKNDKVDATKIALYSYRLRDEIELYQMPTEQVASIKRLLSLRVRIVKQRAGFKSSYKEQKRILSKKDNTTLFNVQEKTIKYLTKQIVDIEKEMMTIIKSDDKLKEQYKLITSINGVGKQTALFMIAYTYGFTKFKTWRKFASYCGIAPFPNSSGTSIRGKTKVSNLANKKIKSLLDLCAKSAIQYNPEMKVYYNRRVDEGKNKMSTINIIRNKLLARIFAVVERQTPYVDIIKYAA

SEQ ID NO: 456330 - protein, 416 aa, unidentified
MMKHEKMTYTYVGVDLHKSTHTAVFLDCFWEKLGEITFENLPSKFPQFILDAKAFQQEGTTLLFGLEDTNSYGRTLTTFLTDNGWEVKHTNALLVARERKNQNITHKTDSVDAECAARVLLSKLGTLPAADPQDHYFILRTLVVRRDNLVKSNTRMKIYLHSLLTQHYPNYREFFTYIDGKTALAFFKTYPSPWTLENVTIEELTEFIADISSDYYGADKAEFIKNSCEDTAVQFQEIRDMTVQSTIRQIEFTLQEIENVEKSMAVHYDSFDCTLTSMAGIDVISACQILSCVGDIKRFPTPAKLARYAGIAPVTYASGKKDLQFSNQRGNRELNSLFYRLACRVTSPVSVHRKLINQFFYDYFHKKQSEGKTKRQAMKCVERRLVNIIWTMLDRNEEYVNPPVFDAPEKEEEKRV

SEQ ID NO: 456331 - protein, 338 aa, unidentified
MKYKRIAIDTSKHVFTLHGVDEQERPVLRRELRRSQMEAFFGKQEATEVVLEACGGSHHWARVLGQLGHRVRLIPPQYVKPFVKRAKNDRNDAEAISEAASRPSMRSVAVKTVTQQADGIILKHREMLVGQRTQAINALRGHAAEFGVVAAKGTANIAALLIELAADAMIPATARAMFEQMAAHIETLDSRVAAVDAELAALHKANPLSQALAEIPGVGPLGAITMALTVEPTNFASARHFAAWLGLTPKEHSTGGKQRLGKISKAGNERLRQLLVVGAMAVIRFAKPGSKSASAWLLKLLERKPRKLCAVALANKMARIIWAMMARGEAYRRKPVAA

SEQ ID NO: 456332 - protein, 447 aa, unidentified
MTHRIGPSRGDRRRNARKARLRGLIPREFAIVGVDLADRKQVFAVCDHDGGVHGRRSVNKRAWQLDETLRWAKAAAVEAGFAGVVVACEPTGHRWRVMLDQCDELGLTMVCAPPMLVHREREREDLTPDRSDAKDAVLIAGLAAQLRCYEPERPTAQWARMRHLGARRSELTTACGVVRQRMRSLLECVWPAALATAADPLASMTWRATMAVICARSVDGDPAAIRRMGWPRFQAAVRRELPRWGGHRVTWTIARELWDATTDPTGVIVHRHGALERVADALTDWQRLRVQRGAVEARMVHLLDELNLTSLVTTIPGLSAVGAAAILAETGDPHRFDSGRAVVKHAGLAPRDNESGTFKGTSRVSGRGRPELRLAVWRAVWGALPHNAVLSARHHHLRTREHNRLTDHQARVAVAGSLLRQLHAVIVGGVAWDARTAAGRQEVIAAA

SEQ ID NO: 456333 - protein, 356 aa, unidentified
MLNKFNKFVDFSGHNVYAGLDVHGKSWTTTIIVDDIEHRRFNQPPEPMALYKYLSSHFPGANLFSAYEAGFCGYHHHRKLIELGIENIVINAADLPITNKEKVNKNDHIDSRRLAQALQRNELKAIYVFGPEHEQFRSLFRMRWTAAKEHRRAKNRIRSFMYYYGINPPSEFNPEHWSLGFIHWLDLIIMPTQAGTLSLKSLLKAYHNTREQLLEITRQLRQEVKLHYPELYKLLMTIPGVGPIVAMCLIAEIGDITRFKSYRHLSSYAGFIPNSHQSGEKDPKGRLTYRSNKYIRSMLVEAAWVAMRHDPALLKYYRERIAGKESKYIIIKVAHKLLNRVRQVWISQNPYQAGLA

SEQ ID NO: 456334 - protein, 410 aa, unidentified
MTKEDFIYVGIDLHKETHTAVMIDCYNNKLGEITFPNRPADFPKLVTKVKKCNTDAKEVVYGLENAYGYGRALAVWLIDKGYFVKDVNTAISHRQAKHRGAMYRKSDSDDAEAIALATLNMLDKLPDACPNDAYWSLGQLVHRRDNIMKQRTRLVNQLHEQLCIAYPSYKQFFNDISRPTALYFWEHYPSRKYLKGKSVEDLRAELVPVSHNKCSTRTCEKILDAIAGDKVKNNAYQDARDMVTLSIVSDLQHYDKQLAEVDKMLEQMYKMLGCTLTTIPGVNVITAVKILAEIGDIKRLSNANKLAQFAGIAPLHLSSSGKGKDLATKQGNRRLQATIYFLAIQMVQVSSKGTPRNSVVRAYYEKRKAEGKTSQQALICISRRLISIIYGMLKHGTEYRMPVVESAGEK

SEQ ID NO: 456335 - protein, 453 aa, unidentified
MMRYIGLDVHKHFIEVCITDRKGKILERGKVNCQRDVLLEFATKKLRKHDRVALEATTNTWAVVDLIRPHVKQVVVGNPMKTRAIAEAKIKTDKVDAEVLAHLLRCDYLPSVWQPDEPTQTRRALLTHRNGLMSRRGRHMNRVQSMLARLMIKPPCKYLWSKTGVAWLETLELSPVDRLMLDSQLRQITQVNQELEIVDQRLVEIARNDSRVRLLMTLPGVSHVVAVGLLAAIGDIERFCDGNHAASYLGLVPSTRQSGNKCYHGRITKMGNPHCRWLLTQACQHVSRHPGPLGAFYRRLVKRKPRQVAIMALARKLVTIAWQMLKQNEPYRYAKPMLMAKKFTDLDRKYRQEQRRTPSAARAKAGDGLTAVYDEIGFTDSLSLNQVPDGERRMLIEKDVMMFVEELYRPVKKDKSTRSDKCMSRDRPDGLIPAHAFFLSIANRNAEKASLDF

SEQ ID NO: 456336 - protein, 343 aa, unidentified
MTKVTTVGLDLAKSVFQVHGADAQGRPIMRKKLRRAQVIAFFADLPPCLIGMEACASAHYWARELRALGHEVRLIPPQYVKPFVKTNKNDAVDAEAICEALLRPTMRFAAVKSAEQQSVLMLHRARELLVRQRTMLINALRGHCGEFGLVAAQGASKVAELIEVIEDPEDERLPALAREALGSLVEQLRVVQAQILGLEKKLLVWHRANEASRRLETIPGVGVITATALVATIGDASQFHSGRQLAAWLGLVPRQHSSGGKERLGRISKRGDGYIRRLLVHGARADLRWSRHRKEQRSLWQQSLLARRPTNVVLVAMANKTARVVWAMLSRGEAFRTEPLASV

SEQ ID NO: 456337 - protein, 341 aa, unidentified
MNTTLIAVDLAKDVFELACANQASRIVDRKRLNRKQFHRFCAQHPPVTVVMEACGTAHYWARELDTMGHTVRLLPAQYVRAYRRRSKTDRNDADALVEAARNPEILPVPVKTVEQQCIQTLHRCRSQWLATRTARINALRGLLRELGHPLPLGARAAITGARACREVVPTVLQPAIDALLDEIATLETRMADIEAALARHARDSEPVQQLLSVPGIGLLTATALAASAGSPGYFRNGRHLAGWLGLTPKEYSSGSRRLLGSISKRGDGYVRMLLIHGARAVLNRAKQLHRAGQSLSRLQQWVVRLEQRVGHNKAAVALANKLARIAWAVWLRSTPYQATSI

SEQ ID NO: 456338 - protein, 344 aa, unidentified
MLYVGLDLSRKRLDWQALAGDGQRVEIGAVPPDADGLAKLTQRLGDADVVAVIESMSGSRFVHDRLELAGWDVRIADAAKARGIAPLACKTDTIDTWVLAELARLELVPEIWLPDPEIRAERERARFRLHLVKHRSALKNRVHAILFQHGVANPLSDLFGAAGRVLLERLRLPEPWTSTVGASLALIDVLDEQISACERELRELGAEHRYIPLLLSCPGIGWVLAFTIASEIGDIARFPSPRKLVGYTGLCPRVDQSGERDRRGPLRKNGPNHLRWALVEAAHTAYRHPLYRPLLERKRAQLGKKRGTKIAAIDVARKLTEAIWHMLTRNEPFAPAGATVSLAA

SEQ ID NO: 456339 - protein, 391 aa, unidentified
MVNNSLIGKSGVGEASEASRANTRRRREIGRVQVREAVTEQDPRRHRGTSPNSRLNRRRPTRTASSYLQVREKTMSEPVYVGIDVAKETFHVATLPNVLKTQLPNTRKGHRQLSQSLKNHTIALIVLEATGGYERPLTAELLSDSLPVVVVNPRQVRDFAKGMGQWAKTDPIDAQVLARFAQIVKPAPKTHSTPQTAELSELVRRRRQLNDLRTQESNRLLMIHHPKVKKSIQKMIKTLNFQIDEIDRLIREHIDSDANFKNKDRILRSTPGVGPQTSAMLIANLPELGKLNRQEIAALAGLAPWDRSSGKSNSKAHIWGGRKEVRSVLYMAAFTACRFNPVIRALAERLKQKGKAYKVVITACMRKLLIILNTMVRNQTLWTPEKSVKNT

SEQ ID NO: 456340 - protein, 348 aa, unidentified
MKILALGPGKFKSVSCCFDTEQQATEFWTLTTDHTYLVAVLQQYQPELVVIEACSIAAWVHDVCRELGFQILVCNPNQEAWRWKNVKRKTDRDDALKLAKLAALGQLIPVHIPAAGTREHRWLVKYRKTIIGRINRTQNILRALYQQHGLHLPVGARCWTRGTLEAMYAQSKPLAECGREELWRGQLAQELAVYQQLQSEMKMLEAKLTALAEQDERIRLLQTIPSVGRVTAEIIATHLDRPERFSSARQVSSYAGLVPRRYQSGLMDRQGGITRRGSRLLRSALVECAWVMLRYNDWAREQYLRLCRGQKNRKKKAIIALARKLLVRCWAMLRDRRSWRKPELEQTA

SEQ ID NO: 456341 - protein, 337 aa, unidentified
MDYFAGLDISMDETHVCVLDREGVVVRESKTESTAQAVANELAKAPSCRRIVFETGRMAPILFHGLSQLGFPVICVESRQAYQALKSLATHKTDRNDARGLAHLARTGFFKPVHVKSLPAHAVRSLISARKKLVGQRVTLENQIRGLAVVFGIRLPRALTAAFVNQALKASEGIAGLSAAMRGLIAARTAVMTAVAAIDVDMRRMTRASGACRRLMTIPGVGQLTALAFVAAIDDPSRIRRSREIGAYLGLVPRRYQSGEVDYVGGISKWGDRRVRTLLYEAANVILTRYKGQLKLKDWAFAIARRSTMRKARIALARRLAIIMHAMLRDGTEFAPA

SEQ ID NO: 456342 - protein, 414 aa, unidentified
MKQQEVAAWIGLDWADKKHSIHLEVREGKREHRMLEQKPGIIHEWVAELRQRFQGQRIAIAIEQRKGAVVHALMMYDFIVLYPINPKALARYREAFRTSGAKDDPSDSELLLDLVSKHGDKLRAWIPDTVVARKLQLLCEQRRKIVNHRVALTNRITSLLKQYFPQAIEWVGDVASIQACDFLSNWPTLASIQRARKETLRKFYRQHNCRKASVIDERISQISNAVPLTNDAAIIEPLSLSVQIYAVQLRSLIRAVQQFDKQIVETFAQHPDHDVFDSFPGAGQVCAPRLAAAFGTDRSRWQSAVEMQSHSGIAPVTERSGDSKWIHHRLACPKFIKQTFHEFADQSIRFSKWARVYYDQMRARGNDHHAALRALAYKWLRILFRCWKDGKPYDEEKYVKALRQRGSALIEKFA

SEQ ID NO: 456343 - protein, 408 aa, unidentified
MTVVGIDVSKGKSMVAAMKPGGELVAAPYEVRHSDIELSHLALDVLCMEPDTRVVMEATGRYHEPVAALLHSEGIFVSILNPLLIKQSGAGSLRKVKSDPKDALKIAKYGLDNWSTLREYTPMEAIRQQLKLCARQCDLYNKNIVMLTNNLISLSDKTFPRVNELFSSPEKADGHLKWVDFYRSFWHCDCINRMSPDAFEERYKKWCKRKGYHFSTDAADALYAASCGSHTTLPRDNNAKLLVTVAADQLIALRENQSKLEAEMLNVCKQLPEYETVMAMYGVGKSTGPHLMAELGDVRRFPHRSSIVAFAGVDPGVVGSGKMRLSSVTTSKRGSPQLRKALFQVVSTYVKCKPENEAVYQFYAKKRDEGKPFFVCTTAAANKFLRIYYARVKECLNAAESATQVEEG

SEQ ID NO: 456344 - protein, 343 aa, unidentified
MVTNYIGADVDCRMTELAVECKGKIVARDRVPTDIKSLSNFLGSIGGKKEIVVEEGPMAGWLYRNLRGKVDRFVVCDPRRNKLISCDGEKDDAIDARDLAALLRGGYLREVYHTDDEDRLALKEIVALYHDRVRDAVRQINKLRGYCRCHGIEIPGRIVKQPSLRGLWLKDVEPAIAKQLSIMWIGLDTVAKQVRMIRKEISRRSKAYPIIGFWKDLPGIGPIRAVTLFAYLDCPGRFANPKKLWKYCGIGLKRFTSGSDKLGQPRPGKLRLFRQTNHKLKDAIMGAALSAIGQSKNPFADHYKRMIQNGVTPSNARHTVARKILTVMWGMWKTNCRYDESLV

SEQ ID NO: 456345 - protein, 365 aa, unidentified
MKIMHWIGIDDHADKWTIAHFTGNEEKPTKEFELVPDEKGYRSLIRWLKELAGEVRIVYEAGPCGFELYRRLTEKKLKCEVAAPTLTPQKPGERIKTNRRDAKKLANYLRSNQLTMITVPDVERESLRDLIRSRQSVQKDVGRLRRQIVHLLLRYGHRFRDGQAWTVRFWVWLRTIKLTGEYSSFVLNDKIVELEHRIEQLQRYDDQIESAASEEEYQPYVAALRTLRGVNTLSAMTLLAELGDLRRFATAPQLMAAVGLVPSEYSTGDKTNRFAITKTGNAHVRHIAVEAAWQYQRRGTSGARIKARRKGQRADVVAIAEKCDARLNRRFNRLTSRHKKSTVAVVAVARELIGFIWAIGQLVHP

SEQ ID NO: 456346 - protein, 389 aa, unidentified
MPTEVDRAETPIAIQTHFAAIFISLELSRSVWLITSLKPGGGERMSKHSVRAGDVAALLSRFSDLKQKALARTGKSFPLVTIQEAGLDGFWLHRVLKKEGIESHVVDPASIATSRRRRRAKTDKIDGEALLRALLAYKRGEPRVCAMVKAPTPEEEDRRRLSRERKVLIAERVEHVNRIKGLLFTQGIADYKPLRRDRRQRLEELTTGDGRPLPTHLKTQITRELDRLELLIDQIKLTEAERDALLAAQQNTSPAPAGRMLLDFKGIGAEFAVVLWLEGLFRHFDNRRQLAAYAGLAPTPWQSGSIDREQGVSKAGNARLRTTLIQLAWLWLRHQPHSALSRWFHERVKRDGGRVKKTTIVALARKLLVALWKYVTTGVVVEGAIMKAA

SEQ ID NO: 456347 - protein, 347 aa, unidentified
MLADQVDYVVGVDPHRDSHALAIVHVLSGAVVFETTIAASSQGYAEALQLVDAHALGRRAFAVEGSGSFGAGLTRFLTGRGERVLEVSRLRRERRSGGKTDALDAVRAARSVLGLERPATPRAGGERQALQALVAAREGAVNAKCAGLAQIRDLLITTPEPLRSELRPLTQAPLLRRLAATRPEGRRDPELRGSMLALRSVARRVLQLQAEERELGRQIEALTRKLAPQLLDQPGVGPHAAAQLVLSWSHHGRIRSEAAFARLAGAAPIPASSGQTVRHRLDRSGDRKLNRALHLILVTRKRTHPPTRAYIERRIQEGKTRREANRCLKRYLARSLYRLLEHPPLPA

SEQ ID NO: 456348 - protein, 331 aa, unidentified
MEHEQTWWVGIDVGAQDSQVVHGPAPDKLSKAFSIAQSEAGLKALDERLVQAGAVREATLVVLEATGTYWMKLATGLHGLGYQVSVINPKQAHHFAQALLKRSKTDAIDAHTLAVLAATLRPAAWNPPPAIYEELLQRLTEREALLEMRQQERNRLHALQQRPHVVKAVQQRMQAHLKFLDGQIQAIETELKQALKQDAAWEHAAKLLRSITGIGLMSCTWLLTATVNFSACSRPDQVASYAGLVPRFHQSGSSLHAPPSIGHSGHAALRSALYMASLSAAQHNPLIRPYYQRLLARGKSKKVAHIAAARKLVHLAWAVVTKDCPFQAPVI

SEQ ID NO: 456349 - protein, 341 aa, unidentified
MEGLYYIGFDIHKKTISYCVKKVDGIVVQQGKIAAERKALHEWMAGLRGPWCGAMEATIFTGWVYDFLKPHAVDLKVAHPEMLKAITAAKKKNDRADAEKIADLLRVNLLPECYMLSEALRELRRILRYRNMVVRTAVKMKNKISGLLMETGAIYSKRRLHGRKYFDDLLERVEDVPESVKGMLKLSRSSLEMFGAIQKKLVKTLREDKLIRERVQRLMSIKGVGEVMALTWVLEIGEPSRFSSARQTISYCGLCSAQRESGGKEQRGPISKKRNKHLQAMLIESAKLAPRWNPQLAALHEKELSRGNRNRATLSVARKLVEYMLAVERQGKDFEPQQMAA

SEQ ID NO: 456350 - protein, 350 aa, unidentified
MQDIAFDSHKRYTQASVSSMTGTIQREARVNHEPGSVVAFLREFDPGSPVAVESLGNWYWIVDEIEAAGMVPRLVHPRKAKLMMGMINKTDKLDARGLNRLQQSGTLPAVWIPPGDLRDKRDLPRTRMLLVQQRTRLKNRVHATLAKYALGSTGVSDAFGKRGQEVLREQVAKLPPETQFVTDRLMEEIASLAAHVDAMESRMKALFAETPELKFLRTLPGIGFILSTVIALEVGDIARFPTASQLASYAGTTPRIHSSGGKTRFGPLRTDVNHYLKWAFVEAANSISRNARRWPDRHVVRLYCRVRTRKGHQKAVGAVARHLAEASFWVLKKGEPYLEPTPPAVSSMEG

SEQ ID NO: 456351 - protein, 365 aa, unidentified
MKTIAYVGVDYHLNFLSIAVMVKGEKEISETIRLKNDDKIIAKYLKKLSEKLELKLCYEASSNGYAFQRKVTSWGYHCDIIAPSLIPKKRGDRRKNDFRDARDLTQLYANGLLTVVHPPTEEQESIRSLIRCRLALKKSEKRVKHQINFLLLGQDYHWPRSKWTQQHRKWLGELEMPDKYLQLVLNEYLGHLEYLETRLHYLDEQIEELARSDIYAPSVKKLRAFKGIGTLTAMLLITEITDFRRFPNPRALMAFLGLIPSENSSGDKRKDGSITKAGNSRCRKHLIESVQHYVKRPHLSKEMKDNLSQVDAHSATIAINCLKRLHKRYWSLTMKGKIRPVALTAIAREFVGFIWAMMQPEPLTA

SEQ ID NO: 456352 - protein, 408 aa, unidentified
MKTLHKRCAGLDVHKAEVVACVRLISKRKVEREVRRFPTTTQGLLALAEWLESAGCTHVAMEATGVYWKPVWHILEGRFALILANAAHVRNVPGRKSDVNDATWLADLLAHGLIRSSFVPPPAIQELRDLTRTRRQLTREIVQHVQRIQAVLEEANIKLCSVITDIMGASGRRMLKAMIAGETDAEKLAALGHERLGCTRAELVEVLTGRVREHHRFLLGQHLRTIEQLKDSVAAFDARIEAALSPFHDIVERLEEVPGLAATSTETVIAEIGTDMSLFPTAGHLLSWAGFAPRLDESAGKHRSTRIRKGAPWLKPVLVQAAWGAARKKNSYFQAQFLRLKARHGAKKAAIAVAASILTTVYHMLRDGTCYQDLGPEYFTRRNPAQAAARLANRIRNLGYHVEIRAAA

SEQ ID NO: 456353 - protein, 338 aa, unidentified
MDTSKHFFQVHGVDASERPVLRRKLRRNELLTFFAKLPPTVIGMEACGAAHYWARELGKLGHKVKLIAPQHVKAYIKRNKNDGRDAEGLCEAMSRPTMQFVPVKTEEQQAALMLVGVRQQLMTRRTQLSNAIRGYAAEFGVITAKGLVKVEPLLRQVAQDESLPALAREMFAVQGRDYARLQVELKAVEARLMAWHRANADSVRLAKIPSIGPIGATALVMKVPDPGLYPSGRHFAAWIGLTPKDHSTAGKTRLGKITRAGDEMLRSVLVAGATSVIQQARKGRGRPSPWLVALLARKPPKLAAVALANKTARIAWKLLTTGESYDGARMPLASNSAA

SEQ ID NO: 456354 - protein, 358 aa, unidentified
MQGQIKQLDFSGQNIYAGIDVHKSSWQVPIMSEDLYHKTFNQPQDPEVLHSYLCKNFPKGNYFSVYEAGFCGFWIHEKLQSLGIKNIVVNPADVPSTDKEKKQKTDKVDSNKLAKQLRRGNLDGIYIHKRSLLEDRNLIRVRHTLVKDLTRYKNRVKSELYFFGIEVPEQYNRDASYWSNPFLNWLAQVEFQQSSGNDSFRILINQVIVLRSQLLEVNRKVRAMALTDFYRQKVPLLRTIPGIGITTAMIILTELEDINRFKTPEKLRSYVGLTPTSRSSGEKQVHGDMINRGNSFIKSTIIESSWIAARLDPVLHKDFINYFKRMNKNKATVRIACKLLNRIYFVLKNELPYSNGIN

SEQ ID NO: 456355 - protein, 402 aa, unidentified
MDIEDIEVFIGIDVGKAEHWATALNQEGRKVFDRALPNDEDRLRALYEKLASHGSLLVVVDQPATIGALAVAVAQDMGITVGYLPGLSMRRIADLTPGSAKTDAKDAAVIAGAARTMPHTLRAVSTSDEDAAALSMLTGFDLDLARQVNQTANRIRGLYTQIHPALEAVVGPWLEHDAVLEVIAAWPTPAELKRAGKARIDARLKKHGCRRHAAWAAQIVSALERQSVTVAGTDAAGMVLPHLARQLIALHAQRADIAAQVETLVQAHPLYQVLTSMPGIGVRTAAVFLAETLGKTFDTGAQLASYSGLAPVTRRSGSSIRGEHVSHGGNKRLKRAMFLSAFASLRSDPVSRAYYQRKRDQAKRHNQAVLALAHRRILTLHAMIRNGTLYDPQPATKLPSAA

SEQ ID NO: 456356 - protein, 417 aa, unidentified
MGSMKKCCCGVDVHKSFIIAVIATFKNEEVTFTRHMRFSTFTKGLREFKEWLRRNNCYDICMESTGKYYMPVYRIVSDEQFHVDVVHPKYVRAPRGKKNDKRDAKRIADMYMRDHIAEYSIIPPAEILAVRDITRYRRKTVNTITAEKNRMSNCLTVSCIKLDEVLSDMYGKTGKALIGQIIEHGGCNFAPEPFIDRRVKAPVEAFKEALDGDVTPATLIKMKLIQTRLDYLEKQKAELESTMESLSKDFNRQIEILVSAPGIDILSATTIISEIGVDMNVFGSVKKFLSWIGLVPQNNESAGKKKSTRIGKGNHWLKPVIVQCANAAKNDKNHPEIRDKYLALKKRRGYGKAIIAIAKRIMTAVYYMLLRDEKYNPQTCVDRAPARGKISLQNLVNYYNSKGYTVVTDDGEVLQTA

SEQ ID NO: 456357 - protein, 441 aa, unidentified
MISISPPVPLEQSEFAAFVGLDWADQKHDLVLYDQRGGRPEHRELIQTPEAIDEWACGLRQRFGGRPVAVCFEQSRGGIAYALLKYDFLVLFPLPPARLASYRESFSNSGAKDDPTDAALLVDYLLRHRDQLRVWQPDTPVTRELQLLAEARRDAVDQRTRLSNQLTAVLKRYFPQAIELVGHDVDRPLACDFLSKWSTLAAVQAAAPTTLRKFYYAHHSRKEERIIERLELVKSAIPLTTDLALIQAGVLQVQCLIGQLRALARAIEKYEARLSELMDQHPDSVLFRSLPGAGPALAPRLLVAFGSDRERFQSAEELQSFSGVAPVTKRSGKQCHVQRRWACPRFLLQTFHEFAHCSCKRCTWAKAFYLQQRAGGKGHNAALRTLAFKWIRIMFRCWKTRTPYSEERYLESLRRRNAPLLAFLPTSPLVDNPSIPGTQHA

SEQ ID NO: 456358 - protein, 372 aa, unidentified
MSKSIRYVGLDVHADTIAVAICEGRGEGRSMGTIPNRAEPVRKLIKRLEPVSTLRVCYEAGPTGYALYWQLTALGVKCEVVAPTLVPVKAGDRVKTDRRDAEKLARSYRSGDLTAVWVPDAAHEALRDVVRAREAAKKDELRAKHRLGKFLLRHGRRAPEGTKAWTGKYWTWVNTMRFDFAAQEATLLDYRTEVERAADRIERLEKAIDEAVQEAPAQMKAVIEALQALRGIAKITATTLVTEVGNFSRFTRPKLLMGYGGLVPSESSSGASRRQGGITKTGNAHLRRVLVEAAWSYRYRPRLCGPQKKRQQGVSEEIKAISWKAQQRLHQRYWRLTSKGKLPGKAITAVGRELIGFIWAVGVQAEREAAAA

SEQ ID NO: 456359 - protein, 405 aa, unidentified
MQNVYERCCGIDVHKKLIVACFRNGKKAELRKFDTLTSSIKELGNWLLDNECQMVAMESTGAYWKPIYNILELLNLDVMVVNAHHMKNVPGRKTDVKDAEWIAELLQHGLLKASYIPDREQRELREIVRYRKNLVEERSREINRLEKTLEGANIKLSSFVSDLTGVSSRNILQLALTGEVNEENIENLMHPSMKATKEQLFHAMDGVLSPVQKKLVSAILDHIDDMTRRIQDLDKIIDDQIRDHENAIKNIDELPGIGKRSAEIIVAEIGTDMNRFPSAGHLASWSGLCPGNNESAGKRKSGRTTKGNKYLKSTLIQCAKAAIKNKDSFFHAQYQRLVVRRGANRATVAVAHSMLIAIYHVLKDGVPFKDLTSDYYTKFNTEAKARYYLRKLQDLGMSIPVSLAT

SEQ ID NO: 456360 - protein, 349 aa, unidentified
MLADEVDYVVGVDTHRDEHVLAVVVAPTGVVVAQRSVAASGSGYAQALRFADEYASGTRVWAVEGAGHYGAGLARYLSGRGETVLEAARSPRGERRLRGKDDGLDAIRAARAALGNDGLAVPRAGQQREALRLLLVARRGAVDVRRQALVQLRSVIVTSPEQLRHELRRLPQQRLLERCGRLRRSSSRTPDELASVLVLRTLARRVQAATAEAAELETEILTHVRALAPQLLDEPGVGPIVAAQLIVAWSHHGRVRSEAAFARLAGAAPIPASSGQTTRHRLSRGGDRQLNRALHTVILHRRLHDPDTKAYITRRVAEGKSRRDAVRLLKRYLARHLYRLLQNQEPLMA

SEQ ID NO: 456361 - protein, 412 aa, unidentified
MEVIIPNCAGLDVHKETVEVAARWVDAEGKARLEVRKYGTFTRQLLELADWLKGLGVTHVAMESTGVFWKPIYNILESGFQVLLVNARHVKNVPGRKTDVKDCQWLAQLLQHGLLRASFIPPREQRELRDLTRHRTQLVSEKARVANRIQKTLEDANIKLASVATDVLGVSGREMLAALVAGETEAAKLSDLARGRLVSKKGDLEQALTGQVSEHHRFLLRILLDQLAEVEGLIARLESRIEEKCRPFEAVVEVLDEVPGINRHVAYVLLAEIGTDMSHFPDAAHLCSWAAMCPGNNESAGKRKSGRTNKGNRWLRTTLVQAARGASRTKKSYFSAQYRNILRRRGKNRAAVAVGHSLLVVYYHLLSTGECYQDLGHDFFDKQNSEQITRSLVKRLERLGNKVTLEPAQEAA

SEQ ID NO: 456362 - protein, 447 aa, unidentified
MKTEPEEIPDADHELIIERVAAIDVAKASGKVCLRLPRPGRPGHRVSRVWDVEATTAAVCELADHLVAGQIERVTVESTSDYWRIWYYLLEAAGLSVQLVNARDVKNVPGRPKSDKLDSVWLAKLTEKGLLRPSFVPPAPIRQLRDYTRLRVDLTRERSRYWQRLEKLLEDALIKVSAVASTLDTLSVRDMLEALIAGERDPRRLADLARGRMKTKRAALIEALTGRFDDHHGELARMLLDQIDALSGQINTLTIRIDQLLATIANEVPGHDDGDSGAGGQPSADLTVVQRLTEIPGIGPTGAQVILAEIGLDMSRFPTAAHLVSWAKLCPRTIQSGAIQRSGKTGKGNPYLKGALGEAAAAAAKTNTFLGERYRRIVKRRGKLKALVAVARSILVIIWNLLSDNHARFRDLGPDYHATRINTERKLRNHIAQLAALGYHVTVEPAA

SEQ ID NO: 456363 - protein, 343 aa, unidentified
MKHYAAIDVSLELSSVCVVDASGKVVKESKVETHPDALVKFFKDLGLPLALIGLEAGPLSQWLHAGLRQAGFETVLMETRHVKKALSASTVKTDRRDARGMAQLLRMGWFRPVHAKSVGSQEVRALLVARKQLQHKLTDIELSIRGILRGFGLKVGKVTKTEFEKRIRELVTGHAMLTQIAEAMLSARNTLLIQFNKLHKAVLVIVRGDEVSRRLMAAPGVGAIVAITYKSALDDPSRITKSKNAGPLFGLTPKRYQSGETDVTGGISRVGDEMVRTALYEAANAVLSRRTRFSALKRWGLAVAKRRGNKRAKVAVARRLAVILHRMWIDGTTFRWTKTEAAA

SEQ ID NO: 456364 - protein, 460 aa, unidentified
MILRMGIDIAVRAPHQASLADERGELVWSGHRFRTTATDLEQLWERLPVGSEPAQVTIVMEPTRNAWVPLAGWFRRKGAHVVLVSAERSADLRAYYAKHTKSDRLDSVLLARLPMLHPEGLHPERGLGPGDPLRRATKLHSTLVKRRTTSLARLDALLEILGPDWHQAFNADLANKTPLRFLAAGYADPHTVRRLGRSRLARFLYRHSRGAFGEALADQILAAARASLDLWAEELSFPELAEDIAVEARLALALTEEIKEVDERIAVLVCDRDPQGVITSAPGVGAVTGAVILGRLGDATRFSSLAAARSFSGLVPSLDSSGVSGRHGGPTKHGDALLREALFISANQARRIDPTLAAKYHRLMVQSGKHHNSAICHIATTLLTRVVACWKNRTPYQLRDIDGRPVTKAEARAIIAERYRIPADIRRARTTTGTSRRSKESQRAPSTGPSNTQAKRPGAA

SEQ ID NO: 456365 - protein, 326 aa, unidentified
MQGKELSKQETTTKSSVGIDVSKSWLDAHALPSGDTLRVANTCEGIRRLKRWLLRFDPALVVVEATGKWHRHLHRSLHASAMPVAVVDPFRVRMFAKAQGIFAKTDRLDARVLAQFAAVMNPAVRAPAPEVMQELAELVQARDSAVAEETALKNQLSAAAGTFLKRQLKRRIERIAKDIAALADEILRRIEADEGLVRRHTILTSIIGFGPVVAATLIACLAELGTCSRRQIAMLAGLAPVADESGERQGVRVIWGGRSGVRRILYLAAVSAARHDPGMKAFFSRLTANGKPAKLAIIAVARKLVVLANTLISENRLYTPQPPQYA

SEQ ID NO: 456366 - protein, 348 aa, unidentified
MKKYFCGLDVSLNSTAVCVVNQDGDIVREGEVPTEPAAIHEWLGKLGLAMERVGLEAGGLTPWLCHELLSLNYPAICIETRHAKAALKAQQVKTDRNDARGIAHIMRTGWYREVHLKSHVSQKLRVLLNNRRCLLDKRLDIDSQIRGTLKVFGMKTGKVTIRSYEPRIRELIGDDQELQAYIFPMLAVRRELIVQMMKLEKMILDHVRDDEVCRRFMTAPGIGPLTALLYKTSIDRPQRFARSKAVGAAVGLTPRKYASGEVDYDGHITKCGDAFLRSHLFEAATVLLTRGKPSALKAWGLRLAKRSSKKKACVAVARRLAVILHAMWRDGTEFRFNQPGVDALAAAA

SEQ ID NO: 456367 - protein, 310 aa, unidentified
MGKEIIEFEQHVERGCGMDVHKETVVATVSGQGIKTETRTFSTITSSLKSMAQWLKKNGITHVAMESTGVYWKPVYNVLEKDFEILLVNARHIKNVPGRKTDKADSKWICKLLRSGLLKGSFIPPQDIRELRDLTRYRRKLTEQIAAEKNRIQRILEDANIKLSSVVSDIEGVVATRLIEGLLCGENVGELVKEHYHGKLSASREELKEAITGFFTDHHRFMITTIKSHIGYLEQQIDQIDTEIDRKVEHCRELIELLRTIPGVGKEGAVGIIAEIGTKMDVFPDEHHLSSWAGMSPGNNESAGKKKVQE

SEQ ID NO: 456368 - protein, 309 aa, unidentified
MIQTTIGIDISKDYLDAHRLPDGTAQRFSNDKKGCRALVAWIGRDRVTRVVYEATGAYHRLLESLAGQAGLPLAKVNPRQARRFAEAIGVLAKTDRVDAAMLARMGVALQPPQTPPADERLGDLKDLHLARRALVKDRTAARNRQKTVRLPLIKRQLAQRLRQIETQIKAIDAASNQLIRLDPVLKRRADILISIPGISNLTAATLLVEMPELGTLDAKQAASLAGLAPVTRQSGTWKGRAHIRGGRATLRQALYMPALVATRFNPDLKAKYAILINAGKPAKVAITAMMRKLLIIANALLRDDRIWTA

SEQ ID NO: 456369 - protein, 401 aa, unidentified
MKQQTYVCGLDVHKDNVYAAIYNGKDRSDVQVFGTFTGQIAQLIACLEQNAVKQVALESTGIYWVPVWNMLEKKGFQLTLVNPWFIKQMPGRKSDVKDAQWIATLLYKDMLRKSFVPPQQIRVLRNYSRQYVKLQWNASRVLLELAKQLELCNIRLTSVFTKTDSVSIIRVIRLLITGCNNTEELLQCISPVIMKRKGHLVRAALQGYIREDSRFILKLLMQQYDLLNQQLSETEGQMLQICNQHYGEQLQLLQTIPGIKEQSAMQIISETGGDMQAFESSSKMVGWAGLRPGNDESAGKIKSTKITKGNRYLKRILIQTSWGASRTKGSAFKIKFEQLAKRISRKKALVAISRRQLTVIWNVLSNKEPYKVNYDSVATAQQIETQLKYHQRMVNQLKNLQ

SEQ ID NO: 456370 - protein, 425 aa, unidentified
MPYRIAGIDVHKKMLAVVVADVEVDGDFHFTRQKVGTTPTDLRALADWLVEQEVEEVVMESTAQYWRPVWEALEQHWRPRRRAREGASRLSGTLHLAQAQSNRGPGGRKKDFPDAERLVKRLVAQELTLSFVPDAEQRLWRTVMRRKYQVTRNRVQLQNRLEALLEEAHIKVSSLVSDLLGISARRMLQALADGETDPAALAALAAPRLRATAEQLCDAFTAAPTLHPVYRRLLKLTLEDLRLIEDHLGQLDQQMAHLLAAHHEAVQRLAEVPGLGVDSAQQIIAEVGATAVTFPSPKHLASWMGACPGNEESAGVNYSHRCPKGNRQMRRVLNQAANAAVKARGSIFAVAYRRLVPRLGHAQTIGAITPRLCRLIWKILHERVRYEERGPAVSAEAKKVRARKMIRELRSLGYRVDLISPAPSV

SEQ ID NO: 456371 - protein, 371 aa, unidentified
MGKHKLAFVAFDSAKVKHAVAIAEDGRDGEIRYLGEIENSPDAVKKFVTKLSRQHEELHFCYEAGPTGYGLHRQLTDLGHVCDVVAPSMIPKRSGDRVKTNRRDAVMLVKLLRAGELRTIWLPDSIHEAVRDLARARETGMLDLKVKRQQLLSFLLRHGRNFPSGKNWTKMHARWLAAQKFDHPAQQIVFQDQIDAINSAQVRLAALEQQLRDIVPTWTMAPVVAAYQALRGVSFLVATTFVAEVGDVRRFSTPQQLMAFLGLVPSERTTGDTVRRGSITKTGNRRARRVLVEGAWTYRHPARVSQTLQSRINGLPLTVRTIAWKAQVRLCARYRRLVANGKNPAVAATAVAREMAAFLWAIGHQVAPNAP

SEQ ID NO: 456372 - protein, 425 aa, unidentified
MNTSPYAAFVGIDWADAEHAVCLLAGDRAEHATVAQAADTLDEWVAGLRQRFGGRPVAVCLEQSRGALLYALMKYDGLVLFPLNPKQLAKYREAFCPSGAKDDPADAELLARFVREHHARLRAWKPDDPLTRSLRLLTEARRGWVDQRTAAGNRLLQHLKEAYPLALEFLGKHVYAQRFLALLAKFPAQRELQRASPRKLVEWFTRLRRVVDDPPADPRLDPRVIALQQAQPVVTDEAVLRDARLAVKHLVRQLQQLNETIAEYEQEIAALVQQHPDAQLFDSFAGAGPALVPRLVAAFGSDRQRYASAADLQQLSGIAPVQLRSGKTCVVKMRRACPAFLRQTFHEFAKCSLGACAWAKAYHTMLRHHGHGYHSALRALAFKWIRILFRCWQTRQPYDDARYLRQLHLKQSPLLAFLQPALPKP

SEQ ID NO: 456373 - protein, 398 aa, unidentified
MLSIGIDVSKGKSTVCGMKPGGEIVYTPFEVQHTREGMSELVSLLRGSGEEVRAVLESTGSYHCPVVAALLENGIFVSVVNSLRMKRFCSQSIRRVKTDQIDAMQIALYGLAYWPELQPTRLPENTYRELQLLARQYYQMTSILIKAKVDFNALCDQVLPGMQELMNDHAGRHKLSDFVLRYRHTTHILEMGETRFRKDYCKWAEKKGYRNRERMAALIFATAQNGIPVLPNAPSTQIVITEAIRVLHTVEASRDAILTQMQALAKTLPEYSLVREMPCIGDTLAPRLIAEIGDVRRFHSKRALIAYAGIDAPPYQSGKFSANNRHISKRGNRYLRKTGYEVMQSYVMHKPANDPIFTFIEKKRSEGKSGKLAMVAGLNKFLRVYYGKVTELYRSLPQ

SEQ ID NO: 456374 - protein, 366 aa, unidentified
MKKISTVQVFGKEILKEQKLTIGVDLGDRWSFYCVLEEAGQIILEQKVPTTPEAMKQTFSRIPQSRIALETGTHSPWVSRLLTELGHEVIVAHAQKVQLITKSNRKDDRHDARTLARLARIDPELLGPIRHRSVQAQIHLTVIRARAELVSARTALVNAARGLVKSYGERLPKCGTQQVSRELGAALSTELRDVLEPLLKEIESLNEGIKEYDERMEKIAKEVYPEVSLLKQVKGVGTQIALTYVLTIEDPHRFLKSREVGCFLGLKPGRRNSGESEPQKSISKEGDRYLRTMMVQGAHYILGPFGADSDLRRWGLKLAERGGKNAKKRAVVAVARKLAVLLHRLWVSGEVYEPLRNSQKAMRAVA

SEQ ID NO: 456375 - protein, 399 aa, unidentified
MKKNLPLELRVGVDVGCHSHNVAIGLSTGEILEEFSIAHEPEGFRQFFSRIEKNERNYGCPVAVAMEGYNGYARPLDTLVRTRNYRLFNINNLKLARFKEIFPGAAKTDDIDARKALELFQLRDHLPIAKDVLQEVKATPQENDILKRISRRRRRLVDERVRVLNNLQADLQSVCPGLLEITGEAGNLWFLRFITSTDDLRKLTRLRETTIRKIPGIGAKYTSIILKWQKAAEFSHETEWVSDMIQQDAERVLALHDQIETLETQMAEMAANSNIAQLLTTMPGFGPITTAELAGEIGTIERFESESSLALYLGMSNLDNSSGKHKGSKAPKQVNERAKAAMMIAVDRHRKSVAQSQKYYEKKRAEGKKHNQAVRALGRHLCRVIFKMLKENRGYFFTQ

SEQ ID NO: 456376 - protein, 269 aa, unidentified
MLSFCGIDVSKDRLDVIVLPEEQCSSVSNDGTGWADLVERLRGRSIAAIGIEASGGYERGVMRTLLAAGMPVRQVNPFKLRQFARASGVLAKSDPLDARMIASFVAIMPTRPAQRAPARAAQVAEVLAVRRQLSAEKVAAENASRLLEDAMLRRLSQGRIGRLASDIDLLDKRMVEIVASDTVLAHRYRLLTSMPGVGSLLACTLIALLPELGCISRKQVAALVGVAPYAFESGTLKGRRCIWGGRANVRQVLYMLEGLPLASRRARSL

SEQ ID NO: 456377 - protein, 368 aa, unidentified
MKYYAGLDVSQQTTSICIVDEEGKTVAERKVASCPEAISEALEPFAVTRAGLETGPLSVWLWNGLKERGVPIVCMDARHANAALKMMPAKTDRNDAIGLAQIVRTGWCKSVHVKSTASHEARALLATRSQFVRTRCDLENQIRGVLRTFGILFGKRVGGFAKRAEEIIDGELDASPTIQAVVEALMRARANILEQIRHLEAKVRLIARQNKVVRRLMSVPGVGVITALGFAATIDDPTRFKRSSSAGAYLGLTPRIYASGETMRSGRVSKRGDDFLRRSLYEAANALLTRIPRFSALKSWGLRIARRGGYRKAKVAVARKLAVILHAMWISGETFPLVIARAGRAGIITVMSVRGCLYQTASHSWDRS

SEQ ID NO: 456378 - protein, 341 aa, unidentified
MQDVTLIGIDLGKHSFHVHGQDRQGKALLRKKFSRKQLIEFLTTFHACTVVMEACAGAHHMARLLSGYGHEVKLISPQFVRPFVKSNKNDFIDAEAICEAACRPSMRFVTPKTESQQCLSALHRVRESLVRERVKASNQIHGFLLEFGISLPVGHAVIRRLPSVLAEQALPARLVALLERLHSHFKYLDEQIADIEKELDRQLQDDDLGQRLMSIPGVGPITASVLAAEVGDGKQYRCGRDFAASIGLVPRQYSTGGKNNLLGISKRGDKNIRRLLVQCARAYMQRLDRQTDRLAQWVRSMLTRRHSNVVACAVANKLARTAWAIAAHHTEFKQREAVMPA

SEQ ID NO: 456379 - protein, 343 aa, unidentified
MKLSRVGVDLAKNVYQLHGVDRFGKTVWKRRLKRHQWLKVLLDTSGPECEIGMEACAGAHHWARQLQARGYTVKLMPPQFVKPYVKSNKSDAKDAEAICEAMSRPNMRFVTVKRVEQQDIQATHRIRAELMTQRTAKANQIRGLVAEYGLVAPKHLSSLRAAIPCWLEDAENGLTGDFRSLLHGVWDDLLILDDRVGEMDQTIKRLADNNENCVRLQQLRGVGPMTSTAMIATVGDARQYHKSRQMAAAIGITPKQHSSGDKDRLLGISKRGDVYLRTLMIHGARAVVARAKHKDDRLSRWVTNIANKKHPNVAAVALANKTARMAWAMLRHETDYDPDFAIR

SEQ ID NO: 456380 - protein, 315 aa, unidentified
MDEPRPVSTCAGIDVSKDRLDVHLLPSDEAFAVARDGKGLESLVERLAALDVSLIVLEATGGFETKVAAALAGAGLPLAVVNPRQIRDFARALGKLAKTDAIDAQVIALFAERIRPQPRPVASHEARMLGELVARRRQVVEMIGMESNRRRRAAGKRLAKKIDRHLAFLEKELVDIDVDIDNGVRASPAWRETEDLLTSVPGVGPVTARTLIAELPELGALDRRKLAALVGVAPFNRDSGAWRGHRMIGGGRSCVRNVLYMAALVAIRHNPLVKATYQRLVQRGRPKEVAIIACLRQLLTILNAIVRTKSEWQNA

SEQ ID NO: 456381 - protein, 347 aa, unidentified
MTIVEDRPVITGGVDTHADMHVAAALDPVGGLLGVQEFPATAAGYASLLSWLRSFGILAVAAVEGTGSYGAGLARHLAAAGVRVVEVDRPDRQDRARQGKSDPLDAVSAARAALSGRASGAPRGRDGAVEAIRALMVAKRSARQERTQAINQARALIMTGPEELRARFVRRSPAQLIEAIAALRPRPGDVPGYATRVALRELGRRAQFLDAQLDRLDELIGPLVTARAPGLLALHGVGPDTAAMLLVAAGDHPERLRSESSWAHLCGVAPIPASSGKTAGRYRLNRGGDRQANSALWRIVIVRMSSHPATRAYADRRSKEGLSKKEIIRCLKRYVAREVYRQLRNGA

SEQ ID NO: 456382 - protein, 465 aa, unidentified
MAAVMIGVDPHKASHTAVAISGAEEPLGELRVRACAVQAERLLAWAAAWPQRTWAVEGAGGLGHLLAQQLLSAGERVLDVPPKLGARVRLLAAGDTNKNDPNDARSVAIAALRSAGVREVRADDHAAVLKIWSKRHRDLGRSRTQVVCRLHAVLCELIPGGVSKAITAAAAARLLESIAPAGAVEAARCELAAAFAEDLRGIDARIRETRKKPAVAVRATGTSLTGLYGVGPVVAAVVIGDVRDVSRFPGRDHFAACNGTAPIEVSSGRRKIYRLSRRGNRRLNYAIHMAAVTQIGHRHSQGRAYYDKKLAGGKTPKEALRALKRQVSNAIFACLQADARRAAVRAGGPGGQPGNDSVACAAGLHPGHRLFGQATPGPGHHTTTAAGSPAAQGSTGHSPVAATPPPATPEVQAERPQPSEDQRPGGAARRRPHPAARKARDQGSPRKPQRPKGTSQAAKNTGGAP

SEQ ID NO: 456383 - protein, 377 aa, unidentified
MANVCLSIANDDHVAGLLAAVMRRGLKSVCETDFDPAETDTNYSGIDLHSNNCVVIVSDENDRIVYQKRLPNELAQVAAALEPYRHELAGVVVESTYNWYWLVDGLMDSGYRVHLAHPAAIRKYDGLKHSGDFADAAYLAQLLRLGLLPEGYVYPREGRGARDLARKRMQLVRYRTAQILLIEGILMRQTGSRMSGETVKRLTAEQVDEFAFTPDVTLAVEANRAVSQALGQQIEALEKRLRERVSLRAEYHLLRTVPGIGDTLATTMMLETGSISRFAQVGNFSSYCRCVDSLRESNGRKKGEGNTRNGNKYLAWAFVEAANFAMRYCPQARSFYDRKKSRTNRVMAIKALAHKLARACYHMLRDQKPFDVHLCFG

SEQ ID NO: 456384 - protein, 343 aa, unidentified
MDYFAGLDVSVKETSVCIVDDAGKIVREARVASEPEALLQVLTNTIYRFKRVGLEAGPLSQWLYSVLAEGGLPVICVETRHMRAMLKAQINKTDRNDARGIAQMMRVGLYRAVHVKTLRSQKLRMLLTHRKLLQSKAIAIENDLRATLRNFGLKVGMIGTVKFEARIRELVESLPDLAVLVEPLLIVRRVVREQLGILHRRLLAIVRDDDVCRRLMTIPGVGPVVALTFCVTVDIPARFRNSKAVGAVFGLTPAKYQSGENDRTGAISRCGDEMMRMMLYEAAQSMLVRSAKWSWLKAWAIKIARHRGMKKAIVALARRLAVIMHRMWVDGTEFRWTREVAVA

SEQ ID NO: 456385 - protein, 390 aa, unidentified
MERPMQKLNDFSRSLVALEPDSTLIAVIEMSLSSWLVAGIVPGVERQPLKKLAADESALLKLLHRWREEAEKAGRRIERVAVAFEAGRDGFWLARWLKARSIEAHVIHAASVAVSREHRRAKTDRLDTELLKRAFLGWLRGERDHCKMVDIPTIKNEDAKRPNRERENLVSEQSRIINRMKAALIRLGIRGFNPKLKRAARRLEDLRTPEDEPIPPNTLAELRRDIERRRLVRDQIRQIEEARLQRLDHAPGDGPHAMVRLLARVIGVGIETADMLVHEVLSRSLRDRRAVARYAGLTGSPDESGRKRREKGLARSGNGRVRRGMIQLAWRFLLHQKDSALAQWFRARTENARGTRKPMIVALARKLLIALWQLVRQGVVPDGVVLRSAQ

SEQ ID NO: 456386 - protein, 337 aa, unidentified
MEYFAGLDVSMAETQIYVVAESGAVIHKAKVPSTPADIAAELAQLPTCRRIVFETGRMAPTLYHGLRQLGLPVICVESRQAYQALKLLATHKTDHNDARGLAHLARTGFFKPVHVKSLPAHAVRSLIIARKKLVGQRVTLENQIRGLAVIFGVRLPRALSSSFISQALRASEGIPGLSAAMQGLVAARAAVLAAVVAIDADIRRMVRASDACRRLMSIPGVGQLTALAFTAAVDDPGRFRRSRDIGAYLGLVPRRHQSGEIDYTGSISKCGDRRVRTLLYEAANVILTRYKGPLKLKDWAFAIAKRSTMRKARIALARRLAIIMHAMLRHGTEFKPA

SEQ ID NO: 456387 - protein, 411 aa, unidentified
MSYKIAGIDVHKKVLMVVVSDATTPEEKPERRRFATMPSDLHRLLIWLREQGVEEAVMESTAQYWRSVWLELEPHMRLHLAQAFSNRAPRGGKHDFKDAERLVRRLLADELILSFVPGGEQRSWRNMTRMKLQLTRDRVGLQNQIECLLEEMRIKLSIVVSDLLGASGLRILRALAAGETDPKQLAQWADKRLQCTQEQLVDALTGRPQPLHREMLALQLERLQLIDSQIAKLNGMIAQAVQPHQEAVVRLAEVPGLGVDSAQQIIAEVGEQASTFPSAAELTSWVGTCPGKDESAEQNHSSRSAKGNKYLRRVLNQAAHAAVKRKGSYFQVVFRRLLPRLGYQSAIWAVAHRLCRVVWKILHEGVRFIEHGIEPDPKAKMRHARRLAQALRKLGYQVTITPTNLASGMQM

SEQ ID NO: 456388 - protein, 388 aa, unidentified
MDEIARAQIARVGVDLAKQVIQVHEVDASGWRVVARAFKRNQFFAWCTQLPAGCVVAMEACSSAHHWARKLSAQGLNPRLIAAHFVTPYRMEGKGGKNDATDAAAICEAASRPSMRFVPVKTCEQQGVMSLHRVREALKEERTACINPIRGVLTEFGLVFGKSPKVLRAVLADIIEDASNELSTTARLVVQRAFEHWRELDEHLRWCDRQVGRHVRASPEAKRAAMVIGIGELGASALTAGVGDFSQFKSGHQFGAWLGVVPRQASSGGTIRLGRITKRGDDYLRTLLIQVAKAAVMSAEKRDDPISRWLVQLTARVGWQKACVAMANKNARVLWGGDDPRRRLWLQARQCQATGQAAGPATHRRSSIDLRLLLGLNAAASRDTRSTL

SEQ ID NO: 456389 - protein, 412 aa, unidentified
MKLFVGIDVSSQKLDVCFLDSDDTKLLEESLPNDIHGAKTIKDCVLSFHESYSYDKIVIGMESTSIYSFHPSMFLHEDADLKNLGMVEVVVENPKSIHRYSQVWDDDKTDKLDAFRIADYMRIGRYKVSLIREEKYQALQRLTRSRYQLVCHLTECKQHFLENLYYKCNTISKEFKSDNKSILGATMMDILSDSLSLDEIALMDIEELAALLQDKGRNKFGDPQKLAKIIQKAIRDSYRLGKVMQNSVDVVLASYVEIIKSLKKQIKALEKSIKSLFETIPEAECLRSIPGVDIVYSAGIIAEIGQIERFEDETKLAKYAGLHWKKKQSGDYESQRTPMTRTGNHYLRYYLVEAANSVRLREDTYREYYKKKYAEVPKFAHKRALVLTARKFVRLVDVLLRNRQLYMPERSV

SEQ ID NO: 456390 - protein, 350 aa, unidentified
MNCVGIDVSKGKSMIAVMRPFGEVVVSPFEVRHTASELSELARLLKNLDGETRVVMESTGNYHAPVAWLLHGAGFYVSVVNAMLVHDYGNNSLRRGKTDKKDAVKLANYGLDHWLTLPRYVPEEDTRLMLKTCYRQYQQYSKVQTMLKNNLISLLDTAFPDANRLFTSPPRADGSEKWVDFVATFWHCECVCGLSKKAFTAKYQKWCRKHGYNFSQDKALDIYASACGRFGVMPKTNTAKLLVEQAISQLQTTSAALAALKQEMQSLAASLPEYPVVMEMFGVGPTLGPQLIAEIGDVRRFHSKKALVAFAGIARADARYAQKSRTEIIVAANETGSLRRGSRFAYYRNC

SEQ ID NO: 456391 - protein, 460 aa, unidentified
MRGKRRGRPRRKHLQMQVVNPNAAGIDIGSEVHYVAVPPDRDPEPVRSFKCFTADLNALADWLEACGIETVAMESRSVYWIPLYQILEVRGFEVILVNARHVNNVPGRKSDVLECQWLWQLHTYGLLRGSFRPEDRICVLRSYTRQRDNLIKSVGSHIQRMQKALEQMNIQLHKVITDITGVTGMRIIEAILDGERDPVKLAQLKHYNTRSSHETIAKSLEGDWREEHLFSLRQEFDLYGIFRQKIAECDQKIEACLNSFQSKVDPDHKPLPPYKHGKKRPHGNQPTLDLRNPLYRMIGVDLIAIDGFDVLTLQSIIFEVGLDMSKWPTEKHFASWLGICPNNKVTGGRVKDTRSKKVVNRASCAFRMAAQAAGKSYSALGGYHRRMKSRLGPAKANTALAHKLSRIFYRMLRYATQYVDPGLHYYEQNYQQRVLKNLKTRARLLGYELIQNPELRPAVS

SEQ ID NO: 456392 - protein, 353 aa, unidentified
MRRPKDKLIAGLDLHSNNVMIGVINQDGKRVAHRKLDCDLDQVVGFLKPFKPQLQSMAVESTFNWYWLVDGLRAQGYSIDLANPAKIEQYSGMKHVDDKDDAFHLADLQRLNILPKAHVYDPELRPVRDLLRRRTNLVHQHTALLLSFSSLYTRTTGQKLDVGEAKKMEPKQAPKLYEHPANQLIAQVQAEHIQALAKSIRRVEKAVLACAQEIPLYDKLLTIPGLGRILGMTITMEVGDIKRFKTDGDFASYCRMVDAKRLSNGKCKAHNNQKCGNKYLAWGFVEAANFARRYDEQCRRWYDRKAAKTSKVIATKALGCKLAKAAWHVMAGQCDYDEKRMFPELANKPMKTS

SEQ ID NO: 456393 - protein, 351 aa, unidentified
MRTSQKTPETISTIGIDVGKNTFHLVGLDKRGAIVLQQKVTRHQLGRRFSNIPRCLIGMEACSGTHFIARQITALGHDVRLIPAQYVKPFLKGHKNDYRDAEAIAEAVQRPTMQFVSIKTPEQMDLLALHRVRSRLVRQRTGVANQIRGFLLERAITVRQGLMPLRKALPEILSAKSDGLSPRMINLISELVQDWRRLDERIAAVSAEIEALAKQDAGCQRLMSIPGVGPIISSAVVAAIGNGAGFKQGRDFAAWLGLIPKQESTGDRTILGKISKRGNKYVRTLFVQAAHVVLERRPRTARQGLWPWIEQASKRLQRNMLAIALANKLARIAWAVLARGHSYQPRIITNA

SEQ ID NO: 456394 - protein, 357 aa, unidentified
MEKLYLGVDLHKRSCWVTVLDADGRLIESRKLGTEKWELLEYFGKLRKPAALAVEATFNWYYFLNVVEPLGLELHLVHPWKTRAIAAARIKHDKLDSRVLGELLRTGFLAEAWIAPRAVRERRQLLRYRVHTVQWATRAKNSIHGVLNRNGIRSPLRSPVGPQAREFLSQVELPATDRWEVQGQLERLDLLRSQIAALDREIRKRSKASPVAQALEQIPGIGPFIAALLIAEVGDLQRFPTAKHLASYTGLVPSLYASGEHRWGGPITKQGSTVLRWALVQAAHRAALSPQFQSYYQRQRQRHGAGKATVALARKLAVIVYYRWRQALYPAGPPRGEKVRERSWAGAWSEDRPLRSD

SEQ ID NO: 456395 - protein, 413 aa, unidentified
MNSVGIDVSNGRSMVAVLRPLGEVVSAPFEVRHDSVSLLSLSQFLQQLEGESRVVMEHTGRYYESIAKSLHEAGLFVSAVNPLLIKEYGGNSLRKVKTDKADAVKIAKYGLDNWAELRDYTPMDETRYNLKTMHRQFQLASKTRTALSNNFVALQEQSFPGIRKCFDSPVRSDGTQKWVDFTYTFWHVDCVRKVSLKAFTERYRKWCKRHGYNFNTDKAAEVYALAMSAVVLVSKNETTKVLVQQAAAQLTSISRSVETYRAEMNRLASTLPEYPIVMAQYGVGTSFGPQLMAEIGDVRRFARKQSLVAFAGVDPAPNDSGDKTSRSNKTTKRGSPYLRKTLFCLMSTILQKSPVDDPIYQFLDKKRSEGKPYYVYMTAGANKFLRHYYAKVMNYLDTLENEASGKDPQKPSC

SEQ ID NO: 456396 - protein, 355 aa, unidentified
MTSTKYIGMDVHKESISIAVRNSAGKVVMECVIETKASMILQFIDGLRGDLQVTFEEGTSAAWLYDLLKPHVTKLVVCDPRKNKSMREGNQNDKIDARRLAELLRLDHLTPVYHGEHGLRTLKELVRSYLTITKDLARVMSRVKAIYRSWAIPCSGKQVYAARHRAEWLGKINEPGVRRRAECYYQQLDALRVLRQGVRRDLLAESKKQKAWKRLCEIPSIGPIRAAVLLGILQTPHRFRTKRPLWNYGGLAIEMHSSADHRRVHGQLERSTKNVLVRGLNRNCNHDLKNLFKGAAVVASSKPGPFQEFYTALVAKGMRPEMARLTLARKIATIVLMVWKRGVNFDAQHLKPQTA

SEQ ID NO: 456397 - protein, 316 aa, unidentified
MTTKAEVHHVGIDVSKERLDLAVLEGRRIEQYSNTAGGINKLVEEMMELMPALIVVEVTGGYERAVVYALFEAGLPVARVSGYRARQYAHAKGRLAKTDELDALNLADYGKHVQLRLFEAKSEQGQWLSGKLARRRQLGEMLKAEKNRLRLAYGEIGPSIERVIEFLQNELKQLDGEIRAYVDNDAEWLEQEKLLRTVKAVGPVTAVTLLAELPELGKLDNKQIASLVGLAPINQDSGKRSRYRKTGKGRPSVRSVLYRAVLTGIRYNPVIKKQYDALVSRGKVKKVALTACMRKLLTILNARMRDQQPFRALPIS

SEQ ID NO: 456398 - protein, 372 aa, unidentified
MNYNTVYVGMDVHKESFTLCSCKYEDEKASHYQRTPASYKNVLRYLAFLRTIYGEYTRFVCGYEAGCLGYSLYHQLENFNVECVILAPTTMLEQRSKRRIKTDKRDAEIIARSLAQHNYSPVHIPTETDNQTKEFIRMRDDHKAELKKIKQQILSFCLRQGYQYDGSGNWTAKHVKWLRSLKPAGLYKEILDEYLLTYTILTDKLNRLDQRIEELASKEEYKESVSKLTCFLGIKTHTALSVIVEVGDFQRFVSARKFAGYLGLVPGQHSSGDDRNGLGITKAGNTHVRRLLVESAQSYTRGKIGYKSRVLRSRQAGNSPQVINYADRANERLRRRYYKMVLKDGKKYNIAKTAIARELACFIWGMITDNIY

SEQ ID NO: 456399 - protein, 361 aa, unidentified
MPNAKISSVSRQVVGGVDTHKDLHVAAVVDEQDRILASESFATTRQGYKQMLTWMRSFGEVVRVGIECTGTYGAGLLRYLEQAGITVLEVTAPDKSDRRKRGKDDTLDAGNAAHAALAGVRTVTPKKRDGMVESLRVLKVCRKTAIQARRVTLQLIQNTIVSAPDDLRESLRTLTRMQLIRTLAAWRPDLSSYRQVTSAYRIALKSLGRRYLELHDEIADLDVMIAALVDDLAPELVARNAIGYESAAQLLLTAGDNSDRFRSESSFAALCGVSPVQASSGKVTRHRLNRGGDRAANSALHIIAIGRLRTDARTQAYVSRRLSEGHSKLEAIRCLKRYIAREVYGIIQRRNSVINQSTVST

SEQ ID NO: 456400 - protein, 370 aa, unidentified
MDDGTTRYLGLDVHKATITVAVADAGSQPTLYGTIANDPSAVRKLVAQLGRSAKLSVAYEAGPTGYALHRQLVGLRVECQVVAPALIPKRAGDRVKTDGRDAITLARLLRSGDLTPVWVPGEEDEALRDLVRARYDAKADVLRAKHRLSKFLLRRGVQAPHGVKAWTVRYQAWLNQLTFPQAAAQVVFEDYRATVRAAEERIRRLEKDLQRCAEDSRQIGLISALQALRGIGPLSAVTIVAETGDLRRFHNAPAFMSFTGLTSSEYSSGTSQHRGAITHAGNAYIRHVLVQAAHNARHAPSVSWERRQRLAGLPPDLVALGWKAQLRLHQRYRHLVGRLGRPKAVTAVARELAGFVWAVGQRQYQEVAAA

SEQ ID NO: 456401 - protein, 376 aa, unidentified
MMEKLRFLGLDVHAETITVAVAEADGEVRSLGTIANREESIRKLIRKLGPVEHLRACYEAGPTGFVVYWQLTQLGVKCDVVAPSLVPKKPGDKVKTDRRDALNLARSHRSGDLTAVWVPDEASEAVRDLVRQREAAKQDQLRAKHRLTKFLLRTGQRPPLGVKAWTERYVEWVQQVRYTHPARETTLLDCLNEVQHMEERVKRLEQSIVEVIQLAPVPIQNVVRGLQALRGIAHISAVTIAVELGNITSRFERARDLMGYSGVFPSEDSSGERIRRGGITKSGNAHLRRIVVESAWSYRYRPAIGARLRKRQEGLPAEITEIAWKAQNRLHKRYMTLMARGKEQRKTMTAVARELLGFIWAIGIKAEASCKQQLAA

SEQ ID NO: 456402 - protein, 343 aa, unidentified
MEKVYYIGLDIHKKTISYCIKLQDGTKVRQGVMAAERKALGQWLAEIPGHWKGAMEATMFTGWVYDFLKPHALELKVAHPEMLKAITSAKKKNDRADSEKISDLLRVNLLPECYMAPEDIRELRRILRYRNMIVRTAVKMKNKISGLLMEVGASYNKKRLHGKRYFNNLLETVEDVPPSVNELLNLSRAGLEMFQGVQRRLLDTLHDNTLIRERIERLMTIKGIGEVTALTWVLEIGDPMRFTSVRQAISYCGLCSAQKESAGKEQRGPISKKRNKHLQTVLIEAAKLAPRWNQQLAAIHAKELERGHRNRATLAVARKLVAYMLVVDKRQTGFEPLSIAKVA

SEQ ID NO: 456403 - protein, 349 aa, unidentified
MSKITRVGVDLAKRVLQVHAVDGSGQRVTSRALPRDKFLTWCGQLPPGCMLAMEASSSAHHWARRLRAMGLDARIIAAHLVAPYRLQGKTGKNDANDAAAICEAAGRPHMHFVPIKTVEQQSLLCVHRLREGFKAERTACINRIRGLLAEFGLVFPQKPDSLRQALPDVLEDASNDLGGIARLALQRAQTQWAELDAHLAWCDERIAAHLKADEQAARAQQLMGVGPVGASAAVATVGDFKQFRNGPQFGAWLGLTPRQNSSGGKNNLGGITRRGDMYLRTLLIQGAKSVVWSAHKRDDPISRWVLALREKHGWQKAAVALANKNARILWAVMTKGQAFDARHVSIKPG

SEQ ID NO: 456404 - protein, 376 aa, unidentified
MKILPNPVRKVNPHVMGLDIHKRMTAWVLFDRKGVAAAHGEIPSSPEALLALFSEQVGRKKAHVAFEASGCSLWAFDLMVERLGARERVHVAHAKNVRAIANSQHKTDHNDAWWLGYLTYEGRLPEVYVPTGLVRELRVATRHRRAVVQERTRAIKRVRAQLRQTGLGRTLPQGALSTKTGRAAVILSAESLGGMRQASIEEDLSLIEAHDARVAVWEGRIEEMVDDMPDVLAIREAIPGMGTILAATVVAETGPVVRFRSPKALARYAGLTPAERTSGGKQRLGAITKEGSAQLRWALCQAVICAKRCRSGPGLHLAHWVDRCQRRLGSKKKGQVAGARKLAEAIWRLRTMGEVFDFRKPFGPLPLSVLTQGSVG

SEQ ID NO: 456405 - protein, 389 aa, unidentified
MSYCPVAGIDVSKQFSDMCILSPDNKIFAQEKIYHDETSINRANALLQKAERLFFSKPVIVMESTSHYHLILFQFFSEHGYDVIVVNPLQSNSMKDFSIRKRKTDRADAFKLAMMYRTKTLRPSQIPQTATRALRQLCRHRAELLNDVSSYKNRLTALLDQTFPGYDKVFSDVGGVTSCAVLVRFPTPTILLVEEESELVEVIAAASKSGYSFAKKKAGLLISAAQKAQTLGIHSCADETLIVCTIQMLRTLSESVLQIETAIDNLLAQIKEMRNNVSLLQSIPGVGSHSAALLLGEIGDILLFKKPKQLAAYFGLDPTERQSGSFRGTKNKLSKRGSPYARAALHMGVVNSICKRGKDSAANPVLLSYYEKTNRQRLLKQRQCTNWSL

SEQ ID NO: 456406 - protein, 342 aa, unidentified
MLHAGIDLHKKTSVVTVVDDDGAEVVAGYRLENEEDEIREFFASFDGELDAVLEAGPSWQWMCDLLDDMEIDNVLCHPLKVKAIASARIKTDRIDSGILAQLLRMDFLPESYKPDLDTRHLRELLRYRASLVRLRTSTKNRVHALLARLNIRHGFSDLFGKAGSSFLRELQLAPVYRRALDGNLSLLEALGSLIKDAEEGLTPFYQQSADARLLSTIPGVGPILALTIASEIGDIGRFQRSKQLASFAGLVPSTNQSGAHSNHGHVTKQGSPWLRWALVEAVIHGVARPGPLKSHYLKLKAKKGNKIARVACARKLATYIYHMLKENKDFTEVTAYLKSDLG

SEQ ID NO: 456407 - protein, 344 aa, unidentified
MENYAGIDVSLELSSVCVVDAQGKIVKEAKAASEPEALVAFFRTLGFAVKRIGLEAGPLSQWLHAGLKRAGFEAVLLETSHVKAALSAMTVKTDRKDAHGIAQLIRMGWFRPVHAKSIGSQEVRALLVARKQLLERLIDVELSIRGILRGFGLKVGPVTRKGFEARIRELVAGQATLERIAGAMLSARAALKAEYEKLHKAVLALVRDDAICRRLMTVPSVGPLVAITYKSAMDDPHRITKSKSAGALFGLTPKKYQSGEKDITGGITRAGDEMVRTALYEAANVLLSRITRFSKLKRWGMDVAKRRGSKRAKVALARKIAVILHRMWIDGTTYRWAAAEPIAA

SEQ ID NO: 456408 - protein, 436 aa, unidentified
MLFDKALPNVEAKLRALIGKLKQHGQVLFVVDQPATIGALPIAVAQSEQVLVGYLPGLAMRRIADLHAGEAKTDARDAAIIAQAARTLPHALRSLQLADDQVAELSMLCGFDDDVVGQITATNNRIRGLLTQIHPALERVLGPHLDHPAVLDLLQRYPSPAAMKAAGTLRFGNRLTKLAPRMGRRLTDEITRALGEQTVVVTGTNAASTVLPRLAEQLAALRRQRAEIAVEVERLVEAHPLQPVLISMPGVGIRTAARLLTEVSGKDFATAGHLAAYAGLAPVTRRSGSFIRGEHPSRRGNKILKRALFLSAFAALRDPVSLAYYDRKIAQCKRHNQALIALARRRCDVLYAMLRDGTLYQTDHPLAAWQKHRGTPHQRSNAPDTSSAMNQFAMLLVAPLSLLEVSYCSRAIDQVKNLAKTDCDTRASPVGLGFQN

SEQ ID NO: 456409 - protein, 400 aa, unidentified
MDDKERFGWFLGIDVFKETFDVCCITRQGEKLFSLSTSMDRRGFEELIHQLSSVSVAQESVLVGMESTACYHLNLYSFLISLGYPAIVINPLLISNFVKLQLRKTKTDKKDAWVIAQFLLLNRDSLCQTTLSSEFSDIRDLSRQRESLVDQMSSIKSEIKRLLTMTFPELEHLSGIFTKSMLRLLCQYPSAASMRRAKRSKIAGILIPGSYGKQTDTSVQRIIKAAEASIGTASPAKEIILKQKVSLLIQLEKHLQELTTILIEYCQEKMRRDMDILTSMKGIGEKTAMNFLIEMGGDIKQFESHKKLIAMAGLDPALYQSGKIDRKGKISKRGNRHLRRVIWLMTTKVIQFNERFKQYYLKRIKDGLPYKKAVLATAHKLIRVMFAMLRNKTLFDARMN

SEQ ID NO: 456410 - protein, 428 aa, unidentified
MNEVDAIRIEQFRQFKKEIRGSREYEVVGIDVAKEKHHAFFGTATGKTLLRNLVIGNDLDGFCKLIEHAEALRVQEGLSKVVYGLEPTGDYHKPLGEHLIKCAKLVVLVSGVAVRRNRELLDGRWDKNDVKDAANVADLISQGKCMFYEYPNANVRDLRVLLSVKMRLRKQEHGLRVRIRNHVVAQYFPELDRVWGQSETENLAIVRWCLDPSVIAGLELDEFVSRVSTRDRGARQKARLKGIWEAAVDSVGCRMPEAASCECKVLVESLKRLRQEIKEISDDIHQICLRFDEYPFLLSIPGFGPEVSAQVLGALGDPHRFRSAAEVLKMAGLDLSASRSGNTSETAVPVISKRGKAHLRYMLYQAAMIASIRNRLFINYYTEKLKGRQQERGIKTKMRVKLAAKLLVIAWTLMKKKEPFDPKHLTMQ

SEQ ID NO: 456411 - protein, 353 aa, unidentified
MKCDKYMGMDVHQAMTVVTVLDADGKVILETMVATEAAPIIRLVQSLSGPLHVTFEETTQAAWLHGVIRHFVTEVVVCDPRRNKLLAEGSKSDKVDARKLADLLRTGMLRSVYHGHEVTRKLKELVRAYETLSGDTRRTMTRIKAIFRGRGIRTAGRGVYQAKQREQWLKMLSEPGIHQRAEWLYDQLEQLRVLRRKAKQAMLEESRNHRAVGLLKTIPELGAIRAAFIVATVDTPHRFRTKRQFWSYVGLAVVTHMSSEYEMNAGRVIRRRKPLATRGLNHNCNHRLKEVFIGAATSASQHKSYESVRERLNHNGMRTEMARLTLARKIAAIALIVWKKGVEFDPKKLNCTT

SEQ ID NO: 456412 - protein, 451 aa, unidentified
MNARKLSREKSMELPKHLQHINPHAAGIDVGSRSHFVAVPEGTGEEPVREFSSFTDDLQLMADWLISCDITTVAMESTGIYWIPVFEMLENRGLDVKLVNARHVKNVPGRKSDVLDCQWLQQLHSYGLLAGAFRPAEQICALRAYVRQRMNLVRYAASHIQHMQKALAQMNLQLTNVVSDITGMTGMRIIKAILNGERDPLVLARMRDPRCKNSSAVIARSLRGNFRPEHLFNLKQAVDLHAFYQRQIDECDRQILEQLSSFDVGDSGNGPKSESPATIGEALQQMTGVDLTRIDGIDSNSALKIIAEIGIDMNRWKSAKHFSSWLGLCPGTKISGGKVLSSKTKPVANRAAMTFRMAAFTLFRSKSALGAYLRRQRSRLGAPKAITATAHKLARLVYAMLKYGTDYVDAGQEYYEERYRTRVVQNLKRKAQELGFELIENSGLEPKTATT

SEQ ID NO: 456413 - protein, 346 aa, unidentified
MMLIGCDYHPSWQQICWFETATGETGELKLEHGSGEAEKFYRGLLGHALIGMESTGNCQWFVEMATTAGHDVWIGDAAQIRASEVRQQKHDRRDAALILKLLMEGRFPRIWTPSGAEKDLRQLLIHRYKLVRIRAQVKTELQHLAMNQGVTRKRKLWSKAGEKVLRELPLKPWASRRREDLLKVREMLNGQITLLDQAVVEAAEKNEKARLLMTQPGVGPITSMAFVLTMGDVNRFQRGKQVASYLGLIPREYSSGGHQRFGSISKQGNRFLRMLLVEAAQGAVRCDPGFRNEYLHRCHKKAKGVAKVAAARKLAIRLYWMLRTNTGYPEVVRVESSSRVPLVSAS

SEQ ID NO: 456414 - protein, 327 aa, unidentified
MSSLTLGIDISKDKFDVALLADEQYQLGTFDNSKKGYRSLAKWLKKRQAQSAHVCIEASGRYGDGVATFLHEAGYAVSVVNPARITAYGESRLKRIKTDPEDAKDIAHFCATQKPRLWTPPPPELQELQALTRRLDSLKEDRTRELNRKKSGISSEAVLQNIEEHIAFLDEQIAALEQQIDGLIKGHPDLRQKHGLLTTIKGVGDITAAKFLAEVPDISHFGSAPELAAYAGLTPKVHRSGSSVHRRAHLSKAGNIHLRTAFFMPALSAMRFNPIVRALAERLEDRGKERMMIVAAAMRKLVHLAYGVLKTGLPFDPNYLVNVQETA

SEQ ID NO: 456415 - protein, 415 aa, unidentified
MEDISKAIVCRYIALDIHKHYCVVAGVDRDGQVVLQPVRVEHEDLEGWLKKNLLSSDQVVIESTTNAWHVYDLLEPLVAEVLVANPIKVKQIACARVKTDKKDTLILARLLAAKLVPVVWVPPQHVRELRQLISQRRRLVGMHTQVVNRMHSISHRHHLGHPRGKRFQEKDMGWREKLEGMERFQLDLDLETKKYLKGQIERITAELGRMSHEEPWAEGMLYLMQIPGFGVVTGMTVLAAIGDIERFESPKRLASYSGLVPGVEQSGMKLRGKRITKEGRRELRWAMVEVAQRAVKADPHWMQLFSRLERRMHRNQAIVTVARHLLTLVWYVLTRQEPYAHYSSERIAYKYYTWSWQLNEAQRKGLTRPQFVRYYLMRLGIGSELQKVALDPKHPHRLASEAEVLARMPELKPPG

SEQ ID NO: 456416 - protein, 401 aa, unidentified
MPELWAGTDAGKAEHHCTVIDSHGTKVLSRRVPNDEPALLELIGDVLKLASGEPVTWAVDLNAGGAALLIALLVGHGQRLLYIPGRTVHHASGSYRGDGKTDAKDAYVIADQARMRRDLQPLQEWDEIAVDLRILTARRYDLTADRTRAINRLRAQILEYFPALERAFDYSTSKAALLLLTGYQTPAALRRIGQARLVTWLANRKVRNAPTVAAAALQAAHAQHTVIPGEKTAAVMVNTLARAVMALDEEIARTDAAIEARFRQHPHADALTSMPGIGILLGAEFIACTGGDMDVFGSPNRLAGVAGLAPVPKDSGRISGNMRRPHRYHRRLLRVFYLSAQVAARCCPSSRTFYERKRSEGKTHKQAVLALARRRLNVLWALIRDQRTFTTEPPRRDLAEA

SEQ ID NO: 456417 - protein, 313 aa, unidentified
MSHKETFVGIDVSKKELQVYVRPDGKRDVFANTEEGVAQMLTFLKSFSPTLVVLETTGGLEIEATNALVDHSFPVVIVNARHVRNFAKALGTLAKTDRIDAEIIAHFAEAVRPEIRPLRDEQAQRLHALNVRRRQLVQMITSERNRLSQASKWTAKTIQDHIDWLSREISKIDKEISHLIKNSPVWREKDAILQSFKGIGSITSSVLLAALPELGTLNARKISALVGVAPLNRDSGIFRGKRFVWGGRKEVRCALYMATLSAIRFNPVIKAFYKRLIQAGKPPKIAITACMRKTLVILNSMIKNMTYWQPSIP

SEQ ID NO: 456418 - protein, 373 aa, unidentified
MTDYDAYIGLDVHKDSISVAIADAGRSGEVRLFGAIPNEPDAISKLVKKLSSRHGRVEFVYEAGPCGYNVFRQIEALGFVCRVVAPSHTPVRPGNRQKNDTRDAVMLARLLRAGELTFVWVPDVVHEAMRDLVRARSVASHDARKARTLIQLFLLKHDLRYSAKSWTSRHRTWLRNRRFQHHAQQIAFQSYLNRLEQAEARKKELEDQIAVISQTWSLARTVMNLQAFKGVGLVIAATLVAEVGIFSRFDSPRKLMAYLGLVPGEHSSGGSVRPRGITKTGNPALRALLFEAAWSYRVQAKIGNWMHKRRPDVPQTINDIAWKAQVRLSARYRKLVGSGKKSNVAITAVARELVGFLWDVARKTESETMSSAA

SEQ ID NO: 456419 - protein, 351 aa, unidentified
MSRRTTTIIGGVDTHTATHHAAVIDSHGRLLDDAEFPASPAGYAALLTWMRGKGTLTQVGVEGTGAYGAGLARHLHDQGIEVLEVPRPDRRIRRQRGKSDPIDAEAAARTVLAGRASGAPKLADGPIEAIRMLRVARNGAVKARTAALNTLRSMVITAPEPLRSQLRTLSSAQLVAACARVRPDLSNLANPVHAAKHALRSIALRVQHLNAETRSLRKQLDELTQAAAPATSAVFGLGPDTVAALLTAVGDNPDRLRSEAAFAHLCGVAPIPASSGKTNRHRLHRGGDRAGNSALHIAAVVRLRYDPRSRAYADRRTAEGMSMPEIIRCQKRYLAREIFGALRTDYAELST

SEQ ID NO: 456420 - protein, 355 aa, unidentified
MSEIKYIGMDVHQTTTLIVVLNAAGKKLSSTIVQTRAQELLAYIQAQRGILHVTFEEGTYATWLYDLLTPHVARVVVCDPRHNALLQAGSKNDPIDAHKLAELLRLNALRPVYHGQQSLRSLKELSRSYLALVQDSTRVMNRIKALYRSRGIACGGKEVYSPRHRVSWVSRLPEAGVHLRAQLLYQELDNLRHLRRQAQRALLAESRKQAASRSLRSVPGLGAVRTALLLALVQTPFRFRNKRLFWAYLGLGWVTRVSAEFCLVNGQVKRSGKAPAVRGLNPNHQRQLKEIFKSAASTALQRPGPWQYFYLQRVALGRKPALVRLTVARKLAALTLSLWKKGGRYDVERLRSAAA

SEQ ID NO: 456421 - protein, 443 aa, unidentified
MQQPVEVHVEEHEQMVERVAAVDVAKASGMVCLRTPHETVPGRRVTKVWPVQATTAALVELGDHLRCERVQRVVLESTSDYWRPFYYLLEAAGLTVWLVNAAQAKNVPGRPKTDKIDAVWLAKLAERSMVTPSLVPTEPMRQVRDLARARFDLVEDRTRVKQRIEKLLEDALIKISSVLTDVLGVSGRTMIEALIAGQRNPTVLAELARGRARRNRATLQRALHGRFTDHHARLTRLLLGQLDELSARIDEVTGLLDAAIRALPTPAADAQDNPAPAGYDSAVARLCAVPGGGPDSVRAVLGEIGLDMRVFGTSARLCSWARVAPRTVQSGRKTGRARTGKGNPYLKSALAQIATGAAKTDTFLGERYRRLIKRMPKAKALVALQRSILVIFFHLLADPTAEFTDLGSDFYAKRIDRARRTTHLLRQLHALGYQVQLTETAAA

SEQ ID NO: 456422 - protein, 410 aa, unidentified
MQALVERGCGLDVHQATVVACLLIVRKDGKVQKQMRTFGTTTQELLSLREWLLSEGCTHVAMESTGVYWKPVYTILEGALEIVVANAQHVKKVPGRKTDVKDAEWIADLLCHGLLRSSFVPPKPIRELRDLTRYRRKLVESQAAERNRLLKLLETANIKLASVGTDVFGMSGRLMLRALVEGKATPQEMAELAKGKLRKKIPELEPALEGKVEEHHRFLLRLQLDRLEAAEKDLAVLEQRIQEKLKPYEAQLTLLDEIPGVDWTLAAGFIAEMGVDMSVFGSVSQLASWAGVCPGNNESAGKRKSSRIPKGNVYLKTALVEAANSAAKAKGTYLRDKFYRLKARRGYKRAAVAVAHKILVAIYYMLSHRVCYNELGDAYLDKRNKHQLTRNLIHRLERLGYSVTLEQKAA

SEQ ID NO: 456423 - protein, 386 aa, unidentified
MPQPNDLSRSLAILDQNRTVIAVIEMSQSSWLIGGIVPGIERHPLKKIPVNEEALLQLLQRWRDEAVKAGGTITRIAVAFEAGRDGFWLARWLRARGIEAYVIHPTSVAVSREHRRAKTDRLDTELLKRVFLGWLRGEPDHCSMAAIPTLDEEDARRPNRERENLIGERTRIVNRMQSCLARLGIRAFRPTLRKAADLLASLRTPEGELLPPNTLAEMRRDMARLHFVVEQIKEIEVARRDRLQHAPEGQCSAMVRLLARVIGIGIETADMLVHEVLARNLRDRRAVARYAGLTGSPNESGSRRREKGLARAGNARVRRGMIQLAWRFLMFQKDSALAQWYRARTLDARRGTRKTMIVALARKLLIELWRLVTTGQLPVGVALRAA

SEQ ID NO: 456424 - protein, 390 aa, unidentified
MPKYQDLSRSLAAFDQNSTLVAVIEMGSEGWLVGALVPGLKKDPRKKLSPDKQSLLALLHRWCAEAAKAGRAIKRVCVAYEAGRDGVWLARWLREQDIDAYVIHPTSIPVSREHRRAKSDRLDLRLLLRAFLGWLRGEPGHCSMVAIATVEEEDGKRPLRERETLTGDVTRLINRMKSLLVTHGIRNFKVTLKKAGEKLAELKTAWGEPLPPESLAELQRSFERLRQAKQQIAEIDKARRRRLEKAPEAGVHPMILILARVYGVGLMTAESLVREVLYRNLRDRRAVARYAGLTGSPDESGKKRREQGLAKAGNGRIRRALIQLAWRLLRHQPESALVKWYRARTGDGRRDTRKVMIVALARKLLVAFWELVTNGTVPEGMRLHPAKVAG

SEQ ID NO: 456425 - protein, 372 aa, unidentified
MNYNTVYVGMDVHKESFTLCSCKYEDEKASHYQRTPASYKNVLRYLAFLRTIYGEDTRFVCGYEAGCLGYSLYHQLENFNVECVILAPTTMLEQRSKRRIKTDKRDAEIIARSLAQHNYSPVHIPTETDNQTKEFIRMRDDHKAELKKIKQQILAFCLRQGYQYDGSGNWTAKHVKWLRSLKPAGLYKEILDEYLLTYTILTDKLNRLDQRIEELASKEEYKESVSKLTCFLGIKTHTALSVIVEVGDFQRFVSARKFAGYLGLVPGQHSSGDDRNGLGITKAGNTHVRRLLVESAQSYTRGKIGYKSRVLRSRQAGNSPQVINYADRANERLRRRYYKMVLKDGKKYNIAKTAIARELACFIWGMMTDNIY

SEQ ID NO: 456426 - protein, 310 aa, unidentified
MEATVVGIDVSKDRLDVHVHPVGDHFFVSRNAEGLDALIARIGPLGLQAVAVEATGGFETVVAASLGAAGLPVIVVNPAQVRAFALALGKRAKTDPIDAAVIARFVEATKPEIRPLPDADTRLLSDLVARRRQIIQMIVAERQRERQLPSRQLKRSAARLIKALEKELNVLDEGIDESVRGSPVWCEKEDLLKSVPGVGNITARTMLAELPELGSLSRREIASLAGLAPWTRQSGKWKGKSFTGGGRTAARTGLFMAAIVAARHNPVLRAFHQRLIAAGKPKMVAIVAVARKLLTILNAILRDKTPWQVA

SEQ ID NO: 456427 - protein, 265 aa, unidentified
MNVKTIGIDLAKNVFQIHGVDEHGKRLFNKQLRRAQMASFFANIPPCLIGMEACASAHFWANKLISMGHNVKLMAPQFVKPYVKTNKHDAADAEAICEAVTRPNMRFVPVKTAEQQAVLALHRSRQSFIKQRTAQANQIRGLLAEFGIVVPRGIQQLQRRLPELVEDADNPLPVLFRTQLSLLQHHMAYLFDVIATLDKQIEQCYRQNALCQRIGKIPGIGPVTASALIATIGKANNFENGRQLAALLGLVPRQHSSGVNKSCSG

SEQ ID NO: 456428 - protein, 351 aa, unidentified
MSEAYDGPQVVGMDLHRRRSVLVRMTADGRKLETARITNSPAELRKVIARAGKRPKVVLEATYGWYWAADTLAAAGAKVHLAHPLGVKAFAYRRVKNDEKDAADLADLLRMGRLPEAWIAPVEIRELRELTRYRIKVVRLRTSCKDQVHAVLAKLGIEVTCSDIFGVGGSAWLDGLELELPQPYAGKVASLRTLAGELTAEITMLEVAIADLLAHHDGYHAVRSLPGIGPVLAAVLVAEIGDITRFATPARLCSWAGLTPRHRESDTKVTRGHITKQGSPLVRWALVEAIQHVPAGHPLRRRKQDILARRGDQAKHIAKIAMARQLLTWVFYAMRDGQVRALAPATGQKAA

SEQ ID NO: 456429 - protein, 339 aa, unidentified
MTKATTIGLDIAKQVFQVHGADRTGRGVLRRKLRRNEVVRFFSEMPACLIGIEASGSAHHWARVLGRLGHTVRLMAPQFVKPYVKSQKNDANDAEAICEAVARPNMRFVPQKSVEQQDLQCLHRVRSRLVACRTQLINQIRGLLAEYGIVLPQHPGQVRRGLPAVLEDAQNQLTGFGRELFQNLYQELAELDVKIADADARIQIAFQNYPDCRRIAAVEGVGPLIATAVVAAISNGHAFANGRQFSAWLGLVPRQNSSGGKSRLLGISKRGDPYLRTLLIHGARSVVYRAKAKTDQRSLWIIDKQKRLGTTKACVAVANKNARIIWSLIAHEQEYRRAA

SEQ ID NO: 456430 - protein, 360 aa, unidentified
MAKIKSVLTPSVVGGVDTHKDLHVAAVVDENNRVLGSKFFATTRQGYRQMLTWMTSFGTVARIGVECTGSYGAGLLRYLQNAGITVLEVTAPDKMERRRRGKSDTIDAESAAHAAFSFIRTVTPKTRSGMIEALRVLKVCRKTAVAARRIALQMIQMNIVSAPDELRDQIRSLTRMQLIRTLAAWRPDVTAYRNVQDAYRIALKSLARRYLELHDEIADLDIMIASIVDELAPELIRRNAIGYESASQLLITAGDNPQRLQSEPGFAALCGVSPVPVSSGKTNRHRLNRGGDRAANSALHIIAIGRLRTDTKTQEYVAKRVSEGHSKMEALRCLKRYIAREVFTLLRNQNRQINSTQITT

SEQ ID NO: 456431 - protein, 338 aa, unidentified
MQKNYLGIDVSKLSFDVSLIVVVNGRKQPLVISQFANNTGGLKEFKNWLTAHQVSFDEHSLLVIENTGIYHRPIWNFCTTHLLPVFIGNAADLKWSFGIARTKNDKVDSMRLCEYAYKNHEDIKPTTGLNKALITLKDLLSNRSKLLRQKNAIKQTLNELKVSNDKATHQLIEKLNKAALEGLKTSIKLIEAQMLVLVKQDDAVFANYTRMLSVPGIGKITAIFIICCTNNFAIKVTGKQLANYAGVVPHEHKSGTSVKGRNRVHFMANKDLKAILTMGALSAINTYPEFRAYYERKMSEGKKHLQALNAIKNKILLRVASVVNQQKLYENKYQVTCT

SEQ ID NO: 456432 - protein, 317 aa, unidentified
MAAVTFPQLVQRACGIDVHLKVVVATIDGVGIQRETRSFKTFTSSLNELKEWLLSNGVTHVAMESTGIYWKPVYKVLEDSIPNVWIVNARHIKNVPGHKTDKMDSEWICKLLLAGLLKPSYIPPKEQRQLRDLTRYRNKLIQQIASEKNRMMRILEDCNIKLSSVVSDTSGATATSLIDMLCEGKILTLDDIKSVYHGKLSASPEELLEACTGFVEEHHIYLLQMIRKDIDQTQALVDDLSERIKRLLSKYENALELLKEIPGFSTKVVEDLISEIGLDMSHFPSEKHLSSWAGLSPGNNKSAGKKKVPESLTETNR

SEQ ID NO: 456433 - protein, 458 aa, unidentified
MKVKARRQEPEEIPDEDHERVFDRVAAVDVAKESGMVCTRLPAGSGVRRTSRVWQVPATSNAIGDLADQLVQLGIEKVTVESTSDYWRIWFYLLEAAGLRVQLVNAREVKNVPGRPKTDKLDAVWLAKLTEKGMLRASFVPPAQIRVLRDYTRMRVDLTRDRTRCWQRLEKLLEDSLIKVSSVVSSLNGISVRDMLEALIRGQRDPRVLADLARGKLKAKHSALVQALHGRFDDHHGELARILLDQIDALTRQIDQLTDRIDTLLTAINPSPDATSTVATDTATEPTSDLIGTSSGMSAMARLAEIPGLSPPVAPQILAETGLDMTRFPTAGHLVSWARLCPRTIQSGNKTTAGATGKGNPYLKSALGQAASVAGRTPTFLGQRYRQLVKRRGKLKALVAVARSILVIIWHLLADPIARYRDLGADYHINPTNADRKIRSLVQQLQALGQHVTVQAAA

SEQ ID NO: 456434 - protein, 368 aa, unidentified
MIHAGSDCHVRNSFYHITDEGGQLLKRGRRPNTRAELVEFLADFDGESMRVCLESTTNSRAMQRMLLDCGRYMGVDMTVDVLDARKLRIIAQSVAKCDKLDAKVINELSRSNLQLPTCYMPDDEEFALREHLRARSDLVRMRTMLKNRVHAVLHRRGILTPPRMDLFTKVGRAFLEQLDLDDAGRTILGRYLEHVDKIEGTIKASTDSLKQLARSLRWAKTAALLQTMPGIGLISALTILAELGNLSRFRSRAAVANYAGLVPVVRDSDSKRYRGGITKRGSSHLRHVMSEAAWMAVGRVPVYCELFDRVQQRKGKLTAIIAVARRMLEDAWTMLRKDEAFRMVAPPRSKASASESRCDRQVASSVAG

SEQ ID NO: 456435 - protein, 414 aa, unidentified
MEDILECCCGLDVHKETIVACILRGPIGESLKPQSEIREFGTQLNDLINLRKWLQEHSCRYVAMESTGIYWQPVYSVLETSLVDEMHLLVVNARHMKNVPGKKTDMRDAEWIATLLRAGLLKGSFIPKHDIRDLRQYTRYRKAIIRDITSQKNRIEKLLQSSGFRLSNFLADIFGSSGIAIMQQLVQVGSISEQSLANCLKGRARQKASEILSSLNGTLSLPQRQLLKMQLEHLKDLQDNLREVEAEIQKDFSKFEGPRNLLDSIPGIDLTAAYAIMAEIGADMSAFPTAEHICSWAGLAPGNHESAGKKKKQRVTPGNNYLKTILCEIAWVIAAHREYYLSGWYWRLKQRTDSKRAIVALARKLLVIIYAMLKKNQPFDEQKFLERKETASRKRVSRMVNDLTKLGFVISSPA

SEQ ID NO: 456436 - protein, 387 aa, unidentified
MGVIIGMDPHKRSATIEVIDERARVLAADRYGTDTAGYTQMLAAARKFADRIWAVEGSNGIGRHLAHRLVHDGEVVFDVPPKLSAQVRVFATGNGRKTDPVDAHSVALVALRTPGLVRVQVEEDLVVMGMLADRRDELGRARTQVVNRLHRLLLELLPGGGKKFLSARQARAMIASIRPRDLAGRTRRRLTVELIGELEAVDRKIRVIDKELTELVTARGSTLMDLHGIGPSGAARLLADVGDIHRFASRDRFASWNGTAPLDASSGSQSRHRLSRAGNRRINRVLHIMAVVQLRNQTKGRAYYDERRAGGMPSMMAMRALKRRLSNVVFARMLADQKRREASPGGQPADAGICRPGTCLSSAAARSPATSRRVKVERPQRSEDVRP

SEQ ID NO: 456437 - protein, 346 aa, unidentified
MMIIGCDFHPSWQQVCWLDTETGETGEQKLVQALGDAERFYRQLSAPALIGMEATGNCHWLVDLLSELGHELWVGDAAQIRASYVRQQKTDKRDAAHILKLLVEGRFPRIWMPSSEVRDRRQLLLHRHKLVIIRARVKNELQHLCLNQGVQKKHKLWSRAGQQMLRELPLKPWAGRRREDLLRLMAMLDQQIEPLDQAVKTEAQRDKMALLLQTQPGVGPITALAYVLTMGEVSRFPRGKQVASYLGLIPREHSSGGRQKLGAITKQGNRMMRMLLGEAAQSAVHYDPEFRKEYLHRCHQKPKAVAKVAAARKLAIRLYWMLRTQKRYPAVVRIESSPRVPLVSAS

SEQ ID NO: 456438 - protein, 458 aa, unidentified
MYRELFPLRQALSLELKADLPPAVPGIDSEHLLQSYLDRLTMYVGCDVADQLLTFFAVDTAGEELGHLSAANDPQGFEQIWDWLENLRSQHSLRIMLLAMESTGVYYWACWDFMAQRANLARVLYNPRTTEHMTQVLSKKVRNELVDAYALAEQVRLGSTPEVVLSEDVDLLTARFCSRAARDLAGQINRKKNQLRALVRAYNPAIRQVFPGSKFHHQAVYALLQQYTFPDECVEAGIEAITAILAAHCRTAFDSQHAERLVALCRDTLSRPIGREEIRQRVHHLIDDITTCQKRKSYFNNTGYRLIEDRPETSLLRDATGAGISNTLALASEIGDVQRFKSGEHLASFLGLTTSKHISGTTVFVSKHITKQGSPNARYAAVNIALHLSQRVPKYQKMYERIKNRKPPRKGHYVALVAVARDFITNVLYDMWRYKRPFFREVEDYRAYRRKNPRSDEE

SEQ ID NO: 456439 - protein, 468 aa, unidentified
MDKYYLGGDVSKGYCDFVIIDQEKKIIEKNFQLDDTHAGHTELKRILSNLLLHKKNSVIYAGVESTGGYENNWYKMLYDLKKELNVSTARLNPFGIYHSSQADLKKNKTDKSSALNVAEYLISYPAKVEYNREYYYESLRRMWKHILILKKHKVGLMGQLESLVYVANPDIMAYWKEKMPEWVLSVLCKYPTSKDLATVRASTLSKIPYLTKEKAELLIKAARNTVASLVDDSMSFLIKSLANEILISRKNIDAQMSYLQKECDIPEVELLMSFCGIGLYSAVGFMLLIGKIDRFSSAKTLASFFGVHPIYKESGDGIGGIRMSKQGRAEARWLLFMVAKSAIVHNTYIKQLYYEYQEKGKSKMSSLGIIMHKITRIIYGMLKSGTEYEPQIDQKNREESKRNKPLRTVKNIKRRFQSIDEKAPISRRQTNKRKEQEPSQNGVTIKHGIEHPAQDNYSMEEKQVPIFK

SEQ ID NO: 456440 - protein, 347 aa, unidentified
MNYIGVDCHISTLDFAVVDGKGNIKKKACVNTGAKEFMEFVRSIPAPRKIYIEEGELANWLLETSRRFGEQLIITDPRENKWISKAKQKNDPIDATKLAQLARGGYIKEIYHPVNDRRRFKELVFAYHDTVKSQTRIKNKIKACFRREGIKCSGETVYSETYRAEWKEKLPKNTIVNLIIDELWIQLDQLQNTKEKIKINIRTYARKYPEIRRFMKVPGVGLIHASTISAIIETPHRFANKKKVWMYAGIGLTERGSGEKVYSRQLTREFNRPLKNAIKKATEAAIHGNNNPFMRQYLRLTIEKGVPSHKAKLTVARSLLSALYIIWKKGEDYDPDIDKKRDKGSKK

SEQ ID NO: 456441 - protein, 348 aa, unidentified
MAIVIGCDLHSRFQQVAVMDLGSGELLREQRVEHEGEQVRSFYQQWREPVTVAIEATGYTAWFAQLLAELGHRLVAGDAARLRAMEPRRQKTDRRDALLLANVFASGRYPVIWMPDAGRRDLRHLLLHRDRLVRCRTQVKNHLHALAMNHGLCRKQALFTMAGRKRLEALATAPFEGWRRAELLESLDGLNGKVQLADQELERQLEIWPEARRLRTHPGVGPVTALAWVAFIGDAHRFANSARICSYLGLIPSEASSGGRQHLGAISKQGNSFVRFLLVEAAQTAVRGDLELGRWYHRLAVAKGRPRAKVAVARKLAVRLYWMSVRGVDYSALGTDGNTQAGSRGPLA

SEQ ID NO: 456442 - protein, 386 aa, unidentified
MQKLNDLSRSLIALEPAGTLIAVIEMSLSSWLVAGIVPGVERQPLKKLAVDESALLKLLHRWREEAEKAGRRIERIVVAFEAGRDGFWLARWLKAHSIEAHVIHAASVAVSREHRRAKTDRLDTELLKRAFLGWLRGERDHCKVVAIPTLKDEDAKRPNRERESLVGEQSRIVNRMKAALIRLGIRGFNPKLKRAAGRLDSLRTPEGEPIPPNTLAELRRDMERRRLVSNQIRQIEEARLERFEQTPNDGPHAMVRLLARVVGVGIETADMLVHEVLSRNMRDRRAIARYAGLTGSPDESGRKRREKGLARSGNGRVRRGMVQLAWRFLTYQKESALAQWFRARTENALGARKPMIVALARKLLIALWRLVRQGVVPDGVVLRPAQ

SEQ ID NO: 456443 - protein, 334 aa, unidentified
MAKRTTICAGIDTGKWKLDVALDGSSEQLQVENTPEGHKVLLAWLRQHRVKRIGIEASGGYEQPVVAELRRKRFVVVVFQPAQVRAYAKFHLQRAKNDKIDAALIATCTAAVKTIHAPPDARLLPFAEHLTMIDQIGEDIARLKNRLETCRNPQFRQTWKEDIARLEKREKIELKALVAAIRKHGDLATRLDLIYSVDGIGLPTAVAILVRMPEIGRITREQAAALAGLAPYDDDSGTQVGARHIAGGRKRLRLALYTAALPASFRWNPQLIALYQRLMAAGKEHKRALIACARKLLIFANTVVARGKPWDRKPPPARLHDRGPTSGLTPLSVS

SEQ ID NO: 456444 - protein, 410 aa, unidentified
MKEQKRKIKANTVLVDHRNIVGIDIGKRKHAATAVTTKGAVIATLKSFENNRAGVDLLERQVLRPATNRSKPLVAMEATGQYWNALHDELQRRGYTCVVLNPIQTSNRSSKQIRQAKTDPLDSAVIARTILAGDAKATLVPDESIYELRLLVRHRWRMIKVHGAVLRYAIGLLDQVFPEYDGVFCKPFLTSVRTLIRDVGLTPKSLVSKKAMVIQTLQKASRKRLSMETIDDLLKRAKDSIGTRQGDTVINDQFRLVADYLDFVEKQVQSINKELRSRMETLNSPLMSLGIGAEIAATILAESGDLTRFPGPGEYAAFCGVDPSVRDSGDSVRGISHISKRGSPLLRWALYVSAQTMVNKHRDFAKIYERHVNRRKGHRFSLIAVAHKLARVIWRLAKDGRKYTKRPPKR

SEQ ID NO: 456445 - protein, 311 aa, unidentified
MNNTIGIDISKDTLDVHRLTDGQHRQFLNGKAGHIQLLKWIRLQPGQLVIFEATGAYHRQLERTLGAKAFPFVKVNPKQARRFAQASGKLAKTDRVDCEMLAKMGAALQLVPQPPFAESLYDLRELLSARRALIKDRTAAKARKATVSNALVKQQLEKRLRQIESDIEKIDALMLELARQDQRMSERLDILFSIPGIGMITALMILVDMPEIGTLGNKQVASLAGLAPMSQSSGKWQGKARIQGGRPNLRNAIFMPALVAIRFNPDLKAKYDYLVAAGKEKKVAITAVMRKLLVLANALLRDQRKWAEKVT

SEQ ID NO: 456446 - protein, 394 aa, unidentified
MFAESEDDEQIIERVAALDIGKAEVVCCVRLPAPGGGKRRVQEVTTHSTMVGSLSELANRLVELRVERVVMEATSDYWRPPFYLFEAHGLDPWLVNAKDVKHLPGRPKTDVLDAVWLCKVAERQMLRPSFVPPHEIRRLRDLTRYRADLVGVRTAEKNRVEKLLEDACIKLSVVASDIFGVSGRDMLAAMIAGERDPKRLADLARSRMRPKIGLLEEAFAGLKVGTFSDHHRFLLARMLARIDQADADIAALDTQIEDHLAPFADAVARLDEIPGIGPTAAAVIIAEIGTDMTRFPTPGHLASWAKFSPGIKSSAGKSKGNGATGHGNRYLARVLGEAAAGAGRTDTFLGARYRRIMRRRGKKKAIVAVGRSILTSHIRGLEALGYRVTLEPAA

SEQ ID NO: 456447 - protein, 312 aa, unidentified
MSTSIFVGLDVSKSRLDLAVADQAAAAAFANDEAGIAALVTHLQDLAPGLIVLEATGGYETPVASALGVAGLPLAIVNPRQVRDFARALGRLAKTDTIDAAVLALFAARVRPEPRPLADPAQQALGALVTRRRQLVEMLTAERHRLALADGAVRADIAAHIRWLEQRVKDVNTDLHTHLKASPLWRAQEQLLRSVPGIGPTTAAVLIAELPELGRLSRRQVAALVGVAPFNHDSGTHRGVRVTWGGRATVRGALYMATLVAVRHNVVLRAFYHRLRTAGKAPKLALVATMRKLVTILNAMLKANQPWCPRTA

SEQ ID NO: 456448 - protein, 271 aa, unidentified
MQAVTTIGLDIAKSVFQVHGVDAAGQVLIRRQLKRRVVLGFFQKLPVCLVGIEACASSHYWSRELQALGHSVRLMPPAYVKPYVKRQKNDMADAEAICEAVARANMRFVPTKTPEQQSCLMLHRTRHLFIRQQTAVINSIRAHLAEFGIVAPVGRKGVTELLHIVADPSDKRVPEVARACLAALGNQLLSLKEQIVEFDRMIMVWHRSNETSKRLHYIPGVGPMLATALVASVADPRTFRSGRNFSAWIGLVPKQHSSGGQGQARQHQQTG

SEQ ID NO: 456449 - protein, 321 aa, unidentified
MVQSIGIDVSKGKLDVGLINLDQTTNNLQYGNDHHSIPSLVKALQNCQEVRDIPIVIEATGGYHYGITFALIEKGFKKVFVINPIITKKHLSSQIRKIKTDKKDALLLARIGLLENLHTYAESRQEVLFKRNIRLFHFLKKQLQQVNNRLSSAKSLSIENDFEQEMLLETKKNFATQLKKIKQVIIKGITVKIPQIKGLSELHLKAIIAELGNIDRFKNHKQIVAFAGMDPSIRESGSSVRGKSKLSKRGSKTIRYFLFQSAWGVMMHNEKYKEYYSKKRTEGKHYYTCLSAIARKLLCEIYHNLKEHPYSLSVDSQVSID

SEQ ID NO: 456450 - protein, 348 aa, unidentified
MSTYYIGADVHSNSTELAIEKRGKIVARYSVPTSIPAIINVLDSLQGKKYLAVEEGPMSGWLYRNLNKKLEQFISSDPRRNKLIASDGDKDDNIDAVKLASLLRGGFLREVYQSDDDSRAELKHWVSLYHDRVRDAVRGINKIRARCRMHGVTISRATLRDPVYRLKWLLKKNYTPLDSQLKMLWIGYDATVQQVIFSKRQLSTLSKKYNIIQDWSQLPGIGLIRATTIFAYLDTPWRFKKKNKLWKYCGVGLQRTTSGTDKKGRPKPARLKLPWAVNRTLKNAVLGAALSAINQKNNVFKDHYERMVQNGMITSNARHAVARKMLTVMWAMWKTNTPFDEKNVFLSN

SEQ ID NO: 456451 - protein, 341 aa, unidentified
MGQASTIGLDIAKWVFQAHGADATGRVVFRKRLVRAKVLEFFAGQPPCLVALEACGGAHYWARELGKLGHTVRLIPPAYVKPFVKRQKNDVADAEAICEAAQRPGMRFVPVKDEAQQANTVVFRARDLLVRQRTQCINALRGHLAEYGHVVPQGPAHVDSLVALVEDPKSSVPESARGILQVLIRTLNALEEQLKELDGEIARRAKADPVARRLMTIPGIGPIAATAITALVPAPEGFRAGRDFAAWLGLTPLQRSTGGKHKLGAISKMGERTIRRLLILGASAVVRWASRRGAAAGSWLARMLARKPRMLVTTALANKMARIVWALLVKGGTYRAPAVAA

SEQ ID NO: 456452 - protein, 347 aa, unidentified
MTYTLGIDLHKRTSAWVLIDGEYKEIWQKTSVLSHPHHISSVISSLPVPPSSIKVAIEPTCGWRWVSDMLVEAGMDVHFANPLQMRCISESTQKHDKGDARTLARMLQSGFFPEAYKVSDDIYALRTLLRTRYFFVRQATATKNFLQGVATTRGLHEYPGQHPLKKPGRLYIKQGDDIIAQSLLAHIDSHAERIKTFDAPLKVMLARYPDARLLMTIPGVGFLTALTVIAEAGDMRRFKDAGKLASFAGLVPTQRSSGDSVRFGHISHRGSRMLRTAITEAAMRIRSTNAPHLYSFYERLAVAKTAKQARVALARKLLAVMWAMVRTQTPFQEQTTVSAKSSLSAAR

SEQ ID NO: 456453 - protein, 469 aa, unidentified
MKRKSRRAKCQKVSPFSGDLQLIEPDAAAVDVGSRSHWVAVNPQRDPNPVREFGAFTADLISLADWLAQCEAKSVVMEATGVYWVSLYELLERRGFKVYVVDAHTVRHLPGRSKSDVKDCQWLRRLHSYGLLRGSFRPPAQIRQLRNYLRSRTKIVEAAAQQQLRMQKALTLMNIHLHHVISDLSGLTGLAIVRTIVGGERDPIRLARLRDPRIRASRETIQKSLEGHWQEELLFDLKIALESYDHFQGQIAAYDEQIRQELKEVESKVDLTNEPLPATRLRACRKRPGMSQQNQLDLREELYRISGVDLTRIDGISLQTAQKVFFEIGTDVSPWSDDKKFTSWLGLSPNHRISGGKVLKRGSRKVVNPLSVALRLAARTLRNSHSALGANFRRLIAKIGMPKAITAMARKLAVLIYRMLKYGTQYVDKGMQHYESKYQETKLQYLRAQAAKFGMILLPKQAAAIGVAS

SEQ ID NO: 456454 - protein, 313 aa, unidentified
MSYTSRFVGIDISKSSLDACVLPDGQTVTYQNTAAGIASFLAFLATVDDIERLVLEPTGGYERLVVAALQAARLPVAKVNAKQIRQFARACGQLSKTDRIDAFILADYARRMETRILPQRSSQERALADLVSRYRQLSHMIVQEKNRREKLTGRTKVWIEESLRFLLDQRQAIVDEMTACLKADAELGRKAEVLMSLKGIGLRTACFILADLPELGHTDKGQIAKLVGVAPLNRDSGLMRGKRMIAGGRRHLRDALYVAALPAIRFDPDMKAFFTRLKQQGKPGKVALVAVMRKMIIILNARMRDANATVLDA

SEQ ID NO: 456455 - protein, 411 aa, unidentified
MRLFVGDDWAEDHHDVEVMDEAGKVLAKRRLPEGVAGISQLHGLIGGFLGEEAGESEVLVGIETDRGPWAAALLAAGYRVYPVNPLLSSRYRDRHGVSGAKSDAGDAHMLADLVRTDSHQLREAAGDSPEAEGIKVLARTHKTMIWERTREVQRLRHQLREYFPAALEAFGDLDAPDTLELLGRAPDPGQARKLTRAQVSAALKRARRRDIPGKASAILAALRSEQLAQPAALTAAYAATVRSLLAVIAVLNEQVKSLEAQVKEHFGRHPDAEVYLSQPGMGAILGARVLAEFGDDPHRYADGKARRNYAATSPVTRASGKKKVVAARFVHNDRLVDALNAQAFAALSASPGARAFYDELRARGVEHNDALRRLANRLVGILHGCLKTGSLYDEATAWGHRKNLPQSSAAA

SEQ ID NO: 456456 - protein, 378 aa, unidentified
MKYVLVLDVAKSKSMFMLSSDVGEVLLEPTEYIHNKSDFERIDSYISKLNIKDNLTVIMEATSIYHKAPERFFKENNYHVIVFNPLIGKEITNTIRKTKTDKQDCIKLTNLFWKGSIPDRNYTEDEIYTKLNELSRQYYHLDEGLTRHKNRYKELLHLCFPEFELCFKDGKIYDLTALNFIKEFPHAYIIKDKRVDALAYNMANTNDRHLNYYKRKANIIKEYAINSYPGVSENSKDVDNLKQLANIIIEIAKQKEIIKEQMIELAKQTKNFECINSLFGIGELSASLIIAELKDITRFNNIKQINASCGLDPTIVQSGKSIDYHGPISKRGNRYARKILFNCSRNIVTLSAKCDKENPIYVYYQKKKQEGKHLKCTL

SEQ ID NO: 456457 - protein, 418 aa, unidentified
MLKIVYPICCGIDVHKKFVVATVGKTNKSGVTEYQTKQFSTFTEDLHQLLDWLKSQSCKHVCMESTGKYWHPVFNILEHNCEVVVANPKYVKGIRGKKTDKKDSIWLCDLHKHGLVPGSFIPPLPIRQIRDLMRYRFKLINFKSSEKNRVQNSLTVSNIMISSVVSDTFGTSSMRIINHILDHPDDTDFDVSSMLHGKMKDKTDTIVKSIQGHLTEPQANKMRVCIDHMESIEKHIAEIESVVLKLVQPYMPQIELILSLPSIKDIFTAIAILGEIGTDMSVFLSDKHLCSWAGLTPQNNESAGKKKSVRVSRAGVYIKPLLVQCANAAIKSKKYPYFKIRYDQIKKRRGHKKALIAIAHKLLVCIYHMLDKNEPFNEELYRIDSKPKPTYAPQITEEMALRYLKTLGYHIPDKNMHA

SEQ ID NO: 456458 - protein, 389 aa, unidentified
MFYVGIDISKFKHDCFIVTEAGEVVCDSFSINNDYDGFTELLSVLDSLDPKEDVRIGFESTGHYALNLKLFLEKAHYSFMEFNPVLLSKFNKSQSLRRTKTDAIDSISIARWLMTVDYKPYPIGFYHTYALKSLTRLRDSLVKQRSFYMVKITNVLDHVFPEFKPFFNNRFSKTAIYLLENYGSAKRIANMNARSYAVLRSISRGKFSMQKFLKLKELAKNTVGCDHELFTCQLNSLLSLYKQLANEIASLEDQIESLIAEIDPKTLSIPGIGPLSAAVIYAEYGDLSKFNSPAQMLSFAGLEPGYYQSGTSEHGGGMVKRGSSHLRYTLMNLCIPLIQYNMTFAEYYHKKRNEGKSHRVASSHLVKKLIRVIFTLEKNGIDFDPTKLR

SEQ ID NO: 456459 - protein, 341 aa, unidentified
MPIVTIGIDLAKNVFAIHGVDDAGKAMPIKPHVPRDQLVALIAQLPACLIGMEACSGAHHWARVFQQHGHTVKLMAPNLVAPYRMSGKRGKNDAADAAAICEAVTRPSMRFVPLKDEHQQATLCLHRTRQGFVEERTATYNRLRGLLSEFGVVLPQSPEKLRRYITEHLDTLPGWAKHSISDLLDHAGNIEDRLIEYDRAIAGIAREDARSKRLMQLRGIGPTTASALLASIGAGHDFRNGRQVAAWIGLTPGQYSSGGKARLGSITKAGDAYLRGLLVNGARAVIASLGEKQDRFSRWVRTLVERRGYWRAAVAIAAKNARLAWASLKYSDDFKLEPVAD

SEQ ID NO: 456460 - protein, 325 aa, unidentified
MIRPTLGIDIAKLKFDVCLINLDGKLRHKVFPNTAAGFSQLAVWLTKQGVMQEMHACLEATGTYGEALAYYLHQDDYTVSVVNPAAVKAFAGSRLSRTKTDKVDAELIARFCLAQQPLAWTPPAPEVRELQALVRRLESLIEMRVAEENRLEAGSVVAAVRSSVEAHVVYLAAEIKRTEEFIRNHIDTHPTLKQQSALLDSIPGIGKTTAALLLAEIVDVTQYGSARQVAAYAGLVPRERRSGSSVRGRTRLSKIGNARLRKALYFPAITALRCSSFFKEWATGLRERGKCKMSVIGAAMRKLIHLAYGVLKTGKPFDPQWGKTA

SEQ ID NO: 456461 - protein, 411 aa, unidentified
MRLFVGDDWAEDHHDVEVMDGAGKVLAKKRVPEGVTGMAQLHGLIGARLGEDLDEAEVLVGIETDRGPWVTALIAAGYRVYPVNPLLASRYRERHGVSGAKSDAGDAHMLADMVRTDSHQLREAAGDSPEAEAVKVTARMHKTMIWERTRAVQRLRHQLREYFPAALEAFEDLDACDTLELLGKAPEPARAARLTRAQVSAALKRARRRNIPDKATAILAALRGDHLGQPAVLTAAYAGTVRSLIALVTTLNEQVKALEEQVRDHFGRHPDAEVYLSQPGMGAVLGARVLAEFGDDPRRYADGKARRNYAATSPITRASGKKRVVAARFVHNGWLADALNAQAFAALNASPGARAFYDQQRAKGHEHNDALRRLANRLVGILHGCLKTGTVYDEATAWGHRENLPQSSLVA

SEQ ID NO: 456462 - protein, 420 aa, unidentified
MREVSLFWIGVDWGDNTHAVHVFQPCSGNVKKCQVNHTVEGLGVLVSRIKELGVEHIGGIAVESTRSPLLSALLEIDCPLYMINPKVSENWRQAYTPAGAKSDGGDAIILAQGLWHHHNHLSPVKLDDVSRRALRALTEVEQSLIAQHTSHVLSLKAMLKQYYPYALEFFDDWASPVAWEFLLAFPTAASLAKATKNKLIRFLQARHIGMKPKWQRRIDNRAKALDWPHDSAQEEAYALYAQSQAKMLCALEKELKKLRKRIEESFAKLEDAHIYESLPGAGKKLAPRISVMFGGDQEMFDTADALRELSGTAPVTCQSGKRKVVHKRRACRKKWRDTMHQFAFHSKRKCRWARAYYKLCMARGDNNATALRKLANKWLAIIFRMWKEGVVYDEDKYVESLKKRNSTTYQYMLTLGYAQK

SEQ ID NO: 456463 - protein, 316 aa, unidentified
MSAPVFVGIDVAKSELVAAMRPSGESWVLANDETGIQDLLQRLKSVEPALVVVEATGGYERGLVGALAAAGVPLVVANPRQVRDYARSTGQLAKTDRIDAQILALFAERVRPEPRPLPDEATRTLAALLTRRRQILEMMTAERNRLTHAIPSVRRDLIQHIRWLERRLRDVDQDLDRTVQSSPVWRAKENLLRSVPGIGPVVSRTLLGDLPELGALNRKQIAALVGVAPLARDSGTLKGKRLVWGGRAPVRAALYMAALVASRRNRSIRAFYTRLVEAGKPKKVALTACMRKLLTILNAMVKTNATWRSLDHLKIA

SEQ ID NO: 456464 - protein, 372 aa, unidentified
MAQSTALFVGLDVDKDSIAVAHAAGGSAEPPVFVGAIGPRQADLDQLLRRLQGKTSALTFVYEAGPSGYGLYRYLTAKGLPCQVVAPSLIPKKPGDRVKTDRRDAVELARLLRSGDLTAVYVPSVEDEALRDLCRARDAARVTGKDAKLRLKAFLLRLGRHYVGRATWNDAHRRYLAKVVCPTPAQQIVFQESVRAVDEQIDRIQRLDAELLERAPAWRLYPVVQALQALRGVQFLVAITVVAELGDLTRFDNPRQLAAFVGLIPSEYSSGGSRRQGGITKAGNGRARRALIEAAWAYRHPAKVSAHIQSRIDRLPKPIQDLGWKAQVRLCKRFRRLVARGKHPNVAVTAVARELIAFMWAIAKEVPVRVPA

SEQ ID NO: 456465 - protein, 343 aa, unidentified
MNISILGIDIAKNTFQLHGTDSIGNTVLKRRLARYKLAADVANIPPCTIVMESCGGANYWARVFQRSGHTVKLINPQFVKPFVKTNKNDANDAQAIVEAASRPSMHFVPIKQVEQQDIQSIHRIRTRVVKNRTALINEIRGLCLEYGVILTTGAARVKPSLCASIANSDNELTASSRGCMQDLYDGLVEVECRLKKLDTKIRQLCRQDERCKRILKVPGIGELTATAIVAAVPDPKEFRNGRHMSAWLGLVPRQSSSGDKLRLLGISKRGDRYLRTLLIHGARAVLSHYKDRDNDYARWVGRKKATLSHNKAAVALANKNARIIWSMLSSGEEFNYGVQTAAA

SEQ ID NO: 456466 - protein, 384 aa, unidentified
MRKEPVVSKNNTRFVGLDVHGETIAVAVADPGGEVRSVGTIPNRPEAVRRLVRKLGEPETLRVCYEAGPCGYVLYWQLTELGVPCVVVAPTLVPVKTGDRVKTDRRDAEKLARCHRAGDLTAVWVPDAAHEALRDLVRAREAAKKDQLRARHRLLKFLLRHGRRRPENVTVWTQKHLLWVKGQCFEQAASQATFLDYLHEVDHAADRVERLEKALDEVLETIAPEMKVVIEALQSLRGVRKLSAATIVAEVGPLSRFNHPRKLMGYSGTVSSEWSSGAKTSRGAITKAGNAHLRRIVVEAAWAYRHRPAISKELRRRQKMASEKVKGIAWKAQHRLTERFRKMVGRGKPNQKVATAVARELLGFIWAIGIQAEREHAAGQLHAA

SEQ ID NO: 456467 - protein, 338 aa, unidentified
MKLYGAIDLHSNNNVTVLIDEQDQVVYQKRLPNDLPLITQQLSGYRDRLQGIVVESTYNWYWLVDGLMDQGHRVHLANTAAIQQYEGLKYTDDHSDARWLAHILRLGVLPQGYIYPKEERAVRDLLRKRGQMVRQRTANLLSIQNLITRNTGSSIRSNRIKTLDAEQVDDLLPNSDLALAVKANLAMIQCADGQIDILERTVTDRIKLRAAFSFLKTVPGIGQILALTIMLETGEIKRFPTVGDYASYCRCVGSQKLSNGKKKGSGNTKNGNKYLAWAFVEAANFAIRYNARIKSFYQRKKAKSHGVVAIKAVAHKLCRACYYIVKDQVPFDVAKAFA

SEQ ID NO: 456468 - protein, 392 aa, unidentified
MIYVGIDIAKDKHDCFITNSDGEVLFKSFTISNNPDGFETSFQKIQSVSDDLTKVKVGLEATGHYSYNLLGYLLDKGLPTYVINPLHTNLYRKSLSLRKTKTDKVDARTIASMIMSDVNLKSYSDTSYHNEELKSLTRYRFDKVKERAKLKTSVSRLICILFPELEKLVPTLHMASVYALLSEFPSAHAVASAHLTRLINLLSQSSKNRYGKDTAVMFREAARNSIGSNMPTKSLELKHTIKLIQELTSEIDEIEAAIKQIMDEEIQSPILTIPGISYRMGAMIIAEIGDFCRFDSADKILAYAGMSSSTYQSGQLDNCYSHMEKRGSRYLRYALYNATKYVCHWDKSFGEYLAKKRSEGKHYNVAISHAAKKLVRLIFAMEKSRKAYLPTA

SEQ ID NO: 456469 - protein, 352 aa, unidentified
MKKNLFFIGLDISKADFAASIYKTPGQSIITKEAIPNDRKGFEMLLLWLNDHHIDKKNCRICMEATGVYSQAIAYYLLFQGFPLSVEPPLKVKRAFDPVGHKTDPVDSKQIAEYAYRFQDELTSWKPRDEILEKIRQLLSVREQFTKQKVALDNSIQAYSKQRVQVALIKKAQKETLNQLKKQIARIDKELEKLIKQDPEIFQRANNLDSIPGCGMLLAAHLLVITENFTKIQNFKRLAAFIGIVPYQHQSGSSVSKMAKIRHFGPGPSRKLLRLAAQSVATHNVTFRRYYLRKLDQGKPKPLVLNNIANKLLKIACTIIRNNTRYIKDYRSIHPMYLKSAWQSHSVRNDRK

SEQ ID NO: 456470 - protein, 309 aa, unidentified
MKEQLVYCGVDVAKAYLDTMIGKEKRHLPNNALGHRGLIQWIKQSGASVQVICEPSGGYERGLIRALVRGQIQVSLVPANRVRQFARAAGILAKTDRIDAGVLGAFGEAMKPPILTGSRLEQEKLRELESQRRHLSRLLVMEQNRGARLSDASVLRLNRSLVNQIKKQIEKLDLLIQNEINQSQELSTKAQKLTAITGVGARTAALLLAQMPELGQLNRREVAALVGVAPFNRDSGKMRGKRAIYGGRRFVRHGLYMAALVAARHNPILRVFYQRLRAAGKPAKLALTATMRKLLIVLNSALKSDLTYA

SEQ ID NO: 456471 - protein, 368 aa, unidentified
MQTIDTKPALYIALDLGSTKWTLALSDGRRRRPRQRTVPAHDLPTLFAEVEQARKQFELGPQTRIVSCFEAGRDGFWLHRVLLERDWQNVVIDPGSIARPRKKRAKSDRLDAHKLMDCLLHHDRGESVWSVVRVPPAEVEDVRRVERERERLKRERGALRSRFFSVLAVLGVPKESRVLAVDIDSLRDAAGGAVPPHARAELRRLQARLALVEEQRRELEQERDEAVREVPRVQKVYEMLVAVRGIGALSAFVLATESFGWREFDNTRQVGASVGLAPTPHLSDQSGFERGISKASRPQLRSLMVQLAWLWLRYQPDSPLSRWFVERFAGAGGRAKRIGIVALARKLYVTLWKYVTWGLVPDGMQVAA

SEQ ID NO: 456472 - protein, 342 aa, unidentified
MEEVSIIGLDLAKNVFQAHGAGADGSVVFRRKLSRGQLLRFVGGQLPCVVATEACASAHYWGRAIGDLGHEVRLIPPAYVKPFVKRQKNDMADAEAIAEAASRPTMRFVAVKSEAQQAAAMAYRIRDLLVRQRTQTINALRAHLAEHGIVAPTGPAHVGRLAALIDGDDGTLPEVVRSLARLLLIQVTELSEKISGLDRELRRRTSVDDTARRLTTIPGVGPITAAAITTFAPPVETFSKGRDFAAWVGLTPRQHSSGGKDRLGRTSKMGQRDIRRLLIVGAVAVVRWAARKGAPRGSWLERMLARKPKMLVAVALANRMARTAWALMRKGEDYKDPAMTAA

SEQ ID NO: 456473 - protein, 395 aa, unidentified
MKKLVDHIIHLKILLMIFLKYGIGLDMAMETFDACISLIDHRQHVQVKSQCSFSNNKKGFESFYGWVCKNLKLSLPAVYLMEATGIYYEQLAWYLHSKKCDLSVVLPNKAKKYKESLGLKSKTDRIDARGLAQMVCEQQCIKWKPLCDNIYMLRLVTRQIQNMTEQSVALSNQLHALQHGMFRDKEIEKMHQKQLTLLKKNTASLKSKVLTTIEADPLLKQKVEKIVKIKGLGYQSLAVIIAETNGFAAFESTAQLVSYAGYDVVANESGKRKGKTKISKKGNSRIRRTLHFPAFNMVKYEVGVFKNLYQRVYDKSKIKMKAYTAVQKKLLTIIYALWKNDQEFVDKTAEQKSGKAEQAPSLASAPQELKKLALEKTRAKQDRHPSKHRRMPSLA

SEQ ID NO: 456474 - protein, 452 aa, unidentified
MGKRSNGMTRGDANRNARLGALRAVLPRDHAVLGIDLAQSRQAAALVDHDSRVLARWRPRCSPWQLDDLLERAPRAALSAGFSGITVACEPTGHRWMIVQQLAAGRGVPLVCVQPLVVARAREAEDYTRGKNDDKDAVLIARLAGQLHCYLPEQAGVAWARLRHLGARRARLITQSSACKQQLRDLLEVAWPAALGAAGDPMASATWLASLGVALAAENGDLKAVHAAGQRQFIDTARTGLGPWGASRVCVRIATAVHAALRDGTGVLPQRPGALERALAALRDWKVVRQELAGVEAAMLGVLDQMGIRQVAGSIPGVSAVSVAAILAETGDPSRFSTARAMVKHAGLAPAENSSGNHNGAATISRRGRPALRLAAWRAVWAALRHNRVYAARHARLTTRAVDKLTTQQADAAIAAALIRQIHAIITRRTPWDAGIAAGQRRPRREVSAKAA

SEQ ID NO: 456475 - protein, 323 aa, unidentified
MDGTTVPRWDAFVGIDIAKNTYEVAFGVGGDIVSFDYDAKGFQQLRSRLGDFGRCLMVVEASGGLQRRLVADLLDEGFAVAVVNPRQVRDFAKGYGLLAKTDRLDAAVLARFARDVQPRTVSKTSENQAELVQLLARRRQLLELQTMESNRLPMATSKLTRRSLQRVLKLLEQQIERLNHAIAELIQSHDDYRDQDQILQSVPGLGPVTSSTLLGELPELGKLNRQEISALVGVAPFNRDTGTLKGHRSIGGGRSTVRAVLYMAALAARNCNPVIRRFADRLTQRGKPIKVVLTACMRKLLVILNTLVRNQTPWQLKLDASTP

SEQ ID NO: 456476 - protein, 511 aa, unidentified
MVYCCYHMQGGALVSSQSISPEERLHHLEGHYANRVIAFRQRLAQLDLTRVLIILLDIGKNVHWATASTASGLELVKPHRLPTTQTGLSQFIQMTDALIAEHNPSLVLLGHEPSGVYHEPWGRALLDYYAPNLASQATPPMEYTFFNPYQVKLARQQTHLRHRKTDPRDLAAMLDLTLRGLGQPAFLPTGNELLIRQEIGFIRAQSRLLGHLERQLRQQLDRLWPGAVVNVQQFRKAHPGLPLPTSIIQTRPLQRNRLRVLLTHCPNPYALHAMSDEELFALYRQHVGRCGPATIHILRSWVNNAVLLPPDVAAPLAEQLHRLFQQYIAAETLVEDGRGRLVPLIPLTPARHLPALPGLGVMDAAAYFAGVGSIDRFHRAAQVWAFAGYDPISDGSGDRPERVGHLSKHGDPPFRDALFQMGYRMAQNYAPVSLTFLDAFDRGKCEVEATIHAAHRVNRICFHLIKNDEPFEDRSTPQLEAERTRRWREFKAEKKRRGSRRKRGKRRSRRR

SEQ ID NO: 456477 - protein, 345 aa, unidentified
MEIRTIGIDLGKTVFHLVGINALGEVVVRKKGSRTQLLRFTSNLRVCLIGMEACGGSHFLGRALREQGHDVRLMPAQYVKPYVKTNKNDYIDAEACAEAVTRPTMRFVPIKSDDQLDLQSLHRVRERWVVRRTAVINQIRGMLLERGVTIRKGRHHIEESLPGILEDPDNKLSGALRVLLTQLRLEMQYLHGQIEESDQLIVRIAGELEPCTRLVAIPGIGPITATATIAAIGNGAAFKKGRGFAAWLGVVPGEHSTGGKQKLTGTSRRGNKYLRKLFVQGAHSVLLQRTKQTSPLSMWLASLTARKRKQVATVALANKMARMAWAVLYKGEAYRPPSVPQVNAA

SEQ ID NO: 456478 - protein, 349 aa, unidentified
MTDQRIPYCGRIVYVGIDVHKETYTVTCVCNKQIVKTVTMQADPAALAASLPRWFPGATLYSVYEAGFSAFVLHRVRTKAGITNIIVNPASVAVAANDKVKTDRRDSKKLAIDLADGRLRGIYVPTEAEELARLLPRTRAQIVKHRATIARQIKAKLHQFGLIAPSSRRLISSRYLREIATWPLPPELGVSLLLLAEQWRFATRQLIEMRRLLRDQAKAQEEIEKVYRSVPGIGEVVARTLATELGDMTRFANERALFSYTGLTPSEYSSGTSVRRGHMSRQGSSRVRHLLVETAWRAIPRDAVLKEIFDRIAATRGKKRAIVAIARRLTGRIRACFRQGTAYAVGTYA

SEQ ID NO: 456479 - protein, 347 aa, unidentified
MATSVIKQSVGIDVSKKELSVCFSNLEQGQRTRILSTKTFNNTSAGFKKLESWVLKLRQNEVPFCLLMEATGVYYEDAAYFLKAKDWSVSVLLPNKTKAFAKSLDYKSKTDKIDAKILAQMSLERSLPLWEPLSPKMLTIKRLCRERVALQDQKTVAKNQLHAKQHAHETEKNSLKRSEKLIQFLKKQIGQVEKAIGQEVETDAVLKEKIEKVCSIKGVALITAATVIAETNGFALIENKAQLVSYAGYDVVENQSGSSIRGKTKISKKGNSHLRRAMHFPALNAIKYVPELKALYERVFEKTKIKMKGSVAVQRKLLVLIYTLFKKNEAFDPSYPKTPALVTLQTK

SEQ ID NO: 456480 - protein, 344 aa, unidentified
MEHYAGLDVSIKETSVCIIDGTGRVVREVKVPTEPEAILAVLSDEDFNIKRIGLEAGPLSQWLYGELAEAGLPMICVETRHMRAALSAQVNKSDRNDARGIAHMMRVGLYRLVHVKTPASQKRRMLLTSRQLLQAKARDIENDLRGTLRNFGLKVGIVGAIKFEARIRELVANHPDLATIVDSLLVARRVLREQLSVLHRHLLAVVRDDEVCRRLMTMPGVGPVVALTFRATVDVPARFTNSKTVGAIFGLTPRRHQSGEIDRMGGISKCGDAMMRTVLFEAAQAMLTRTIKWSWLKAWGMKIARHRGMKRAVVAVARRMAVVMHRMWVDGTDFQWKREEVAAA

SEQ ID NO: 456481 - protein, 400 aa, unidentified
MDDIDDVGVFLGLDVGKSAHHGHGLTPAGKKVFDKQLPNSEPRLRAVFNKLAAKFGTVLVIVDQPASIGALPLTVARDVGCKVAYLPGLAMRRIADLYPGEAKTDAKDAAVIADAARTMPHTLRSLELTDEITAELTVLVGFDQDLAAEATRTSNRIRGLLTQFHPSLERVLGPRLDHQAITWLLERYGSPAALRKTGRRRLVEAIRPKAPRMAARLIDEVFDALDEQTVVVPGTGTLDVVIPSLARSLAAVHEQRRSLETQIAALLEAHPLSPVLTSMPGVAVRTAATLLVTVGDGTSFPTAAHLASYAGLAPTTKSSGTSIHGEHAPRGGNRQLKRAMFLSAFAALHDPASRTYYDRCRARGKTHTQALLRLARHRISVLFAMLRDGTFYEPRTPCLA

SEQ ID NO: 456482 - protein, 392 aa, unidentified
MVISVGIDVSKDKHDCFIVNSEGEVLADVFTIQNTRDGFNFLLQKIQDCTTPQDKIKVGLEATGHYSYNLLGFLLDNGLPTYVLNPLRTNLYRKSLSLRKTKTDRVDARTIATMLLSDAGLKPYTDTAYHNEELKSLTRYRFDKVKERAKLKSSVSRLVCILFPELEKLVPSLHTASVYTLLEEFSGAKQIAAAHLTRLKTLLETASKGHYKRDMALEIRDAARNSIGSWMPAKSLELQHTIRLIRELDDEIAEIEKQIQAIMDELNSPITTIPGIGFRMAAMIFAEVGDFTRFDSPDKLLAYAGMSPSTYQSGQLKNCYPHMEKRGSRYLRYALYNATKYVCHWNPTFAAYLAKKRAEGKHYNVALSHAAKKLVRLIFAMEKSRQPYCSAA

SEQ ID NO: 456483 - protein, 339 aa, unidentified
MRLYAAIDLHSNNSVLVILDETDKIVHERRHPNDLPTILAALAPYRENIQAIAVESTYNWYWLVDGLMDAGYTLKLVNTLAVKTYDGLKYSSDEHDARHLAHLMRLGLLPTGYIYPKEERAVRDLLRKRSLLVRNRTLHILSIQNLVSRNSGNGIVATSIRKLDDEALSRICGGNSNLVLAIKSSLSVLFCLDAEIKGLESVVLAKARLRPEFKKLLTVDGVWHIIGMTIMYETGDIGRFTKVGHFASYARCVGGGRFSNGKKKGEGSRKNGNKYLSWAFIEAAHYAVMHNERIRKFYQRKKAKTNTVVALKSVAHKLARACYHIIKEQTDFSEERAFA

SEQ ID NO: 456484 - protein, 354 aa, unidentified
MPKTAITQIAVIGIDIGKNSFHVVGLDRRGAIVLRQKWSRSQVGERLANMPPCLIGMEACVGAHHLSRKLNVLGHDARLMPAKYVRPYSKGQKNDFRDAEAIAEAVQRPTMKFVPTKTVAQLDLQAMHRVRERLVSQRTGVINQIRAFLLERGIAVRQGRQFLRTELPTVLAARSDVLSTRMLHMIEGLARDWRQMDERIDKLSSEIEMLAHEDAGAERLMSVPGIGPIISSAMVAAIGTGATFSKGRDFAAWLGLVPKQISTGDRTILGPISRRGNRYLRALFVQAAWVVLVRVKSWERYGLKSWIEAAKKRLHHNVLAIALANKLARIAWAVLARGSNFEMRRSNELSTQPA

SEQ ID NO: 456485 - protein, 475 aa, unidentified
MNVKGNRRKKQEAKLSIIDQQTLLRKAEEIKSDLKASTWHELETNGKFDKNDKLTFISEDMLILGCDIGSETHYARAIDTRGRELSKSAFSFSNTEEGFKSALDWALKLAAENGKHQIVMGLEPTGHYWFCIATWMVNNGVSVVQVNPYAVKQTKEVEDNSQLKDDTKDPKLIANLVKDGNFGMPYLPEKLYADIRRLSMFRDQLTEDRIRNLNRLHRELKIYFPEYKDALGKTDGMFCLELLKKAPFPEDLTQLDSDGIRAVWRDAKLRGRGYAKAESILDYAKKSVGIKDGSDASRQAVKWYVNKIQELDVQLEDVQRQLNNRCGEIPYAENIQEISGIGETTLTGILAEIGDISRFDDVKEVQKLSGLGLVACSSGKHKGETKISYRGRKRLRYWLFQAAKSAVVHADEYRQLHTYYTTRANNPLKKMQSLIVIACKLLRVIYVILTKGTKYDPEKMLGDIKRPENQLTAAA

SEQ ID NO: 456486 - protein, 466 aa, unidentified
MRTIGLDLAVRAAHKAVVLDERGHFCTPIITVHTQPSELDHLLIRAREGAPSDEVQIVMEPTGMAWFPIAVYYARQGVASYLVNSQEVADLRRYYKRHAKSDRIDARVLARLPLVNPDKLHRLVLPAATAFACQRACKQLDHLATQITAIKNRLQAIDRFAWPGLEEQVFADPFAPAARFFREHWYDPRQVVLAGAELIGQQWEASALNASDGGAWVDPLVALAQQVLTLYGADGQYLDFGQLQAEVQRDQVWLTWLEQQHHTLRLRTVRPLYRAVHPSRNLETLKGVGQDSAAVYASFIGDPRRFSSTRLFRGWTGMVPNSEQSAENEAKGLHLSQAGPDLIKKYAYLDAEIARRYDPQIAAIYYDQMMRKGKHHKQAVCACATHLLDRVLAVLRSDKPYEMRDSDGTAISDQQARAMIVERNSVPQEVRRRTNKRNRRQQADQRAERRARREPGRQPLLEGQLS

SEQ ID NO: 456487 - protein, 418 aa, unidentified
MTKVTRDFSVYVGIDWANDKHDVCIQQANSDTRKFKIIKHSANSINDWIISLHKQYKGQIAVAVELSKGPIVYALQKYKFVTIHPVNPSMLAQYRKAFSPSGAKDDPTDAELALDLMLNYPKKIKALNMESEPVRKLTYLVEQRRRLVEDRRRFSNRLINTLKQYYPHLLDWFSHRGSGMFCDFITRWPNLQKLKRARANTLRKFFHAYPGRTASCTEQRLILINQAEPLTLDNAVIESHQLLAVALANQMLVVVEAIKIFDKEIRMLFETLPDAELYKSLPGTGPCLAPRLLVAMGENRNRFTSASEIQMYAGIAPVTERSGQKCWVHWRYQCSKFNRQSFIEWAAKSVHQSYWAGLYYRQQRSKGNTHQSSVRSLAFKWIRILYRCWKVKKPYDESKYLKVLRDRNSPLLFKENTC

SEQ ID NO: 456488 - protein, 365 aa, unidentified
MGLVMRPPQPESIMDKQLQNEVILGVDTHLDTHVAAIVNFAGKLLGVLATPTTAAGYLQLLSWARSMGNLKRAGVEGTGTYGAGLARLFREQGIEVFEVNRPDRARRRLQGKSDPTDAESAARSVLSGNATAIPKSQEGAAEAMRLISVTRRSAVKAKTQAINQLRAILVSAPQNVRERLWKAKPEHCVAGCAHLRSLGTTTLLQTLTIALRMLAKRWLMLAAELKEIDAALDKLTSAYAPRLRGQFGVGPQTAATLIAVAGDNPERLRSEAALAALCGASPLQASSGKTVRHRLNRGGDRSANNALWTIAMVRMRSEPRTRAYVARRTAEGMSAKEIQRCLKRYIVRELYPLILADLAPAVQIS

SEQ ID NO: 456489 - protein, 366 aa, unidentified
MSSVTPSAGPIHLGMDTSKNTIVVGILMPGDEIPVIDRIWNEEGAVRHLVGRLGDPAALRACYEAGPCGFGLHRLLASMGVACDVVAPSLIPRRAGDRVKTDKRDASRLARLHRAGELTPVRVPSAAEEAVRDLVRVRAALLADRKRAQQRITAMLLRHGRVWRSGSYWTQAHEQWIARQSFDEPALTAALVYYRAGLDTRRAELDAIEAELRTWAGRDPLAPVVARLGCYRGIAALHGLALAAEVVDWRRFPSARAFMGFTGLVPGEYSSGDKTRRGSITKAGSEPVRTALVEAAWAYRFKPAIGLTLRRRQHDATPDTLARSWKAQRHLHSKYKTMTSRGKPPAVAVTAVARELAGFVWAEMTS

SEQ ID NO: 456490 - protein, 345 aa, unidentified
MQLHTIGIDLGKTVFHLVGLNQLGDVVVRKKFSRKQLLHFTANLQVKLIGMEACGGSHFLGRALREQGHEVRLMPAQYVKPYVKTNKSDYIDAEAIAEAVGRPKMRFVPIKSDDQLDLQSLHRVRERWVMRRTAVINQIRGLLLERGITLRQGRRHVDEALPGILEDASAKLSGAVRSLLAQLKLELDHLQMRIDEADALIKKTARENEACQRLVAIPGIGPVTATALIAAIGNGGAFHKGREFAAWMGVVPREHSTGGQQKLLGISKRGNSYLRRLFVQGARAVLQQRTKQSSGLSAWLAQLTSRTHRNVAAVALANKLARIAWAVLAKNEQYRPSVVADVAAA

SEQ ID NO: 456491 - protein, 387 aa, unidentified
MEKKKGRVVGLDVHPDSFAGAVVEGTDPAGARVLSSSTRVELERLEQWALRHTREEDTLVLEASGNAFSVAMRLRAIGRKAEVLDSHRAGKVGKVYCANDRVDAVKIARIYLSALSPIVWQPDEKTLERREIFSAYQAVVKESTRAKQQLRSMLNEHCVRLEKGFRLCHPNALTRLLALREWTPARRMLLQQLHGTLVAARTRRTLLRRHMAQEIVAEEALLRLTRLCGINLITLYGVAAAVGDVRRFPHSKKLVAYLGLNPSVSQSGNFEGSGALKRHGRGALRALLIQSGKKLLEVNNPLQKWGLAVASRRGRNKAAVAVARKLCVALWHVLMGHAIGALERLDTLQTKLSKFATEMGPAALRAFGYNNKADFVEKKLYVLRTYP

SEQ ID NO: 456492 - protein, 417 aa, unidentified
MRIVRPICCGADIHKDLIVATIAATNQDGITEYIQSSFSSQNFDLVRLKAWLIEHHCFEIAMESTGKYWIPVFNVLEGEIKVFVVHPKYTKAIKGKKTDKKDSKWIADLFKHDLLKFSFIPPKEIRELRELSRYRIKLIAMRSSERNRYQNSMTISNIGLASILSDPFGKSSRAVMKEVMLSSSVTEEKISKLLERNAKKKVKEVLQSLVGSHIESDQRLKMNIASQHMDQIDSHVRRLETEMAIRCIPYATLINLLLDIPGISYLSAMTIIAEIGTDMSVFETSKQLSCWAGLAPANNESANKKKSVRISKAGSYLKPLLVQCALAAINSKSNPYYRIKYNRIKKRRGHKKAIIAIARMILVNIYHILSTGEVYSPCDMEQIINPKPVKKVMTIQNAIEFLQSQGFDTSKLISSSS

SEQ ID NO: 456493 - protein, 480 aa, unidentified
MIKSVGIDLAGTGEHKVRCLDEGAQPCDGFTFQSTPEGLAKLEERIFGDGSNPVIVFEPTGLAWLIVAIYLKARHPDCRLVRVQARKVVALRKYLRRSSKSDKIDALTLGKMPFIDPERLEEIYLPPAKIYAIQRLARQRKRLESEIGSRKKRIGSIVDGYFPRIRQAFSDPWSAHARGFLRSRLNPLAVVNAGEKALHAFLTKARQHGKADAVESHLVYLACQEAATVYKLSSSVGTIDEDFFSALQDEISRELRLMEIEEAESEAIAKHLEELYHELHPSDNLRTIPGVGEHTAPIFLATVGDPARFRSQSAFANYSGVVPAAKQSSDAEAKGLRMTKAGPATMKWALYQSGQIGRRGDPQLACVYYREMVHYGKNHKQAMGAVMSHIGARVLAVLREDRPYELRDIDGRPVTREEARRLILLNYQVPEEIKRERRRRKQVAGKAVKSSRRKREMAAHRTNEAATAPQPVEVMTISQS

SEQ ID NO: 456494 - protein, 341 aa, unidentified
MKKNIFFIGIDISKADFAASIYKTPKEPIVTKEAIPNNPKGFEMLLLWLKDHLIDRKNCRICMEATGVYSQAISYYLLFQGFPVSVEPPLKVKRAFDPVGHKTDPVDSKQIAEYAYRFQDELTSWQPKDEILEKIRQLLSVREQFTKQKVALKNAIQAYHKQRVQVALIKKAQKETLSQLEKQIARIDKELAKLINQDPDTLQKASNLKSIPGYGMLLAAHLLVITENFTKIQQYKRLAAFIGIVPYKHQSGTSVCKRAKIRHFGPMPSRKLLRLAAQSVATHDVTFRRYYLRKVAQGKAKALVLNNISNKLLKIACTIIRNNTRYIKDYRSIHPMYLKSA

SEQ ID NO: 456495 - protein, 392 aa, unidentified
MRKPKKQKPLNDLNRSLTPFDPNETLIGVVELSKGSWLVAGIIPGVERQPLKKLAPDEDGLLKLRERWRAEAQKAGHKIIRIAVAFETGRDGFWLARWLRKRGIEAHVIHAASVPVSREHRRAKTDRLDTEQLKRSFLGWLRGERDHCKMAAIPTFAEEDAKRPHRERETLVGEQTTIINRIKSTLARLGIRSFNPTLKEAPERLEKLRTPVGEPIPPNTLAELSRDLERKQLVAEQIHQIEKARMEQLKRAPKARPNLMVLVLMRVIGIGIETADMLVQEILSRNLRDRRAVARYGGLTGSPDESGSQRREKGLARSGNARVRKGMIQLAWRFLQFQKESTLAKWFEARTKNARTSRKKMIVALARKLLIALWHLVRDGVVPEGVVLRPAH

SEQ ID NO: 456496 - protein, 446 aa, unidentified
MCGGAVQRFPFTIFILGGNFLEVGNIVYPICCGVDIHKKFFVATLITTKGLVPHYQKRRFSTFNNQILEFKQWLLDNNCYDVCMESTGKYYVPVYNFLEDSIRVTVANPKWVRAVKGHKDDAKDSKWIGNLFRLGLVPGSFIPNKDIRIMREFTRYRFKLVSCKSSEKNRYQNVFTVCNVALDAVVSDMFGKSASSITNYIINSDIFDMDHCLSLLRGTLKQKSKEVAASIDGFQMATAQKLRANAVLKHYDFLVEHIKQLDAAIDYLAIPWESSILVLCKVPGIKRRSAITVLSEIGTDMSMFSSSKRLCCWGGLTPGNNKSAGKKKSVKITRAGVYLKPALVEIAHAAVKDKENPYYAIKYERISKRRGKKRAIIAIARMILTAIYHMLSTGEVWNPCDLNQVDMPPELREKELQKTIRRAANLLVAQGVVDVNNIKLPLANSA

SEQ ID NO: 456497 - protein, 351 aa, unidentified
MPRTTTVLAVTTIGIDMGKNTLHMVGLDSRGAIVLREKVSRGRITSRLANLPPCLIGIEAGMATHYVARELAALGHDVKQVPPTYAKPFRQGHKNDFRDAHAVAEAVQRPTTRFVPVKTDEQLDLQALHRVRSRLVSERTAVINQIRGFLLERGIIVRQGLRFLRQLLPDILAKRTDVLSPRMIRIVVDLAGDWRQLDERIETVTDEIEALAKSDDSCRRVMTVPGIGPIISSAMVAAIGSGAAFARGRDYSAWLGLVPKQMSTGDRTILGHISKRGNRYLRMLFIQAARVILVRPANWPKHGFGAWLGRAAQRLHPNVLAVALANKLARIAWTVLAQERSYEARVTKAAA

SEQ ID NO: 456498 - protein, 358 aa, unidentified
MNRNTGMNAGQIIGTMGGKQVIGLDIAKHVFQLHTVNMGTGEIVNVQIKRAKVLEHFVNMPQCLIAIEACGGAHHWARELTAQGHSVRLLHAKIVRPFVSGNKTDATDARAIWLAVQQPGVKLVGVKTAAQQATLTLHRQRELMMKMRTMQTNALRGLLYEFGATFAKGRKALFQDVEQTLEDLSTQLPQMVRDSLREQVARIKAISEDMLAIEKRLGLQLKADPPMQRIAQVPGVGLLTATAAIATMGEPSAFKSGREFCAWLGLVPKQTGTGGKVRLGGISKRGDSYLRTLLIHGARSVLAHAKEPGPWLEQIKTRRPVNVVIVAQAAKMARTIWAVTAKEQSYQRGFKSVRPQTV

SEQ ID NO: 456499 - protein, 449 aa, unidentified
MNPKKTKATSTQTLSVLNPNAAGLDIGSAEIWAAVPADRDAEPVRQFGTFTPDLYALADWLAACRIETVAMESTGVYWIPVYEILEARGFQVHVVNARHVKNVPGRKTDEKDCQWIQRLHQYGLLSGSFRPDAELCALRAYLRHRADLLEHRAAHIQHMQKALHQMNVQLTQVLSDITGETGLAIIRKIVAGERDPVKLAQLRNPRCQHSQDEIAKALTGNYRPEHVFALKQALALYDAYTEQLSECDGAIARQFSVMRPRHTCTALPPLDVTGKRNSHSKNTPRYDARTLLYRLVGVDLVAITGLNESTVQTLLSETGTDMSKWRTEKHFCSWLRLAPCNDISGGKVLRSRTLKTHNRATQAFRLAAQAASRSSHTAIGAYYRRMRARLGPEKAITATAHKIARIYYYVLKHRVPFQDLGGEEYEQRAREREIENLRKRGCSSANTLK

SEQ ID NO: 456500 - protein, 345 aa, unidentified
MYNMLTGVDLAKKEIQVCVAKSNKIIRNMAMTPTAFSNWLATQKPMTVVFEACATSNYWYQCAREYGHDARLISAKLVSNIRQNQKTDKNDAEAVLQASQLSNVNFISGKSKEQQELQSLVRMHQLSVKHKVAYGNQLCSLLLEFNIKLSPTDTGLNSAIQSILEDAENGFSAIFRDALHTAWHQYLKSIELVKHYEQSVARASRASEACKNLMKIEGVGPTNAVNLYIALGCCELGVFKKARDAAACIGLTPIQHSSGGKVRLGSKGKNIRNSSLRANLVAGAMSAVNQAVKRDSRTKKDEWIKGVVERRGKRCAAVALANKTVRTAFSLLRNGTEYKAELLAA

SEQ ID NO: 456501 - protein, 332 aa, unidentified
MSIIGCDLHSRYQVIAMLGMETGEITTRRLEHEGGEAERFYRGLEKPALIGIEATGYTQWFERLVGELGHALWVGDPAEIRARAVRRQKTDTRDAEHLLDLLVSKRFPRVWVPTPEERDIRQLLKHRDKLVKMQTSVRNQLHFLAMSQGVCRKRKLWSAAGRRELQGLRLGPWASRRRQELVDLLDGLGPRLEELDRAVKAEALRRAEAARLMEQQGVGPVTALAFVLTVGPVERFANSRKLVSYLGLNPREDSSGGHQRLGHISKQGNEMLRWLLVEAGHTAARLDPELRRVYQRLKFRRGGRVAKVAIARRLAVRLYWSLRRSAAGSHVQ

SEQ ID NO: 456502 - protein, 410 aa, unidentified
MKCFVGLDISSTKLDVCIMLSDTSTPVTASLSNDLSGATEIKNHILDLNHTYHFERIVIGMEATSLYSFHPAMFFHEDRQLKELHVEIMVEQPNKIKKYRDAFEENKNDTIDAFYIADYFRIERFSPSFLKEEKYMALQHLTRTRLQIIEQLTRTKQHFIENIYYKCNTLAYQFKKEELSTNLWSSTMMTLDELANMPLQELDDWLQKLGKGHFKDSEKLAQTIQAAIRGSYRLSKLQQDSVNVILGLLAREIRNLEKMIKEIDKAIEDMVETIPEYQCLTSIPGVGKVYAAGIIAEIGQIERFKDHPQVAKFAGLNWREKQSGNSNSQHTSLVNRGNRYLRYYLVEAANSVRRYDDEYKDFYKKKYHEVPKHQHKRAILLTARKFVRLVDVLLRNHQLYTPPRRIMEDN

SEQ ID NO: 456503 - protein, 323 aa, unidentified
MTRIICGVDVASKSLEARIGQQGATGSFASDAEGINALGDFCRTHQAELVAMEATGGYEQQAFAQLSGQGLAVAILNPRAVRQFAQSMGSLEKTDRIDAGMIAWYAEVKKAQPVCLATENQQHLRALVTRLRQLTKMRAIQLNQQRLVTDRKVQASFKKLLALLARQIGELEQGIAALLEKDPLWHELDQAFRTIKGVADRTVARLMAEMPEIGTLSNKTISKLAGVAPLANDSSKHQGKRAVRGGRAAVREILFIVASVVGRHEPDFIAFRERLRAIGKPPKVVRIALAHKLLVRLNAKAREVRLRMVTLQPNPAVLLAESR

SEQ ID NO: 456504 - protein, 405 aa, unidentified
MPYILALDVSMGHSYSVLYKDDTCLFEDEIEHTQRGFHALLEEIQHLPERPLIVFEATGIYSRPVEKFFQDHHFPYCLLNPLEAKKQMEENTLRSWKTDKSDAHRLAQTHLKNQRQPKEVQSNFYLEMRDLARFYQEIEKKITRLRMDLHNCLQLTFPELEQFFSNRLTPYALTLIRLFPHPDFVLASTRTKIKNKLINETRKKISANRAEQKADQIIHYAQCAYPAVEKDSIHCQKTIYYAELLQDLLEQKEALATQMIKKAEGSPCFLLYQTFPGIGALTAALLLGELGDITRFKTHKQLNAFVGIDIRRYQSGKYTGQDRINKRGNPKARKIIFFTIRNMIRQQRAAPNHIVDYYYKLKKQPIPKKDKVATVACMNKLLKCMHAMVRAHTEYDYAYAVSVDH

SEQ ID NO: 456505 - protein, 409 aa, unidentified
MKLFVGIDVSSKDLVTSMISEETTEVVFHGNFVNDLKGATELKNMIIDTANSNHLDQVVIGMEATSIYSFHPAMFFQEDSDLKKLNTQSVVIDPKKTKRYHDVFAEDKNDQIDAFYIADFLRVGRYSVGIVRQENYIALQRLTRSRYELVQSLARAKQHFIENLYYKLNKLVISDELNTSIFGSTMMSLLTEDMTTDDLLNLSITDLADYLNEHGRGRFANPEALAKTIQKAVRASYRLDKVIANSVDTVLSVYAEEIKAFQKMIKDLDKAIEKVVQVTDEEQILRSIPGIGPVYAAGILAEIGQIERFDNEAKLAKYAGLSWREKQSGAYASDNTPLKRTGNAYLRYYLVEAANRVRIQDPVFGEYYRRKYQEVKHTPSKRALVLTARKLIRVIFFLLKNHQIYQEKR

SEQ ID NO: 456506 - protein, 347 aa, unidentified
MATSYIGADVDSKMTELAVERNGRIVCRQRVETSIVAIKQFLAGVGGRKALSLEEGPMADWLYRNLKDSVDELVVCDPRRNKLIACDGDKDDPIDAGKLAELHRGGYLRAVHHSDSAERVLLKQWVGLYHDRVKEAVREVNKIRARCRMHGLRPPRGFLCNAKVQKQWLAELGGHGVRGQLELLLPGLGAVRQQVRRARLEMARRVKGHDIVDRWKDLSGVGPIRATTLLAYLDTPWRFGSAKKLWKYCGVGLVRTASGTDKKGRPRKGKLQLAWAVNRRLKGTVIGAAVSAIEQGANVFSDHYRRLQAQGVSPSNARHAVARKMLTTMWGMWKNKSRFEAALVCGG

SEQ ID NO: 456507 - protein, 340 aa, unidentified
MPLYGGIDLHANNSVVVLLNDQDQVIYQKRLPNHLPTILEPLNLHHGELEGVVVESTYNWYWLVDGLMEAGYRVHLANPAAMQQYSGLKYTDDPSDARWLAHLLRLGVLPEGYIYPKTERAVRDVLRKRAHVVRQHTANILSVQNILARNTGARFSGKRIQELTKQELTTLLADETQVLAVTSSLVVLDCLRQQIKTLEKTVHKHLHHTPSYEQLLTVQGIGAILAQTITLETGAISRFPSVGHYASYCRCVDSAKISNGKRKGTGNVRNGNPYLAWAYMEAAQFALRFQPEAQRFYQRKLAKSRNNTILARKAVAHKLARACYYLMRDCVPYEATKTFG

SEQ ID NO: 456508 - protein, 371 aa, unidentified
MISVGIDVSKGKSTVCILKPYGEIVSKPFNITHTQKDLSELSSMLFRLNDEVKIVMEATGIYHLPVLTYLQEKGFFVSVINPYLMKSYRNESLRKAKTDKIDSRIIANYGIDHWFKMKEFQTSGEIYEELKLLGQQYRHYMKLHLLSLAELTHLLDLTMPGIKNLLASWNETNRKDKRSDFVERFWHYDVITSMSEQEFTEEYILWAKEKKYVPSQEKAKVIYTLAQESIPTLPSETSSVKMLVTEAVRVLKEVDATLGLILSRMQEIAKTLPEYSVVREMGGVGNTLAPKLIAEIGDVRRFRNGKALVAFAGIDPPPYESGQFVSCNRKIWMNRMSIIAQSRIRNNEKFKNAFQTRRSGLPICCKKGIRR

SEQ ID NO: 456509 - protein, 387 aa, unidentified
MVAIMRPFGEVVATPFEIKHTEIELKKLVCILEKLPGETRIVMEHTGIYWQPIAKALHDAGLWVSVVNALLIHKYGNNSIRKGKTDKLDAVKIANYCLDHWLDLDRFTLIDPIRQELKTCHRQYDQYIKLKVNLKNNLITLLDGTFPDLNTLFKSAPRDVDGHEKWIDFAIKFWHRECVCGCTEKSFTNQYRKWCTKAGYRFNEAKAASIYAHAAAQVNTLPMSDAIKRLVILAASQLNTIIETLSVIQNEMLTLASKLPEFPVVMKMFGVGPVLGPQLIAEIGDVRRFHHKQSLVAFAGVDAPPCQSGTFESKNRHISKRGSPRLRKTLFQIMSTIIQHAPADNPVFQFLDRKRQEGKHYYVYMTAAANKFLRIYYGTVRAYLEDT

SEQ ID NO: 456510 - protein, 342 aa, unidentified
MDHFAGLDVSVKETSVCIVDDTGKIVREVKVASEPEALLAVLKNRAYHFKRIGLEAGPLSQWLFSALAEAELPVICVETRHMQAVLKAQINKTDRNDARGIAQMMRVGLYRPVHVKTLRSQKLRMLLTHRKLLQSKAIAIENDLRATLRNFGLKVGMVGTVKFEARIKELVENQPDLASLVEPLLIVRRALREQIVILHRRLLAIVRDDEVCRRLMTIPGVGPVVSLTYRATVDVPARFRKSKAVGAVFGLTCSKYQSGEVDRSGSISRCGDEMMRVMLYEAAQSMLRSKKWSWLKAWAMQIARRRGMKKAIVALARRLAVIMHRIWVDGTEFRWTREAATA

SEQ ID NO: 456511 - protein, 410 aa, unidentified
MDAIVERVGGVDVGQATVVATVLVGAAHERAKKETRTFRTVTRELLELREWFLAKGVTHVAMEGTGIYWRPVYELLEDAFEMILGNAQHIKNVPGRKTDVKDSEWLAELARHGLIAKSFVPPKPLRQLRELLRYRRKLMESRTAERNRLLKLLETANIKLASVVTDVFGVSGRLMLAALIEGAATPAAMAALAKGVLRKKAVELQQALEGRLEEHHRFLLQLPLRRLDQADADLATLDAHIDEALTPYQEQCQTLQQIPGVSRVVAAVIVAELGTDMTVFRSAQHAAAWAGVCPGNNESAGKRKRAGVRKGNVHLRTALVEAAVAASHKKGSYLRDKFYRLRARRGTKRAAMAIGHKILIAAYHMLATGMPYRDLGVTYLDAVEKRRTTRNLVRRLERLGYEVTLGTKAA

SEQ ID NO: 456512 - protein, 319 aa, unidentified
MANAGKVLSNRKCPNRLMDLVELVAAFGNEVFAAVEASNGAANLTDELLTRHGWSINLAHPGYVARMKQTPDKSDWTDARVIADLVRVGYLPKVWLAPEDVRQLRTLVRFRQQLVDQRRTIKLRISALLRDARLVEPKSRWGKAWMSWLKSVEGLGTEGRFVVDRHLIRNEQLRREITEVETRMAAVTAGDPVVEQLTNLKGLGTVTACALRAEIGRFDRFNTGKQLARYCGLSPRNASSGQRQADAGLIKAGNVQLRATIIETAHRLMRFDPQWAQLAGRLRKAGKPTNVIVAAVGNRWIRWLYHQVEGGTIRLAKVG

SEQ ID NO: 456513 - protein, 450 aa, unidentified
MSPLALDVVTKTDKTPVLGRMLSKYVGRKTSSIENGITKARNHSRQRGNIMRVVFGIDVSKASSEVAILVNGEKVHGYTIPNDAIGFNRLLGDLKTVHQPEIVFEATGVYSRRLQAFFEDNSYAYIRLNPLESKKQLNSLRVRKTDKIDAEKLATSQFILNRKPSYVQEALYQELRDLSRFYQNLTEDIVCSKNRLHKVLQVTFPELANILSSPTGKQYWNLVMASPCNSFVLELDDAALRAIIRQSTSKRISEKRVTYLVDKLTKLANHSYCAVKKTFPMMEEVKYYAGELLRLSEHRQGVVEEMVTLAQSLPEYEILLSIPGIAETTATSIIGELGDIRRFHSANQINAFIGIDLRHYESGDFLAKEHITKRGNPYARKILFKCIHNIASASHTNPCHIADFYEKRKRQSQVTSTKPHTIASIHRLIRTMYYLITHNKLYDYTSTQNR

SEQ ID NO: 456514 - protein, 402 aa, unidentified
MNSVGIDISKGRSTIAVMRPFGEVVISPFEVRHTDSELSELARQLKSLNGETRVVMEATGNYHAPVAKLLHDAGLYVSVVNAKLVHGYGNNDLRRVKTDRKDAVKLANYGLDRWLTLPRYVPEENTRLLLKNCYRQYRQYSKVQTVLKNNLISLLDMTFPNANRLFVSPARADGSEKWVDFVAEFWHCECVSERSLKSFVNKYWRWCRKHGYNFSEEKAHAIYDEASGHIGVMPKSETTKLLVEQAVSQLSATSAALAALKQEMQSLSSQLPEYPVVMGMFGVGPILGPQLIAEIGDVRRFYSKKALVAYAGIDAPPNDSGDVIGRHKSMSKVGASSLRRTLFLIMSAYLQNSPPNEPVYQFMDRKRSEGKPYRVYMMASANKFLRIYYATVKAYLETLEQF

SEQ ID NO: 456515 - protein, 401 aa, unidentified
MNTTTMLYVGIDISKDKSDICIKDVKGNDLIQRFKITNNKADLGRLYETIERIKSKTAGNSDVVFGMEATGIYSLPLYSALKRDGYKVKLYNPIQTNGFRKMNIRKTKTDPIDSAINADMLRFSEPPQVNPIKDLNLYQLRELVRIRDRLIDKQTVCKVQLIRNIDTVWPDYSSVMKRATGATSIAILKKYSVPSKVRAESFENFYELVKKKSRSKISRTTAEEIYTHAGNILTIPELDSIISVEIKTLITELELYDEQIRSIEKRIDQMMKLVDSKIMSIPGIGDTLGPMILGEIGDADRFSNAKKLIAFAGLDPVVSQSGRFENRSGPISKRGSPLLRKCLFLAANVARQNDENLKRFYDKKISEGKHHFSALNAVAAKLLRIVYWVLKNNKEYQTQLN

SEQ ID NO: 456516 - protein, 386 aa, unidentified
MQTLNNLSRSLIALEPASTLIAVIEMSLSSWLVAGIVPGIERQPLKKLAVDESALLRLLHRWREEAEKAGCRIERIVVAFEAGRDGFWLARWLTARSIEAHVIHAASVAVSREHRRAKTDRLDAELLKRAFLGWLRGERNHCKVVAIPTLKDEDAKRPSRERESLVGEQSRIVNRMKAALIRLGIRGFNPKLKRAAGRLDSLRTPEGEPIPPNTLAELRRDMERRRLISNQIRQIEEARLKHFEQAPNDGPHAMVRLLARVIGVGIETADMLVHEVLSRNMHDRRAIARYAGLTGSPDESGRKRREKGLARSGNGRVRRGMVQLAWRFLTYQKESALAQWYRARTENARAARKPMIVALARKLLIALWRFVWQGVVPDGVVLRPAQ

SEQ ID NO: 456517 - protein, 339 aa, unidentified
MSQHNLISIDLAKNVFQVCGMTDRQSVVFNRQLKRKDLVAFMINQAPVEVAMEACYSSHYWGRHFEAMGHQVKLIPAQHVTPFVRGNKSDHNDAIAIGEAARRPNLIPVPIKTIEQSDIQCIHRMRERYVRDKTGLTNQTRGLLSEYGVIGATGHKAFSKLIREVSAPEYEGLSPLLKDQLNSVADEYCYQNLRIQEYNRILSEMAHQHPLCQILLSIPGIGPINATAIYSAIGNGAQFNSGRQFAVWMGLTPRQSGSGDKFTSGGITKRGNRYLRKQLVHGARAVLFRSKGKKDLLNRWAHAVAERRGVPKASVALAARLARLAWTLMQKNTMYQSRF

SEQ ID NO: 456518 - protein, 342 aa, unidentified
MTIVTVGIDLAKNVFAVHGVDAAGKPALVRPSVARSNLLELIATLPPCLIGMEACSGAHHWAREFEKLGHTVRLMAPKFVAPYRLSGKRGKNDAADAAAICEAVTRPQMRFVPHKSIEQQGQLMVHRTRQGFVEQRTATLNRIRGLLSELGLVLPLKAATVRREALARLEELPGWANTVIGDLLSEVTRLDERITEYDRHIALMARHSTQAQQLMQLGGIGQTTAMALISTVGNGHDFACGRSFSAWLGLVPGQYSSGGKQRLGRITKAGDAYLRSLLVMGARAVLAAAMNTRTPKQDPISRWARSLAERRGYWRAVVAIAAKNARMCWAVLQRGEAFKMPA

SEQ ID NO: 456519 - protein, 338 aa, unidentified
MKRYIGVDLHKNSFRVCYYTSSKEHQFKTYKVRKTTIESFKKTLKKSDEVAVESTGNTGFFTREIEGCVKRIRIVNPIQFKVITNSVKKTDDEDALKIAKFLSKDMIPEVRMRSKEQSQISSLIGTRDKFVKLRTSLKNKIHNILNANGIVSKPEMFTGNKGLRMVLNMRLEESCRFEIELLVDQIKHLNETIDKISEELKERGSKLKGHKNLKSIKGISDTGATIFINTIGNINDFKDEKSLASYFGIVPRVYQSNQTTHYGRITKMGNKIARTALVQSTLVAIKYSPYLRSFYDKIKEKKGAGKAIIGTSRKMLGIIYNTLKNNWVFEDFSSFKIA

SEQ ID NO: 456520 - protein, 350 aa, unidentified
MMIIGCDLHTRYQQIAMLDTETGELVERRLEHENGEARAFYAALVGAVRVGIEATGHTHWFEAMLAELGHELWMGDAAKIRAAVVRKQKTDARDAAHLLELMCSERFPKIWRPSGAERDLRQLVWHRQKLVWMRGAVKNQMHALAMGEGVCRKKKLFTAKGRKELEGLALGPWASYRRQELLRMFDELQVSVARLDQAVEQAAKSQALAVRLMTHPGVGPVTSLAFVLIIGPVDRFPHSKQVVSYLGLNPQEHSSGGKQRLGSISKQGNPMMRSLLVEAGHTAARFDPQLRRVYQRLKFRRGASVAKVAVARKLAVRMYWMLRSTADYAQLVRMQGSPWATLVENSPSLG

SEQ ID NO: 456521 - protein, 417 aa, unidentified
MLKIVHKVCCGIDVHKKFVVATIGKTNNAGTTDYETREFSTFTETLIGLRDWLGSNGCKEVCMESTGKYWIPVFNILETECNVFVANPKYVKGIRGKKTDKRDSVWLCDLHKHGLVQNSFIPPWQIRQIRDLMRYRYKLTNFKSSEKNRMQNSLTVSNIMLSSVVSDTFGKSSMRIVRHLLDNAEDTSFDVAPLMHKGMKASAEEISKSIQGTLTKPQAEKISVCLAHLDDIDKYKTVIESAVLELAEPYQEQIKLLLTIPGIKDVYTALGIIGEIGVDMSVFLSSRHLCSWAGLVPANNESAGKKKSVRCSRAGTYIKPLLVQCAHAAVKSKECPYFRLRFEQISRRRGKKKAIIAIAHMLLNCIYHMLARNEAFDHDLYLIDNTPKSRFPPRITPEQAILLLESLGAQVIMPVAT

SEQ ID NO: 456522 - protein, 412 aa, unidentified
MEVVYPCCCGLDVHKKSITACVLWAEAKGKSRKEKRRFGTFTHDLLQLADWLGESGVTHVAMESTGVYWKPVWNILAEQFKVLLVNAQHIKAVPGRKTDQKDSEWIADLLQHGLLRGSFVPPQPTRELRDLTRYRVSLAQEINRIANRIQKVLEDANIKLASVATDALGASGRAILEAMLAGEQDAARLAELSKGLLRNKIPELQLALEGRMTEHHRFLLRQLFDHLRFTESKLSQIEQEIDRRMRPFQDEVIRLCTIPGVDQVTAWGILSEIGLDMNQFPSAEHLSSWASLCPGNFESAGKRLSGKMRKGNVSLRRCLSQAAWAISMTKNNYLSALYRRIAARRGAKRAIMAVAHALLVIAYHMLKRKEDYRELGADHFDRIDMNRTRRSLVRRLERLGHKVTLEPLAQTA

SEQ ID NO: 456523 - protein, 464 aa, unidentified
MNGAFQEGVYTPLLARKLISSKVDSILPDGQSLSACNYKSQEVIFLAFKIFRKNCCGLDVHKTWIYACIGITDTNGRTEYKQARFSSFSKGLKELADWLAKYRCFEVCMESSGKYWIPVFNILEKAGLFVTLAHPKYTKPQKGNKTDRKDAKWICDLFMCDMIKPSFIPPADIRHLRDLVRYRFKLTCMITGEKNRAQNCLTVSNLKLDDVFSDVFGKSSRSITEQILAHPGETFDVAPFVDKRCKTPIREIQAAIDGAVSPEQAVKLRQCLDHIDELEMHIEKVQQEIFRLSDKYQAALGLVRTVPGFDKNPMTAIQILSEIGGDMSVFPTAKHLVSWAGCCPRNDQSAGKIKSTRISRAGSYFKPVLVQVASALTRSKDHPEITNRYRRIKARRGHKKAIIAVCRMLLTAIWHILSDCKPYTPDGFVEPRPAEKSKVLTTAQALSLLKQRGYVISDSAPVLN

SEQ ID NO: 456524 - protein, 411 aa, unidentified
MRVHHTVCCGIDVHKKSVTACLMWGPADREPQWEIRRFGTMTSQLKVMVEWLKQANCEIAAMESTGAYWKPVWNVLEGKIKLVLANAKHVRSLPGEKTDNKDGKRIASYLRHGLIRPSFVPPRDIRELRDLTRYRQKLLANGAAERNRIQKLLEDANIKLGSVLSDVFGVSGQRMLQALVNQPTTDVEQVAALAHWRLAPKIEQIKQALEGHVTAHHRFMIDLSLGHMQYIEQQILRLDEEIARHIQPYQKQFQLLQTIPGIGGNASAAVLAEIGPDVSPFDDEGKLASWSGMCPGNNESAGKKFSSNTRKGNPHLASTLVESAWASTHTKNCQFKTRYYRLRSRRGPQRAIVGIAHALLRTIYVVLKTGQPYQEPLRPALTEDRRDRKTERLSRELRNLGYDVILRIKTP

SEQ ID NO: 456525 - protein, 344 aa, unidentified
MYPFYLGIDLHLKRTYVVLMDNMGQIVDERRLPNDEMQEYLITTVPQNTYAVLEATRNWPFMYDLLSEHVDRVELAHPKELHLIAKAVIKDDPIDSKALANLARLNYLPIAYAAPREIRDLRTYIRHREWLIVQRTRAKNRVHAMLAYYNLVSPVTDLFGSKGREYLDKVMPILRPAARRVVMDSLDMISHLNQNIDNLEDEMELTPEQKKQIKLLTTVPGVGKTIATVILAEIGDIQRFDNPKALCNWAGLTLRVRKSDLSVKHGRISKQGSAYLRVSMTRAAAVASRINKHWHLVHEGLVPRCGKKGAKVAVARRLLTVIYFMLKRDQPYQEDYSQCHAADR

SEQ ID NO: 456526 - protein, 355 aa, unidentified
MTSTKYIGLDVHKESISIAVLNFAGKVVMECVIETKASTILQFIHGLRGDLRVTFEEGTWAGWLYDLLKPHVTELVVCNPRKIALLKDGSKSDRIDAHKLADLLYMNKIKPVYHGEHGLRRLKELSRSYLTISKDLGRVMNRLKALYRSWAIPCAGTQVYAPRYRSEWLSKITEAGVRRRAELYYQQLDAVRLVRQQARKELLVEAKKHRATKLLRQIPGIGPLRAAHLVAVMQTPHRFRTKRQLWTYSGLGLETHDSAQYRIVEQQLQRSKKSVTLRGLNTNHNHDLKDIFKGAAMRASTAAGPLHDFYEALLAKGRKPTMARLTLARKIAAITLIVWKKEVRFDANYLKPQAA

SEQ ID NO: 456527 - protein, 486 aa, unidentified
MSQHNRRREKTTGPKTRLPRPHRDTAPALSVLKPHAAGIDVHSDMHMVCVPAASVPPASGDGGLPPNVRRFGANSCDLHAIADWLRACGVTTVAMESTGVYWVPLFELLEARGFEVWLVEPGQLSRCGARPKTDALDAQWIQRLHSYGLLQPSFRPVDSVLALRGYHRQRQMLVRYAAGHTLHMQKALEQMNVKLTEVVSDITGATGQRIISAILKGERDPRVLAMLRDPKCKNDAARIAKALEGTWRPEHLFALKQAHELYQFLHQQIAACDALIRAELVRLPDRAGGRAATTKPRRCGRKPNDLAFEAGRPLFRALGVDLTDVDGIDVGTALVILAEIGVDVSRFPTEKHFAAWLGLCPRQYESNQTKKKRGPRKGKNRVAIALRMAAQAVGRTQSPLGLFYRRIKGRIGGQGAVTATAHKLARLVYRMLKFGAEYVRQSMAEYELRVRSQLERSLRRRAAALGYQLVPRTPFGDGVPTPSNSA

SEQ ID NO: 456528 - protein, 344 aa, unidentified
MNIIRVGVDIAKSVFHVHGVDRHGKTVWQAKYTRTKWLNALSRKVPAGCSVGMEACASAHHWGRELQKLGYHARLIPAQFVKPYVKSNKNDKVDAEAICEAMSRPNMRFVALKTAEQQDIQAAHRIREELVGQRTAKANQIRGLVGEYGVISPVGIHQLRKALPKWLEDAENGLSDTFRTLLNSLAEDLRYLDDRIKSLDEKITENVQKDSVARRLMTLRGVGPLTASALSGALGDGKAFRKGRDFAASLGLTPRQHSTGGRDRLLGISKRGDSYLRKLLVHGARAVLRHVDSKNDGLSHWLKCLTSRKHINVATVALANKTARIAWALVANETAYDETLAAAS

SEQ ID NO: 456529 - protein, 392 aa, unidentified
MNRNRTVADLDVHKDSIYLCIMGYNESVIFQKTYGVLTPELRQMRDDMLCRGVTECAMESTAVYWVPVWNELCGSMDLKLVNPYFIKQLPVKKSDVKDAQWIAECVLKNLIKGSFVPEPIAQDMRKLNRRIMDLNEDMTYNCNKLDAALQRCGFRLSNYVSSTKSKSYQSVLKAIIEGQTCPEELVKLVHGRTLNKHGRENVKAAVTASFSKTDLTVFRQLKETIDLVGRQIKECQKELTALCKEHFPKQYERLQTILGVKGRAATAIIAETGIDMKMFATAACLVGWCGLKPRNDVSNGHYKSRKVTHGNRYLRQILIEIAWAASRTRNCFFSNFSYIQTTVKKKSKMKIQVAIARRILVAVWHMLSKEEDFIDVYLKRLEEQRAKGENNG

SEQ ID NO: 456530 - protein, 457 aa, unidentified
MRKQVRRTPRTQVRVDALQQINLHAAGIDIGDSEMYVAVPEDHAEQSVRVFGTFTRDLVAIADWLTECRVITVAMESTGVYWIPLFEVLTERGFDVLLVDARKIKNVSGRKTDIEDCQWIQQLHTYGLLNGSFIPDQQIRALRDMVRHRANLLRYRASHIQHMQKILQLMNLKLTNVLSDITGTTGMQIMRAIVEGKTDPRYLSQFRDSHCRKSHADIEKSLEGNYRPEYIFQLRQLLDLYDYYGSLIQQLDQETEHMYHQLPSRVDPTAQSAKPRKRNANRRMKNAPDYDLRTQLHRITGVDLTRVDGLNASTVQDIIADIGTDMSKWPTSKHFCSWLRVCPENKKTGGVVFSSSTKKTKNRANKALRMAAFGLTNAQCALGAFYRRVRAKHGGPAAITATAHKLARIIYKMLKFKVEFVDLGADYYEEKFKARIVHNLKHRAESLGYELVPLSSV

SEQ ID NO: 456531 - protein, 388 aa, unidentified
MYLVGIDISKYKHNCFIATKTGVQLKEFVFENNLEGFKMFHQSLFELDQSQEIRIGLESTGHYGTNLKQFITASGYTYLEFNPYLTHQFSKAMSLRKTKTDKVDAKTISNMLGSVDYKTLHTQFYHNNELKQLVRDHDDILTNRSKTLVKLTNLLDISYPEFKPFFNNRLGSTAFFILKKYKSAQRISKLAMKDYEVLKSKSKGKFTYSKFSRLKSLAKDTIGVQSEIYVKRIQMLIRDYEYFDQSLEGLDQEIINLFGEVKTKLTSIPGLGIIQAATIYAEIGDIHLFSNPQKLIAYVGFDVSISQSGMSEHYGKIVKRGSPLLRKSIWTYALPSLRFIPVLHDYYHTKKSEGKHHKVALTHVCRKLIRMIYHIEYNQIDFDDKEIK

SEQ ID NO: 456532 - protein, 425 aa, unidentified
MGKRKNRVCGADVHKDIIVATILNSDNTEFQGKFGTTSMELGRFRDWLIAHNCEQVAFEATGVYWFPVYDALSPSIDTIVANPWMIKGIPRNKSDTLDSKWIADNCLDGKIKRSRVLPKDDRDLRTLTRARSAYTKTRTQLRNRIHKYLALCGITLSSYISDIFGKSGRHILDGLIESKDIDTILDSIPSGKVKKKRELIKASLGKGLDDVSRMLVKDTLELLHHLEEKVNDTSLEILGRLQERAKDLAIVMSVPGIGFVSASIILAEIGDYHDFQTSEQLVKWCGLAPGLNESAGKKRPCRITKQGSKSLRTILVEIAQVVAKMSNNKLSRFFHRLRARKNYNLAITALARKLISIIFHLLINQELYQENNCTTVKTKPIKKDLLCLSKEEQLKDGVAAIVDAFYHLKKKSPLEGVDRIPYPLI

SEQ ID NO: 456533 - protein, 391 aa, unidentified
MALFVGIDVSKEKFDACGINDEGKKAFSVSCPMDRGGFDKLILQLPKEPSLLLGVESTASYHIALFSYLTAKGYRVAIINPLLIANFAKLSLRKTKTDKKAASTIAEFLLLKKEALAMETEPPRLGELKDLSRRRERLTDQVTALKNDMKRILSVTFPELETIAGVFTKSTLRLLTQFPSAHAIREAGYDAVATIVTSHSRGRKSAASVKTLMDTATTSVGVASPSKDLILTQEASLLLHVQEQAEEIMKVIVRLSDEKMKRDTEILTSMKGIGDKTALNFLIELGGDIKVFENDKKLIAAVGIDPTVYESGKYRGQSKISKRGNRHLRRVIWLMTTKVIISNEVFRAYYFKRRKDGLIYKMAVLATAHKLIRVMFSMLVNQRHFEPERRK

SEQ ID NO: 456534 - protein, 411 aa, unidentified
MEVVYARCCGLDVHKETVAACLRVVMDGKAVKEVRTFATTTADLISLSVWLAENKCTHIAMEATGVYWKPVWHILSDGDFELLLANAAHIKNVSGRKTDVKDADWISDLLAHGLIRPSFVPDGPTQEMRTLLRTRKQLSREKASHILRIQKTLEDANIKLDSVVTDIMGLSGRKMIEAMIAGQSDPAKLARLADPRVKASQETLREALRGRVTRHHRFLLRLHLQQIDALDDAIVKIDRQVEVDIAPFRTAIEQVITIPGVKDLSARAILSEIGIDMTRFSSDAHLISWACICPRNDESAGKRRSSRIRKGSPWLKTTLVQCAWAAARTKGSYLQAQFHCIRARRGPKKAIVAVAASILTAIYHMLKDGTMYQDLGPKYFDRRDHERQKRRLVQRLADLGYAVELVALVSP

SEQ ID NO: 456535 - protein, 350 aa, unidentified
MIYYAGMDVSLEETAVCVVDETGRIVKELRAASDPRALVAALREVGFPLERIGMEACSMTAWLHDELVAAELPAICIETRQANAAMKTMPNKTDRNDARALAQIMRTGWFRKVHVKSRQCRLWRSLLVARRTVLNEMRSIENVVRAILREGGLKLGTPARSAFADKARGMASGDGQVMALIEPLLCVLTTMLREFDRLTKQVLKIVKGEETCRRLMTAPGVGPITALAFRATIDRPERFQHSQDVGAHLGLTPSRYQSGETDIQGRISRCGDEIVRTALYEAAHCLLVRSKKWSSLRAWGMNVAKRRGMARARVAVARKLAVILHRMWTDATPFRFGKEPGAKAGQAATA

SEQ ID NO: 456536 - protein, 453 aa, unidentified
MEQPREVQDEEHERVWERVAAVDVAKGSGVVCTRVPDEDRPGRRRTRIWTVPARSAAIIELGDYLRARQIQVVTLESTSDYWRIWFVILEAAGLKVQLVNARTVKNVPGRAKTDKNDAVWLAKLTEKGMLRPSFVPPPEIRRLREFTRLRASLVHDRSRYWARLEKLLERAQIKISDVMSELNSVSGRAMIEALIAGERNPRTLAALARKSLRTKIPELIEALTGQFEDHHGELARMLLDQIDALTAQIGQLTTRTGELLEQIPAAWGVDADGTTGPQAGTGPVAPVLPAVARLDEITGCGPYAAQAIIAELGLDMTIFGTPARLVSWAKKCPQTRQSGQKTTRGKQDKGNPWLGGILGEIAASAARTDTFLGERYRRIARRRGKRKALAAIARSVLIIIFHLLADPQARYHDLGPHHYDTHTDRDRKIRNHVRQLQALGIDVILQPRTEPAA

SEQ ID NO: 456537 - protein, 341 aa, unidentified
MEKYVGLDVSMEETSVCVLDGGGNIVFEGKTSSQPDALSKLLRAKASDAARIVLETGSLACWLWHELRGRNFPVICLDARHARAALSMRVNKTDRNDARGLAELARMGWYREANVKSMESRYTHSLLAARAKLVDLRRDVENQMRGLLKGLGLPPGKAGIKALLEKIVVIMREAPHLRMLFNPMMLAHSALVTQVEFYDVQILKLAKGDETTRRLMTVPGVGPATALAFRSTLDDPNRFKRSSDVGAYLGLTPRRYQSGELDRTGRISKRGDRLTRLYLFEAASVLLSVVKRWSVLKAWGVRLAKRVGIKKAKTAVARKLAVILHCIWVDGTEFQWGKEKA

SEQ ID NO: 456538 - protein, 403 aa, unidentified
MNSVGIDISKGRSTIAVMRPFGEFVISPFEVRHTDSELSKLARRLKSLNGETRVVMEATGNYHAPVAKLLHDAGLYVSVVNAKLVHGYGNNDLRRVKTDRKDAVKLANYGLDRWLTLPRYIPEEDTRLLLKNCYRQYRQYSKVQTILKNNLISLLDTVFPNVNRLFSSPARADGSEKWVDFVAEFWHCRCVSEKSEKVFTNKYQRWCRKHGYNFSEEKAHTIYVEASGHIGVMPKSETTKLLVEQAVAQLRATSAALAALKHEMQSLASMLPEYPVVMDMFGVGPTLGPQLIAEIGDVRRFYSKKALVAYAGLDAPPNDSGDVTGRHKSMSKVGASSLRRTLFLVMSVYLQNAPLDEPIFRFMDKKRAEGKPYRVYMMASANKFLRIYYATVKAYLESLEHTA

SEQ ID NO: 456539 - protein, 462 aa, unidentified
MQKFYLGCDVSKGYSDFVIIDDQMNCVEENFQLDDTATGHAELSERISAFFEKHPSATLYAAVESTGGYEDNWYAFLLRQQGKFNLHAARVNPNGIAHDNKAGMIRNLTDKISARSVAEYQIRHPDKIPYGKRDPNKSLKKMWGRYRSLKKQMGVLLNELESLLYSANPELLPYYRSRMPQWLMLLLLKYPTAKMLARARVTTVASIPFLKKPLASVLVKNAKASTAEESDDLTAFLVSSTVSQIASLSKQITIFEQRFEKECDWPEVQLLMSINGVGRMTAIVLMLYIEDITRFKSAKKLASFLGVHPELKLSGDGSKKGSYKMSKKGQKAPRAMLYMSVLAGLSKGSRNDVIKRIYDEKRASGMVAKAAIGVCIHKLVRLAYGVLASSKPFDPAIDDKNREKSKPAEKPVPLSKDRRYQGFDTAAPVSRRQNKKRMEQIKSQDSYAVECGIKDHAPRALQ

SEQ ID NO: 456540 - protein, 368 aa, unidentified
MKQQTSTATETHNKSSKTIDYAGKTIHVGIDVHLKDWQIASVNETVVLGNHRMEGKVENVVSHLQKKFPGATFKCVYESCAWGFDLQRQLTARGMECIVVHAADVSGSDKERKRKTDKVDAVKLARYHAAGLLQGIYVPDEELQKQRNLVRFRCKLTRDLTRSRNRLKSLLKYQGIETPKQFGKARWSRNFLNWIEQEAQKDIALKDTLLFMLEQVKFLRQLLLEVERKLRVLMNSEKYNDSIKLLMSVPGIGRTIAILWLLEIGDVRRFENIDRLNAYVGFCPDTNSSGETQHDRGISTRRHNQLRVNLIQAAWQAIRTDPAMLETYQQLIKRMKGTQAIVRIARKLVRRIRAIQLHATLYQKGVIE

SEQ ID NO: 456541 - protein, 371 aa, unidentified
MGKHRLAFVAFDSAKNKHAVAIADGGRGAEVRYLGEIDNSPDAVRKLVAKLTRQYERLHFCYEAGPTGYGLHRQLTELGHVCDVVAPTMIPKRSGDRVKTNRRDSVALVKLLRAGELRAIWVPDSVHEAVRDLTRARATAMVDLKTKRQQLLSFLLRHGRGFPDGRNWTKTYERWLAKQTFAHPAQQIVFQDQLEAITTAQARLAALEQQLREIVPTWTMAPVVAAYQALRGVSFLVAITFVAEVGDVRRFATPQQLMAFLGLVPSERTTGDTIRRGSITKTGNHRARRVLIEGAWTYRFSARVSETLRTRLKDLPSSVRAIAWKAQVRLCARYRRLIARGKKTPVVTTAIARELSAFLWAIGQQVAPQTR

SEQ ID NO: 456542 - protein, 352 aa, unidentified
MNQLKYIGMDVHKAMSVISVLNSEGKELTQAVIETKSTTIIDFIHGQRGTLHVTFEEGTQAAWLYDLIRPHVASVLVCDPRKIVTQGNKADKIDARRLAELLRTKGLTAIYHGEQSTRAVKELTRSYQEMIEDSTRVKNRLKALFRARGIDCSGSAVYTPEERKNWTAKLEHEAVRARAGRLWEELDVLEKLCEQAEDDLNTEARKHAAIKILQGIPGIGPVRAAVILGIAGTPHRFRSKRQFWNYCGLAVTSKITSEYLLVDGRISRSKKQPLVRGLNRNYSRTLKDVFKGAAKTAATGAWKSHFDAMVAKGQDPPLALLTIARKIASITLALWKRGERYDQKKVEIWHAA

SEQ ID NO: 456543 - protein, 348 aa, unidentified
MSQRHYIGLDVSARTVNLCIVDHDGQVVHERKLSSDPEEIAQHILSLRFPIVRVGLEAGMLSQHIYGRLAEAGIPVVCVETRHMKAALAAQLNKTDRHDARGIAQMMRVGLFKPVHVKTPNSQRLRTILTARQLLRNKLQDVENEIRGLIRNFGYHLGKVTARDFEPRVRELIADTALHAVADALLLARRSLREQFGRLDDMLVRLAKHDEVTRRFMTVPGVGPLVALTFRATVDVPSRFTRSRTVGAHFGLTPRKQQSGEVDRNGRISRWGDEMMRSLLYEAAQVLLTRVKRWSALKAWGAQISRRRGNKKAIIALARKIAVILHRMWIDGSEFDWGKRPETAASSV

SEQ ID NO: 456544 - protein, 341 aa, unidentified
MKVMAGIDLHSNNAMCGLMDMQGKRLAHKKVECELAQVLKVFAPYQKQIDTVAVESTYNWYWLVDGLMDHGYKVALANPAQIDQYDGLKHTDDKSDVFFLTELLRLGILPTGYIYDRQTRPVRDLLRRRLSLVRQRTALILSFKNLHVRNTGVELGLARVKSLGVSEGKNLFEHPCDRLIAQEQLTLMRQLDQSIDRIEKAVLKVVEALPCYRRLQTIPGIGMILGLTITLETGEVNRFATAGDYASYCRCVKSQRLSNQKSKGKNNRKCGNQYLAWAFVEAANCALRSDAQCRKFYERKKTQRNGIVGIKALACKLSKAAWHIMSRGVDFQSGQMFGGRT

SEQ ID NO: 456545 - protein, 344 aa, unidentified
MQHYVGLDVSVKETSVCIIDKAGKVIREVKVATEPVAILAVLTEEPLALERIGLEAGPLSQWLYSALAEAGLPVICVETRHMKAALSAQINKSDRNDARGIAQMMRVGLYRPVHVKTLASQKRRMLLTSRQLLQAKALDIENDLRGTLRNFGLKVGMVGTVKFEARIRELVADHPDLAAIVEPLLIARRVLREQLDVLHRQLLEIVRHDEVCRRLMTTPGVGPVVALTFRATVDVPSRFTSSKAVGAAFGLTPRRQQSGEIDRMGGISKCGDAMMREMLFEAALVLMTHSGKWSWLKAWGMKIARHRGMKRAIVAVARRLAVIMHRMWMDGTKFRWSSKEVAAA

SEQ ID NO: 456546 - protein, 410 aa, unidentified
MEVIHRNCAGLDVHKKVVIAAILLEGSPKEIRSFGTMTADLLELSDWLMSSGVTHVAMESTGEYWKPIFNILENNFEVMLVNAQHISKVPGRKTDVSDAEWIADLLRHGLLTASFIPPVGQRELRELTRFRSTFVKERATLVNRVQKVLESANIKLASAASDVVGVSGRAMLEAIVAGTATPQQMAELSKGKLRSKREELSRALEGRVKPHHRFVLTELLSQIDGLEETIARFDQEIIEYCRPFEEAVVLLDTIPGVARETAENIVAEIGTDMSRFPTANHLASWAGVAPGNNESAGKKRSGRVKKENKPLGVILNQAAHAAARTKDTYLSAQYHRLAGRRGKKRALVAVAHSILVIAYHMIKRRETYCELGSDYFDKRRPETTAKRLVYRLEHLGYQVSLQQLSVPASI

SEQ ID NO: 456547 - protein, 386 aa, unidentified
MVKGSIVDEFCGKASVASRAAKHRRREIGRVQTPEVVAERDPRRHCGTSPNSRRNRRRPTRPASSYLQDWERTMNEQIFVGIDVAKDTFFVCSSPAVINLSLPNSVSGIRQLIKTLKPHDVKLVVLEATGGYERPIVAGLLESDFRVVVASPRQVRHFAQGIGELAKTDPIDARVLARFAQIVQPKPKLPFSPETDELADLVRRRRQLTDLRVQELNRSQTVRHPKVSKSVRKMIKTLDYQIAELDELIQQHIKSDDDFRKKDEILRSTPGIGPHTSATLLSQLPELGQLNRQQIAALVGVAPYDFRSGRFAGKSRIWGGRKEIRCVLYMAALTAMRCNPAIHRFANRLLEQGKVFKVVITACMRKLLIILNTMLRNQSLWRPEKN

SEQ ID NO: 456548 - protein, 355 aa, unidentified
MNSIKYVGLDVHRDTISVAVLNADGKLVMQSVIATHATTILDFLRGLRGTLQVTFEEGTHSAWLYDLLVRRVAHLVVCNPRKNALLKAGNKSDAIDARKLAELLRAGLLSPVYHGQNSTAAVKHLGRSYAALTEDTTRIMGRLKALYRGQAIACAGKKPYGLRHREEWLAQLADSGLQRRTRRLYQELDLLQQLRREARHDLILECRKHSETKLLRTVPWLGPIRVALLIGRVQTPHRFRTQRQFWAYCGLALETRDSGEYRVINGQIERKKKPVFIRGLNRNHNHDLKNLFKSAATTASGSDGPFRPFYENLLKKGMRAEMARLTLARKIAAITLHVWKKGEPFDAEYLKSQAA

SEQ ID NO: 456549 - protein, 381 aa, unidentified
MTKIIRIGVDTSKSVFVLHGVDAAEQPVLRKRLRRKQVLEFFSKLEPTKVGLEACGAAHYWARELQASGHEVVLLPPQYVKPYVKRNKNDAADAEAICEAMSRPTMRFVPAKTAEQQAALMLVGMRDALIRRRTQLTNMIRGYAAEFGLTAAKGLDKVEPLLARLAADAQLPGLAKELFATHAKEYARLRVEIQKIEAKLMAWHKHNELSRRLVEIPGIGPIGASLTVMKVPNPQAFRCGRDFSAWIGLTPKDHSTAGKTRLGVITRAGDEALRSVLVAGATAVIQHAKRGQGHPSPWLLDLLRRKPAKLAAIALANKNARVAWKLMVSGERYNPARYSPAGSQADAPSEGRGTALRGGSAPRPSLAPRNKSREITAMTNA

SEQ ID NO: 456550 - protein, 413 aa, unidentified
MDLLHDRCAGLDVSKKDVKACVRSPGARANQRHTEVRTFATTTNALLQLRDWLVEQRVTLIAMEATGDYWRPPFYVLEDDLNVILVNPAHAKGLPGRKSDVTDSMWLAQLAECGLLKASFVPPTPIRQLRDLTRYRTTLSREHTREAARLEKELEDAGIKISSVATDILGVSGRAMLEALIAGERDPQVLAQMARGRMRTKITPLTQALIGRFGQHHAFLCRMHLDRLDALDEDIAKLSTRIEAALEPFRDTLARLDTIPGVGRDVAEVIIAETGADMSRFPTPGHLASWAGVAPGLNQSGERSKPAHTRHGDHWLTGALGVAAMAANRTKDTTFLGARYRRLARRIGKLKALVAIEHSILTAVWHVLSENTDYHDLGGDYHAKRDPQRALRRITRDANRLGYTVRFDPIQAA

SEQ ID NO: 456551 - protein, 425 aa, unidentified
MWRSNYGRVWTLASLSIIAWSSTSIGKRVFSRRVANDEALLQELISAVTAQAQGGEVTWAIDLAGGGAALLITLLLAASQRLLYIPGRSVYYASGSYRGDAKSDAKDAAIIADQARMRRDLQPLRPGDEITVQLRILTARRADLVADRTRAINRLRAQLLEYFPALERAFDYSNSKAALILLTGYQTPEALRRAGAARLVAWLQKRKARNADAVAAAALEAAHAQHTVVAGQQLAAAMVARLAQEVIALDTEIASTETMIEERFRRHRHAEIILSMPGFGIILGAEFLAATGGDMSAFDSADRLAGICGLAPVPRDSGRISGNLKRPRRYHRRLLLRLSYPRTAALAFSAASNDFELAIAVAIGVFGATSGQALAGVVGPLIEVPVLLGLVYVALWLRRRLAWPQDDRPQRPSPPQPRLSAREMP

SEQ ID NO: 456552 - protein, 371 aa, unidentified
MAHYSTDTVWVGMDVHQDSITAAVLFGNEPEPKVERLPGDLNAVRRMFRRLSEHGTPRSCYEASGAGYVLQRCLEHDGFHCEVIAPSLVPKKSGDRRKTDRLDAIHLAQHYRAGNLVPVAVPSPEQEEVRQLVRSRLAVQSHVVRLKHRIVRVLATHGHRFTASKSNWTKTHRTWLRKLHRELGGPLGTVLAHHLEHLEYLEAQKNALEMEIDRYACSTPYRDKVEALCCFRGVKTLTAMTILTELGDIRRFKKATGLMAFAGLVPSERSSGNVRRRGSITKSGSKELRRILVEASWQYRKRAGADLILKRRRMGQNPQVVSIAIKAQHRLNKTYLKIASRKHPCTAVTAVARELCGFIWSALWALESQED

SEQ ID NO: 456553 - protein, 344 aa, unidentified
MSKLDTCGIEVSAKELVVSLRRQGNLEPLRNFTNTPEGHLIILRYLRQAGRVVRACMESTGLYGLDLALALSGQEGIEVMVANPRAVRHFAQAMMKRSKNDQIDAGVLEQFAVHMPFKPWQRPSVVVLALHALARRLRELVEIQTAEKNRQHAAGLSEATPAVVRRDLARSLRAQERAIQRLTRQARKLIAQDPQLAERFELLDSVPGIGETSAVQLLGELGVLAPDLEARQWVAYAGLDPRQYTSGTSVHKKPRISKAGNKHLRHALFMPALVAVQHDPHLRAFYQHLLAQGKFKMQALVAVMRKLLHALHAMFKTHQPYDGSQLFQLKSAPAQEVTHVLVAS

SEQ ID NO: 456554 - protein, 412 aa, unidentified
MEGETVIAGVDTHKDVHVLCLLDGLGRKIWSGSFGADPEGYDRLAEAIGDPGSCMVVGVEGTASYGAGLTRRLVELGYNVVEVLRPKRDKVRPGEGKSDPLDAERAARKAASGRGCSVPKSQDGWVEAVRQLYVARRLAVATSTSCVACAKSMLTTAPSALRERFRGRERPKDLMPLLARGRKAGDALEESVLASLRSVAAVWKEARSQVESLDERIRALLEANAPALLGVEGCGTTTAAALVVAAGDNPGRLKGEAAFSMMCGASPIPASSGKTERHRLNRGGNRQANWALYEIAIKRMAYDERTRRYVARRTSEGKSRREAVRCLKRYIAREVYRVLMDPNPDGAAPEGPELAKMRKAMRVTQKQAAAGLGMSAASLGHLEHGRRRSTKLERRYYELLCELKGALPQTAY

SEQ ID NO: 456555 - protein, 425 aa, unidentified
MTVHPEAATPPQEEDFAVFVAMDWADKKHVWALVKVGSSKREQGEIEATPEAVEAWVSELQARFPGQRIAVALEQKRGPLLCQLSKYKELVLYPVHPATVSRMRAALYPSSSKDDPKDADLLLDILLHHRKHLRRLDADTIETRKLQMLVEDRRNLVDQQTAHTHQLRARLKLYFPQALRWLPELDSPLAADFLKRWPTLPLLQKARLETIRNFFHQHNCRSEALLGQRLREIPTAVVATEDAAVVDSGTAMVRALLDLIGVLRTQIAALDRQIAATAAVHPELPIVASLPGAGSALEPRLIAALGTQRERFASASELQALSGIAPVQQCSGQSEWIHFRWACPKFLRQTFHEWAGHSIAQSRWAKAYYDAQIAKHKGHHAAVRALAFKWQRILFRCWKDRQPYDEEKYIEALKRRGSPLAEALS

SEQ ID NO: 456556 - protein, 352 aa, unidentified
MHLYFVGLDVHRQVIAFCVKTADGVIIAEGTIPATRAALDEWVKTIPGPWHGAMEATMFSHWIYRHLQPHAAKLEMGHAARMKAICAGKKKSDKIDARTIADLLRCNLFPACFVISPELGALRQQLRFRRLVVEENVMFKNKTAGLLMEAGVEYERRRLHGKRYFDSLVKDNDWIGKELRPLLEFNRAQMTTLQAMDRRLKTMLARHPALEERVKALCRIDGVGPVTALSWALEAATPDRFPSIKHAMSYCGLTSALRESAGQQKRGPLSKQRNAHLQSALIETAKLAPIYNEKLKEVHRKAVEKGAHRNRATLAVARKLVAYLMAADRAFFAGQRENPAADAADQEALAAA

SEQ ID NO: 456557 - protein, 340 aa, unidentified
MSNPAVIGLDIAKNFFQVHGADAEGRCVLRRRLRRAEVVIFFARLPKALVGIEACPGGHHWARELRSLGHDVRLIPPQYVRPFVKTNKNDAADAEGISEAVVRPNMRFVPIKSAEQQAAMMLHRTRALLLRQRTQLINAVRGHLAEFGLVARRGARNIRELAELVRDAGQDRLPDAARTMLVLLLEQIREAQIRVRKTEYALEAWAKQSDACRRLLAIPGVGTMSATALVLTMDDPRRLRSGRHFAAWLGLVPRQSSSGDRQVLGGISKRGDGYVRTLLIHGARSLTRWRRKSWNWLAGLLVRRPTNVAAVAIANKTARTAWALLARGRHYQSTRTAEVA

SEQ ID NO: 456558 - protein, 365 aa, unidentified
MNNNDTESSELSSLEGTRCQFNGSRAIIKLGIDVHQDYYVVVRQEGGTNPKPAQRFRKEAFLHWVAKLQSQGGQIHAVYEACGFGFGLQRQLAALGITCQVVCPQKLDERNKRIKTDGLDAKALCLKLDRFVQGNRDALAIVRIPSEEEEQKRAIHRQREQLVKARKRLEAQGRSFMVNHGMETASNWWKPRTFALLSVPEWMKELLSNSQPILVALQEKIRALTQQLQAAARAGQARGFGALSSVVIDREIGNWTRFNNRRQVGSYTGLCPGEYSSGNTRLQSCVTKHGNPRLRAALVETAWRLVRFQPNYKPVRKWRQTLAKGALATKAARKKTIVAVARQLAVDLWRIRTGRVTAEQMGLSI

SEQ ID NO: 456559 - protein, 375 aa, unidentified
MGEITRVLIARVGVDLAKLVIQVHAVDAAGRRVLSRALRRDQFIAWCQHLPAGCLVAMEACSSAHHWARKLGALGLDARLIPANFVTPYRMEGKSGKNDMTDAAAICEAASRPTMRFVPVKTCEQQGVMSLHRVREGFKEERTACINRIRAVLGEHGLVFGKSPKALRAVLADVIEDASNELSTRARLVVQRAFEHWRELDEHMRWCDQQVGTHVRSSPEAKRAAKITGIGELTASAMVAGVGDFKQFKAAHQFGAWLGVVPSQDSSGGKTRLGRITKRGDDYLRTLLIQGAKSAVMSAGKRDDPISRWLVQLVARVGWQKACVAMANKNARILWAVMTRELGFDPRHVSIKPDAKQTALEKINPAHSALASCPA

SEQ ID NO: 456560 - protein, 355 aa, unidentified
MSQEKYIGMDVHQATISVAVLDSRGKLIMESILETKAATILEFLQGLHGSLSVTFEEGTSAAWLHDLLKPHVTHLVVCDPRKNALLKDGSKSDRIDARKLAELLRGNQLTSVYHGEHGMRTLKELGRSYLTITKDLTRVMNRIKALYRSWAIPCSGTSVYAPRHRAEWLDKIPEPGVRLRAERFYQQLDLLQPVRQQARHDLLTESRKHHVVKLLRQIPSIGPIRAALLVAQLQTPHRFRTKRQLWAYSGFALKTHDSGEYRYVRGKLQRNQERMTVRGLNNNHNPDVKNLFKGAAISASTHPGPLYDFYIALLEKGMRPTMARLTLARKIASITLTIWKKGADFDATQLHRQEA

SEQ ID NO: 456561 - protein, 352 aa, unidentified
MEIIALDAHKRYSQVCVQKQDGRFLCEKRINHGKGQILEFLSQWTAGATVALETVGNWYWIVDEIEQAEMRPKLVHARKAKLMLGSINKTDKLDARGLNRLQQVGTLPTVWIPPVEIRDQRELPRTRMVFANLRTRLKNRIHSVFDKYGLHTEFEGITDIFGRQGREKMALTIKQLPSETRYTLRCMLRELDMVEGQIQRIEKRMKKVFSKTEQVKRLMTLPGIGFILAVAISNEIGDISRFATPQRLASYAGTVPRVHSSGGYTRYGKLRSDVNHYLKWAYSEAGNSTAVNHKRLPFRHTSKLYRRIREKKGHAKAVGAVGRHLAEASFWILSRSEDYKEPKSKSFSSTVA

SEQ ID NO: 456562 - protein, 346 aa, unidentified
MKFYTGHHKFYCGVDLHARTMFLCVLDERGYPLLERNIKTEPELFLRSIAPYREDLVVAVECMFTWYWLADLCSRERIPFILGHALYMKAIHGGKAKNDRIDANKIAVLLRGGMFPVAYVYPPKMRSTRDLLRRRMFLNRKRSALITHIKCTFAQYNLPEPEQNVSRVSQREGVADQIPDPGARRNVQLDLDLLDFYDQTLTKLEQELTVIAKDHDPDSYFRLRTVPGIGKILSLVILYEIHDINRFPSVQDFASYCRLVKPAKESGGKRLGSGGAKIGNVHLKWAFSEAAVLFLRKNEPAKIYRARLVKRHGKAKSLTILAHKIARAVFFILKRRTVFEAETFFA

SEQ ID NO: 456563 - protein, 407 aa, unidentified
MDITCGIDWAEAHHDIAVIDERGVVLACKRIASDAGGYGELLRILAEHTDDVAAVPVAIETDKNLIVVALQAAGNPVYAINPRAVARYRERHGQAGKKSDPGDALVLADILRTDRHRHRVLPEISENGLAIKALARQHQEAIWATHQTISRLRSVLLEFYPQALQAFPQLKHKAALAVLAVVPTPDAGQRLTARRLVALLHRCGRRNDPALVERILSDLRTPALRQAPSVEQALGRTVVGLVGIVAAMQSAVEELEAALSEEFERHPLAPVLRSAPGLGPVLAARVLAEVGDDPSRFASAQSLRAFAGTAPITRSSGRSRFVNARRVRNKRFGDACHWWAFSMLTKSPGARAHYDRRRAAGDNHNAALRNLANKILGRLWWCLQNETHWDEAAAWPSARPAPLAAAA

SEQ ID NO: 456564 - protein, 339 aa, unidentified
MSKRSIQVQETMYCGIDVSAKSLTVAIQRMHQPVEQRSFPNTSVGHKALIVWLRKAKLPVRVSLEATGIYSLDLAFALDAAEGIEVAVLNPKVANRFAQTIRRSKTDAADAELLAEYARRMPFTAWVAPSPGSLRLRSIVRHVESLSVQSAQNQNRLHAAHGSTSTPGCIVQDLKRSVASLELRIHKLRREAMTLVRQDDLLRKRFELLVSIPGIAQVSAMQLLAELSTSPPDLTVREWVAHSGLDPAHEISGSSVRKASRISRAGNRHLRRALYMPALVASRCDPHAKAFFESLFARNKARLQALIAVARKLLHAIYGIFRSGLKYEGTKLFPRITLS

SEQ ID NO: 456565 - protein, 296 aa, unidentified
MPLYGGIALHANNRVVVLLTEQDQVLSHRRLAHHRPTILAQLDPYQADLTGVVVESTSNWYWLVAGLLEAGSRVHLANPAAMPPYNGLTYTDDRADARWLAHGLRLGVVPAGYIDPKAERAVREILRQRAPLVRQQTAHGRSLHNLLVRQTGVRLSAKRMHALTLEALEPLLPEPTPVLAVTSRLAVVHCLGQQSQTLAKLVQTRLQHTSAYEQLQTVDGIGTMLAQTIVLATGDMRRCPTVGHDASYCRCVTSTTIRKGKRKGRGNVNNGHPSLAWASREAAPCAIRFSPRGQRL

SEQ ID NO: 456566 - protein, 311 aa, unidentified
MSQEMYVGIDVSKRRLDVNLQPSDESFEVAYDEEGLKRLSERLRQGSPKLVVLEATGGLQVRAAAQLAAAGFEVAVVNPRQVRDFARSIGLLAKTDRLDARAIARFAQATKPSPRPLPDQAAEALAALVARRRELVQMRVAEKNRLGQARSKTVRDSIARLIATLDGQIAEIDGDIDAAVKGSPIWRNTEELLTSVPGVGRTVSRTLMAELPELGRLTRRKIAALVGVAPLNRDSGSQRGRRTIAGGRAALRSALYMAALTAIRTDGPLRTTYLRLTNAGKPKKLAIIACVRKLVVILNAILRDHTAWKTA

SEQ ID NO: 456567 - protein, 307 aa, unidentified
MSGIGIDVCKHSLDVAVFRGQTRQFTNTAGGHRKLVDWLNTLSVRQVVLEATGGYELAALDALHHAALPVARVNAQRARNLANGLGLAKTDRLDAAMLACMAEKMELHQYVPLEPWQRDLGEHVRARRQLVDLLKTARQQLLQVAEKALRKLLQGNVNQLVRSVARLDKLIAGQLKTLLTEQPHLAALKTFKGVGPVLLAVLACRLPEIGTLSGKQISRLVGVAPLSRDSGAMRGKRGIGGGRADIRQALYMAAMSSARHEPRLRDFYRALRARGKEGKVALVAVMRKMLVILNARVRDERAAMQPA

SEQ ID NO: 456568 - protein, 350 aa, unidentified
MSECTTAVIGCDLGDKQSTLCILRADGRVERPKSIKTVREAFRTFFFARPPAHVVIEVGAHSRWVNALLEELGHRVTVANARRVKLISQNDSKSDQVDAELLARLGKADVELLAPIHHRGMEAQADLAVPKARDALVGCRTKLINTCRGLVKSFGERLPQCSGESFHRQAREYVPAALKPALEPVFQALERIDEAIRKEDKLVARLAKKYPDVEVIAQPNGVGILTALVFLLTLEDKNRFKSSRQVGGFVGLRPRKNQSGEDDPQLRITKAGDPFLRRLLVQCANYMLGPFGRDSDLRRWGLELARRGGKNARKRACVAVARKTGVLMHRLWVTGEVYEPLGYGTKRLSA

SEQ ID NO: 456569 - protein, 397 aa, unidentified
MEIQDETGRKLAARRLPEGAAGIARLHELIAAHLGGDGDPGEVVVAIETDRGLWVQALTAVGYQVYGLNPKQVARFKERYNLSGAKSDAADAHALADMVRTERHQLRAVAADTAAGQAIKVVARAHQTLIWERTRHTLRLRSALLEFFPAALAAFAALGLAGADTLELLARAPDPAAAAKLTLSQVSAALKRARRRDVPARAAAIKDALRVPQLAQPAPVTAAYAAAVQAAVAVLAVLNEQITQLEAQVEAHFLQHPDAEIYLSQPGIGTVNGARVLAEFGDAPGRYASAKARKNYAGSSPITRASGRSKVVLARFIRNDRLADALQSQALSALSASPGARAYYDKQRARGLGYNSALRQLSNRLVGILHGCLKTGTRYDEATAWPGAAGNTEPLAA

SEQ ID NO: 456570 - protein, 337 aa, unidentified
MEQPITVGVDLAKSVFQLHGVDAEGAVVLRRQLRRSQVLAFFQNLPPCLVGMEACAGSHHWARALGRFGHDVRLMPPSYVKPYVRRGKTDRADAVAICEAVTRPSMRFVPVKSEETQALLLCHKAREFLVRQLTQVTNAIRAHLGEFGIVVAKGVHNIGRLLEAGDRADLPASARQPLRLLAEQFFQTQEKIGELTREIRREAEASAPAKRLQTIPGVGLITATALVATLPDVMGFRTSRDLSAWLGLTPKPHSSGGKERLGRISKMGNRYLRRLLYLGAMGVITSRRRGQPGEDWLWRILQRKTAKQAAIALANRMARIVWALLRNGTEYEAARAA

SEQ ID NO: 456571 - protein, 407 aa, unidentified
MLFVGDDWAEDHHDVEIVDDAGRRLAARRFPEGLFGLTGLHALIGEHLPEPGPDSEAQVKVAIETDRGPWVAALVAAGYEVFAINPMQVARYRQRHSTSGAKSDAADAHLLAEIVRLDREHHRPIAGDTPQAEAIKLVARAHQTMIWDRSRAVLRLRAALRDFFPAALEVFDDLDAPDVLELLARAPDPDRAARLSKAKITAALTRARRKNVEARARHTQQIFRAPQLRQPPAVQAAYAVIIANTVRLISQLNRQISELGEVVGEHFGRHRDAEVYLSQPGLGSILAARVLAEFGDDPHRFTDSKARKNYAGTSPITRASGTRRIVLARYARNRRLGDAVHQWAFCAMRGSPGAKAYYKTMRARGIGHQAAIRQLANRLVGILHGCLKTGTLYDENTAWAHHITAAA

SEQ ID NO: 456572 - protein, 536 aa, unidentified
MARTRTNFGILGGPKKVSQIHLEAVTSLLRVVLFADNAFPGSWKPYESLCNVVCDTMQTIKGLLNPKTPKCMAKKAQKMRKGKRSELLIVNINAAGIDIASTEYQVCVPEDRDSEPNRRFEAYTCDLHSIAQWLKQCSIDTVAMEATGIYWVQLFMVLQEYGIDVVLCNAKHIKNIAEKKTDYVDASWIQLLHSYGLLRESFQPENQIRQLKDLMRHRERIIRSMSQDILRIQKALEMMNIKVHKVLSDIKGKSGLSILEAIIRGERKPSVLAELVHHSVKASKEEIVKSLEGNWNDAQLFILKQSFDSYRFSLGQIEELDQSIQQLLIAYAHVAGESKTNKPIERAIKRKVTQGNALHFDAEQYSYDILGVNLSRIPGISSLTSVKIISELGRDFTTKFPSVKHFCSWLNIVPNNKISGGKVLSSTVPKRKNFAGQAFRVAANTLSKSKGYLGDYFRRMKSKLGYNQAIIAVAHKLARIVYHMVKMKVEYDESIDRLKNVNMLEIKRKLLQKRLAKIETELNLSACNTSNLLLVR

SEQ ID NO: 456573 - protein, 411 aa, unidentified
MSTIFCGIDWAEGHHDIALVDQDGSQLAKLRISDDSAGFHALMELLARHGDTAEDPVPVAIETPRGLLVANLRATGRKIYSINPLAAARYRDRGSVSRAKSDAADARVLANILRTDLHAHRPLPQDSEAGQAVAVLARAHQDAIWDRQQMVNRLRSHLREYYPAALAAFHGPGKPGLDSARARVVLAAAPTPAAAAKLTRSQLRALLKRVGRPRCGIEAEVERLREIFRADYLHQLPLVEEAMGRQAMALVQQVNAACDSVADLAAATEEEFLAHPDADIITSFPGLSAVSGARVLAEVGDDRERFADARAIKAYAGAAPVTRASGRSHVVVARTVKNQRLAAAGYMWAFASLRSDAPRAHYDRRRAGGERHTAALRNLFNKLLGCLYHCLQNRTKYEAGQAFATSLALAA

SEQ ID NO: 456574 - protein, 446 aa, unidentified
MSLDCCYEHAGLCPGRGPSGPAPGGDGRLPEERRDAMEVMFDRVAGLDVGKETVAVCLRTPGPKGRRRAETRTFKTTTGSLRVMRDWLVEAGVSIAAMESTSVYWKPPFYCLEEVMEVWLLNAAHMKAVPGRKSDVRDAEWIAQLLEHGLLAPSFVPPPEIRRLRMLTRYRVQLMGDRRRDIVRLELMLEDASIKLSSVASSLKTVSARAMLTAMINGETDPLRLADLAKGRMRRKIPDLAQALTGHFDANHARLARSMLRQLDLVDQALAELDAVIVDACQPWAHQIELLQTIPGVGEKVAQVIIAETGGDMARFPTAAHLAAWAGLAPAMNESAGRQTPAGKRHGNKWLTAMLVEAAGSVGRMHGKNYLAAQHARLLKRRGMGRAQVAVAHSMLVAAYWMLKRDEPYHDLGADWHSRRSDEAHTRRLIAQLEHLGHTVIIDPAA

SEQ ID NO: 456575 - protein, 340 aa, unidentified
MPLYGGIDLHANNSVVVLLNDQDQVIYEKRLPNHLPAILEPLRLHPGEIEGVVVESTYNWYWLVDGLMEAGYRVHLANPAAIQQYSGLKYSNDHSDARWLAHLLRLGILPQGYIYPKAERAVRDLLRKRAHLVRQHTANVLSMQNILARNTGARFSLTRIHELTQQELQRLLTEEAQVLAVTSSLAVLDCLQHQIKILEQSVHKRLRHTPSYEQLLTVAGIGPILAQTIALETGAISRFPSVGHYASYCRCVDSNKLSNGKRKGTGNVKNGNPYLAWAYMEAAQFALRFQPAAQRFYQRKLAKSRNNTVLARKALAHKLARACYYMMRDLVPFEATKAFG

SEQ ID NO: 456576 - protein, 387 aa, unidentified
MSQTVAALIPAAVDYERTLVLAIEVSNKNWVLAAQVPGLPHTKAKRMIDPKAEALLAAIAGYRARAVATGRSIERVIAVYEAGWSGFWLARWLMRHGVEVCVVQPSSVPVDRRMRRAKSDGIDSELLLRTLLAWLRGEPRVCSMVPVPDEADEDARRCVRERSELISERIGLTNRIGAVLATLGVGDYNPLLRNRTRRLVELRTALGEPLPANAHAKIKRLLARLELVLTQIAELERERDAVVETEASDQASKMIQQLTALRGIGVQSATVLVREAFVRRFANGKALGSYAGLASSPYSSGGIDREQGIGKAGNRRVRTVMVELAWLWTRYQPGAAQVCWFRERVGSTGRRVRKIMVVALARKLLIALWRFVIDGVLPEGAVLKPAA

SEQ ID NO: 456577 - protein, 387 aa, unidentified
MTKNKGRVVGLDVHPDSFAGAVVEGTDPGQARVLSTSTRVELEQLEQWALRHTSTEDKLVLEASGNAFAVAARLRAIGRKVEILDSHRAGKVGKVYCANDRVDAVKIARIYLSALSPIVWQPDAKTLERREIFSAYQAVVKESTRARQQLRSMLNEHCVRLEKGFRLCHPNAIRRLVALREWTPARTMLLQQLHGTLVAARRRRTLLRRHMAQEIVAEEALLRLTRLCGINLVTLYGVVAAVGDVHRFTHSKKLVAYFGLNPSVSQSGNFEGGGALKRHGRGALRALLIQSGKKLLEVNNPLQKWGLAVAARRGRNKAAVAVARKLCVALWHVLMGHAIGALERLDTLETKLSKFATEIGSAALTAFGYHNKADFVQKKLYVLRTYP

SEQ ID NO: 456578 - protein, 391 aa, unidentified
MPEDAPRPAQAAIRTDLGAIFVSLELSRRAWLITSLSPGGGEKMSKHSVPASDVSGLLRRFAELRRKATARTGRDFPIIVIQEAGLDGFWIHRVLQSEGIESHVVDAASILTSRRRRRVKTDRIDGETLVRTLMAFKRGEPRVCSMARAPTPQEEDRRRVCRERRTLVGERVKHVNRIKGLLFAQGVFSYEPLRKGRRERLEDLRTGDGRPLPVRLKAQIIRELDRLEVLLEQLKTVEAERDAMLKPATDEAASPAAMLARLKGIGPETAAVLWSEGLFRQFDNRRQIAAYAGLAPTPWKSGSIDHEQGVSKAGNPRLRTTMVELAWLWLQNQPTSALSLWFHERVRRLGGRMRKTTIVALARKLLIALWRYTTAGVVIEGAVMKAAPATI

SEQ ID NO: 456579 - protein, 381 aa, unidentified
MPSDNTVHVAIELSSSTWLVATRLPGIEKSRLHRIEGGDTTALLALLAELGQQAATRLGHALNVACCFEAGRDGFWLHRLLTAHGVAAYVLEPTSILVNRRARRAKTDRLDAEGMLRVLAAWLSGDRQVCSMVRVPTVEDEDAKRPHREREHLVQEKLRVENRIEALLFTQGIRGRPSLRSWERDMAELRTGDGRALPPLLQSELNRLRRRLVLALELIRELEAERAAALAASAEAAAADNAMALKITALQRIRGIGENFSAVLVREVLYRSFANRRQLASYVGIAPMPYQSGGMDRDRSISRAGNPRARTTLIQLAWLWLRYQPGSALAAWFRERVGTLQGRTRRIAIVAMARKLLIALWRYVETGVLPEGIEIRPQAAA

SEQ ID NO: 456580 - protein, 416 aa, unidentified
MLIFGMRSDENQPYPNNPGTPGRGGNQTLSTPFGLEPVREISAAAVQLVPTVRTVSDGRACGAEPVYKVEQHKLSGGVAKFKSKSWSITMDTTTLPKLGIDVSKRDFEVQLEVTGRKARRRRFDNRETGFRALTDWLSSNGAPQVHAVMEATGTYSDALALFLHQAGHVVSVVNPARIKGFAESELRRNKTDRADAALIALFARQKNPEPWHPPAEEARELQILVRHLDDLIEQQTQLSNRLTEGRLIPAVKASLETLLETIAEQISEIERQIAAHFERHPRLKADRALLLSIPGIGEKTAARLLAEMACWGEIESSAQAAAYAGLTPRRHESGTSINLPSRLSKIGSPRMRHALYFPAIAALRHNPLVKPLGERLEQRGKHKLAIIGAAMHKLLRIAFGVLKNREPFNENHLAGA

SEQ ID NO: 456581 - protein, 357 aa, unidentified
MDGSKDKPKMTAGLDLGDKYSYLCLVDTQSGEVIEEGRLRTNPETFKRRFASEQPLRIAIEAGTHSPWVSRALEGCGHEVLVANARKLRLIYANKRKTDEIDAENLARLARVDPKLLYPLKHRGEDSQAHMAIVRSRQALVGSRTQLVNHVRGAVKSFGARLPKCPAVSFHKNAAAHIPEALRPALEPILEQIGSLTQRIRDYDRKLETISKERYPETELLRQVEGIGPLTALTFVLTLEDPYRFERSRSVGAYLGLVPTTAQSGDRDPQKRISKEGDEMLRKLLVGSAHYILGPFGSDSDLRRHGEKIASRGGKNSKKRAVVAVARKLAVLLHRLWVSAEVYEPLRNARGTPGQAA

SEQ ID NO: 456582 - protein, 334 aa, unidentified
MWHVGIDLHRATVVVAAVNDVGEAMNPITIPCSDTAMIVSTVKALGSFRAVIEACGTYRWLYDLLRPHGTVLLAHPMRLRAMIQRRSKTDKRDAQLLANLLRINQIPLAYIPPEPYQQLRDLTRCRARLGRQLAEVKIQLRALLARQNRESPYRTPFGPRGLGWFRGQDFGPIESMVRDELLERFRHYAKQMTLFDKRLEGMRQAFPQVESLVDIHGIGLYSALLIVAEIGEAERFRSAKQVGAYSGLTSRVHQSGGHCYQGSITRQGSPWLRWVLVQAAMKAVHKDAALKNFNSRIRKRSSAKIARLAAARKLAEICWKRLRQWQREHASQAA

SEQ ID NO: 456583 - protein, 320 aa, unidentified
MSFLITIGVDIAKLKFDVACLAAGKYKHKTFTNDTPGHVAFATWLVALCGDVKPLICMEATGSYSLPLADFLAHQGHAVSVVNPAKIHAFAKSELSRAKTDKADAKIIARYALTMNPPLWTPPPANIRELRALVRRVEHLLEMIRMERNRQDTANAKVADSINTVLAILEAELQATRKAIHDHINNDPGLKQRGDLLATIPGIGDASVAHLLIALSQHHAFINAKQVVAFAGLAPALRQSGQWSGNTHIAKNGDALLRKALYMPALCALRFNPPIRVFCQRLKANGKNGKAIACAAMRKLIHIAFGVLKSGKPFDPNYAV

SEQ ID NO: 456584 - protein, 464 aa, unidentified
MSKLRKRHRTRSAQGETRPFEGMRTVNPHAAGVDIGAHEIMACVPDGDAQHIVRAFGTYTAALHALADWFIDRGIETVAMASTGVYWMPLFEALEARRLRCCLISARSLKHVPGRKSDVLDCQWIQTLHSYWLLSASFRPEADLVALRTLLRHRAQLIEHRAPHVLHMQQALLQMNIQLSQALSDVTGTTGQQIIRAIVAGERDPQTLAALRNYRCKKDADEIALALTGTWREEHLFVLTQALALFDFSTTQISAGDAQIERAFSVIKPRFEPAPTVTAPVAATTPRHKPHSHSKNAPEVNIRAHILRITGVDLVAVHGMSDSLAQTMLAEIGTDMSKWPDDKHFSSWLGLAPKHDISGGKILKSRTMKNRNRAAQAFRMAAQSVVRSHCAFGAFYRRLKGRLGPAQALVATAHKIARTVYHMLKYRVPYHDIGAAEYNKRFRERELKYLQKKAAKLGYKLSPA

SEQ ID NO: 456585 - protein, 456 aa, unidentified
MKNYYLGIDVSKGYADFVILNDKKKPVEENFQLDDTFEGHCCLYERLLRFFDDHPDSTIYAAVESTGGYEDNWFNALIKFQGTLNLNTARLNPLGVNANSKADLKRNVTDKISAQSVAEYMIAHPEKISYQQRDHLASLRKQWGFIKMLTKQSTQLLNQLEPLIYTANPELLAYCKDGVPEWLLKLLIHYPTSSSLSKAKIVKVARIPYISSDRAKELVGNAKKSVASATDKVTGKLIVATVKQISHLKQVIKAQTKLMAQECSVPEVDLLTSFTGIKDFSAIGLMLEIQTVERFLSAKKLASFFGLHPVYKVSGDGSGGFHMSKRGRKEPRQILFMVTLSAIQSNPLIRGIYLEHIQKGMEKMAAIGLCMHKTLRIIYGMLKHNSVFDPEIDRRNREKMVKRKSKVHKGKNRRYQDFDSRAPISRRQHSKREERKQSHSDNNTNNGIIAPAPLST

SEQ ID NO: 456586 - protein, 485 aa, unidentified
MGPSAATKTLVTPSSEGDPVLGDCTHFTARTNRLPSKGNDMQEDKYTKKRRKNNRKASTSVDSGPVIHPDAAGADIHPTSIFIAVPEGRDTNVIRKFSTFTRDLLAAVDWLKQCRIRTVAMESTGVYWIPLYQMLNDHGFEVCLVNARHVKNVPGRKTDVSDAQWLQYLHSVGLLRGSFRPPQEICALRSISRHRESLLEMGAVHIQHMQKALDQMNLHLHHVIDDIVGVTGLAIIEAILAGERDLERLAKLRNCRIQCSEATIMKALEGDYRREHLFVLRQSLNNWRHLQQQIAECDAELESLTRQLEAKSNHAPVPLAPCPRKKVSKNQPKGEWRQLLAQSFGVDLTAIPGVKTATAQTLFMELGTNWSCFPSSGDFSSWLNLCPDLGLSNGKVVHRHRRRTQKRLRCALRMAALSLHRNQSSLGCEFRRRKAQLGPTGAITAMAHKLGRIMWHMVTYKTPYDETIFSAAEKKHQQRQQKSLI

SEQ ID NO: 456587 - protein, 406 aa, unidentified
MVCTRVPHPAKPGRRATKVWQVPATTNAIIELADQLACQGIQRVVVESTSDYWRAWLYLLQARGLVVWLVNARDVKHLPGRPKTDKLDAVWLARLNERGMLRPSFVPPAEIRQLRDYTRLRSDLTAERGRQVQRLEKLLEDALIKLSTVATDIMGVSGRAMLEALIAGQRDPKVLAELARGRMRGKRGALVQALTGGFDDHHAELARMLLDHYDALTGQIDRLTVRIQELIGAIPAAQAPSDGAGPTGGGDGGTTGVGAKAAQVIIAELGLDMGQFPTPGHLVSWARLAPRTIQSGAKHRAGATGKGNPYLKGVLGEVAAAAAKTDTFLGERYRRLVRRIGKLKALVAIARSILVIIWHLLADPTARFHDLGAGYYPSRIDRDHKTRNHVRQLQALGYSVTLTPAA

SEQ ID NO: 456588 - protein, 363 aa, unidentified
MTKERYYIGMDVHKDSVQMAVFENVGEEPIYERKLNNDPALLVKEAKRFGQKGETEAAYEAGCLGYVIQRAFEKAGIACYVLPANKVAKKRDGRIKTDKRDARLIGRELRSHSIRPISVPEETDEAARDLLRCREDMGEDLRRMKQRLLKFLVRHGHIYSGGSHWTVKHRHWMGKIQFSNEHEREVYEEYKSQIDTLEERLERMNLKVKEAAESPRYKEAVSRLRAFKGIDYVIALALVCEIGDFKRFANAKSFMSYLGFVPSENSSGGKRSRGSITKAGNGHLRKLLIEGAWHYAKSGQTGKRLQQRRVGCPVDVIDAADRAMYRLHKKYIRLLMKGKHTNTAVTAVARELAGFVWAVQVSA

SEQ ID NO: 456589 - protein, 456 aa, unidentified
MAKKQMTLEVVNPNSAGIDIGRRSHWVSVGQNSQDVKEFGVYSEDHQKLCEWLKKHKVTNIAMESTGTYWQNLFSSLVAYGFDVILVNGRQTKNIKGKKTDILDCQCIQKLHSLGLLSSSFLPDSTTAIIRTYSRHRQNILKQSASTVMKIQKYLRLMNMRLDVVVNDIVGLTGKKIITDFVSGKKSGKELAKNRHYNCKKSIEEIEKALQYNGREDYYFALKQEWNTYLHLQKQISEVDEQIKKHLANVIDKDDNKKQHIASKKPHKRKNKNTIRGVDMNQMSYQYFEGIDLMAIEGVNDATIMAIISEIGLLGIKKFETAKQFTSWLRLAPNNKISGGKVLSHHLPKGSNRLKIALRQAANAIGNLKEGHLNDFFRRINYKRGRATAVSATARKLAVIIWNMLVKGVPYNPPTEYLFLDQKRKMKLVSRIKKNITKFDLKPEDVGFGNMMEFST

SEQ ID NO: 456590 - protein, 358 aa, unidentified
MDVHQASITAAILHGDSVEPQVVRLPSDLNAARRLFRRLAEKGVPRACYEASGAGYVLQRTLSDAGFHCEVIAPSLIPSRPGDHRKTDRLDAVHLAQQFRSGHLTAVSVPDVDQEAVRHLVRARLFNRRQITRSKNRITGILRVAGYHFTDTETGWTKAHRAWMAKLRRELTGPMQTVLASELQLLEYLEASLSSLEAAITEISVQPPWREPVEALCCFRGVKTLTAMTIVSEIGDIKRFGSPRQLMSYVGLVPSERSSGERSHRGPITKAGNSHLRRVLIESSQPCRRRAASTLILRRRRAGQNPTFVGIALKAQHRLERRYAHLARTKHTNKAITAVAREFCGFVWAMLWEVQGRH

SEQ ID NO: 456591 - protein, 354 aa, unidentified
MMIIGCDYHPGFQQIAFVDMDTGELQERRLAHREEAEKFYRELGAQGAMVRVGMEASGHARWFERLLAELGFELWIGDAAEIRTKRVRKQKTDRHDAQLILRLLLEKRFPQIWVPSWENRDLRQLLWHRHRMVQARTRIMNQLQAVALNEGLRCKKRLWRDAGREQLESFKLAPWASRRRRDLLELLDRLTPTIAELTAAIEQEVKRCPAAQRLQTHPGVGALTALAFVLIIGRAERFQCGKQIASYLGLVPLEDSSGQRRRLGHITKQGNSLLRFLLVEAAQVTVRSLPEWRSKYCHLALRRGRKIAKVAMARKLAVRLYWMMRKEWDYAQLRKFGSYAGKPGNRHGVKSNTE

SEQ ID NO: 456592 - protein, 308 aa, unidentified
MGLYCGIDLHSNNHVVTVIDEEDRRLYERRLPNDLAITKAALEPFRAQLVAVAVESTFNWYWLVDGLMEAGYQVRLVHTGAVVQYDGLKHTDDEHDAFWLAHLMRLGILPTGYIYPKSGRGLRDLARQRMRLVQHRTSHITSVQSQVWRSTAVRLRSETIKGKGKQPWPELLDPDVALSVETGRAAIDALSAQIERLEELLLKRVGLLPQFQLLKTVTGIGPILALTIALEVGDIKRFPGVGEFASYCRCVDSRRLSNTKKKGEANRKNGNPYLAWAFMEAAHFAIRNLPAAQRFYERKRRQRMRCSP

SEQ ID NO: 456593 - protein, 345 aa, unidentified
MKVSTIGVDIAKSVFQVHGEDAEGKASVQKRLGRQGMVGFFSKLPPCLVALEACGTSHDWGRALRAMGHEVRLIPAAYVKPFVKRNKTDARDAAAICVAARRPDMRPVAIKSEEQQASRALERSRELLIKQRTQLMNSLRAMLAEFGIVAAQGGRGFAELTARLRGENPGLPETLVAALRLVAAQLDNLTPAIEAMEDRIKTIAKADPTMRRLSAIPGVGFITAHAVVAAIGEGRQFGCARDFAAWAGMTPREASSAGKRRTKGVSRQGESRLRKLFALGAATLMRNARSRDDRATQWQRGILARRPMKVAVMAQAAKTARIAWAVLTSGRSYAPPSAAAFSAQP

SEQ ID NO: 456594 - protein, 418 aa, unidentified
MTRSEDSKIIRVVHPICCGLDVHKESISACVIYLDNNGADQYEIKVFGTFTDDLMRLRSWLIDYECPVVAMESTGIYWRPVHNVLEDTVRVVLVNARDIKNVPGRKTDIGDSKWLAGLLRHGLLRGSFIPSKDVRAWRDLTRLRKQYVHTVGDYRKRTHKLFESANIKIDSVVSDLFGVTGLNLMNLLVSDRALTLANIELCVRGKLKGKEKELYRSIQGFFSDHHRFILQRLLSTIATLEEEIAVFDAQIRHLMKDHDALLNRMKKAAGIADVSSCEILAELGPDLSEFPTGEAIASWAGLCPGNNESAGKRKSGKSPVRKHHLKTIMIEVAWAAIKKKGSYFKDKYYRLKARRGAKKAIVAIAHRILLGIYHVIKDGVEFHDLGEDYLTQRNKSQKMSYLRKQAQLLGYDLVPQTT

SEQ ID NO: 456595 - protein, 351 aa, unidentified
MPKAKTESKPSSMIVVGGVDTHADTHTVAALDQLGRRLGWAVFPAHRAGYRALADWLAGHGEISAVGVEGTGSYGAGLTRWLSAHQITVVEVNRPNRAERRRRGKSDPVDAEHAAAAVLANTATAVPKARTGLVESIRLIHATRAGAMKARTAARNTFTNTLRTSPDAVREQLQPLTRARQLTAATGYRATGDGPDSTVKRCLRRLAVRISQLSEEINAADHELDRLTRELAPTMRSRPGFGPETTAQLLITAGDNPDRIGSEAALAGLCGVSPVPASSGRTRYHRLNRGGDRQANRALHMIILNRLRHHPPTRAYLASHSLQGHATPHLRRVLKRYLVREVYKLLSQLQR

SEQ ID NO: 456596 - protein, 349 aa, unidentified
MKILAIDLGKTKSVACVYDVDSGSATFRKIPTGADAIRGLLTEHRPDRVVIEVCPAAGWIGDLVSCGCTELQLANTAAPAWRWSNTKRKTDRDDALRLAQLSALNQLPQVPATPRPTRQWRALIRYRHHLVRRRTQLRNRIRALFDREGLVLPQGKICWTQNGTAALRKYACDVNEVDDDDLWRGELDCELDALQSVDELITRVESKLNVLEQKQAKCRLLRTIPGVGPRLAEIVVAVLGDPHRFQNSKHVGSYVGLAPRQYQSGDSDRKGHISRQGNGLLRAMLVEVSWVSLQYNDWARSVYERVRRGSPARKKIAIVAVARRLLVRCWAMLRDATCWKQPTLAASRG

SEQ ID NO: 456597 - protein, 426 aa, unidentified
MKKKSNSVANSVRAGKARGPVQRDAKEVMAELVVKLSQKLESQAARTSEEKGRQQDLPGPNRDRLTVGVDLGDKWSNYCIVGLDGEKLTEGELRTAQQDFAEFFQSLAAARVVMEVGTHSAWARDVVASCGHEVLVANPRQMEGPKRRKRKNDRIDAHKLARVGRMDPQSLFSIEHRSVKVRQDLVAVRARNAAVAVRRDLINVTRGLVKSMGGRLPQCSSPSFPHRVEEMLPAEVREVLLPLVRLVETLSICIKEYDETIEKLGSEKYPHTKLLRQVKGVGPITSLAYVLTLENPERFAQSRDVGPYLGLVPKQEDSGDSQPQLRITKMGDMMVRQLLVGSAQYILGPFGPDTDLRRYGLRLSERGGKNAKKRAVVAVARKLAVLLHSLWVSGEVYEPLRHALPKAAQDTTVSHAPAEAAAEAAA

SEQ ID NO: 456598 - protein, 350 aa, unidentified
MDKTIKMLGIDIAKSKFQLHGINSRDQCILKRCFTRKKMMDFTANLNPCIIVMEACAGSNYLARTFSKSGHEVKLIAPQYVKPFVKGNKDDAADAEAITEAAIRPNMNFVAIKQVWQQELQMVHRVRSRLMKNRTALMNEIRGLLGEFGTVVPQGQPALIMVIQELLAREEQQLSYKGIEVFQELYSELIALNDKIKTYDNKLKIYFDQDPVSQRLSEVSGLGLITTTALSIALCDPSVFKNGRQFAAWLGLVPKHTGTGGKNMNLGISKRGDRYLRTLLVHGARSVVASVKRKNERGEKLSSLDLWISKLEAVKGYNKAAVALANKNARIAWSMIAHNQQYDFKLASGY

SEQ ID NO: 456599 - protein, 408 aa, unidentified
MTVVGIDVSKGKSMVAAMKPGGELVAAPYEVRHSDIELSRLALDVLCMEPDTRVVMEATGRYHEPVAALLHSEGIFVSILNPLLIKQSGAGSLRKVKSDPKDALKIAKYGLDNWSTLREYTPTEAIRQQLKLCERQCDLYSKNIVMLTNNLISLSDKTFPGVNELFSSPEKADGHLKWVDFYRTFWHCDCINRMSPDAFGERYKKWCKKKGYHFSADATNALYAASCGLYTTLPRDNNAKLLVTVAADQLIALRENQSKLEAEMLNLCKQLPEYETVMAMYGVGKSTGPHLMAELGDIRRFPHRSSIVAFAGVDPGVVGSGKMQLSSVTTSKRGSPQLRKALFQVVSTYVKCKPENEAVYQFYAKKRDEGKPFFVCTTAAANKFLRIYYARVKECLNAVESATQVEEG

SEQ ID NO: 456600 - protein, 292 aa, unidentified
MSQPNPLCVGIDVSKATLDIAASSDVAQFTVSNDSDGFNAIITGLRRHSVALVLMEATGGLEVAVACSLQAEGFEVAVVNPRQARDFARAMGYLAKTDRIDARVLTQMAEVINRHPERKRFIRALPDAERQALAAMVVRRRQLIAMLVAERNRLYPSHPQNKKSINTIIKALEDELARLEKDMNSHIRNHFKEIAERLSSIKGVGTMTVSAMLAEIPELGTLSRREISALIGVAPVNRDSGTMRGRRTIFGGRAGVRSALYMAALVATRFNPVIKRFMCACLQPERPKKWRW

SEQ ID NO: 456601 - protein, 357 aa, unidentified
MLALGDSAPRKGADAMTFVGCDLHTRMQQVAVLDTRTGEVSERQLAHDGNAIEEFYAALPGPVTIGIESTGYATWFHTLMQRLGHTVLVGDAAKIRAMVVRKTKTDRRDALHILDLLRHDRFPTIWVPDPATRDLRALLTHRMRLVRIRTMVKNGLHAIALNYRLTRGSKLLRQAGLAQLHALALPPHTAQRRDQSLELLAGLTSQIRELDGAITTAALAHPDGPRLITHPGVGALTALATIVVLGPVARFHDSKHVVSYVGLAPALNASADKYHLGHITKQGSPLLRFALGQAAAHAARMDTDLKRTYFTLVHRRGRPKAKVAVARKLLVRLFIMLRDQIDYDEFRRRGRTAPASA

SEQ ID NO: 456602 - protein, 354 aa, unidentified
MSQIPNTAIAVIGIDIGKNSFHVVGHDARGAIVLRQKWSRGQVEARLANIPPCLIGMEACVGAHHLSRKLASLGHDARLMPAKYVRPYSKGQKNDFNDAEAIAEAVQRPTMKFVATKTAEQLDLQALHRVRERLVSQRTGIINQIRAFMLERGIAVRQGIGFLRKELPTILATRTDALSLRMLRVIEELAGDWRRLDQRIDGLSGEIEALARQDQACSRLMTVPGIGPIISSAMVAAIGTGDVFSKGRDFGAWLGLVPKQISTGDRTILGKISRRGNRYLRVLFVQAAWVVLVRIKDWERYGLKSWIEAAKRRLHHNVLAIALANKLARIAWAVLAKGRAFELTRTDDAGVRPA

SEQ ID NO: 456603 - protein, 316 aa, unidentified
MSEPVYVGIDVAKRTFEVATTGQAQTFSLGNDEAGHAQLCQLLAPLSPRLVLLEATGGYEQYLALALSAAGLRVSVINPRQARDFARCMGKLAKTDRIDAQALRGFAALLDAQGHEPRMLADEQQRALTALVVRRRQLVAMLVAERQRLALAHPKAKPSILRIMATIAEQLNDLDGQLKEHVLAHHADLAALLTSVKGVGPTTASTLLAQLPELGQLNRKQITSLVGLAPINRDSGTLRGQRHIFGGRADVRRVLFVAALVGTRFNRVLKAFYARLLAAGKPKKVALLACMHKLLVILNAIARTKSPWRNELAQAV

SEQ ID NO: 456604 - protein, 388 aa, unidentified
MLLDHPSDGPTAIRTHIGAIFVSLELSRSNWLITSLSPGKGEKMSKHSVTAGDVAGLMKLFAELRRKAAARTGESYPIVTIQEAGLDGFWLHRVLQQEGIESHVVDPASIATPRRRRRAKTDRLDGETLLRSLLAYKRGEPRVCAMVVAPSPEEEDRRRLCRERRTLIAERIVHVNRIKGLLFAQGIFDYVPMRRNRRAELDVLRTGDGRVLPAHLRVQISRELDRLELLLEQIAAVEREQDALLAASRPAGGTDRSDPVAMLLELKSMGPNFAAVLWTEAFWRQFANRRQVASYAGLAATPWRSGGIEREQGVSKAGNPRLRTTMIQLAWLWIRHQPQSALTQWFNANSPRGRKRTIVALARKLLVALWKYVTAGVVIEGAVMKSAA

SEQ ID NO: 456605 - protein, 349 aa, unidentified
MTTQRLSYVGQSVYVGVDVHKDTYAVTCVCNKQIVKTATVKADPAGLTASVSQWFPGARLSTAYEAGFSAFVLHRALTKAGLMNIVVNPASIAVAANDKVKTDRRDSKKLAIDLSDGRLQGISVPTEDEELARLLPRTRAQIVEHRATIARQIKAKLHQFGLIAPASRRLISNRYVREIDAWPLPPDLRVSRTFLAEQWRFATRQLIEMRRLLREQAKAHPAIEQVSRSVPGIGEVVARTLATELGDMTRFANERALFSYTGLTPSEYSSGPSVRRGHISRQGSSRVRHLLIETAWRALPRDAVLKEIFDRIAATRGKKRAIVAIARRLTGRIRACFRQGTTYAVGTYA

SEQ ID NO: 456606 - protein, 398 aa, unidentified
MLSEAAIIEHAQEKFLSAAAQPRTKNRPQRPAADRLPCGVNNAVAQRDRGRPGIVSPNSRQSRMPRAASSSHLQGRDGSIMQDQVMTWIGIDVAKESLDVAWSSGDKSQHLSAANSSAGFTSLVRQLPPPTEARVVVEATGGYERALVTALVEAGYRVAVVNPRHVRDFAKALGILAKTDRIDAMVLARFGHQVQPRVLEADPAERVELVQLVTRRRQLIDLRTMESNRLQQTTVRPAQKSIQHVLKLLAKEIDQLEAEIARLLQSDDDWRAKMELLSTTPGVAKVTSATLVAEVPELGRLNRQAIAALVGVAPFNDDSGRHRGTRRVKGGRAAVRRVLYMATLSARRCNPVIRAFSERLAAQGKKPKVIITACMRKLLVILNTMIRNNTPWRDLHAC

SEQ ID NO: 456607 - protein, 421 aa, unidentified
MPSENTVHIAIELSFSSWLVAARLTGAKKSRLHRIEGGDTGALLALIAELRSRALTELGGAAEVACCFEAGRDGFWLHRLLTAHGILVYVLEPTSILVNRRSRRAKTDRLDAEGMLRVLAAWLGGDRQVCSMVRVPTPEEEDGKRPHRERERLVQEKLRIENRIEALLFTQGIRARPSLRSWERELTELRTGDGRTLPPLLRAELDRLRRRLVLILELIRELEAERAAALAAAPDEAMAQKITSLQRVRGIGANFSAVLVREVLYRSFANRRQLASYVGVAPMPYQSGGMDRDRSISRAGNPRARTTLIQLAWLWLRYQPGSALATWFRERVGTGAHAPNRHRRPGEEVADRTVALRGSRSAAGGRRNQDRNGARGVRRTGLLQTTSRSAAIREARPSSSLVASCRRVSGRLRLTGATPRA

SEQ ID NO: 456608 - protein, 403 aa, unidentified
MSKNINRTNGKKLDSTKKTTKSRVKPKQKIEIRNLLHKLETAKKAPKAARPEEDVEYYIGIDLGDKRSYYCILDKNTNIAADGNLATTVQEFEQYFKAIPKSRIALEVGTHSPWISPLLEELGHVVYVANPRKIGGGKKRRRQKNDKLDAEAMARQVKSDPRMLYPIQHRGEKARQALVLLRTRHALVCARTKLICTVRGLVKSDGRRLPKCSTMTFHKMERGYVPEALRDALEPLFQQIGLLTEQIKKYDKEVKRMCRESYPETELLQQVNGVGELVSLAFVLTVDNPGRFAKSRNVGAYMGLIPRQYDSGDSRPQMRITKTGDRMMRQLLTQSAQYIIGPFGKDSDLRRHGLKIAARGGKNAKKRATVAVARKLAVLLHSLWITGEVYEPLRNSEPKEKAA

SEQ ID NO: 456609 - protein, 408 aa, unidentified
MEIVGIDWGRKKHYCYLLHQGKKLVLKNKEEDFAKLLKIKEAVYVIEDGNNRIVDYLLRNNRQVYILPSRRSSEARSFFVIEGKSDFIDSKVIAMTYEHNPEWCLQVKREGIAFELDVLVEENAVINVSMMQDIGRLDAYLERYWPEVKEVFSGTSARKLAFISICPTAKDFLTMSDKEILQKLKEMGFLINSNLKSKLKELRKIALERYVPASIRTLIIAFSRYAMEKKVMKEEIGKQMKEIIEESEFSVLLTLPGVGVIIASQLIVAYLTHKFSSYRDLQRYAGTTPTYYGSGNKNTTKMRSNCNHYLRGTLHIASLAATNSSKWMKRFYDNKKSEGKSSAHALRALANTILKIAFAMLRDLTPYSEEKFFKRNPLSDYTPSKKEGEQKPEYSLKVSSVATCRSTA

SEQ ID NO: 456610 - protein, 383 aa, unidentified
MQKTQETLRIKDSIKEAILYIAFELSSSKWKLAFSDGSKIRYKTITAGNLAQLQVEIELVKRKFRLIEEARVVSCYEAGRDGFWIHRYLESQGIENLVVDSASLEVNRRKRRAKTDRIDAGKLLRMLMRYWGGEKQVWSVVRVPSEQDEDARHLHRSLENLKSERTRHRNRIKGLLVQQGIKVSNPSHKKFLEVLEKVRTWNGQAVGPGLKSQVVREYERLQVVEDQIKAWEKEKKERLKNPDTVSLQKVAKLASLYGIGSVSSWTFVMEFFGWRQFQNRREVGALAGLTPTPYDSGKSLREQGISKAGNQRVRALAVEIAWAWLRFQPQSKLSRWYMKRFAGGSKRMRRIGIVAVARRLLIDLWRYLEYDKIPEGARLKSSA

SEQ ID NO: 456611 - protein, 417 aa, unidentified
MLARRAKGDRVIFVGVDWAEAHHDVHVADEAGKRLGKARLPEGVDGIARFHELVGAHVEDPAEVVIGIETDRGLFVTALVAAGYQLYAVNPMSTSRYRDRHSTSGAKSDAGDAQVLSDMVRTDRHHHRPVAGDSEGVEAIKVLARAHQTMVWSRGRQTNLLRSTLREFYPAALVAFDDLTSGDALEVLRVAPTPTLGGGLSRSKIAAALRRGGRQRRVEERAVEIQAALRSEQLHAPAVVANAMGASVAANVAVIAEMSAQITRLAEELESGFEQHPDAEVVRSLPGLGTILGARVLGEFGDEPNRYATPKCRKNYAGTSPITRASGTKQTVLARHVRNRRLADAIYLWAFASLTASPGARAYYDARRAAGDGHHQALRALGNRLVGILHGCLAHHTAYNETTAWAHRPEHELAPAA

SEQ ID NO: 456612 - protein, 482 aa, unidentified
MHPQTTNISAITHDVHSFTFESAGAFGITNEHSGLAVTPAHLYCFRRSQARMSHVLNLAQWRSVMKKNELPPFAAYVGIDWADKKHDLCTQIPSEDIQEFDIIPHKANSIDEWLRSLHKRVKGPIAVAVELTKGPLISALQKYDFVVIYPVNPSSLAKYRQAFSPSGAKDDPTDAALAVDMLLRHPERFKPLRPQSADMRSLVTLVEQRRQLISERVRITNRLRAALKQYYPSVLDWFDDVDTILFCDFIEKWPTLVQVKRARFNTLKSFFSEHNMRFAHILESRVEAIKEAVPLTEDDAIIVPYRMKAIATVRQLRLLLESIKEFDTEIDEVAMRHPDYELFRALPGAGSSLTPRLLVAFGEQRDRFTSAAEVQMYSGIAPVTERSGKKHWVHWRMQCPRFLRQTFVEWAAQTINKSYWAGEFYRQQREKGCTYQAAVRALAFKWIRIVYRCWQTGIPYDEAKYLKALERRGSPLLAKGKT

SEQ ID NO: 456613 - protein, 480 aa, unidentified
MGNINIQKHENQTIRKIFDDAGELKKVLIVGLDYAEEAHQVVICNGLGDYRCNPFTVKNNKEGLAFLVSRISNLCSKYTLKKSHVVTGGETPGSWAVNFAYQLHLQGYPVIDLHPHRVAKQSENETTNTDKLSAMTICKCLINKMGHTHYYDEIYTELKLAVRSRSQLGKSRTRISNQIHTCCDTYFPGLMDQKKSGIVPLSKPCFFILENHSIQSIRSEKPAKLMRMLKKYGLSNTNKGVEKIKDLANITLESSPTYERQMRRKLKHLIAQYNLITEQIANAAEEVAYLLRQTPGALLTSLDGISVTLASQLTAEFGDPQLTENIDSKVTYFGLSKRTHQSGGEDKPKKKKGKSQRINKHGKRAILMGVNLVLEHGPDEFRDYFQQRQLSGKNGTHALGRKLLRFVFSVLRTPHEYVPKELEGVNRKDPLWQEHYKKLETKLKRKWRPFTRKPSPNQDHFRQWEKVIKSVFGVTITGEL

SEQ ID NO: 456614 - protein, 428 aa, unidentified
MKYYTSTTEYNCGIDLHARQMYVCVMNRQGKKLVHTNVLHNDFDYFLKLVEPYKHDLTVCCECMFGWYWLADACQQAGLTFVLAHALYVRAIHGGKNKNDRIDSEKLTHLLRSNLIPPAYVYPADKRPLRALLRQRLFYVWRRSELLARIYSHQLAHNRTPARQTRRVRDSWEQALLKAEEHPLRQIALQNDLAMIKHFDHQIFQLEEELQRQTKKAAGRDYELLKGVPGIGESLGLTILYEIGEVQRFPTVKDFLSYCRLVKGTVASAGKIKGLRGAKLGNPYLRWAFGEAAVIAKRDHYVVGPLSQRLEAQMGGNKFKSNTVVAIKLARAVYFMLKNKTVFDPERLVASMQKCLKPTRKVAAPLSQPDGDLRRLAAAVEKQLSPGRKQPARLTGCAKQARPLPAADQTCCAWSTPVCVGSASNPAL

SEQ ID NO: 456615 - protein, 402 aa, unidentified
MNQTAPPKQSTNSTPTLGASGRAVGLDIHPDTFAAAILDGRDPLRARAAQSVTRQPLEALCAWAARHTRSEDLLILEASANSFAIAERLQGIGRQVYILESHRAGQIGKSYLANDKVDAAKIARIYLSGLAIKVWQPDAETRQRRELLSTYQRCVKDSTRAQQHLRSYLNEHALRLPKGFRLCRPEALHRLLTLKEWSTRQKLLLTEMHGGLIAARERRTRLRRMMALEIEEEPDFLRLYKLAGLNLVTTYALVAIIGDIQRFATSKKLVSYLGLNPSVVESGQFEGGGALHGHGRGSLRALLIQASKRLLSTANPLQKWGLSVALRRGMNKAAVAVARKLTVAVWHVLQGHWNQALEESTTLLTKLAKLATELGVSTLQELGYASKLAFQEQKLAVLRTHP

SEQ ID NO: 456616 - protein, 419 aa, unidentified
MLTARWFVGIDWATEAHEVCVLDPEGQVCDRRSVPHSATALQAFVDALLERAHGDASTVAIGIEVLRGAVVEVCVERGFGVYAINPKQLDRFRDRFTAAGAKDDRRDAHVIGDSLRTDPQAFRRVRLDHPLVIQLREWSRVDEDLAGDLTRMTNQLRDLVYRIAPGLLTLCPAADERWLWTLLRDAPTPADQRRLSLRRLERLLRDHRVRRLEAAQVREVLQQPSVYTAPGVVDAVAAHIQLLLPRVDLLAGQRRDAEKQLERLLDALDAQEPAAGDQREHSDVAIVRSMPGIGTRVAARMLAEASQPLVERAYHVLRATMGVAPITKQSGRRRTVSMRYACNARLREAGYHWARTGAQKDPASRAYYAQLRARGHSHGRALRSVADRLLRVLMTLLNHGQLFDLTHGQHAPAAIGAGA

SEQ ID NO: 456617 - protein, 382 aa, unidentified
MSAERVNDCYVALELSQRTWLIGFLLPGTDKVQIMTVAGGDAEALLSALGRIESLAGTRLPAECTMVSMRVCYEAGYDGFWLARYLIDRGIDTTILDPSSFLVSRRGRRVKTDRIDVEAMVFTLKAYLLADRSVCRPVRLPSVAEEDAKRLSRERTQLKKERTRHVNRIRALLVLHGIRSVPGLWGGRWKEALSNIRTGDGRELGRFIFRELCRQFERLDLVHSQLKSLEKERIQACETEGAINDSGKIRVLKQLDGIGEVGATQLVAEVYHRTFKNRKHLASYLGLSPSPYSSGEVHRDQGISKAGNKQARVMLVELAWCWLKYQPQSELTRWYRARFSGHGSRSGKVGIVALARKLAIAFWRFIEDGVVPEGATLAVATK

SEQ ID NO: 456618 - protein, 345 aa, unidentified
MLYVGLDLSRKRVDYCLLDEAGVVVERSAAPADADGLVGLVRRVGRYREPVSAAVESMNGARFVHDLLEGEGWEVGLADAAKVKGLAPLACKTDRIDAWVLAELARRELVPAIWLPDPEVRGQRELARFRLHLVKHRTALKNRVHQTLVTFGQPCPVSDLFGQRGRVLLERLAIPEPWAETLRTSVRLIDELESEIGAIERGLRGSAEHRYLELLTTVPGIGPVLGYTIAAEIGEITRFASPRKLAGYTGLCPRVYQSGDSDRRGPLSKRGPRYLRWALIEATTHTCRHPLYADRYQRTKKRLGAQRGPRVAQIDLARRLTEAIWHMLTKNQPFAPAGASRCLAT

SEQ ID NO: 456619 - protein, 335 aa, unidentified
MREITTIGMDLAKNVFHVIGCDARGKVQLRKQLRRHQVLAWFARLKPCRVGMEACASSHYWGRELRKLGHEVKLIAAQHVKAFLRGNKNDYNDALAIAEAVVRPEMRFVAIKSAQEQDIQALCRLREQRVKECTALGNQIRGLLGEYGISIRKGKAGFKRRVVELLEDADSGLSDRFRRLLREAWHQYQELEAHLQAYDQELARVVRENEACQRLQTIPGFGPVVASVFFSRIGSGEGFRRGREVSAALGLVPRQHSSGGKEVLLGISKRGDRYLRGLLIHGARAVVARAGSKRDRLSRWVMTLVARRGHNKAVVALANKMARMGWAVLAHKTAC

SEQ ID NO: 456620 - protein, 336 aa, unidentified
MMETEREVVCGADIHKKFLLATILTKGGQKFQDRFDSNFEGLLNFRQWLLDHGCQRLAVESTANYWLPIYFVVEKDVEFVLANAYQIKHIPGRKTDVLDSEWIAELCLKDLIAPSRIFSEDDRDLRAMTRTRENYVKMRSQTKNRIHQELESACIKLSSVLSDIFGKSGIHIIRGILGGLSIEDILDSIPSKKLKAKREEIQDAIRANISPVQVDLISLLLDSVDFLTREIASIDKQIQTLISKRQGDLKIAMSIPGMGFTSASTILAEIGCFRDFKTGEKLAAYCGLVPSVYQSAGKLITGHITKHGSPHVRRMLVEVAHAISRTKADCTCLALA

SEQ ID NO: 456621 - protein, 355 aa, unidentified
MAVYIGVDFHPYEQTVAFVDEVDGEIGYKRFLHSDKAGIKAFYRKCGRDAVIGTEATGSLWWFEKLLFDNGMKLKIGDPRMIRRAALSRHKNDFRDAETILDLLIRGQFPAITPRSERSREMLDLLNYRQSLVSKRTSVVNQLQAFARSKGLPRFRLPAVKARKKVEEVPATEVERLLVGSRFLLCDELTVQIKTVEARLAEEVDKDERARLLMTHPGIGLINAMALVHTLGDVRRFRRKEEVVAFVGLDPLEKSSGETRRIGSISKRGSRLARHLLGQAAQACRDQKIRKFYSEVSRRRGRPKAKVAAARKLLINCYVMLRDEISYEEFTRRGEVGLCEGSGEVTRKLAQSLKV

SEQ ID NO: 456622 - protein, 413 aa, unidentified
MTEENFAWFAGIDWGSERHQACLVDAQGRIVGEREFPHGGKGLADLCDWLLSMCGAADTVAVGIEVPHGPVVDTLIDRGFVVHAINPKQLDRLRDRHSVAGAKDDRRDAYVVGDGVRTDRRLFRRVHVTDPRLVELRAWSRLAEELTEERVRLSNRVHHELWRYYPQMLKIADGDVAATWVLDLWDLAPTPARAHRLRAAPVEKLLKHHHIRRIDADTVLRNLQEPAIKVGKGVAEAASVHLRSLFTRLRVVNRELRQADAKLDALCAAIGETDADSGEGLQRQDVMILRSMPGIGRINLATLLCEGSGPLSRRDYPALRTLCGAAPVTKRSGKSHIVIMRYASHVRLRNVVYHWARVATQHDPKSRERYAALRRRGKSHGRALRGVADRLLGLACVLLQRQTPFDPNFAQAK

SEQ ID NO: 456623 - protein, 377 aa, unidentified
MKNSTRWLGLDVHAETIAVAVAERDGAVRSLGTIPNRFESIRKLVKKVGPPGELKACYEAGPTGYVVYWQLTQLSVACEVVAPTLVPSKPGERVKTDRLDAEKLARCYRSGDLTAVWVPDDAHEALRDLVRAREAAKKDQLRARHRLSKFLLRRGIRAPEKMRPWSERHLKWVKGLRFEQSAHEATRIDYIGEVDHALDRIVRLEKAIDEAVEKAPDKMRAVIAALQGLRGIGKMTAVTVVSELGELSRFEHPTQLMGYSGVVSREHSSGSKIQRGAITKTGNAHLRRVIVESSWAYQHRPSLYRELRRRQEGLDEEVKAIAWKAQHRLNSRYRKLVARGKSSALAVTAVARELLGFIWAIGTHVERKYRVEARKAA

SEQ ID NO: 456624 - protein, 410 aa, unidentified
MTTTKDKVNAATLVAIDIAKMRNEVLIQPPGRKRYRMRITNERVDHDRLIQHLTALGGAVDVCFEATGNYHRSIAWRLLSAGFRVHLVSSVALARTREALQNSWDKNDPKDAQVMLHLLAAGNVQRYYDPLAQGINDWQELSKTHEAISRAKTETLHRLKTHYLPLYFPEVDRFRRNSRAEWFFRFLYEFPTPGSITGLSEPEFVAAAWESIGRKVSKTRLLSDIYKTACTSAGLPVATDSAAVCMYRLVIMQMRQLIQHRDAIERQANRLLGEHPDFRRLQQIPGIGPIHALTILAEAGDLRRFGHYRQFLKYCGFDLATHQSGQFRGQSKLSKYGNARLRKAFWMAGQVAIRQRENSFRDKYRRYVRREPENAHLKRKALTAVAAKVARVAYAMIKHETDYRPYYGVR

SEQ ID NO: 456625 - protein, 408 aa, unidentified
MDSAFQFFAGIDWGSDKHRVCLTGRDGQIMAERWIEHSGDSLAELAAWLRQHTSDSPSLLAAAIEIPRGAIVETLLEHGFTVFSINPKQLDRFRDRYSPAGAKDDRRDAFVLADALRTDMHCFRRVKLDQPAMIRLRELSRLDDELAHEQNRAVNRLREQFHRFFPQLLQLSECADEPWLWALFEMAPSPLAAARLTEARIARLLRQHRIRRIAAAEVRAVLKTKPLTLAPGASEAAAEHALLLLPRLRLLHQQRTDLGRRINAMLDELATPAQDKNEHRDAAILLSLPGLGRKIAATMLSEASQAIADRDYHALRCYSGAAPITRQSGKKKIVLMRRGINERLRNALYHWARVSVVFDPQSKKRYAAMRACGHSHGRALRGMADRWLKTLTSMLTTRTLYDARRRAA

SEQ ID NO: 456626 - protein, 358 aa, unidentified
MNRNTGMSAGQIIGTVNGMQVIGLDIAKHVFQLHTVDMGTGEIVNVQIKRAKVLQHFANKQPCLIAIEACGGAHHWARELSAQGHSVRLLHAKIVRPFVSGNKTDATDARAIWLAVQQPGVKFVGIKTAAQQATLTLHRQRELLMKMRTMQTNALRGLLYEFGVTFVQGQKALFKDIEQTLEELAVQLPQMLRDSLREQVARIKAMSEDMLAIEKRLGLQLKADPQMQRIAQIPGVGLLTATAAIATMGEASAFKSGREFCAWLGLVPKQTGTGGKVRLGGISKRGDTYMRTLLIHGARSVLAHAKERGPWLEQIKARRPANVVIVAQAAKMARTIWAVTAKDQDYQRGFKSVRPLAA

SEQ ID NO: 456627 - protein, 428 aa, unidentified
MKYNTQNAKIKSITEKTLIVGIDVGSETLFARAFDWRNYEYSKKPLEFSNTEAGFMTLKAWMADFAEKYGKNVVIPGMEPTGHYWFNLGAYLQDNGMKPVHVNPHHVKKSKELDDNNPNKNDRKDPKTIAALVNEGRFSYPYIPTGIYAEIRSLSNLRLQTQEEITRIKNRIARWFSIYFPEIKDVYRNPDSVSGLMILKEAPLPQDIVKLGVDGINKIWRDAKLRAAGLKRAKTLVTAAEHSIGSQEAPDSARIELKNLLNDYEIYKNREEDLMSLTEEKLSEIPHIDKLLEIKGVGLKTVSGFVAEVGDITRFDNPKQLQKLAGYAIVECSSGKHKGESHISYRGRKRLRYVLYEAAISLIARNEEFKEVHRYYRTRKENPLKKMQSVIAVACKVLRIFYTILTKGVTYDGAKMMQDIKRPQMLAA

SEQ ID NO: 456628 - protein, 360 aa, unidentified
MNRRSSYEAEDGVRHSITDGHRRRYRQGDFFHLVGFGADGKIAFRRKIRRLGLKDVFEQLPPCIVGMEACLSAHFVSRTLHALGHEPRIIPAIYVKPFVKGQKNDYNDAEAIAEAALRPNLRFVQEKSQDQLDLQACHRVRSRLVSRRTATINQIRAFLIEQGIAVRSGLRTLRKSLFVILETRKDEISPRTAKLILGLYGDWCGLDERIEAVTSEIEELSRVEAKCQRLMSVPGIGPLISTGLVAAIGTGEAFERGRDFGAWLGLVPRQYSTGRRSILGRISKRGSKYLRTLLIQAAKVLLMRPHNWPRYSFGAWLTTASERLHRNKLAVALANKLARIAWSVLRHDKAFDTHLETAAI

SEQ ID NO: 456629 - protein, 345 aa, unidentified
MEITAIGVDLAKHVFQIHAVDAQGHTVLRKHLNRSQMVPFFTRLCPCLIGMEACGSAHYLARRLATMGHTVKLMAPHFVKPYVKTNKNDMNDAEAICEAVQRPNMRFVAVKSVEQQSILHMHVSRQLLVKMRTQVSNHLRGLLGEYGVILPQGISHLADIPALAEDATNDLPGLLRQLLMDMLNHVREIDRKIDVIEAQIRQWHRNSDASQRLAEIPGIGLLTATALVGHIGANAQGFTSGRHLAAYLGLVPRQHSSGGKQRLAHISKRGDPYLRTLLIHGARAVVRMCQGIQRRGSTAIDPWLEHLLARKHPSQAAVAQANRNARIAWALLAGNRVYRSPVTAT

SEQ ID NO: 456630 - protein, 343 aa, unidentified
MQAIATIGLDIAKSVFQVHGVDAAGQVVVRRQLKRRHVLAFFAKLPPSLIGIEACASSHYWARELQAVGHTVRLIPPAYVKPYVKRQKNDAADAEAICEAVTRPNMRFVPIKTVEQQGCLVLHRTRHLLVRQQTATINSIRAHLAEFGIVAPVGRRGVEHLLEVIADANDTRVPEIARACVATLGVQLQQLKTQILELDRRILAWHRSSEASRRLNHIPGVGPLLATALVASIADPKAFRSGRDFSAWIGLVPKQNSSGGKDKLGNISKRGDRYLRSLFTAGALAVIRYAKIHGTKHRPWLVALLARRPTKVAAIALANKLARIAWALMTKGSRYRQPAALRV

SEQ ID NO: 456631 - protein, 361 aa, unidentified
MNSIDYIGFDIHKKTISFCAKAQDGQILDEGVLPARRPDLSAWAKKRPRPWVGAMEATLFTGWIYDHLKPLAQELKVAHPPMLKAIAASKKKNDKVDARKIADLLRCDLLPECYMAPTAIRNLRRVLRYRNLVVRQATRMKNRIAGLLMETGTPYNKERLHGKAYFTELLGSLRQTPAAVKGLLQLSRRQLEFFETIQKRLMKGLRENPELSQRVERLQSIRGVGEVVALTWALETAEVTRFGSIAEACSYCGLTSAQHRSADHEQRGPISKQRNKHLQTILIEAAKLAPRYNAQLAAVHQRELQRGNRNRATLAVARKLVAYLMAVDKSGKPFQERASGGEAEASQSSGAVPAPGAKPCQ

SEQ ID NO: 456632 - protein, 306 aa, unidentified
MEVLFDIVAGVDVHKDFLSISVITGGRNGEEIMETWECSTFTDDLATAGKKILSLGAKHVAMESTGVYWRPVYNVWNSMGIIITLANASHVKNVPGRKTDPHDSRWIAKLHRCGLIRGSYIPEVEFQELRALTRHRRSLITDLAKVKNRTQKILEDGNIKLGSVLSDVFGVAGYAIVTALANGEIDPDKLADLVVTNVKAPRSEIRKSLIHTLKGYQVLLLQELLRQYMSLQNLIDSINKEIDEKMTKHQPLIEKLDAVPGIDVKIAQDIIAEATTKMENFKDAKTFAAWAGVAPGNNESGGKKKV

SEQ ID NO: 456633 - protein, 413 aa, unidentified
MYYVGIDIAKRTHVAVIMNEDNSLKVKPFSFNNDKLGFKKLLVHLQRLCCDMSDIIIGMEATGLLFENLYRHLQNLEYNVVLLNPYQTAKFREMDTMKRVKNDNIDSVMIAALLKSGRFSEGYVSQEQLQSLRELYRHRNAIEDQIKSLKRRTSAMLTVVFPELETVIRDPFNVSGLALLDKYPTAKHFHHASVERILKTFRGIKGNNFNRVKAQALLDASKRSIYSGVASDARALNIRMNIAQIRLLKEQLDETLTVMQSLFSNHTEVKQEDKEVMESLIDNLRTIPGVADKTILALLAECGNLDRFYAPKALIGFLGLYPTLSQSGDSTRNGRLAKRGASLAKKAIYLASISAIRHNDEMRTIYMNYRSKGRAKKEAIIIVARKLLTIIYTIYTRNIPYDPQRVFVAKPNQ

SEQ ID NO: 456634 - protein, 408 aa, unidentified
MNTLYVGIDVSSKSNVVYLMLPNGDKHSNFSVANSHEGSTLLVKKIYSALTSHSLDTVLIGLEATSVYGVNLVYFLREDATLAPFNRKIHVLNPKQVKKFHDTYNDLPKNDYVDSFVIADCLRFGRINKEVYMGEYRYKALQNLTRARFFAVQNLVKEKQRFMNVLFKKYSTMTQEKVFSDAFSTTALAVYDEFESAEALANMDLHELTDFIIEKGKNRFPDPDAVAKAIQKAARSSYRLPKTVNDSVNQVLSISITSMKALESQIKEFDKAIKALMELLPNVLISIPSIGPVYSAGIMAEIGDINRFDNQASLAKYAGLAWKQHQSGGFEAEVTRLIPSGNRFLKYYLCEAAFSLVRCDKEYSDFYHLKYKEVNRCQHKRALALTARKFVRLVFRLLKDNRLYCPAK

SEQ ID NO: 456635 - protein, 296 aa, unidentified
MEDVTLIGIDFGKHTSHLHAQDRAGHAVWRKKCNRSQLMILLANTPPCTVVTEACAGAHQMARDLIRFNHTVKLISPQFVRPFVKTNKNDFIDAEAICEAASRPSMRFVTPKTEAQQCLGAWHRVRESLVCDRVQVTNQIHAFLMEFGISLPKGAAVIKRLPSVLAEQRLPARLVILLERLRDQYRALDAQIAEIERDLAAQLREDESGRRLLSVPGIGPVTASLLAAEMGDGKQYGCARDFAASLGLVPRQYSTGGRAHLMGISKRGDKNLRRLLVQCARVYMQNVARRQCLIKF

SEQ ID NO: 456636 - protein, 438 aa, unidentified
MSNKVIFNVDELFISVGIDVGADFSWMSIALPNQQFVGKPYKILHNSMDSLTAAVSKIKEAEELYSLESRIFLESTGIYHYPLFCYLRDKGFNVSVINPIITKNSTNINIRKVHNDRFDSKKAALVGLKPDLKVSLMPSDLALNCRNLCREYYDLMDNRSAYVNKLQGELRMAFPQYLGIFSKVTVNTSLTLLETYTSPAAFIEADRQEIIDAIKSTARFGLTYALNKYNAIIQAANEANEFGYIIDSNIKRIRLYIGFIRKYDEEIKGILGSMHELVDANEATDFVRQIHLIETFKGAGFLSAISLMGEIGDFSAFSKPKQLFAYFGLDPAVKQSGKFEGTKTQMSKRGSAIARRVVHTLALQSIGTSRTGEAKNPVLRDYYLKKCESKPKLVAMGAVSHKVCNMIFAILRDNKPFEIITPQEHIKKHNAAKCDIAA

SEQ ID NO: 456637 - protein, 400 aa, unidentified
MYDISDVDVFFALDVGKTAHHGHGLTPAGKKVFDKPLPNSEPKLRAVFDKLTAKFGTVLLIVDQPASIGALPLTVARDAGCKVAYLPGLAMRRIADLYPGETKTDAKDAAVIADAARTMPHTLRSLELTDEITAELTVLTGFDQDLAAEATRTSNRIRGLLTQFHPSLERVLGPRLDHPAVTWLLERYGSPQALRKAGRRRLVEVIRPKAPRMAQRLIDEVFDALDEQTVVVPGTGTLDIVVPSLARSLGAVHEQRRALEAQIEALLEEHPLSQVLTSMPGIAIRTAATLLVTVGDGTSFPTAAHLASYAGLAPTTKSSGTSIHSEHAPRGGNRQLKRAMFLSAFAALHDPASRTYYDKCRARGKTHTQALLRLARHRISVLFAMLRDGTFCEHRTPSLA

SEQ ID NO: 456638 - protein, 347 aa, unidentified
MLAEQLDYVIGVDTHRDAHAYAVVALPGGGRTVAAELAAAPRGYREALALARRSAPGRRAWAIEGSGHYGAGLARFLLAQGERVLEIGRGARGPRGPRGRSDALDAVAAARAALAAERPGQPRRGGKRAALRALVVTREGALAVRRAGLNQLRALLVSAPEPLREQLRGLTRARLLRRCRELGTEGRDSEGHAVALSLRLCAGRVEAANREEQELAQAILALVRVEAPQLLARPGVGPISAAQLLISWSHPGRFPSEAAFARHGGSAPIPASSGQTLRHRLDRGGDRQLNRALHTIVLSRRKHHPETKAYVERRRSEGKSVREAIRCLKRYLARELFRLLEGTPLPT

SEQ ID NO: 456639 - protein, 453 aa, unidentified
MLMKQKVSMEIINLNAAGIDVGSRSHFVAIGQGKNDIREFGVYNEDLSSIAEWLLANNVKTVAMESTGTYWQSLFAVLQNAGLQVILCNGKFTKNIKGKKTDVQDCQWIQKLHTIGLLSGSFLPDEATEQLRTYCRHRTNLLDNAADTTRKIQKYLRLLNLRLDVVVKDVVGLTGLLIIEAICKGETNAAVLASLRHGNCKKSEEEIAKALQTNGRKDYLFALRHEYNMYRNLQSSIQDCDAEIEKMLTEQITDNDDKRQHYIEKKAHKKINKNSPKNIDINLMSYQYFEGIDLLAIEGVSHSTALTLMSEVGLQGLKKFDSAKQFASWLRLAPNNKISGGKVLSHKVPKGSNRLKIALRQAANVIGNLKNTPLSNFFNRINFRKGRSAAISATARKLAVIIWNMIIKKQPYNNDHGYEFLDQKRKRKVQEMKKLIHKFDIKTEELGLLLTGL

SEQ ID NO: 456640 - protein, 412 aa, unidentified
MSNPLLVGIDVHRKTNTIALMDLTGCEVAPRFTVDNNRPGAGALAQILQATSEEHGFDAIHIAAEATGWYWWHLFCALDQDPFLKQRSLLLYPFNPRLIATFRKTFSERNKTDLIDAAIIADRLRFGRDLPQAYVCDERYQALRMLTRHRFHLVHQIVREKAYFLAHLYLKASEYTRLQPFSDVFGATSRALLQDYANIEEIAAIPFDDLVEIIDQLGKRRFADPEDKARKLLAVARDSYALSEDLQAPVNLVLQQSSQQITSLQRLLKRTETAISDALQLIPNSLQTIPGIGATFAAGILSEIGDPIRFDCDQAKIAKLAGLTWRQSQSADFEAEETRLSHSGNRYLRYYFCEGANSVRMRDAAYRAYYERKYHEVRLHQHKRAIVLTARKLVRLVVRLLTTNQPYRPRGT

SEQ ID NO: 456641 - protein, 347 aa, unidentified
MNSEKYIGLDVHQATISVAVLDSTGKLVMESILETKAATILEFFAGLRGTLSVTFEEGTWAAWLYDLLKPHVAKLAVCNPRKNALLKDGNKSDRIDAHKLAELLYLNKLSSVDHGETGVRMLRELARSSLTIAKDLTRVMCRLKAVDRSWAIPCAGRDVYYACHRAEWLGKIKEAGVRRRAERLYPQLDMLQYLRQQARRELLTESRKHAITVKLRQIPSRGPIRSALAVALIQTPHRFRTKRPLWAYSGLALETRTSAEYCYVKGGLRRSKKPISIRGLNKDHHHDLKGLFKGAATRASVLPGPFQDFYQRSLAKGIKPTMARLTLARKIAAINANSMEEGRKLRR

SEQ ID NO: 456642 - protein, 341 aa, unidentified
MSTATLVGIDLGKHSFHLHGQDKAGREVFRKKTTRQQMMRLLGNLPSCTVVMEACAGSHFLARQLMAFGHEVKLISPQFVRPFVKGNKNDFIDAEAICEAASRPTMRFVTPKTEAQQTLSVLHRMRESLVRDRTKTANQAHGFLLEFGISLPKGLSLVRRLPCTLGEHELPPRLATLLKRLHEHFCYLDEQIRALDEEMDNQLAADDLGSRLLSIPCVGPITASLLCAEMGDGKQYGGSRDFAASVGLVPRQYSTGGRANLLGISKRGDKNLRRLLVQCARVYLQRLAFQQGALADWVRSLRERRHSNVVVCALANKFARIAWAIAANHSEFEAGPSAFAA

SEQ ID NO: 456643 - protein, 345 aa, unidentified
MNKLVSTQQATEFCGIDVSAASLSVALIAPDGGLAQREFSNDASGHGALSVWLKKCSSRIRVSLEATGIYSLDLALALDAEASVELMVLNPKLVNRFAQTLRRSKTDAADAVVLAEYSMRMPFCRWQRPQASHLQLRTMSRYIGSLVVLQAGLKTRLRSAQSTATTPRAVRVDLKRALAAVERRVEKMRAEALKLVEAEAELYERYHLLTTVPGIGAVSALTMLSELILLALGMTVRQWVASSGLDPAHQQSGTSLNKPSRISRAGNRRLRAALYMSALSASRYDRHLAAFYQALRTRHKTGLQALMAVARKILHAIYGIFKSGTPYDGQRLFPNIRTEVESVAG

SEQ ID NO: 456644 - protein, 338 aa, unidentified
MKKYIGIDLHSNNSVVVITDEEDRIVFQKRLANKLDEILLALAPHKEETVGVVVESTYNWYWLVDGLMDAGYQVHLANPSAIKKYEGLKYSGDFADAAYLAQLLRLGLLPEGYIFPRELRAVRDLARKRMQLVRLRTTQILSIGGILVRETGGRMSSDRIKTMTAETVEALGFMPDVALAMESNRVVCQVLQQQISVLEKRLEAQVKLQPGYQLIKTIPGIGQILATIIMLEAGPMTRFADVGNFSSYCRCVDSLRESNGKKKGEGNSKNGNKYLAWAFMEAANFALRYCPEAKRFYERKKSRTNRIVALKSVAHKLARACYHILREQQPFDVKRCFV

SEQ ID NO: 456645 - protein, 346 aa, unidentified
MEISTIGLDLAKNVFQVHGISATGEVVLRKALRRSQMLPFFQKQAPCLIGAEACGTSHHWARELTRLGHEVRLMPAAYVKPYVKRGKNDAADAEAICEAVTRQTMRFVPIKSREQQAALSLHRARSLLIKQRTQLVNMMRSVLAEMGIAIPVGIVKALQMAREIVDGEAELDLPAEATNVVALLAEQLLQLHTQLRKLDLRLAALQRSDDRAKRLATIPGIGPIGATALAASVTDPGQFSSGRQFAAWLGLTPRQSSSGGKDRLGRITKMGDRYLRQLLVIGATALVRYAREKPGTVDPRFVALLARKPARVASVAIANKMARIAWAVMARGGVFERGHAPMLAAA

SEQ ID NO: 456646 - protein, 273 aa, unidentified
MKQYVGLDVSQKETSVCVVDDAGRTVYEGRVKSDPSALTELLRKRAPHAERIGFETGAMASWLWHELRRVELPVVCIDARHAHAALSVRVNKSDRNDAKGLAELVRVGWYREVKVKSEESQRVGAILVARSRLVSIRRDIENQVRSIIKEYGFLFRRAIGLQFRNQVIELLGEDHHLRAVIDPLLSIHEQVCRQQDKFDDEVRHLAKSDETTRRLMTVPGVGVVTALTFRHTIDEPSRFRSASAVGAYLGLTPRRNQSGEADTNGRISRWGDR

SEQ ID NO: 456647 - protein, 377 aa, unidentified
MKKVRFLGLDVHAETIAVAVAEADGEVRSLGTIPNREESIRKLVKKLGPGEQLRACYEAGPTGYVLYWQLTGLGVQCEVVAPSLVPVKAGDRVKTDRGDATKLARSYRAGDLTAVWVPDAAHEALRDLVRARESAKRDQLRARNRLSKFLLRHGRRAPLGVRPWTMKYMTWVREQVQFEQPAQDYTRLDYVHEVEHANDRVRRLEEAIGEAVKLAPVTMREVIQGLQALRGIAQLSAVTIVSELGPISRFAGARQLMGYSGAVASEDSTGQRIRHGAITKTGNAHLRRVVIEAAWAYRHRPAIGATLHKRQQGVCEEVKEIAWKAQHRLHKRYRHLATAGKNKPKVVTALGRELLGFIWAIGVQVERHSSHQHRLAA

SEQ ID NO: 456648 - protein, 354 aa, unidentified
MTVYIGDDFHPHQQTVCYMDTTDGEIHRRELKHDHAQIREFYSQFNGDVVIGLEAGNPCRWFEKMMSELGHRVLFGDAKEIRLLARSRHKSDPRDAEHLLDLLLRNEFPVLWRRPEQSEVILEQLRFRHALVQQRTRIYNHLQALAHTAGLPKRSMKSISAKDQLKEADLSQTQMDQCDHWLGMLKDIDSRIKRLDQWAARAAAADSIASRLGTQPGVGVLTALCLTHTLGDVSRFRTSRQVTAYVGLDPVEKSSGSRHHIGRISKAGSPLLRFLLLQAGQAALKSDAQLRQFYKQLCHRRGHAIAKVAAARKVLVRSYIMLRDKINYAEYLRRGVVVGRSDLAVRFVQQPKSR

SEQ ID NO: 456649 - protein, 348 aa, unidentified
MEHYAGIDVSLECSSVCVVDASGKIVREGKVASEPEALIGWFASLGLSLVRIGLEAGPLSQWLYAEMKQAGLPVELLETRHVHAALAAMPVKTDRNDARGIAQLMRLGWFRPVHCKSMVAQETRAVLTARKLVQSKLKDVENSLRGILRGFGLKVGKTTKRGFAGRVRELVDGHPSLETIAEALLSVRAVLLREFNGFEKRVRIMARADAKAKLLMSTPAVGPIVALTFAAAIDDPERFTSSKRVGAHFGLTPRKYQSGETDRSGRITKVGDAAVREALYQASHVMLTKPVKGCSELKSWAMHIAKRAGMAKAKVALARKLGVIMHRMLADGQAFNPTATIKLIAAAA

SEQ ID NO: 456650 - protein, 421 aa, unidentified
MQVLYPRCAGVDVHKDQVTVAVRLPGSGPGGRETVVRKFGAFYGVLREMARWLASLGVTHVAMEATGIYTMPVFHALMEPGCFGQVLVCNAAHVRNVPGRKTDAVDARWLAELLECGLLRGSFLPDADVKAVRDVVRYRKKLVQARGSETQRPGSVLQDAGIKPDSVASSIGTVSGMAMIRALIDGERRGDVLAGLARGRMRAKIGDLSLALEGRFGDHHALMCQLHLDHIAQLNEMIARLDAQVEAMMVPFARQRDLLATIPGIGRIAAAAIIAEIGTTPAEYFATSGHLASWAGLCPGNHESAGKRKHGTPRKGNQHLKPILVEAAWSAIRTDGRLRARYHRLVLRFGGYRSPAAKKRAIVAIAHTLIVIIWHMLTTGAPYADLGPDFYARPVDPDQEARRLISRLEAPGRKVTLEPAA

SEQ ID NO: 456651 - protein, 370 aa, unidentified
MAKRNMFVGMDVHKESIDVSIAEEGRDGEVRHYGVIPGDLEAVAKVVRALRVPNRQLRFVYEAGPCGFGIHRYLTAQGEDCVVVNPSSMPKRSGDRIKTDRRDGDALARLHRAGELTAIYIPTADDEALRDLVRAREDAVGLSTQAKHRLKAFLLRQGRRYPGRAGWTRPYRRWLADLSFPLAPQHIALQEYRDTIDETERRVDRLTDQLRQQTPAWRWAPVVDALQALRGVSFVTAVGLVVEVGDIRRFDHPRQLMAFLGLVPSEYSSGPSVRRGGITKAGNPHARRLLAEAAWAYQGVPRIGRQMLYRQEALPKTVCDIAWKAQLRLTSRFRKLVARGKAKPKVATAIARELTGFIWAIAREIPLPPA

SEQ ID NO: 456652 - protein, 349 aa, unidentified
MHKSDSFDPCGIEVSAHELHVALRRDEQLVPLKMFPNTPAGHPALRRWLQRPGRTVRVCLESTGLYGLDVALALSGQPGLEVMVANPRAVRHFATALMERSKTDLLDAAVLREFAARMPFQRWTAPSPAALELHALARRIVALVEMQTAEKNRWHAAHASQAIPAAVRRDVARSLRAHRQAIARLTREACRVIAGHPQLSRPFALLLTMRGIAQTSAVQILAELAVLSPDLQVRQWVAHSGLDPREYRSGSSVHKKVRISKSGNRHLRRALYMPALVAVRYEPHLRAFYEHLLARGKSKMQALVAVMRKLLHAIYGMFKHGQPFDGSKVYRLPEEAVVAGPIFSTAEAA

SEQ ID NO: 456653 - protein, 417 aa, unidentified
MLKIVFPICCGIDVHKTFLVATIASTDRSSVTTYQTKRFSTFTKDLENLSKWLLYNQCTDVCMESTGKYWIPVYNVLELTCEVILAHPKYVKSLRGKKTDKKDSVWIADLFKHGLVKASFIPEKAIRDLREVMRYRTKLVSMKSSEKNRYQNALTVSNVQLASVVSDTFGKSAQTLINQLLQQPKDTSFDVLPFLHGSLKKKAEQISESLNGSIDDIQAQKIRSCTSHMAELDSHIEDLQVAADLIASPFTAALRIIESVPGIGHLSALTILSEIGTDMSKFLSAKHLCSWAGLTPCNDQSAGKKKSTRISRAGCYIKPILVQCALAAIKDKSFPYYGQRYKVLKHRRGHKKAIISIARMMLSVIYTLLSRGELFSKELYEESLKNPMVILSPEEQFQRLAKKFGYAVVKVHEPVPV

SEQ ID NO: 456654 - protein, 467 aa, unidentified
MGKGSGVSRSDRRRNARKERLRALVPRDGAVVGIDLGEGKQALAVVDHDVRVLWRKTVRVPAHRLGEAIDLAAGAARAAGFASVTVACEPTGPRWMQVQRLCAERGLPLVCIQPLVSHIAREQQDYTTHKRDESDAVLIARLAAELHCYVPEQLDAAWAQLRDLGRRREQLVTAQTASVLRIRSFLSVAWPSAVTAAVHPFGSLTWLAAVQVVTGRCGADPARLGLGEQEFCALVGDAARAWGAVRADKRIARKVLAMADDPDAVGWSRRGLFRRIGDELADLARTRALLRAVEADMAAVLGDELGLARLGDIPGLTLAGAAVILAEAGDPARYETSSSLVKHAGLSPADNASGAFEGPSHISRRGRPGLRTAAWRAVFPLLAHNPVMAAKHQALIAAAEQAAAAVGAGPGSARAARAVKAARARARVACAASLLRWIYFMAVHDAGWDPVAASGGRLSPDEPAAAA

SEQ ID NO: 456655 - protein, 365 aa, unidentified
MKIIYWIGIDDHADKWTIAQYRGEEARPSKEFELVPDEKGYRRLLAYLKGLDGEVRIVYEAGPCGYELYRRLTKAGYQCQVAAPALTPRKPGERVKTNRRDASKLGRYLRSGELTFIAVPDEERESLRDVIRSREAAQKDVGRTKRRIVHLLLRYGQRYRDGQAWTKRFWTWLKSVELAGVNSQFVLDDLISELEHRIAQVRRYDEQIELAAQKPEYKPYLDGLRTLRGINTLSAMTVLSELGDLRRFQTAPQLMAAIGVVPSESSTGDKTNRFSITKTGNAHVRRIAVEAAWNYRRRPTAGRSIQARRKGQPKKIVDIAEKCEKRLNSKFFRLTSRHKKSTVAVVAVARELLGFICAIGQIAHP

SEQ ID NO: 456656 - protein, 423 aa, unidentified
MKGSSPSIYDDFELLIGVDWADKKHDICEYDACSQQYKFSVIPHTPDAIQAWLLSLQERYPGKRFAIACELTKGPLINALQACEDVVIYPLNPSMVARYRKAFASSGSKSDPVDAKIQVEILQYHRDKLTPLKTQSDSIRQLNQLVLFRRKLVQDRVSLSNKITGILKQYFPQSLLWFKEKDTAIFCDFLKRWTTLEQAQAARKTTFLAFFSKHNSHYPDVNEARFTQLKAAKPLTRDEAIIKPNSLMISLLVPQLKQLLLAIRTLDEEIKELYIQHDDHIIFDSLPGAGPCYAPRLLAAFGEDGARYQSASDIQKYAGIAPVIEASGQKAWIHWRYHCPKFLRQSLVEWAGQTVRYSYWAKAFYEQQIGKGKSHNVAIRALTFKWIRIVWRCWQDRKVYDESTYLNALRVKGSQLLKYAVDN

SEQ ID NO: 456657 - protein, 320 aa, unidentified
MADITTPTNIGIDVSKDWLDIIVLPSGETFRIENTEEKMGALVGKLESLKPERVVLEATGGYERLVTSKLYLAGLPVCRVNPKRVRYFARSLGQLAKNDKLDAKVLARFGEVVQPALTQLPSEHEQRLSALLTRREQLSAMLVAEKNRLGTAPTHVRSSLTEHVTWLKKQLKHLDKEVDAFINATPDLKEKDDFLQEVQGVGKKTAAKLIADVPELGACDRKQIAALIGTAPYDHDSGYKKGQRAIRGGRPDVRKVLYMATLAATRFNPVIQEFYRRLVQAGKRKKVALVACMRKLLTILNAILRDRKHWNPTRACPAVP

SEQ ID NO: 456658 - protein, 385 aa, unidentified
MTTRDRTDTPAMGEYATVFVAFELSKSKWQLGVIAPGSEKMSRYTVAGGDLAGLGQLFATVRAKVERGGQPVRIMSCYEAGFDGHWLHRWLTDQGVINHEIDASSIAVNRRARRAKTDRIDLDLLMRAFLAHLRGEPRACSVVRVPTAEDEDRRRRTRERERLIKERTAHSNRIKGLLHAQGIRDAMPLKPGFLSDLDRLCTGDGRPLPPQLKDEIRREHERLCLVCKQIKTIEAQHQAAHRAPAPGSVEAKIVQLAQLKGIGPVFAQVLGNEVFYRRFANRRQLGSYLGLTGTPFDSGDSRREQGISKAGNSRARASAIELAWLWLRHQPDSALSRWFRARVGALTGRMRRIAVVALARKLVVALWRYLESGLIPTGAVLRPSF

SEQ ID NO: 456659 - protein, 340 aa, unidentified
MSNRIVIGLDLAKQSTATAALDGQGREQWRRTFRRQKLLPFLARQAPCIVAMEACAGAHYLARQVDRYGHQVRLYPPKHVKAYQRGQKNDYNDALAIAEAAQHGRLRSVPVKTVEQQDEVLLIQQRRQLKQEQVRLGNHIRALLAERGLVLPKGVAALRRRLPEVLEDGDNGLTPLVRRVLNGAYQRLLAILEELTWYDRELERQTQQDDVRQRLCEMPGVGTVVASVLKAWMGDGRQFRRGRDASAALGLVPCQHSTGGRQVLGGISKRGDRYTRSQVINGAQAVLLYAHRKDDALHRWVVRLQATRGHNKAVTALANKLVRIAWVILARGERYSPRPA

SEQ ID NO: 456660 - protein, 373 aa, unidentified
MKRILKIAMDVHSKNYTLCAMEPTIGAEDRVYGEIQVAPDYKEVLRFIDSLKMKLGPNDEYSIECGYEAGCLGYTLYHQLTEAGVKCVILAPTTMLTQQGKRVKTDKRDARLIAQCLCYGGYHPVYIPTGEDDAVKEYLRMRDDHKLALKKLKQQINAFVLRHGHQYTRTKWTIKHVAWLHKLELAPMYRETLDEYMASYEEQEAKIERYDKRIEEIAAEARYQENAKKLSCFLGIRTHTAMSLIVETGDFNRFSKGSTYAAFLGLAPGEHSSSTSVNRLGISKAGNTHLRCLLIEAAKGICKGAIGRKSKELRSRQNGQSAEIIAYADKANIRLRSKYYKMIRRGKKKNVAVAAVARELACFVWGMMTGNIA

SEQ ID NO: 456661 - protein, 346 aa, unidentified
MLYLGLDLSRRKLDYCALAPEGARLEVGTAPVDADGLRGFAARLLDYGQPIRAAIESMNGARFVHDQLELYGFEVEIADAVKVKGLPPPACKTDRIDAWVLAELARRDLVPAIWLPDPEVRAERERARWRLHLVRHRARLKHRVHSTLVTWGKPCPVSDLFGRAGRELLVRLDVPEPWRSHVENAVRMIDELGREITGIERELRSAGVDHRYVPLLTTVPGIAWVLGYTIAAELGEIERFASPRKLASYTGLCPRVYQSGDSDRRGPLSKHGPKYLRWALIEAAVNACKHPLYRERYQRTKRRLGKQRGPKVAQVELARTLSEAIWHMLIRNEPFAPAGATPILAA

SEQ ID NO: 456662 - protein, 346 aa, unidentified
MIETTIIGLDVGKLIFQVHGVSADGKVTIKRRLRRSDVLKFFARLGRCIVGLEACGGSHFWAREIEAIGHDVRLIPAAYVKAYVKRGKTDAVDAEAICEAVSRPTMRFVPIKTANCQAALMVLKSRDLLVRQRTQAINAVRGHLAELGIVAAKGLAKIGTLIAIVRDENDQRLPPAARMALKLLVDQIELLTDRIDALGREVVAEVRRDDRMRRLSTIPGIGPITAATIQALVPDPGVFTSGRHLAAWIGLTPKMHSSGGKEQPGKISKMGNPTLRSLLVVGATALLRHARRGATISPWLTALLKRRPAKVAAIALANKMARIVWALLTKGGTFIQKHRTAEHAAA

SEQ ID NO: 456663 - protein, 459 aa, unidentified
MSRKHKKAKRAGQGGAVPSLSCIEPNAAGIDVGATEIFVAVPQDRDPGPVRSFETFTEDLHRLKSWLQHGGITTVAMESTGVYWIPLFQILERAGLEVCLVNAQHVKHVPGRKSDVIDCQWLQYLHSVGLLRASFRPEERICAIRSLLRHRDSLVQMAAAHVQPMQKALTQMNLQLHHVLSDITGQSGLAILDAILAGERNPAVLAQLRHARVQASQEVITKSLVGDYQREHLFTLRQSLQAYRYYQSLITTCDQEIAEQLQNLDSRTPPDASPLPPEPYPHRPRKNEFRFDMRSELYRIYGTDLTAIPSINALTGYTVLAEVGTDWSKFRNGDAFASWTCLCPQNKKSGGKILSAHTRRSANRVNRALRLAAQTLERSTSYLGTYYRKMRARHGAPAAITAAAHKLARIIFHLVTTGQAYDESLFAAEEQRQRKRLENKLKRSAQQLGYQLIPLGQTA

SEQ ID NO: 456664 - protein, 340 aa, unidentified
MNATTYGLDVAKRVFQLYWVDAQTGEIANRRFGRDDLIAFLAQRPAGRVALEACGSAHWWARKIQALGHEVVLLHAQFIRPFVQTNKTDAADAKAIWTAVQQPGMRTVAAKTEDQQAMLSLHRMRSQLIKFRTMQVNQLRGFLYEFGVTFRTGRAAGLAEVRQRMAELEDALPASIMLNLQDQLRRINAFEDDIDQLEKRIGAWQKQEVACRAISDVPGIGRLTATALVATIGDARTFRSGREFAAFLGLVPRQSGTGGKIRLGSISKRGDPYLRTLLIHGARSVLCHTKVPTAWQKGIQERRPANVAAVALANKIARTAWAILAHDSSYEANHVSVRPA

SEQ ID NO: 456665 - protein, 345 aa, unidentified
MKKVYAGMDIGSKECAAVVIDSKGKQVDSAVFKTSERNLRAFFSKHPSSSLLVEECEMAAWVRETVKPHVARVTVCDPKRNAWVAKGTNKNDRVDAAKLAELNRLGSYAEVWHTDDADIAGFKVLVKHYDDTSARLAALKCQIKARFRKQGVVARGEAVYGARRHEALCRVENTFARIAIEQDYDLLDYLVEAKAAARKSVIAASRSFPVTGKLGEIPGVGPILAARFVAYVADPHRFNKRTLASYSCLAVVKRSSDGSPIGREHLSRAGNSALKDLSRTAFERSMATRAPNGIKEFYASSLAKTNDKTKARLNTQRKILALMLAIWRDGTDYRDDLVTRAFTGA

SEQ ID NO: 456666 - protein, 314 aa, unidentified
MDISKLTFDATAIVGNAEYSAKFDNDSKGLNQFSDRLKSLGCQNLHICMEATGNYYEEVADYFAQYYSVYVVNPLKISKYAESRFKRTKTGKQDAKLIAQYCRSAQESELVKRQKPTDEQYRLSRMTAAYAQIKSECAAMKNRHHAAKDEEAAKAYAQIIKAMNEQLEVLKEKIKEQTEKPNCKEGVKRLETIPAIGRMTAAVLFHHLTSSKFETSNKFAAFAGLSPQQKESGTSVRGKGKLTKFGNRKLRAVLFMPAMVAYRIRAFPDFIKRLEEKKKPKKVIIAALMRKLAVIAYHVHKKGGDYDPSRYKSA

SEQ ID NO: 456667 - protein, 343 aa, unidentified
MELYVGMDVSLKETSICVVDGSGEIVSEGTVISEPATIAAFLEAKAVGALRIGLETGPTTTWLWHELRALGLPVICIDARHAKAALSMQINKSDRNDAVGLARIMQCGWYKEVQVKSVSCHELRAVLNSRAQLVKIKRDLENQIRGLLKNLGLVIGKAGGTVFTRRVEELLGRQGLLWEAVRPLLEVREKVRREIAGLYRRLLDLVRNDIDSRRSMTVPGIGPITALAFHSAVDDPIRFRRSRSVGAYFGLTPRRFASGEVDWSGRISKCGDAMVRSYLFEAAGVLLTRVAQWCKLKAWGHRLWKRIGFKKAKIAVARKLAVILHRMWRDGTDFVWSSKEAAA

SEQ ID NO: 456668 - protein, 340 aa, unidentified
MKITAIGLDLAKQVFQVHGVDESGKPVIRKRLKRDQLTAFFAQLPPCLVGMEACASAHHWARVLRDLGHEVRLISPQFVKPYVKSNKNDANDAEAICEAVGRPSMRFVAIKSIDQQTVLSMHRAREGFVKARTATGNQIRGLLAEFGLILPAGLSNLGPRVPALLEQAADRVGPALIQLIDQLMDHLKLLDARVKELEKMIANWHRHDPVSQRLAQIPGIGPITASALVASVADPRLFKNGRHMAAWIGLVPRQHSSGGKSTLLGLSKRGDGYLRRLLLLGAQSVLMRVRQPGAAPSWAGQLLQRRHVNVVAAALANKNARIAWALMARPQDYVPCDNLT

SEQ ID NO: 456669 - protein, 459 aa, unidentified
MVVEGSHENRGLLPSSTSVRLLKSSSPPRDRHLPIIHVFEKAEVTVDLVHPRCAGIDISKRDAKVCVRVASAGRAKATSTVTTWGSVTNQVLALREHLVAEQVTLVVMEATSDYWKPFYYLLEDGPFEVMLVNARHVRNLPGRKSDVSDAAWLAQLGAHGLVRGSFVPPEPIRQLRDLTRTRTAIVRERAREIQRLEKLLEDAGIKLSAVATDITGVSGRAMLEALIEGQRDPVVLADLAKRRLRSKIPELTEALTGRFGEHHGFLARLHLDLIDNHTHAISELAARIEVVIEPFRGARDLIVTIPGISTNVADVIIAETGADMTRFPTAGHLASWAGTCPGSNESAGRIKSTHTRPGNPYLKGALGVAAMSASRSKNTYLAAKFRRIASRRGPIKAVVALEHAMLVAVWNMLDTGTYYGDPGEDFFTRLNPDRAKSRALEQLRKMGYAVTLSPLAASA

SEQ ID NO: 456670 - protein, 321 aa, unidentified
MSEVTFLGIDVSKAKLDCALLRGDKYRSKVVSNSAAGLETLRQWLEKNQGSTAQVCMEATGIYWELAAQTLADAGHKVSVVNPALPKAHAQSLGLRVKTDAADARVLASFCKEKQPTAWTPLSISERALRALVLRHQGLMEIQTQEKNRMESARQEVRESLEAHLKWLAGELDRIEQAIKQTIDDDPDLRGKRDLLDSIPGLGERTIAVLLAYCGHAKRFSTARQFAAFAGLSPRLHESGSSVRVRPRLSKVGHAFLRRALYMPAMVTLYKTAWGRVFRERLAANGKAPKLIIGAMMRKLAHVAYGVLLSGKTFDPALHGA

SEQ ID NO: 456671 - protein, 329 aa, unidentified
MSALFCGLDVHKDSTYATLLDSGGRVVDHHRMSNDSVLSFLSGYQIDRIGMEASNQVAPLYRQLTKVGYSVQVSHPRKTRYIAEAKIKSDRVDSKAIAELVRLDALPSAYMPPRSIAELREKVRRRAFLVRERTKLRVKVRSILTYEGTRPPEGFGLFTEKGVGWLHGLSMESVESYLRVLKPLNDEILRISKHLKELAGGDEEVKLLMTIPGVGYYTALLVKAEVGDVGRFGDGDRLCSYAGLVPSTHSSGGVMRHGSITKEGSRWLRWAMVEAAMVHVHRYDTAITRAYHRIAERRGKQVATVAAARKLLSCCYSVMVNRRPYHDQA

SEQ ID NO: 456672 - protein, 412 aa, unidentified
METLVERGCGLDVHQGTVVACLLTVRKDGKVQKQVRTFGTTTRELLSMREWLLSQGCTHVAMESTGVYWKPVYAILEGAFQIVVANAQHVKKVPGRKTDVKDAEWIADLLCHGLLRPSFVPPKPIRELRDLTRYRRKLVESQSAERNRLLKVLETANIKLASVATDVFGTSGRLMLRALIQGKATPQEMAELAKRKLRSKIPQLELALEGRLEDHHRFLLKLQLDRLERVEGDLAVLEQRIQEKLAPYTAQLALLDEIPGVDWTLAAVIIAELGVDMSVFPSVSQLASWAGVCPGNNESAGKRKSSRIPKGNVYLKTALVEAAHAAARTKGTYLRDKFYRLKARRGYKRAAVAIGHKILVSIYHMVSQNVSYNDLGDLYLDKLNKNHLTRNLVHRLERLGYSVTLAPQQKAA

SEQ ID NO: 456673 - protein, 315 aa, unidentified
MSRYLGVDLHRNCFTVCTQLENGRQYMSTVKLENLQRFASRLRADDEVAVEVTGNTRLFYDAVAPHVARVAVVNPFQFEVIRKSVKKTDEHDARALALFLSKDMLPEVRMKDQEHSEMASLAQTRDTLVKSRTALKNKVNNLLSARGINLPKESLASEKGLREVLSLFFGSTVDVELQVLVDQIRSLNQSIAKLEKAISEQAPKLPGYENLTSIKGIGDVGASVLLSVIGDVNDFADEGKLASYFGIVPRVSNSNETQHTGRITKRGSKLGRTVLIQCALIAKRYSEYLQNFYERIKTKRGTGKAIVALGKYPPA

SEQ ID NO: 456674 - protein, 428 aa, unidentified
MNYNTQNAKIASITEKTLIVGIDVGSEIHFARAFDWRNYEYSKKPLEFSNSESGFATFKAWVQDIAEEHGKDVVIPGMEPTGHYWFNLGAYLQDNGMKPVHVNPHHVKKSKELDDNNPNKNDRKDPKTIAALVNEGRFLYPYIPTGIYAEIRNLSNLRLQAQEEITRIKNRIARWFSIYFPEIKDVYKKPDSVSGLMVLKEAPLPQDIVKLGIDGINKIWRDAKLRAAGPKRAQTLLTAAEHSIGSQEAPDSARIELKNLLNDYEIYRKREEELMEMLEQKLSEIPYIDKLLEIKGIGLKTVSGFIAEAGDITRFDNPKQLQKLAGYAIVECSSGKHKGESHISYRGRKRLRYVLYEAAISLIARNDEFKEVHRYYRTRKENPLKKMQSVIAVACKALRIFYTILRKGVTYDGAKMLQDIKRPQILAA

SEQ ID NO: 456675 - protein, 317 aa, unidentified
MAETLPQAAGIDICKQFLDVAFSTTNQTKRFDNTPKGCAAALAFVRTHGADRVCFEATGAYHRDLEHALGQSSFSFVKANPRRVRRFADVIGVGAKTDKIDAKILAKFVSLIAPRETQIKGKALLALTELLGAKDALSKDRVAVLNRSKIQRLPLLKRQNAARLKQIEGQIIAIEDQAKEIVIADELLRRRFEILLSIPGIGEATALVLLAEMPELGTLDQRQVASLAGVAPRARESGSWTGKRFIHGGRARVRRALYMPMLVAIRFNPALKEKYDGLIAAGKLPKVAIVAIMRKALILANALIRDDRHWTKTRACA

SEQ ID NO: 456676 - protein, 311 aa, unidentified
MEADCIAIGVDVSKHRLDFATLGSQQRGSEPNTASGIAALAKTLAAIGPHRIVLEATGGYERAIARTLFDAGLPVCVINARQIRHFAKALGVTAKTDSIDAEVLARYAAMVCPPLRQLKAENEQEMADLMARRRQLFTMIVMEKNRLQAPSRAQAIRIAAHVRWLEREVARVDRDLDRWIAADPERVETDAILQSTPGVGAVVARTLIADLPELGTLGKRQISALVGLAPFNRDSGAMRGKRKIRGGRASVRGVLYMAALTGARFNPVLAAFYKRLCDAGKPKKLALAAVAHKLLIILNAMMRNRSRWTHA

SEQ ID NO: 456677 - protein, 315 aa, unidentified
METVFVGIDVSKAQLDVALPDGTQVWPNDPDGHQQLVEQLGKWPLQMVVLEATGGYERAITAELAAAGLPVVVVNPRQVRDFARATGRLAKTDQIDAAVLAEFGRAVRPEQRPLPDAETEKLREKLARRRQLVQMLSAESNRLQQAHEASVRKSIRHVQQTLTKQLAHIDEDLQQTIQQTPAWREKENLLRSVPGIGPQTALSLLVELPELGSCSRQQIAALVGVAPLNRDSGKFRGRRTTWGGRATVRKALYMATLVATRYNPRIRNHYQRLLKAGKRKKVALVACMRKLLCILNALLRDQKPWTVPNNLPVTN

SEQ ID NO: 456678 - protein, 431 aa, unidentified
MGNKRNAKLAAITPETLIVGIDIAKRVHWARFIDYRGIELGRAEKITNDKQGFENILTTIRQQCNTNSMTKVIIGMEPTGHYWKALACFLKSKGLEIVLINPMHTSRIKEVLDNNQSKNDQKDAAVIARLVRDGNYYESYLPDDSYADLRVISAAWATVAKEKSILHNTLTAVLDEYFPEMAQVFKDPIASKAARQILKTYPLPAMITEIGIAGIHSEMQKAVKKTVGIGKARELFQAAEGSIGVTAGATATAVRIQTLISHLELTEKSQEQLLVEMKKYLEQTGISEEILSIPCIGILSAARLLAEIGDPARFQDHRQLHRLAGYNLVAQSSGEHIGTTKISKRGRATLRQLLYQTAMIMVAAKNSEAAEMHWYLKARLVNQLTGKQSLVVIAKKILTLIFYLAKHHQCYEKERFLGEIRKNQIKHLQAA

SEQ ID NO: 456679 - protein, 454 aa, unidentified
MNRSKKKNQRGQELQVVHPRAAGIDIGSQIHVVAVSPDCDAEPVRTFRSFTADLHRLAEWLEKAGVTTIAMESTGVYWIPVFEILEARGFEVFLVNARDAKQVPGRKTDVNDAQWLQKLHQHGLLRASFRPHHDIAALRAYLRQRERLVEFAASHIQHMQKALMQMNLQLHHVVSDVSGTTGMKIIRSIIAGERDASVLAMHRDAHCKQSMDTIRDALVGNYQAEHVFELTQAVELYDFHQTQIARCDLRIEEAIKQLQAQVEPPTETLPAPRSKGTRTSNPIGFDVRADLYRLLGMDLTQIHGVGPYVCLKLVAECGTEMSRWPSAKHFTSWLCLAPGNKISGGKVLSSKTRRSASRAAAALRLAATTVGKTDTALGAFYRRLSSRIGKAKAVTATARKIAVLFYNALRFGMAYKDPGVSYYEQRYRQRVLDNLRRRAESLGYVLQEKPLEAQ

SEQ ID NO: 456680 - protein, 436 aa, unidentified
MRGCRCSMIMGFTKPIEHFNLQRKKVITMNTLYVGIDVSSKSNVVYLMLPNGDKHSNFSVANSHEGSTLLVKKIYSALTSHSLDTVLIGLEATSVYGDNLVYFLREDATLAPFNRKIHVLNPKQVKKFHDTYNDLPKNDYVDSFVIADCLRFGRINKEVYMGEYRYKALQNLTRARFFAVQNLVKEKQRFMNVLFKKYSTMTQEKVFSDAFSTTALAVYDEFESAEALANMDLHELTDFIIEKGKNRFPDPDAVAKAIQKAARSSYRLPKTVNDSVNQVLSISITSMKALESQIKEFDKAIKALMELLPNVLISIPGIGPVYSAGIMAEIGDINRFDNQASLAKYAGLAWKQHQSGGFEAEVTRLIPSGNRFLKYYLCEAAFSLVRCDKEYSDFYHLKYKEVNRCQHKRALALTARKFVRLVFRLLKDNLLYCPAK

SEQ ID NO: 456681 - protein, 338 aa, unidentified
MGTYAGIDLHSSNNYIGIMDQDYKRLFGRRQPNDLNNVLKVLEPFKADLEGVIVESTYNWYWLVDGLQEHGYTVHLANPSAIKQYEGIKHTDDKWDSFWLAHMKHLNILPEGYIYPKEQRSVRDLLRRRLFFVRHRTANILSLQSTITRNLGIKMSSNEIKKLNMDDACDLFDSSNLVFMAQNNISTIKHLGKIIKGIEKEVKSQGKLRKEFVMLTTIPGIGLILGLTIMLEIGDIGRFFKVGNYSSYCRCVGSKRLSNGKKKGENNKKNGNKYLAWAYVEAAHFAKRHIPKAQRFYQQKMAKANGAVATKALANKLARASYFIMRDQVPFDEDMLFK

SEQ ID NO: 456682 - protein, 360 aa, unidentified
MNSLPATVGDFYRYVVGVDTHAATHSYAIIEAPNGGLIDQNVFPTSPAGLRRAREWIARRTEGDLDGVLIAVEGTGSYGAVLSDVLQQVGYRVVEAPTPRRARARSKTDALDALLAARSSLVMPLTTLRDRRTGDLQSALQVLTGARDQQNADRLRCINALTALVRTHDLGIDARRALTGPQIATIASWRRREETLGTATARAEATRLAKQITTLERDLAENRERITHLVETTAPELLDLPGVGAVTAAVILTVWSHPGRIRNEAAFAMIAGVCPIPASSGNTTRHRLNRGGDRRLNRALNTIVLTRMRTDPATRTYIERRQSEGKTSREIRRCLKRYISRQIFRSLTVAHPVPDAAAAA

SEQ ID NO: 456683 - protein, 360 aa, unidentified
MKKVSRQMRKMEAADKPEMTLGLDMGDRYSHYCLLNADGDVVEEGRMQSTEAALRRHFEGEPPLRIALECGTHSPWVSRLLTALGHQEIVANARKIPAITGSESKNDRNDAENLARFAAYDARLLSPIEHRSPERQLDLNLIHARSTLVRARTMIVNALRGLIKSAGGRLPACSTESLPTRAPAAIPAALATVATPLIEQIALLNAQIGGMDKQVEKLAVQYPEISLLRTVPGVGPIVAAAYVLTLDRPDAASNRSAGAFLGLRPAQSQSGDSDPQRRISKTGDGCLRSLLVQSAQYILGRFGPDSELRRWGLKLAATGGKRGKKRAVVAVARKLAVILHVMWRNGERFQAFPQPAAKAA

SEQ ID NO: 456684 - protein, 338 aa, unidentified
MKEQFYAGFDIHKKSIAICVKNQMGETIQEKSIRANPIAVARWVENAPKPFAAAMEATLFTGWVYDELCRYSDDVRVGNSVMLSYISKSKNKSDKVDAKKLADLLRVDLIPQVYMLPRYARDIREFLRYRNWLVRQSVRYKNKISGLLMMNGIEYNASKLHNKGYFYDFLDSLNNEKKLVELLRLSRSQLEILKEFERRTKKLLYKQPGIKERVELLTSVPGVGEITALTWALEIWDPHRFSSSEKAKSYCGLTPSQKESAGKERRMPISKQRNKHIQWVVVEASKIAVHRVKEPELVQIYQKVAERKNRNAATMAVARKLVEWLLAVDKRKTPFRAR

SEQ ID NO: 456685 - protein, 462 aa, unidentified
MALTLGIDVAVRAAHQATLVRDGTTVWRGCKFSTRPTDLERLWSDLDLADPGDLTVVVEPTRNAWIVLAEWFRRRGTQVVMVPTTQSADLRKYYSKHTKNDRIDSELLAGLPLLHPEGLREYSGQGPADPLRRLVKQRSTMVKRRVAVYARLDALVELLGPAWYAVLGSNYGIAALEFLARYADPNVVVRLGQGRLSRFLSARSRGAWREDHAAGLIVAAKETLALWGSEGMNFAELAEDIAHEAEQALYLTRQIKQIDERVANLYADADPDGIVASAPGVGPVISAVIAGRIGDPHRFTSLAAIRAYTGLIPKISQSGLSKIESSITKAGDPLLREMLCTAADQARKVDPQIAAKYQRLMTGDRHHDSAICHLATMLVTRIATCMRAGQPYQLRDVDGTAITESEGRAIVKQRYQLDPRQRDHVRHKLMRDRRKRPARSHRSRQALQHPIPLNASLRRAPN

SEQ ID NO: 456686 - protein, 433 aa, unidentified
MIKINYMSTLFVGIDVSSKSNVVYAMDFDENKYIDASFGNNQPGADELVGKIAACMQKHPHLNTIIVALESTSVYSIHIANFLASCELLMPYKPYVYCLNPKMTANYRKSYVGMDKTDHMDAFLISDFARVGRTKKCEPWRGSQYLALKRLTRHRLHLAECITREKTYMVSNLYLKFSELQLLDDDSRPFSNIYGTTSSAVLTEFMSLQEIIDSPEEELLEFLAAKSRNRIADISKTSELLKKAARDSYRLDKCMYEPLNVSLASSFNCIQTYQKEIKLIDQAIEKCISGMNPNAFIILKSIPGIGPVWAAGMLSEIGDIAAFHSSDALAKYAGLTWLKNDSGDFVSEDNRVSKAGNTYLRYYLGEAANSVRRYVPEYAEFYSRKYAEVTKHQHKRALALTSRKFVRLVFGLLVKNQLYTGEKLDAELNTDFK

SEQ ID NO: 456687 - protein, 352 aa, unidentified
MNNLSNVKNFIGVDISKDTLDICVLNYKLAKQSKANLDQTTNANLDQTQSKEQKQFFKIPNNSNSIKAFFMNFNPNQTAVTFEATNNYGVNLAKTLSELKIPFQELNAYKSSLFLKHLSYIKTDITDSYGLAYYCANFSNIFIQSKFNPNFKLIKSYQTTLNMLSKMQTQMKNLEKSQIGVNDEYLKQAINSFKLTIKSLFTKLEDFTYEILSQEIPQTKEIIENNKGFGKSLAIAIFPIMQYNKDKNYKQIISFLGLSPRVFQSGTSVLKSPHIKGPSKARKALFLSALSCIRYNEYFKAKFDRLIANGKPKMVAIIAVMCQMIKYLKLRYFSDDLNNVDLKDDLKAVQGS

SEQ ID NO: 456688 - protein, 315 aa, unidentified
MTTIGFDVGKLELVGVRIGKDAKVRERYYIANQPKAIDNLLSILGNKYKHIRIGSEATAEYHRLLALSCIDKNIPFCLINPIVTKQFTRATVRKKKTDVSDALVIAKLIRQGEGRLVSKDDFMASKAILRTANKLSSMHQALSLIKRRFEDNYHNEATTIKIVDHCLSVVEDSIGQIRKQAQAEDEELLKLLCSLPGVGKITANALIAEIGNIERFKNSKSLIAYAGLDPRVRQSGKLLHHNTRLTKRGSPYLRKVLFTAASIGLRHDKELGDYYTKKRNEGRSYKEAVIATARKLTNRAYAVWRERRVYVKTQT

SEQ ID NO: 456689 - protein, 371 aa, unidentified
MNTIIYVGMDVHKENFTLSCYSIEEDAIKYQQKMKPDYKQVLKYLGEVRKRYPEEIEFICGYEAGSMGYVLYNQLKELGIKCVILAPTTMVQINNKRVKTDKRDSGNITKCLAFRTYSAVHVPTVEDNAVKEYIRMRDAQKQSLKAIKQQILALVLRHGCFFEDGKSYWTIKHVNWLKSLDLGGVLQESLSEYLVTYGYLTDKITRLDKRIKELAEAESYQEKVSKLQCLIGVKTHTALSVVVEIGDFKRFSKAERLASYLGLVPGENSSGGKQNRLGITKAGNSQVRRLLVEAAQGYTRGQIGNKSADLKRRQSGNAPQVIAYADKANERLRRKFYRMTLKNNTNRNKAATAIARELACFMWGLMTNNIA

SEQ ID NO: 456690 - protein, 338 aa, unidentified
MYYTGIDLHKKTSFITTIDARGKIVTRANLQNVEEDILAYFANLGDETRIVIESMASWYWLYDLLTGEGFEVVISNPVKTKAIASAKIKNDKLDSHMLAQLLRADLIATVHVSSLETRKLKELLRHRSRLVRDATRMKNRIHMLLMKNNFRSPFSDLFGVKGLRYLEEIDLPDYHRQQVETYLLLYQKLREQIEPLTKRVRALAKENHTAQLLMTIPGIGPITAMFIIAEVDDISRFRSYRNLASYAGLVPSLDASAGKEKRGRITKQGSRYLRTALVEAAQAAARMKNCRLNIFFRRRIVKGGYQKAIVATAHKILQYAFYVWKNQTPYKETYPVCA

SEQ ID NO: 456691 - protein, 449 aa, unidentified
MKRSPKRGVAVSRPVFGEVRADAAGIDVHSEENWVAVPPDKPGPTVRKFGACTADLHQLADWLQACGVKTVAMESTGVYWIPLFGILEARGLQVFLVNARHAKNVPGRPKTDCLDCQWLQKLHACGLLNASFRPDDSTCRLRTLLRYRDVLIKSLSCHTQRMQKALSEMNVLLHKVVSDITGSTGMRILEAILAGRRDYQRMAGELVDPQIQASAEQIGRALEGDYRPEQLFVLGQELEARRFVQQQIGACDGKIEEQLAIMQAAVAVPPDPPQPLTGAEKRRGNAPDFDVQSYLYRLTGVDLTRIPGIGASAALALTSETGIDMAPWRTDQAFASWSCLCPDTRISAGRSKGGRPQRSANRVKHIFPVRNREDYAKSLRHLAEVNGFSPDELTRYIQAAFRQYVERSKKQWKVTFGSYAFLVASLRDKAQRVEFVRKTRSPLGHPRSQ

SEQ ID NO: 456692 - protein, 335 aa, unidentified
MMIIGVDYHPSFQTMAFLMEETGECGEQELNHSDGQAEKFYRDLKQRGISVRVGMEATGYSRWFERLLAELGFEVWIGDPAEIKAKRVKKKKNDREDARLMRKLLLENRFPRIWVPDPENRDLRQLLWHRHRLVQMRTRIMNQLQALAMNEGYRWKKKLFSEQGRAQLEKLSLAPWASRRRQELLELLDRMNPTIEELSAAVEREARKRPAVQRLMTHPGVGPLTALAFVLIIGTWERFPRGKQIGNYVGMIPSEDSSAGKQRLGHISKQGNSLLRFLLVEAAQAAARVHPDWRRRYVHLAMRRHRSIAKVAMGRRLAVRLYWMWRNGCEYSPST

SEQ ID NO: 456693 - protein, 347 aa, unidentified
MKFYNQQHQYYCGIDLHARKMYVCILDQKGKTMTHENIKTDPEMFLKLISPYLEDIVVGVECVFCWYWVSDLCAKHKIPFVLGHALYMKAIHGGKTKNDKIDSYKIALLLKGGNFPTAYPYPAQWRATRDLLRRRMYLVRRCGELVAHIQNTKTQYNLPGFTKRLARKYNHAGVAEQFEDPEVRKSVEVDLAAIASLNQILNQLEWHIEKTAEQHDYHTLYLLRSIPGVGLILALVMLYEIQDIKRFPSVQDFSSYARLIKPVKESDGKWAGKSNGKIGNHHLKWACNEAAILMLRESEKAKQYVAKLERKYNKGKALGIFTHKIGRAVYYILKNKEAFNMEKFFSQ

SEQ ID NO: 456694 - protein, 353 aa, unidentified
MQHFIGCDVHTRNQVVAWIEEETGEIKKRRLQHEGEEVKAFYAQFPSGTVVGIEATFPAYWFERLMGELGHELWVGDAARIRASEVRYQKTDARDAGDILDLLRTGRFPRIWVPSLEDRDLRQLLVHRMKVVRARTQVKNQLHALAISQGVCRGRKLWSAKGRKELESLTLMPWAARRRKDLLESLDGRDEQVRELDRAVEEAGRARPEVALLRTHPGVGMVVALAFVLTVGPIERFPHSRQLVSYLGLNPREDSTGGRQRLGSISKQGNTMMRWLLIEAAQTAARFDPQLRRLYQRLKRQRNKSGVAKVAVARRLVVRLFWMLRTRNNYAQLVHMSGSPSSAVVPPTSGPTV

SEQ ID NO: 456695 - protein, 421 aa, unidentified
MSDDRCRLGSDDVVIGLDLASAEHQAVVVTAAGKRLTRFRMPHTRAGLEELLRRTTPAALGRPGGARVFAFEATGHLWEAVAYVLRVRGERYVVVNPLATFRVREARQLSREKTDLTDAEQIAELCRTGLVTRTQLEARPYLALRRAWGEYARLREERARLKVLVAHQLYGLFPEFLRVWADLLQPGALAVLRTGLTHAAMAALPLTEFVAQARAHGAGHRLWRDTLAQVHRAAAQTMACPDGLDVLAREVQRAVARIDMLTAHMTAVAAEIDSMLAELEEVPSLRPIPGLGWTSVAGLLAPVGAITKYHHGRQLIKLAGTNPSRRDSGQTVGHGQRMSHRGRAGLREVLYLATISCLQHNPRIRAHDDRLIQRPDRPLPKMQALGACMNKLLLYAFAVMHRREAFQLDHDWPRTTMARVA

SEQ ID NO: 456696 - protein, 352 aa, unidentified
MMIIGCDFHPRFQQISFLLEETGECGQRRLMHTAEADKYYRSLRGAKVRIGIEATGSYGWFGRLMSELGHELLVGDATQIRASNPRKQKTDKRDAQHILGLLMEDRFPAIWQPPAENEQQRQLLLHRSRLVRLRTRVTNQLDGIAKNEGLLIPGGWSGKRRKAIEALPLPGWYGERRKDLLALLDRLEERIAPLNKAVGQAAANNAEACLLMTHPGVGPVVSLAYVLTIGNWQRFPRGKQVGSYLGLIPSEDSSGDKRRLGHISKQGNTLLRWLLVEAASTAQKYDPSWHRQYLRLSIEKHHGVAKVAIAHKLAVRLYWMLRSGEDYQHVRERGSHARQSECPGGRYQRPIE

SEQ ID NO: 456697 - protein, 343 aa, unidentified
MGNTITIGVDLAKSVFQVHGVDAEGSIVVRRQLRRRQVVPFFEKLSPCLVGMEACATSHHWARAIEQLGHRVRLMPPRYVKAYVKNQKNDAADAEAICEAVSRPTMRFVEIKTTEQQSVLILHRTRQMFVRQRTTLINAIRAHLAEFGIVAQIGRNGVDVLLRIIGEHEDSRLPEVARSCLKALVTQLHLVKRQILEADRRILAWHRSNETSRRLDSIPGVGPLVATALVASVPNPQAFKSGRDLAAWIGLVPKQNSSGGKERLGGISKHGNRYLRMLLTVGALAVIRYAETHGTAHRPWLARLLARRPAKVAAIALANKIARMAWVIMARGERYREPTLQTT

SEQ ID NO: 456698 - protein, 338 aa, unidentified
MTIETLGIDIAKNVFQLHGVNRNGRIVLRRRVMRDQLLEVVAQIERCTIVVEACTGAFTWARKFEALGHQVKIISPQYVKPFVRRQKNDGNDAEAICTAARQPHIPFVPKKTVEQQDIQTLHRARQRMVNHRTAIVSQIRGLLLDRGFAIAKSITRARRMIPEILADLDNELTALAREALNELYDLFRDLDRRIHSFDLKIDRVFRGSEACQRIAKIKGIGPKTATAIVAAIGDGSEFKNGRHLAAWVGLVPRQFSSGDRRVLMGISKRGSQHLRSLLVHGARAVVRTAPNKTDPNNQWVNQLRERRGFNRATVAVANKNARIIWAVLRSGEPYRAIF

SEQ ID NO: 456699 - protein, 330 aa, unidentified
MKNYKEVVGIDVSKKTIDAYCHQAHTHKEFKNEISGYKSLLKWVLKQTKGIDVFYCFENTGYYSLKLALYFNKEKIVYVEESPLKIKRSSGVVKEKTDRLDACLIARYGWIYREELKPSSVKSTSQLELGRLLALRDQIVRNNAGLKCTLKELKVLLTSATTDACCISLKRSIDYLTKQIKSIELRIQELILDDDLMQKNYELLTSLKGVGFVVACQLIYHTGNFTRFDTWRSFSSYCGTAPFAHESGTSIKRRKQCHYLGDRKMKSLLSMASVSAIQHDSELRIYYKRKLAEGKDKMLAINNVRNKLISRAFAVVKRGTPYVVLQNYAA

SEQ ID NO: 456700 - protein, 355 aa, unidentified
MIIIGCDYHPAFQQIAFVNTDTGELQEGRLQHREEAEKFYRDLAAQGMKVRVGMEASGHARWFERLLAELNFELWIGDAAEIRAKQVRKQKTDRQDAQHILRLVLEDRFPQIWVPSWENRDLRQLLWHRHRMVQARIRIMNQLQAVALNEGLRCKNKLFQDAGREQLEAFRLAPWASRRRRDLLELLDRLTPTIADLTQTIEQEVEKCPAAQRLRTHPGVGPLTALAFVLIIGRADRFQGGKQIASYLGLVPLEKSSGNQRRLGHITKQGSSLLRFLLVEAAQVTVRSLPEWRSKYYHLTMRRGRKIAKVAMARKLAVGLYWMMRKEWDYGQLTKFGSQGRKSGCHAGVATDSTR

SEQ ID NO: 456701 - protein, 336 aa, unidentified
MMYEEYIVVCGLDVHKESTYATVLDRDGQVLVQRKMPNEDIPGFLEPIKPEKLAMEASTYIIPLYRKLVEQGYDVTVSHPKKTRYIAEARIKSDRVDSRALAELLRLNSLPESYIPPREIAEIRERVRRRAFLVRQVTKLKVKIRDVLAYEGIKPPTGYGLFTAKGVEWLHGLGLEPVDCYLRLIEPLKGEVKILSSRLKREAGDDPDVRLLMTIPGFGYYIALLVKAEIGDVRRFASGDRVASCAGLVPSTRSSGGVERHGGITRQGSRWLRWALVEAAMVHVRYDSPVTRFYHGVAERRGRKAALVAAARKLATVCYSVLVHGRPYFNPLDAQA

SEQ ID NO: 456702 - protein, 344 aa, unidentified
MDYYVGLDVSLRSVAVCVIDGDGRTVFERSVACEIDAISGCLSDLPADGLRIGFEAGAMSQHLFFGLRAAGFDVVCMEARQVNAALSAMRNKTDKTDAKGIANVLRSGWFNPVHMKSREAHAARALLSSRKAVQRKCIDLANEIRGLFRIFGLRLPSRVDQATFDERVRPIIEADPDLSHALLPLLDARAVLFATYRELDRRVKRVASNDETCLRFMAIPGVGPIAALTFKAAVDDPKRFTSSRTVAAHFGLTPRRYQSGEMDNPGRISKAGDADVRSALYAAANAMMMRSVASSEIKSWGLRLMRRKGRRRAVVAVARKLAVVMHRMWCDNTEFRHRPLEGAA

SEQ ID NO: 456703 - protein, 343 aa, unidentified
MESIYYIGLDVHKKSIAYCIKTATGKIVCQGMVKAERRALHQWLVDLPGPWVGAMEATMFTGWVYDFLKPYAVELKVAHPAMLKAITAAKKKNDRADAEKLADLLRVNLLPECTMMSEELRELRRILRYRNMIVRTASKMKNKISGLLMEVGAVYDKRKLHGKKYFGQLLERVEDVPESVKDLLKMSRSNMELFEAVQKKLLKTLREDSRISKRVELLRSISGVGEVMALTWVLEIGDPERFSNSRQAISYCGLCSAQHESAGKEHRGPISKKRNKYLQSMLIEAANLAPRWNPQLAMLHEKELTRGNRNRATLAVARKLVIYMLAVDRRGEPFITEKESLVA

SEQ ID NO: 456704 - protein, 413 aa, unidentified
MERLLERCAALDVHQASVSACVRVPGEGDQRREFNERFGATTPDLLALCDWLRGHGVTHVAMEGTGVYWKPVYYALEDEFELLLVNAAHVKQVPGRKTDTKDAAWLCQLLECGLLRASFVPPKPIRELRDLTRYRKTLIADRASEANRLHKVLEDAGVKLSSVASNVLGVSGRLMLEALCQGANDPVALAELARGRLRSKLPALRRALESRFRDHHAFLVAQILGHLDYLDEAIAACSARIDEQIAPFASALTLLESIPGVGRRNAEVIVAEIGADMSVFPSSRHLASWAKLSPGNNESAGKRKSGSTGKGSPWLRSALVESALAATRTRGYLRAKYWRIRQRRGHQRAVIAVAHAILEISYHMFQSGELYRDLGDDFFDRRDNERATQRHLRALERLGYRVTVESAPDREAA

SEQ ID NO: 456705 - protein, 419 aa, unidentified
MKKIKPKTTKAVNQKVLISTVDGGSDKHYGYYRCPDGSECKAFDFWNNGRGFKEFWERISSAARAQDLEEIIVGFEPTGPYMEPLVQFLRSKKNVRLVQVNPMHTKRLKELTGNSPLKTDRKDPKVIADIIELGHALTVVIPEGPAAELRRLTQGRERTMASRTRLFNQLQSLLVISFPEFLQVMSDVKTASAQHLLRNYPTAQKIISLGEPALTALLRKVSRGKLGGDRARALFEGANESVGVREGRSSMLLEIGLLLDTIASYDHFIDSVETDMVRYLEQIPYSRAILSLKGIGPITAAGLIGEVGDFTKFGTISEVMKLAGLDLYEVSSGKHRGKLKISKRGRPLIRKLLYFAALSSVRKGGVMHEWYQRALGRGMVKTKALVAVSRKLLGLIFALVRDHSVYVENYLKPVLQEAA

SEQ ID NO: 456706 - protein, 393 aa, unidentified
MIARFFGIDTHKNYVMVAAVNIDQEIILKPTRVSMAELAEWAAEHLTADDQVVLEVSSNTWSLVDLLSQHAGQVVAANPYKTKLIAEARIKNDKVDATALAKLLAARFIPEVWVPDAEVREQRSLATHRATLQKQSTQVKNRLHHVLHRHNLRCPEKSLFSSAGREWLLAQSLTETDRLQIRHLLRQLDVLQEDLDETDRLMAQQASQDPRVARLMQISGISYTIAYSALAIIGDIHRFPKPDKLPAYAGLVPRQHQSGDGDFHGSITKAGSPLLRWLMVEAARAAIRWDPHWRKIYNRIARRRGSSIAVVAVARRLLVLVWHLLTKNDIYYHLQPQTLVNKLQNWAYRIGRAHLPAASTRDFVHQQLSTLGLNDLTQSLTRNQNGKLCVQPA

SEQ ID NO: 456707 - protein, 401 aa, unidentified
MPAVWAGIDSGKRAHHCVVIDQAGEILLSQRIDNDETVLLELIATITEVADGHEVVWATDLNSGGAALLISLLVDHGQQLLYIPGRIIHHAAATYRGDGKTDAKDARIIADQARMRTDLQPVRDGDQISVDLKLLTARRLDIIHDRVRAINRLRATMLEYFPALERTFDYSKSKAALTLLSTYQTPGALRRMGVTRLAAWLKARGCRNSATVAHKAVDAAHEQETTLRTETVGATLVARLAAVITTIDAELVDLDKTITARFNEHENAEILESMPGFGPILAATFLANTGGDLRRFESPDRLASVAGVAPAPRDSGRISGNHHRPRRFNRRLLRTCYLAALSSLKNSPASRAFYDRKRREGKSHKQALLALARRRINVLWAMLRDHTLYQEPAEIPKLKTA

SEQ ID NO: 456708 - protein, 392 aa, unidentified
MTNSTSASATASSVNMSVLGMAPRRATFDISKPYFDVSLIKVGKTGKAGSPATPTQHRFDNTVEGYKQLGQWLKDGPSNGHLCRVKQVHACLEATGRYGDDRPPFEGWLALWLHTHNHVVSVVNPAMAPRRATFVHAYAQVQLRRNKTDALDAGLIARYCLSEHPQAWTPPTQETLGLQALLKRLEDGPSKGHFLKTMRQQEINGPSKGHFRLDSIVPCQQAVEYIQQHVSFLDGQIHELEAAARKYTKATPTFAAQLKLLITIPGIGLLTAMRLIAFDLLRFEDAGGAVAMAGLNPSQHTSGTSVERKAHLSKQGHADIRKALYMPALTALTHNPCVQELAVRMAAKSKPPMVIVGAAMRKLLRLAYGVLKSNKPFDPNFAKEALRGAIQP

SEQ ID NO: 456709 - protein, 411 aa, unidentified
MEVLYQRCAGLDVHKKTVVACIRLATENKLVTEVKTFATTTAGLLALSDWLSENGCTHVAMEATGVYWKPVWHVLSDGEFELVLANAAHVKNVPGRKTDVSDAAWLAELMAHGLIRASFVPDAQTQELRALLRTRKQLVRERTRHIQRIHKALESANIKFDGLLADVLGKSGRSILNAMIAGESDPVRLAALAHPNVKCSRASLEEALRGRMTHHHRFLLQLHLGQIDGLDGALSAIDKEVEANLTPFRVAVDLVSTIPGVSSLSAEAITSETGIDMSRFRTAGHLLSWANMCPRNDESAGKRRSTRMRKGGNWLKTTLIQCAWAAKRKNGSYLQAQFLRLRGRRGEKKAICAVAASILTAVYHILKNGTPYQDLGADHFQRRSKITHTQRLVRRLENLGYAVDIKPIAAA

SEQ ID NO: 456710 - protein, 357 aa, unidentified
MAKKPRRQRITGGVDTHSGTHHAAVVLMNGRRLADAEFAATATGYADLLAWMRSFGRLHAVGVEGTGSYGAGLARHLRGQDVTVVEVNRPDRRQRRAKGKSDPLDAYAAAEAVLAGRATTVPKAGDGIVESIRALHLVRAGAIKARTACSNEMKALVVTAPAQLREQLPTRSAGRLAQACAQLPAPGDLGDPAGGVTAALRRLAARYHTLTAEISDADAQLAGLVKQARPDLLAIRGVGVETAAQLLSTCGDNPDRLHSDAAFASLCGVSPVPASSGKTRRHRLNRGGDRQTNRALYMIVITRMGHDTRTRAYVRRRIGEGLSTKEIIRCLKRYVARELYKTLTRPTNPAQDLPAAA

SEQ ID NO: 456711 - protein, 342 aa, unidentified
MELYVGLDVSLDMTAVCVLDGAGKIVWRGRCSSTPDAIARVVREHAPTAVRIGLEAGQLSTWLVHGLRKLGLPAICLDARHAKAALSLQLNKTDDNDALGLAHIVRTGWYREVAVKSMDSQTTRALLMARAHLVSQRQTTANLIRGLLKTFGLLVGQAGGGRFALRVRELIADHPALVAIVEPLLTVWQTLREQVADLDRQVRVRAREDARVRRLMTAPGVGVVVALAYTAVIDDPARFAKSSSVGAYLGLTPRRYQSGEVDYDGHISRCGDGLLRSYLFEAANVVLSRLTKPSWLKEWGEALAQRIGARKAKVAVARKLAVVLHRMWMDEQEFRWSPTAAA

SEQ ID NO: 456712 - protein, 413 aa, unidentified
MLKIVYPICCGMDVHKSFLVACIATTNSQGVTTYTSKRFSTFTGDLRRCASWLAEHDCKDVCMESTGKYWIPIYNILEPTCKIVLAHPKYVKAIRGKKTDKKDAKWIADIFKHDLVSGSFIPPADIRQLRDLVRYRWKLTNFTTGEKNRAQNCLTVSNIKLDDVFSDVFGKAATAITTRLLEHPTERITDVSTFRTKGMKATDEEVLAAVDGEMCAEQAEKLRIIRSHMDSLDLCKANLESLILSLAEKYLPQLNLVMTVPGIQSFAAIGIISEIGVDMSVFPTSKHLCSWAGLTPQNNESAGKKKTTRIGRAGAYIKPLLVQCALCAIRKKSNPEIRRRYENLKKRRGHKKAIIAIARMLLTAIYNILKKNEPYNPELYAHINTPPKQRTVSVEEAIFILQRQGYLVTPSAT

SEQ ID NO: 456713 - protein, 311 aa, unidentified
MQPTIGLDISKDRIDAFAADPGVHRAFDNSLAGRRALLAWIGSLGRPLAVFEPTGAYHRDLERDLGRADLAFVKVNPRHARRFAQAQGQLAKTDRADAASLARMGAALDLVPDRPEPESLKELRELLTARRALVADRVATRTRARTVRLAVVRSLTARRLVQIKAQIATLDREIARRIAADPVLARRRQVLESISGIARITATAMLIDMPELGQIDGAEAASLAGLAPVARQSGRWRGQARIAGGRAPLRRALYMPALTASRRNPDLARFAKRLKARAKPGKVILTAVMRKLLLLANALLKADRLWTPIAA

SEQ ID NO: 456714 - protein, 386 aa, unidentified
MKQNTTSRQSPQQTPKQSLTHNPKQTPKPSPKQTRKICEGPITIGIDLGDKTSRYCLLNERGEVAKQASVGTTKKGLAEAFASVRRCRIALEVGTHSPWVSRLLTSLGHEVFVANPRQLKLISQSSRKDDRVDAEMLARLARVDPKLLRPIQHRSEQMQLDLMAIRVRAALVDVRTTLINSARGQAKAVGERLPACDADNMGPGQLAGLPEAVQVLIKPLLKQAEALTAEIKARDAQIEQIAREKYPETKLLRQVSGVGPLIALTFVLTVADKQRFEKSRDVGCYLGLRPKRSQSGQSEPQLRITKEGDVYLRKLLVQGAHYILGRKGPDTDLKRWGTRLALGGKRAKKRAVVAVARKLAVLLHKLWSCGEVYEPLRNSTARQAAA

SEQ ID NO: 456715 - protein, 418 aa, unidentified
MNEDESARGTRRYVALDIHKHYSVIAAVDREGRVVLHAVRVEHADLEGWLKKKLQSGDHVVFESTTNAWHVYDLLAPLVERVVVANPIKVKQIASARVKTDVRDTLILARLLAANLVPDVWVPPAHVREMRQLLSQRRQLVETHTQIVNRMHSVAHRHHLKHERGKRFNEKNTVWQKDKGLSKTEQFQLELEMENRAYTEKQIGRISKEVAKMSHRKPWAEGMTYLMQLPGFGVITAMTVLAAIGEIERFGSAKHLASYSGLVGGVEQSGTHLVEKGITKEGRKELRWAMVEVAQRAVKSDPRWTGKFQELHKRMHRNQAIVAVARQLLELVWYVLTRRQPYRYFSQERIAYKYLTWAWQMDEAARDGLSRQQFARYYLMRLGIGHDLTRIALNPKYPRKLASEAELLALQPELKYIE

SEQ ID NO: 456716 - protein, 355 aa, unidentified
MDSIKYIGLDVHQSTISVAVLNADGKLIMQSVIATHATTILEFLHGLRGTLHVTFEEGTHSAWLYDLVVRRVAKLVVCNPRKNALLKAGNKSDTIDARKLAELLRAGLLSPVYHGQNSTAAVKHLGRSYAALTEDTTRVMGRLKALYRSQAIACAGQKPYAARHREEWLVQLIESGLQRRARRLYQQLDLLQELRRDARHDLILQCRQYSETKLLRTIPWLGPIRVAMLIGRVQTPHRFRSKRQFWAYCGLALETRSSADYGFVNGQLERKKKPVFIRGLNLNHNHDLKNLFKSAATTASGSNGPFRPFYENLLLKGMKPELARLTLARKIAAITLHVWKKGEPFDAEYLKPQAA

SEQ ID NO: 456717 - protein, 464 aa, unidentified
MRTDKRLWRNRKAKKELARRLQSENPGLEVVHAHAAGIDVGNGAHYAAVRPDRDLQPVRRFECFTADLYRLADWLQNCGVKTVALQSTGVYWIPLYDILEERGFEVYLVNARHTKNLPGRKSDVQESQWLLKLHTYGLLNNSFQPSSKIRILRTYWRQRLQHVTGAATCVQRMQKALTQMNIQLANVISDLSGVTGQLIVRAIVAGERDPQKLTELSHPRIQASRGEIAKSLEGNWRQELIFVLQQEIEMYDTYQRRVAECDQELQKHLRAFADTVAPVQQELPPKKKKKQNKNNPHFRLADELQRITGVDLTRIDGVDVLVAQTLVSEVGLDMSRWKTEAHFASWLGLCPDNRISGDKVLSRGTRHVLNRAANALRLGASTLLRSQTYLGAQYRRLRSKLGAPKAITAMAHRLARLVYRMLKYGQQYVDKGAEYYERRNRQQQIEFLKKKAARLGLQLTPVYP

SEQ ID NO: 456718 - protein, 358 aa, unidentified
MAEHSEASHVVGGVDTHKDLHVAAVVDHQDRVLGVESFPTTRHGYRLMLVWMRSFGDLQRVGIECSGSYGAGLLRYIQTAGVEVLEVTAPDKHDRRRRGKNDHFDAESAAHAAFAERHTVTPRSRDGMVESLRVLRVCRKTAVQARRIALQMIQTTIVCAPDRLRDPLRQMTRMQLIRTLAAWRPDLTAYREVEEAYRISLKSLARRYLELHDEIADLDDMIEAIVKDLAPELLEHTAIGLNSAAQLLLTAGDNPERLKSEASFAALCGVSPVPASSGKTVRHRLNRGGDRAANSAIHIIAIGRLRLEPRTQAYVAKRIASGNSKLEAIRSLKRYIAREVFGIIMRRQKQINQSQIAA

SEQ ID NO: 456719 - protein, 410 aa, unidentified
MDAVRERCAGLDVHQKSVVACILYGNVESKPKKVMKTFGTTTKELCELQNWLLEYHCKDVAMESTGVYWKPVWNILESSCQLVLANAKRIKGIPGKKTDMNDAHWIAQLHRCGLIQPSVVLPQHMRDVRDLTRYRVKLVQNVAAEKNRIHKMLEDANIKLGSFMSDLFGVSGRLLLEKLMNGEVLNEDELRALVKTKLKSKVPQLIEALHGNLRRHHRQMMRRHWDHIMFLEREIDELEVEIDERLEDYKQEMEWLDSIPGVDRNSAAAIFAEMGPDVSERFPTIEQFSSWSGVSPGNHESAGRKKSSKCPQGNKYLKRAITQAAWANAKSNNRIGEYFRRIRKRRGDLKACVATGHLLLKIIYTMIKEKTEYKEIDVQANTSREKKLEYYLKQLQTFGITVQIIPTEAS

SEQ ID NO: 456720 - protein, 345 aa, unidentified
MECYVGLDVSLKQTSICVVNEKGLVVREGVVDSVPEAIAGFVRSKAPGAVRVGLETGPTATWLWTELARLDLPVICIDARHAKAVLKMQVNKNDRNDAAGIARIMQTGWFKEVHVKDLDSHAVKALLASRALLVKIKRDLENQVRGLLKNLGLVVGHGTFNVFAVRAKELIADRPELTSAVSPLLTARTAIEQQIGELDRQVLKLSRQDAQARRFMTVPGIGPITALCFKATIDDPARFRRSRSVGAYIGLTTRRHASGELDWSGRISKCGDAMLRMYLFEAAGVLLTRVPKWSALKAWGTRLTKRNGLRKAKVAVARKLAVILHRMWVDGTEFNWSNNNKEVAA

SEQ ID NO: 456721 - protein, 391 aa, unidentified
MLYLGIDVGKNNHVATLINSQSKSLFTGFSFANTTDGGDSLVAKMYAHIHSPSDVEIGMEATGHYWLSLYSFLITKGFVVHVINPIQTDGWRKGIEIRKRKTDKIDSFLIADLLRYGDFVETSLSDENVMSLRNLTRFRHYLVGSISDLKRKAICVLDQTFPEYQSIFSNTFGQTSSELLLHFQTADDFASITAEQLEAALAGISRKSFAKNKLTQISALAANSFGLKFCSDSFSLQLRLLIEQIKFIEAQVFDVEAEIAAILEKLNSPITTIPGIGAVTGATILGEIGDINRFSNPSKLVAFSGIDATIIQSGESSGAYRMSKRGSPYLRKALFQAALVASTHDPVFKSYYQKKRAEGKHHLTAIGAVARKLCYTLHAILKNNTPYEVQK

SEQ ID NO: 456722 - protein, 403 aa, unidentified
MAANMGGIDWASEIHALCVVDEQGARLRERMVDHSEAGISALCRELVALEVERVAMERPDGILVDRLLEAGIMVIAVHPNQAKAARERYSVARGKSDRFDAFVLAELARTDAHRLRAIRPDSDETKALRALTRTREDLVGVRVELANQLRAQLEAFWPGALIFADVDSPISLAFLARYPSPADARGLGPKRMEGFLARHSYCGRRTAEELLERMHSAPAGRAGELEAEARRAAVLGLVSALKPIVAEIAELTSQIRGALAAHPDGAIFAPLFRDAKTAICPATLIAELGDARSRYPSDAALAADAGMSPVALESGKRRAATFRRACDKRLRVAVATLADSTRHWHPWAKDVYRRARERGQDHPHAIRTLGRAWLRVLWRCWQDGMPYDPALHGNFRRLQPVGG

SEQ ID NO: 456723 - protein, 351 aa, unidentified
MDIVGGLDVHRKQITFDYIEMESGELHRGKIRPATRQSLREWLDEFTEQFSGKQIAIAVEATTGWRYGLEELRRAGIEPHLAEPAETKSLQGRKKRAKTDRLDAGHLRDLMGIERLPESWIAPDHIQEIRTLMRLRHSLIEERTTHKQRIHAQLFHNGYPQQKNLDSMEGRAHLEEMKLPGAARQVVDLSLAMIEHINEELEPIEAELRAYARSQAGCQALMKHYGVGELTSVALLSELGDTRRFSSSKQAVRYAGLDITVHSSDEKRAAGKLSRQGPPVLRWAAYEVAKRACGEESLEERLTRSRVLPKEQGAHRCQSGGSLHCPQADPASTPHLTGAGRGGHKRANKRQ

SEQ ID NO: 456724 - protein, 354 aa, unidentified
MIIIGVDFHPEFQQIALLNTTTGEVEEKRLAHPEEAEKFYRALAGAGETVRIGMEASGHARWFERLVAELQFDLWIGDAAEIRTKRVRKQKTDRQDAQLILSLLLEDRFPKIWEPSWENRDLRQLLWHRHRMVQARTRVMNQLQAVALNEGLRCKKKLWRERGRQQLESFGLAPWASRRRRDLLELLDRFNPAIAELTQAMEREVENCPAAQRLRTHPGVGVLTALAFVLILGDAERFHCGKQVASYLGLVPLEDSSGNRRRLGHITKQGSSILRFLLVEAAQVAVRSLPEWRSKYFHLVLRRGRKIAKVAMARRLAVQLFWMMRKEWNYEQLKKFGSHAGQPGNRHGVQSNTE

SEQ ID NO: 456725 - protein, 328 aa, unidentified
MTSSLGVDVSKAKLDVALLNDEGKYRCKVFANSGMGFAALHQWLQTHLPQGQELAALHVCMEATGSYHEPLALHLHDLGVRVSVVNPLRVKRFIELEGTGNKTDQGDSKSLARFCRMASPELWEAPAPGVRALQALVARLDALQEMRQSEANRLEVAHGVVQASLHEMLATLDKTIAQVKAQIRQTIDDDPHLRGRAQLLHSIPGLGDRTIPQLLAYIGRPERFKSVKALIAYASLSPAIRQSGTSLNKRGGTHAQGHRQLKHALYFPAMVAGRHNPAVAAFWQRLKAQNKPGKVIVVACMHKLLAIVYGVLKSRTPFDATRFCDANT

SEQ ID NO: 456726 - protein, 313 aa, unidentified
MDCMELDVGVDVSKPLLDVAVVQTDEEFQVTNEEAGWAELIKRFKGRKVRVIGLEASGGYERGLIKALRKAGFRVCRVDAYRLRQYARAMGRLAKNDRIDARMIARFAAQMPTREPYVDPLVEQMAELVVARRQRTKDKVRLSNQLEQVRDPMLRRITRQRLQRIEAEILLIGKRLAEIVASDANLATRDRLIQSFLGAGPVLSHTLLALAPEIGEVDRRELAALIGVAPFDDQSGKRNGKRHIWGGRAEIRNVAYMAAMTAARCNPVLRAFKERLIANGKCKKEAIVAVARRMLGIITALLRTGQEWNPHHA

SEQ ID NO: 456727 - protein, 346 aa, unidentified
MKITTIGIDLAKAVFQIHGVDEHGKVAVRKQLKRAEMSSYFANLEPCLIGMEACGSAHHWARKLEGYGHTVKLMAPQFVKPYVKTNKNDMADAEAICEAVSRPNMRFVAMKTVEQQAILSVHRARQGFVKARTAQGNQIRGLLSEFGMVIPQGIRSIMKQIPEILEDGENGLPGTMRNLIERLTENLKEMDRQVKELEAQIQLWHRENVASRKLAEIPGLGPITASAIVATVGDAREFKNGRQFAAWMGLVPRQHSSGGKQNLLGISKRGDTYLRTLMIHGARAVIRYAENKAESESWLRKLMTRRNKNVAAVALANKNARIVWALLNKDQMFRPDYTPAAVVAGM

SEQ ID NO: 456728 - protein, 320 aa, unidentified
MRNAVGLDISKLTFDASAIVGNAEYSAKFDNDSKGLDQFSDRLKSLGCQNLHICMEATGNYYEEVADYFAQYYSVYVVNPLKISKYAESRFKRTKTDKQDAKLIAQYCRSAKESELVKRQKPTDEQYRLLRMTAAYAQIKSECAAMKNRHHAAKDEEAAKAYAQIIKAMNEQLEVLKEKIKEQTEKPNCKEGVKRLETIPAIGRMTAAVLFHHLTSSKFETSNKFAAFAGLSPQQKESGTSVRGKGKLTKFGNRKLRAVLFMPAMVAYRIRAFPDFIKRLEEKKKPKKVIIAALMRKLAVIAYHVHKKGGDYDPSRYKSA

SEQ ID NO: 456729 - protein, 476 aa, unidentified
MSNNGKKQSQPKNDRPKKRRKGMCLEDRPILENSAAGVDVGAREMFVAVPPDRDTHPVQVFNTFTEDLHRLADWLVACGVTTVAMESTGVYWIPLYDILEERGLKPCLVNARHMKNVPGRRTDWHECQWLQYLHSVGLLRGAFRPEADICAVRVLIRHRDELVQIASQHVQHMHKALTQMNLQIHHVISDITGLTGLAIVDALLGGQRDAGELVKLCDPRIKADHETIRKSLVGNWRLEHLFTLKQSRELYRMYQQQVVECDHEIEQLLGAFEPRVDPNKKPLPPDRKRNRSGKKRRKKNGNLEIGFDLRTEAYKLFGVDVTQIPGVETIAFPLFSEIGRDLSKWSTASHFASWLGLCPDNDISGGRVLWKGVRKVKNRAGQMFRLAAHSLHRSLTPLGNYLRRMKAKLGPAAATTATAHKIATIFYTLVTKQVEYDESVWAQRDAERDKRLEAKLKRQAKQRGYKLVPIEENSAA

SEQ ID NO: 456730 - protein, 349 aa, unidentified
MLYVGLDLSRKRLDFDARLTSGELFERGAVPPDADGLAGLVRRLGDTEVIAVIESMNGARFVHDRLELAGWDVRIADALKAKGLAPLACKTDKIDAWVLAELARRDLVPEIWLPDPAVRAERERARFRLHLVRHRTALKNRVHAILIAHGIPNPSSDLFGAGGRRLLERLALPEPWQSTTAASLALIDTLDEQIDACERELRRLGADHPYVPLLITCPGIAWILAFTIGSEIGDIARFRTPAKLIGYTGLTPKVEQSGESDRRGPLRKNGPNHLRWALVEAAHTASRHPLYQPTLERNRARHGRKRGSKLAALTIARKLTEAIWHMLTTNQPFAPAGARTSLAASTAPN

SEQ ID NO: 456731 - protein, 364 aa, unidentified
MKKLTTAATNWIGKQERLTIGLDLGDRSSHYCVLDESGRIVTESKTATSPKAMEAVFGGMTRSRIALETGIHSPWVSRLLSQHGHEVIVAHARNVRLIGESRKKDDRLDAQTLARLARIDPELLCPVKHRSAKAQADLSLIRARAGLVRARTALVNTARGLAKSYGQWLRGCNVRNMNPEKAEALSPELQAALEPLLAGIEAVSEQIGEYNERIEKLAQESYPEVKLLKQVKGVGTLIALTFLLTLEDQHRFSKSRDVGCYLGLQPGRRNSGQSEPQMHISKEGDPYLRTLLVQGAQHILGPFGPDCDLRRWGLKLAERGGRNGKKRAIIATARKLAVLLHHLWVSGEVYEPLHNNRTAIAVAA

SEQ ID NO: 456732 - protein, 396 aa, unidentified
MICVGIDASSEKHDVCITSDTGELFTEVFSIKNNRKDYEKLLSMINSAKEHFNDDKVRLGIESTGSYSAAITDFFANEDSLEVVLINPILTNMYQQLKKVHYAKTDSLDAIGIASFIANKLDVRIYTPPSYHNRALKEMFRELVTINKNLCECKNKLRSTLHRYFPEYLNVFSNISCSASLFILKEYDDLRKFLKYKPTTLLKKINAKSGGKITINKINLLQDSIKNSICDMNNYCAVVIKILAERILLLAKEKEELLIQIEPIVKKEGPELLSIPGISITLAAGIISEIISITNFQCADQLVAYAGLDPIVYESGTYKAKNTRISKKGSSYLREVLYYASFTVSQQNEYMNLYYEKKKAEGKKHRVILGHVAKKLCRLIFSLLSKHQNYISPLSN

SEQ ID NO: 456733 - protein, 323 aa, unidentified
MKVEGKTEYYVGIDISKEKLDVYIRPSDEYNQYRNDGDGCEQLLEWLAGYQGAIKLVVVEATGGLENLVLASLGRAGVPVHRSNPSCIRHFAKANRQYAKTDRIDAEIIAVFGEKLTPEPQALPSEAAAELQDLVQRRRQVTKMLGDERKRLSRARPRSRQSIESHIEWLEQQRQELEAEIEAQVAENPAQQAQAQRLQTGSGVGVVTAAQLVVELPELGQLSREQIAALAGLAPLNRDSGQQRGRRSIWGGRASVRSALYMAVLSASRYNPAIRSFYQRLLARGKEKKVALIACARKLLTILNAMLRDGTDWQFPISDQGLG

SEQ ID NO: 456734 - protein, 368 aa, unidentified
MIRRFHGIDRHKKYSTVSVLDRDGKEVRLHRSCAIEDYLSNLGAEDAVVLEASCGCFYWADRIEATGATCFVLDPRRFRIVTDSWNKTDRQDARNMAKALWVFLVTGEFGIPTVYKPSETIRTLRRLFATYNLLNRQIRMLKNAIQAMLTDDGAVLSGAQLSGLFAAREPVADALSEYSLSPTIVSAIEVQAALLQQVNESKNGLARQIVVHSEPLAEQIELLVTIPGVTPLTAAAFLADIGDIGRFKSLRQMNAYLGLVPRCHDSGGKSRSGHITRESRKLTRTILTQSIYQAVKSTPSWQRDYDELKARRGAGRARIAMIRRLCGVMRRMLLNGEKYHWLKEDLYQRKLRAYRQALENAKNEQNAA

SEQ ID NO: 456735 - protein, 351 aa, unidentified
MLIIGVDYHPSDQYIAFADTETGECGERRLNHSEEEAEKFYRDLQSRAASVRVGMEATGYSRWFERLLAELGIELWIGDAAEIKTRRVRKQKTDSNDARLLLRLLLEDNFPRIWVPSPENRDLRQLLWHRHRMVQMRTRMMNQLQALAMNEGQRRKKKLWNEQGRAQLEGLPLAAWASRRRKDLLELLDRMNPTIEDLTRAIEREARRRSEAARLMTHPGVGPITALAFTLIIGTPQRFGCGKQIGSYVGLIPAEDSSAGHQRLGRITKQGSRLLRFLLVEAAQAAARGDTDWKRRYMHLAMRRERNIAKVAMARRLGVRLYWMWRNGWEYAEWVKFGSNAGQLGTGHGAK

SEQ ID NO: 456736 - protein, 419 aa, unidentified
MERSRSKVCGIDVHKRFLVATILERNGQKKTGQFLNSLEQLLKLKEWVITEQCQAVAFESTGEYWTSLYEVLQGYVEIIVANSYHIKGIPGKKTDTIDSEWIAELALNDLISPSRILSKEKRDTRALTRLREKLVNERTDHKNRVHKVLDSACIRLSAHFTDLFGKTGLTILKCILSGIPPDEIVQKLPKRLRARSDAILDAIRTQLSVHQLIQLQTSVTMIELLTGKIKGLEQTILNDLQKDRRKLQILMSVPGIGTIGATTLLAEIGDVNDFSTPDKLAKWVGITPRVYQSANKLHTGSITKQGSKHIRWILVEVAHSCIRTKNTVLRDFFDRIFNRSGYKKAIVALARKILKLVWHLLTNDELYHEKNSPLTKSSRMPTPSENDSFSVSAAIELLVKAGFQVIDGDDHTDKRVLGT

SEQ ID NO: 456737 - protein, 348 aa, unidentified
MVVLGIDAHKRTHTVVAVDEAGRQLGVRVTKSTSTAAHLELVRWAGRFGPGRRWAVEDCRHLSRRLEGDLLAAGEQIVRVPPKLMAGARRSARTYGKSDPIDALAVARAALREPGLPVARLEGPERELRLLVDHREDLVAERTRAINRLRWHLHELDPAWDPRPRSLAGARALGVVAARLAGMDGLVAKIAADLTARIAALTSDVKVLEREITARVRQLAPALLALPGVAELTAAKIVAETAGADRFRSKDAFARHNGTAPLPVWSGNRVRHRLARTGNRQLNCAIHRIAVTQKRCHPGAQAYLQRRISAGDTNLEALRALKRRLSDIVYRTLLADTAATAAQPGRAA

SEQ ID NO: 456738 - protein, 361 aa, unidentified
MVNGIMVGCDLHDKSMLLKIAVGQAKPLVRSWGTDGPARRAMIRDLLGRAQQAHGGRIVFAYEACGFGFGLHDELSAAGIEAYVLAPSKMARSAKHRRGKTDERDAQALLDLVGAHVLAGVAMPSVWVPDLATRDDRELVRRRLSVAEDGAAAQTRIRWLLKRYGIESVPSSCTLDYWHQLGRLVEARRPSGASSALASLMRQTEWLWQETQRLDDEVLALSRAPRYAAVVAALRRHKGVGVLTAMVYLTELGDLGRFANRRQVGSFLGLTPSSHESGEDDDHKGHITRQGPGRVRKVLCQAVWSSIRVVPGERAAYDRVVRKNPKHKKIAVVARMRALAVRLWHAGLEAQRLARAEPAVA

SEQ ID NO: 456739 - protein, 358 aa, unidentified
MKIIGCDFHPSYQQIATVDTETGELWEGRLEHEQGQARRFYQALGTQTVRVGMEAVGNSQWFEQMLAEMGHELWIGDAAAIRRLVVRQQKTDRRDAQHILQLLRDGRFPKLWVPTQQMRDVRQLLRHRQKLVELRTQVKNQLQHLALNQGVRRKRRLWSEQGRRVLEQLPLQGWTARRRSDLLAMLDRLDQQVGELDGAVRLEAEQRPEVRLLMTHPGVGPVVGLAYALTIGPHTRFARGKKVASYLGLIPKEHSSGGRQSLGSISKQGNTMMRTLLVEAAQTAARLDEELRRGYSRLKAKKHSAPAKVMVARKLAVRMYWMLRENKTYAELYARHPVARMQGRSGHSVVAEKDRSLE

SEQ ID NO: 456740 - protein, 324 aa, unidentified
MIDGVLGIDVSKNTLDASMSSCNKVRARSFANSPDGWRHLLDWLITQRVRRVHACLESTGRYSLGIAGALNEAGHVVSIVNPAQIRDFARTKLGRNKTDGVDASHIREYCELFKPQPWAPPSEAHRRLGELQTIRAGIIAGLTEWKNRKNSCMIDAVAQSLADVTISHFTSQLSAVDEAITQTIDHDSVLRRKRDLLLSIRGVGETLAGVVLAELPGPDVLHSSAEVVAYVGLNPRQHQSGTSIDRVTRISKIGNAVLRAALYMPAMSAMRYNPAIVALVARLKSRGRLKPKQIVVAAMRKLLVLCFGVLKTGKPFDPAIAMGR

SEQ ID NO: 456741 - protein, 339 aa, unidentified
MTELKLIAMDTSKHVFSLHGVNERGEVVLRRELRRQQLTAFFQKLPPTEIVLEACGSSHHWGRTLAALGHRVRLIAPQYVKPFVKRGKNDRIDAEAISEAALRPNMRFVPVKSAEAQADAMILSVRELLVKQHTQLVNALRGHASEFGVIAAKGTGHVEGLLERIAADPAVPAPAQAMFVELGERIAELRTRRAELDRKLAALHKANPLSQQLAAVPGIGPIGALTLALTVDASQFHSGRHFAAWLGLTPRQNSTGGKTRLGGISRQGNERLRQLLVLGATSVVRLTKPDYRHASAWLLALLQRRPRKLAAVALANKMARVVWAMMTSGEAYRPQPAAG

SEQ ID NO: 456742 - protein, 355 aa, unidentified
MSSEKYIGMDVHQATISVAVMDSQGKVIMESILETKGSTILEFFAGLRGALSVTFEEGTSAAWLYDLLKPHVAKLVVCNPRRNALLKHGSKSDKIDACKLADRLRLNDLKPVYHGETGVRMLRELARSYLTIVKDLTRVMSRGKALYRSWAIPCAGRDVYYTRQGSQWLGKIQEPGVRCRAEQLYQQLDMLQHLRQQARRALLAESRKHTITAKLRQIPALGPIGSALAVALIQTPNRFRSKRQLWTYSGLGLETRDRGEYYYVRGQVRRRKKQVTIRGLNKDYNHDLKGLFKAAATRASVLPRPLQDFYQRSLAKGIKPTRVRLTLARKIAALTLTLWKKGENFGVEKLKSQAA

SEQ ID NO: 456743 - protein, 425 aa, unidentified
MGKVSPGNRKGQRPDGSILFVGCDIGSKHHAAAIMDLSGAVLEKLPKVFNTLKGFEFLEGKIDYWAKRTGADTIRLGFEPTGHYWKPLIHYMCNRGVEVFFIKTTAVKAMRELTDSTQSKNDKRDAVTLAHLLREGKVLKSPPAEGVWRELRDLVKHHRRLTEENGALLQRLRAIIETFFPELTEAFCSNKAVGLWRLLEAAPFPEDLVARGPEWLRSNLSKWTRRGKNAEEKADLLMKAAGESVGLPVRRGDRVRLQSLLGLLGYYREELRMVEQEMERVLMETGYGEILLSFPGMGVITSATFLGELGDPANFENAGEVVSFAGIDPSEKSSGKKESRRKISKKGRPILRTNIYYMALAAIRHCPELKAYYTEHRSLIESGRLDLKPQQLLFAVAIKEVRMLFAMCRDKRPYIPGYLQMKRAV

SEQ ID NO: 456744 - protein, 365 aa, unidentified
MQKISTMQTSGENIFKGQLTIGLDLGDRFSAYCVLNETGEIVFEHKLATTPEAMKQVFSSMPRCRIAMETGTHSPWVSRLLTALGHEVIVGHAQKVRLITKSRRKDDRLDARTLARLARIDPELLSPVKHRSAQAQLHLTEIRARAVLVSARTALVNAARGLVKSYGERLRKCGTQQFRRETTSGLSTGLREALEPLLREVESLNERIQEYDRRIEKMAKQTYPETALLKQVKGVGDLIATAYVLTIEDPHRFRKSRDAGCFVGLQPGRRNSGESEPQMHISKEGDEYLRTLLVQGAHYILGPFVEDSDLRRWGLKLSARGGKNAKKRAVVAVARKLAVLLHRLWVSGEVYEPLRNSQKAMSAAA

SEQ ID NO: 456745 - protein, 414 aa, unidentified
MKKREKVEFEQVIERGCGLDVHKENVTATITGRGIKQQTREFSTYTRSLISLRDWLLKNGITHVAMESTGVYWKPIYNVLGEHFKIILVNARHVKNVPGRKTDQLDSQWLAKLLMAGLLKASFIPIKKIRELKDLVRYKTKLTRQVSSEKNRFVKILEDANIKLSSVLTDIFCVTGMKMIREIIECDYDPDKLLYHVHGSVKKSRSEIKEAITGYVTNHHRFMMQTILESIEKTEDIIAKIDSQIAEQTKEYGLEIELLETIPGVGHDGAIGIISEIGVDMSVFPDEKHIAKWAGMCPGNNETAGKKKSSRASYGNAYIRALLVQLAWSASRTKKTYLSSKYKSLVRRMGKKKAIVAVGHNILIASYFIIKDKVTYNELGEEYLSNFRKDKLVAYYKKMLQELEPNLEFETKVA

SEQ ID NO: 456746 - protein, 419 aa, unidentified
MFKIYRKNCCGLDVHKTWIYACVGITDANGRTDYKQRRFSSFSKGLRELADWLAEYGCKEVCMESSGKYWIPAFNILEKTCLVTLAHPKYTKPQKGNKTDRKDAKWICDLFMCDMIKPSFIPPPDIRHLRDLMRYRFKLTNCLTGEKNRAQNCLTVSNLKLDDVFSDVFGKSARSITNHILDHPGEPFDVAPFVDRRCKHPIEEIQAAVDGAISREQAAKLRECLKHIDEIEAHRKIIEDEILRLSAPYAQLLTLLRTVPGFSANSMTAIAIISEIGGDMSVFPTAKHLTSWAGCCPRNDQSGGKRKSTRISRAGAFLKPLLVQVANAIVVSDKYPECKERYRRVKVRRGHRKAIIAICRMLLTAIWNMLTKLVPYSSVGFLADRRVNSSMVITKAQGLHLLRARGYVFKEDSPDGAPA

SEQ ID NO: 456747 - protein, 318 aa, unidentified
MNTNTLQNINVGVDTGKSQLDIYVRPLDIYFTVPNTDKGISDAIKIIKKHKPQRVVIEATGRLEMPFILACDKAKLPYVVANPLRIKRFAEAIGQRAKNDRLDAELIAHYAERVQPELTKLKSENIRLMSDLVTRRNQLLTMQTMERNRLQILPKNISSTITPILTALKNQLEKVEAKIEKLIESCPEYQAKNTILQSMPGVGKILAASLISNVPELGFITNKQASSLIGVAPITRESGRFKGKRMIKGGRPQVRTVMYMAMMSAIQCNPVFKATYERLLAAGKPKKVAIVACMRKMVVTLNSMLRDGAMWDKDSVKN

SEQ ID NO: 456748 - protein, 341 aa, unidentified
MKNKSFIGIDISKNVIDVSIFCEETPIKDFSHDVFNNSRKGFGEMCTWLKKNHVVLSNCLFGMEFTGSYSMELEKFLTARKYQFCMLSTHTVKHYPMGPKDKNDKIDSAKIADFLYRYNGTECVKPYKMPDKTMQRLKTLMNERKFLVEQRTCFMNRRQLCITKEDAQLYDGYIKKFSRDIENIELEEQKLLATDESLLTTYRNLLTIPGIGSVNAINVIVITRNFTAFETARQYASYVGVAPHFRTSGTSVRWRPRPSARCDGQAKADLSMAALITVQYDAELQSFYNRKLGGKQDSDTKRKALNAVKFKLILRMFAIGKQNRKWEPLDSKSSNEKLAIS

SEQ ID NO: 456749 - protein, 343 aa, unidentified
MQTVTAIGLDIAKSVFQVHGVDAGGQVVIRRQLKRRQVLAFFQRLPACLVGIEACASSHHWARELQVFGHTVRLMPPAYVKPYVKRHKNDATDAEAICEAVARTNMRFVPIKTPEQQSCLILHRTRHLLIRQQTSVINAIRGHLAEFGIVAAVGRNGVEQLLGVVADVNDKRLPEVARACLVALGAQLRVLKAQILEFDRMINAWHRSNETSRRLDKAPGIGPVLATALVATVANPKTFRSGRNFSAWIGLVPQQHSSGGRERLGHISRQGDRYLRNLFVAGALAVIRYAKIHGTQHRPWLAALLARRPTKIAAIALASKIARMAWAMMVKGEQYKEPAALAP

SEQ ID NO: 456750 - protein, 369 aa, unidentified
MVDSIRSIDCQVIVGLDIGDKFSTIIVLNPDGEILDEGRGRTTAEALTARFQGLPRARVAIEVGTHSPWVWKLLEECGHEVLVANSRKLRLIYQNDKKSDKVDAEYLARLARFDPKLLSPIQHRGLETQQDIAVVRARDTLVKTRTVLINTIRGSVKSIGERIPSSSAHNFHKKIADSIPQELRPALTPLLETIEEVTTRIHALDNRIEELCETKYPQTKALMSVTGVGPLTALAYALVIGNPARFKKGRDVGPYLGLVPRRQESGDLQPQLRITKSGDKLMRRLLVGSAHYILGPLNQGDSDLRRHGEAIAGRGGKNAKKRAAVAVARKLAVLLHRLWVSGEEYEPLRNSKRRARTKRQTPAQAPAPR

SEQ ID NO: 456751 - protein, 368 aa, unidentified
MVFIAVPAGLTDFTPMGLEPAVKHGCPAGSLCKPERLRERPSSHCRKDGTRGGTVNNKQVAGIDVSKATLDAALSSTGEVMQFTNDAGGIEELGKKLKSAAVDLVVMEATGGYETAVATALVGSGWRVAVVNPRQIRDFAKATGRLAKNDRIDAQVIAAFGQAIEPEIVRLPDEDARELEALLVRRRQLVAMRVQEVNRLGLVQGAMRKRIKAHIDWLEKEIDKLNIDLTAGLRNSPAWRAKDELLRSFKGVGPITSSTLVIDLPELGLLDRRAIAALVGLAPFNRDSGVMRGRRSIYGGRSHVRTLLYMAATTAIRSNPVIRAFYERLKSRGKPHKVAMVACMRKMLTILNAMVRQSTPWTPETNPV

SEQ ID NO: 456752 - protein, 345 aa, unidentified
MNTIKIPQSQAKGKSVCLSDFDHFLALDWSMKVMAIGHMRRRSKEPETFERPSDLKELKQYLATLKGRKILTIEETTTAQWLYVELIDHVDRIILCDPFHNRLLSNGPKTDKIDAGKLCLLLRAGLLKEVFHSLSGLYELRRLVSAYEDLVKAGVRVLNQKASMEQGHFESGKHAPFILEHVAKSIELYQRSKEQYERKFSDLSKRNKLVKNLMEVSGIGIIGAVKIVAIVVDARRFARAGNYLSYCGLIKHEKISGGRSYGRRRPRFNHTLKAVYKLAAMSVISGNNNPIREYYEYLLAKGIAEHNARHAVARYIARLTYGMLKTGKRYQRYQWRNQVAGHQAA

SEQ ID NO: 456753 - protein, 350 aa, unidentified
MLYTAIDYHKRYSVACTMDATGARVKEARIDDNEPAAFAAYFQSLPDQSQVVMEACWNWGWLYDELGEISGVETVVLAHPFKTRLIADAQIKTDRLDARALATLLRGNLVAKMHAPSPLTRARKHVIRQRMFLVQLRTMVRNRVHTVVARQRGIDRPVFSDQFGKKGLHWLRTVALPAPDDALLRQDLQALEQLGVLIKELEQRLLADNANDAAVRHLQSLPGVGPILAAVMAAEIDGINRFPRADKLCAYAGLAPTTYASGGHVHHGRMLPFANRWLKWAFIEAAWVAVGCSPYFGTLYRRHRARGKKANTAITIIARRMCRIAWQLLHEGRYFTPVPPKLTLSPVAPL

SEQ ID NO: 456754 - protein, 390 aa, unidentified
MFYLGIDVGKFSHSLCLLREDGQRSIWQTNNNREGFNDLADRLKGIDYSKILVGMEATGHYFLNLYQFFLEKSFQSEQIALLNPLQVKAFRNTNLRGAKTDNIDAERIAVLLRFGEFQRCNVSVNEMMDLRQLSRLRYELVASSSNLKRRIIAVLDRIFPEFGKVFRNKLGKTALALIQEYPFPENLASLSLDKLKSIVKSLSKRGIADKKIEALHQAASNSIGISFGKEGFKIELEVLLARFSMLQKQIDKIEEKIESIMEKTDTPLLTIPGLGLTTGAAILSEIGSIDNFSSAVKLIAFAGLDPKLKESGSYKGKTPISKRGSKYLRNAIWYSAMVACRIEPNFKQKYKERKDKGKSHRYCITAAANKLTKVIYHILKNNCSFQADLL

SEQ ID NO: 456755 - protein, 406 aa, unidentified
MRGGRVQEVREFKTTVRGLLGLRDWLAGHGVTTVAMEATGVYWKPLFAILEDDFELLLCNAAHVKNVPGRKTDVGDAQWLCRLLECGLLKASFVPPKTVRELRELTRRRKTLVRDRQREAGRLHKTLEDTGIKLDCVATDILGVSGRAMLKALIDGTRDPAVLAELARGRLRAKLPDLREALEGRFTIQHALLVGGILRHIDFLDAEIDALGTAIEAHIDAQSKQAREAKQAGEDAGAENPFDSAVQIACSLDGIQQRTAENLIGEFGTDMSRFATDKHFVSWAAQCPGNHESAGKRRSGRSRKGPEHLNRALNDAAMGAIRVKDGHFARKYRRVKARSCHGVALGAVKHAILIALYHMLKTGELYKPPTPNPDAERRARERATKRLLAQLEGLGHTVTLQGAAAA

SEQ ID NO: 456756 - protein, 455 aa, unidentified
MEKKSLPLQVINYNAAGIDVGSRSHLVAVDQNKENVRSFGIYTKDHELLITHLQNHGITSVAMESTGSYWQTLFNALQKAGFIVLLVGGSQTKNVQGRKTDVIDCIWIQKLHSLGLLSGSFLLSDFLQELRTYYYHLQHIVEQIAKYTHKMQKALRLMNVRLDVAIRDITGKSGLAIIDAILSGNRDPHYLASLVDIRMKKSKQEIADSLKGWWRDELLFELSASLDFYRLYEKALQECDKIIEKALLKFAPVNTLLESDKEKPNRSKKKSSKNAPVFDVSSIAWQYFKTDLFAISGISYSTVLCLLTTMGDDIHKFQSAKSFASWLRLVPNNKISGGRIISSRTPSGKSYLASALRQAANSIGNQKDHELTPFFKRIAYKKGRITAITATARKLAVIIWNMLTKAEPYKKQQVKETNQKTKAAGLKQVERRIDALKLSQSELKTLFARASLLIN

SEQ ID NO: 456757 - protein, 338 aa, unidentified
MNLSRIGLDLAKQVFQVHGVDRHEHVVCRRQLKRAQVRDFFRQLPPCLVAMEACGSAHYWARELRELGHTVRLIAPQFVKPYVKGDKHDAHDAEAICEAASRPSMRYVPVKSAEQQAVQSMHRVRSRLVRARTALCNEVRGLLGEFGLIATRRGRAATMALLETVMATEPASLPAPMGELLRELKDKLQTLEARIARLERQIQAHVRGDARIQRLLAVEGIGPISASAVAASAGDTRQFRTGRQFAAWLGLVPRQHSTGGQQRLGNISKRGDTYLRTLLIHGARAVVRCCANKTDARSRWLQGLLQRRPANVVAVALANKNARILWALLSRETCYRPG

SEQ ID NO: 456758 - protein, 355 aa, unidentified
MDSKKYIGMDVHKESISIAVMNGAGKIVMECVIETKASMILQFFDGLRGDLQVTFEEGTSAAWLYDLLKPHVTKLLVCDPRKNASMKEGNKSDKIDARRLAELLRLNHLNPVYHGEHGLRSLKELVRSYLTITKDLGRVMTRVKAIYRSWAIPCTGKQVYAPRHRSEWLAKISELGVRRRAEFYYQQLDALRTVRQEVRRELLAEGKKHQAWKRLCQIPSIGPIRAAVLLGILQTPHRFRTKRQLWTYSGFGIETHSSADHRSVDGQLQRVKKQSSIRGLNRNCNHDLKNVFKGAAIVASSKPGPFQEFYTALLAKRIRPEMARLTLARKIATIVLIVWKRGACFDAQHLKPQTA

SEQ ID NO: 456759 - protein, 343 aa, unidentified
MKDTTISVDVAKSVFEIAVSLHPGQVAETHRLPRPRFAPFFASRAPTTVVMEACGMAHHWGRELQNQGHRVVLLPPHAVRPYVPRNKTDRTDAKGILEAFRNQAIHPVPVKTVAQQALAALHRLRSRWMATRTSRINTVRGVLREFGVPIPIGSRQVVPAVRTALADADSGLPDAIRSTLAEACDEIRDLELRIASVEDQVEAIARETPVVPALRSIPGIGLLTATALVAVVGDAGRFPSGRHFASFLGLTPRESSTGLRRRLGAISKRGDSYLRMLLIHGARSVLCHAKKTDTHDGLRTWALDREQRRGHNKAAVALANKLARIVWAVWTKKVSYQAAATVE

SEQ ID NO: 456760 - protein, 324 aa, unidentified
MSNHSMKQAVVKAAGIDMSKAKFDVAVHGSVEVFSASNAGEGHRQTAEHLARLGVTRVGVEATGHYEAGLVVCLRAAGFTVVVLDPAQVHGYRKFKKKRAKTDKIDAILIAAVTAALSEEEIHQAPDSRLAPLAEHLTLIDQMVEDIARLKTRRDRFSDKECLGWLESEIDRLKKQLKQERGKLIGKVMAHADLKQRYELAQSIPCVGEGLALAVVIRMPELGHMSREQASALVGVAPFTVESGDHAGERRIAGGRARVRKAFFMAAFSGCHQWNRDLQAFYDRLCERGKHAKTAVIACTRKLVVMLNAVLARGTPWVEKTSAP

SEQ ID NO: 456761 - protein, 351 aa, unidentified
MTEHTLVVGIDVGDKYSYLHVLDNASGDEVEQTRIATNPEAYRRKFKGYDLSRSILEVGCQSGWISRLLLELGHSVLVADPRKARLLMGREHKDDKTDAELLARIGRLDPKLLKPVTLRSEQTQSALSVLRSRDVLVRARTQLINHVRGTLKTLGRKLPKTSSYLFHKLRSELPTLLKPALEPVMSALESITEQIDELEQEIERMCEQDYPQAQKFREIPGVGPVTALTYVLTIESPERFRNSRQVGAYLGLIRRRWMSGDDDPALHITKSGDAMLRRLLVNCAQHILGPFGHDSDLRRWGLKYAETGGKLAKRRAVVAVARRLAVLMHRLWTTGQDYEPLYNAQQAELAK

SEQ ID NO: 456762 - protein, 376 aa, unidentified
MNVHTVGIDLGKTAFHVIGLDQPGNIVMKKRPTRSQLLRQFSNTPACLIGMEACCGAHHLGTALVAQGHEVRLIPPQFVRPFVKSNKNDYKDAEAIAEAVQRPTMRFVPIKTQDQLDLQALHRVRDRLVSRRTAVVNQVRAFLLERGITFRRGRKYLQQRMPLILEDAELNLSPLLRQLLDQLWQEWKALALQIEAASQQIERVAEEDTACQRLQQIPGVGPLVATAMVAAVGNGSAFIKGRDFAAWLGLVPRQHSTGGKAKLLGISKRGNPYLRRLFIHGARSVFHQTHRDRLTLDAWMSQLEGRMHRNVAVVAVANKLARIAWAVLAKGENYHWPAKSCANEAGPGTARTAGKLTQELTSGIHGVPAPPPVEGW

SEQ ID NO: 456763 - protein, 341 aa, unidentified
MDYFAAIDVSLEQSSVCVVDDTGKIVREAKVASEPEALAAWFAGSGLKFTRIGLEAGPLSQWLHAGLMAAGLAVILIETRHLKAALGAMKVKTDRNDARGMAQLVRMGWFRPVHVKTVPAQEVRALLTARDLLQRKLQDVELGMRGLLRGFGLKVGKVSKSKYEARIRELAAGHPMLEPVTSAMLQARATLRAEYANLHRMLLRIVRADAVCRRFMTAPGVGAVVAVTYRTSVDDPTRFHKSRDLGPYFGLTPSRYQSGEVDWTGRITKVGDVMVRAALYEAANVILTRMTRFSTLKAWALRIAKHRGMKRAKGALARKLAVVLHRMWVDGTDFRWRKTAA

SEQ ID NO: 456764 - protein, 351 aa, unidentified
MKRYLGVDLHRNCFTVHTRQEDGSGESREWSIRSLKAFAKTVTANDAVAVEATGNVRLFCEALKGCGCRIVVVNPHQFQVISRSVKKTDKHDAKVLAEFLAKDMLPEVRMKDEAHARVASMAQTRDKLVKLRTTLKNKVNNLLAARGILIRKESLASEKGLAGVLAAPVSELEHLELEILVGEIRHLNESIKKLEGLLHGQRPKLPGWENLTSIKGIGDTGASILLSTIGKIEDFADEGKLAAYFGIVPRVSNSNETEHSGRITKRGCKLGRTTLVQCALIAARYSPYLQTYYRRIAAHRGTGKAIIALARKFLGIIYKTLKNNWGIHLTQPPPRGSVCGYGSISADVDGV

SEQ ID NO: 456765 - protein, 449 aa, unidentified
MAQRSGLTRGDRRRNEKIEELRSVVRRDRVILSIDLGEDKQVAALMDHDGRVLGRRVVKKKAYALGGLLEWAAGQAGRHGFAGVVVGCEPTGHRWRSVMQLADEAGMGFVCVQSLSVHLAREADDYTRDKTDHKDAVLIGKLASRLECYLPERAGEDWARLRHLGQRRFRLVGEVVACRNQINDLLSCCWPAVLECAVKPLDSTTWLASLAVTVDRCNGNPAKLRTLGRDRFFAAVRRELPRFGAQRVCHKVADRFFAALTDGRGVAAQRRGALERVGLLTDDWRSAIARLGEVEARMVAVLDGLGLTALVTSIPGLSAVGAALILAETGDLSRFASARSVVKHAGLNPSENTSATLRGQTRVSHRGRPALRAAAWRAVWGALPHNRVLGAKFTHLTTRETDRLAPGQARVACAAALLRWLHAIITKQQPWNPDTAAGTTTDQAGEAAA

SEQ ID NO: 456766 - protein, 522 aa, unidentified
MIRSRNRRRRQPQPLEAIQKPQGTFHPRVQKVGPQHFAIVSVDCAKARSKWMLADFFGNVLVPPTIVEHNRIALDQAVQQIRQALHHHAIRDQLVAVERTGRYHQPVRRAFDSAGFETRIVHPFATSRLRQPRHPGNKTDDNDLIAIHSAAINGFALVEHDRDEQWTTLQLLIRHRRELVRKTVVLRVQIREHLDAAMPGFADCFGDLWECDCAMFLARRFPSAHALLHAGLNGLCQSLDEAGLRYQRRSLQPLLDWAKQAANPDRGGDARRRFAFALDEDRQQKTREIQAVERDIAAALAQTPYVLLLSCPGVNVVSAADFAGEMGPIEHYANAKAISGRAGRRPSRYQSDQVDKANGPLVRCCNRRLRAAILRVADNLVKCNHHFNALLHLWKLQGKDPRHSRVKVASRFCRLAYQMVAGRQVFHHPGLQGRHYILSKLTAFHQEHGSGAAEQMRDLQAAVEQVPPREYATEAKPLHEELERIQRGGRRGPQLLAGILPMVLARLGVSVVQSELREGNLT

SEQ ID NO: 456767 - protein, 336 aa, unidentified
MSTCKKILTIQVGSTSANKLKEIVALEAVLESCAGLDVHQETVVACVMAGPVEGRPQKETMTFKTTTSGLLELSDWLQGHGCSHVAMESTGVYWKPVWHVLEGSFELILANARHIKNVPGRKTDVKDAEWIAQLLRCGLITSSHVPPENIRDLRDLTRYRKKLLGNALAEKNRIHKILQDANIKLSSYMSDVFGVTGRTLLEAIINGEMIDTEYVERVAKGQLKNKVPLLVEALNGRLRKHHRNMIRFSWSHLMYIEKAIHQVESDIECQLEPYYEEVELLKTIPGVKKEAAATIIAELGVDMSVFPTAQHAASWAGLCPGNYESAGKKKVVAHEK

SEQ ID NO: 456768 - protein, 407 aa, unidentified
MRLYLGIDWSQSKHDICFLNPAGSTLAQHVIPHSQEGFWQIERIRQKLGVGVEDCFVGLETTHNILLDFLWDQGYSQIYLLHPSKVRSSRGRFRQSAARNDPGDALLIADILRTDHARMQTWQPDHVLTRQIRAKINFVSYLTRQIVGLTNRQRALLLRYYPVAADLFTTLKAPIAQHFIRAFPSPRDATRLDLEQFRTFVKQHHYVHYHKLPGMVAKLHQPYPQAAPEIILACQQEAQMLAAILLEMIASKKATLREIKALFAQHPDRDIYASLPGTGEYLQPALLAKFGDNRDRFPSPSRVQAIAGTCPVTISSGKRKRVQFRKSCDHDFRHIVQQWAKISLRHSVWANVYYSRVRPHCDSESHAFRCLANRWLAVLWRLWQDRTPYDEAYHLRQRALRSQPRAA

SEQ ID NO: 456769 - protein, 429 aa, unidentified
MTPSIKTPITSEPDFAAFVGIDWADQKHAFCLQAAGQKAKESGELEQKPELIGPWVAKLRERFDGRPVAVAVEQSRGALIHALFSYDFLVIYPLHPKTVAKFREAFKSSGCKDDPLDTEQILEILTKHRDLLRPLNPDTPETRLLSRLVEDRRKLVNLRSSHMEALSASLKEYFPQALELVSNNLKSRLAHDLILKWPSFQALQKAKPSQIKTFYYGHNVRSPELIQKVLQIAKSPHALTADAAIVESGSRLSQAYARSIQTLNAEINKYDQRIEQVFQAHPEAKLYTDLPGAGPVMAPRLCAFFGTDRSRYETARNVNSFTGVAPVTKKSGKSRVVYFRVACPKFDRQTFHEFARLSLPKCQWARNYVEYYTKKGKKFHTIIRALAYKWVRILFKCWQTRAPYNETAYMETLKKRGSIFATLHLEENS

SEQ ID NO: 456770 - protein, 343 aa, unidentified
MEGYAGKQFVGIDLHRRRTVIVRTTQGGEVLESVRIVNDVERLASVMARAGECPEVVLEATYGWYWAVDALQAGGATVHLAHPLGVKAFEYRRVKNDVRDAADLADLLRMGRLPEAWIAPPATRELRELVRHRAKLVGLRSHCKAEVHAVLAKCGVQVLMSDLFGVAGTALLDGLDLPAPYAARIASLRRLMDDLDFEVDLFAGMVRGRMAHEPGYTAVQKIPGIGPTLGAVFVAEIGDITRFASAPKLTCWAGLTPKHHESDTHVRRGRITKQGSRLVRWAAIESVKTISATTPAGVLRERVADRRGRNIGSVAAARRQLEFVFYALRDGHVRALEHPPRVA

SEQ ID NO: 456771 - protein, 352 aa, unidentified
MRYYIGCDAHKKYSVFGGISEVGEIIPTRRVEHDREGYRSFLEELPQGSQIAVESVGNWYWMIDAMEKAGHVPALVHPAKAKLMMGQINKTDKLDARGLAILARNGTLPEVWIPPGELRDQRELPRMRMAMSQVRTKFKNRIHSAFAKYGITFDEVSDLFGKKGRKLLEESLDELPPETRLSVQEQLWLLDQAEQSIDKAEKRIGEVIKMNPTMQLLQTLPGVGPILSIVIALEIGSIHRFAGADKLASYAGKVPRVNSSGGKTHYGKVRPDVNRYLKWAFTEAANAIVLQQERQMDSHVVRLYQRVYRHKGHAKAITAVGRHLAEATYWMLKNNESYREPKRKQLVSYTQR

SEQ ID NO: 456772 - protein, 319 aa, unidentified
MMGWMAPLRHRRAKLVFWRITRNREPSMSEITTIGLDLAKHVFQVHGIDAQGATVLRKRLRRGQVLAFFSRLPRCVVGLEACATAHYWARELGALGHEVRLMPAQYVKAYIKRNKHDAADAEAICEAVQRPTMRFVPVKTAEQQATALLHRGRERLVRQRTMLVNALRAHLAEFGMVAAQGLRNVGELIAIVRDDGDTRLPDVARQVLQVLANQIEQIEAAVTALERQLLAWHKTNPVSQRLASIPGIGPIIATAIATTVADPNVFRSGREFAAWLGLVPRQNSTGGKTRLGGITKRGNRYLRRLPICCDRRRPRPIRG

SEQ ID NO: 456773 - protein, 424 aa, unidentified
MNCNQNFKISQVTEGTLVLGIDVGSNTHYARAFDWSGLELSKVFKFKNSFEGFQSFVLWVNDLCCKYNKSKVIAGLEPTGHYWFSLGELLKENNITIAIVNPYHVKQSKELDDNLQTKNDSKDPKVIAKLVIDGRYSFPYIPEGIYGELRVADKLKNDITQQIISIKNKIHRWLSIYFPEYENIYSSIDSKSGFLLLKETPLPKDIVELGSEGIVERWKQTKLRAVGLDKAKKLEEAAKKSIGCKNITSSARFEIKLLIEDYEYKQNQLNSITEELNKLCKKIPMIKEIAEIKGIGIATAISFVAEVGDIRRFKSAKQVQKYAGLALKENSSGKHKGLTRISKRGRKKLRTILFRATIPLIGFNKEFSSIYNYYIERKDNPLKKKQALTAICCKMIRIFFTILSKGIKYDETKMLHDIKRPVAA

SEQ ID NO: 456774 - protein, 340 aa, unidentified
MTITTIGIDLAKNVFAVHGVDQNGKTVLVKSRVTRAALPGLIAGLPPCVIGMEACSGAHYWARLFRQYGHEPRLMAAKFVSPYRMAGKSGKNDAADAQAICEAVCRPHMRFVPVKDESQQAMQCLHRTRQGFIEEKTATYNRLRGLISEFGVIAPQSTDALRHMVSVQKSSLPLQVQQCVDDLLEHVDRIEANITEYDKILSRIAKTDHRSQRLMKLKGVGPTTACALVACIGNAHDFKNGRQLAAWLGLTPSQYSSGGKSKLGRITKAGDSYLRTLLVQGARSVLIGAEKRTDSFSRWVCSLVERRGYWRAVVAIAAKNARLCWASLHYGDDFRLYSAS

SEQ ID NO: 456775 - protein, 347 aa, unidentified
MQDGLVVIGVDAHKRTHTMVATDAVGRRLAETTVEAVSDGHLRALEWAARWPSRRWAVEDCRHLTRTLESDMLRAGEELVRVPTKMMSGARRAAREAGKSDPIDALAVARAAWREPDLPIARLAGPERELRLLVDHRDDLVRERTRIQSRIRWHLHEIDPALHVRLRGLRSQRVVDGLIAQLEDREGTIVAIVREQLARVRELNQRALELERQIMLLVIRLAPSLLAIPGCGALTAAKIVGETAGASRFRTRAAYARWNGTAPQPVWTGNSARYRLARTGNRQVNSALHRIAVTQAREPTLGRLYFERRIAQGNTRKEALRLLRRRLSDVVYRTLLTDEAAVASSST

SEQ ID NO: 456776 - protein, 338 aa, unidentified
MAIVTVGIDLAKNVFALHGVNAMGDVQLRQPKLARARLHEVIAALPPCTVGMEACTGAHHWARLFAAHGHTVKLMAPKLVAPYRMSGKRGKNDGADAAAACEAVQRPNMRFVPVKTVDQQSRLMVHRARQAFVAARTGHINRIRGLLAEFGIIMPQKAEVVRRQACEHLEDLPGWANVVIGDLLSEVHHLDERIKQYDKHLHAMARDCTLAQRLMQLMGVGEATATAIAATVGNAREFDNGRQFSAWLGLVPGQYSSGGKARLGRITKAGDSYLRSLLVLGARSVLNAAAGKTDSLSRWAIKLAERRGYWKAVVAIAAKNARMAWAVLTKGEAFKFPH

SEQ ID NO: 456777 - protein, 330 aa, unidentified
MKFKWFIGIDISKKTLDVSFYDNQGFKNSNHIKVNNNEKGFIEIIKWLKNNSITLDDVLICMEHTDIYGIDLAVYLDKKAIAYSMVPPLHIKRSIGLSRGKNDKVDSFQISRFCYLHREELKLSKTPSKTIQKIKGLLNERERLVKMQTVEKQVLTELKGANTSSTLQRAENRLKLFANDISLIEKEMEQAIEAEEDIYNNYTLIRSVIGIGMINAVLFIIYSNNFEGFTDARKYACYGGVAPFENTSGTSIRGKTRVSHLANKRIKANLSNGARSAVQNDPELRLYYDRKAKEGKEHGVIMNAIKFKLITRVFAVVNRGTPFVKMRQAG

SEQ ID NO: 456778 - protein, 371 aa, unidentified
MNQNMLFVGLDVHKEKIAVATAEGRRSGEVRFEGTIVNKLDAVRRLVEKHARQHGQLQFCYEAGPCGYAIYRQITKLGHDCTVVAPSLTPTRPGDRVKTDRRDAVTLARLHRAGELAAVWVPDEAHEAMRDLVRARTAAMENQRRARQQLQGFLLRHNRIFTGGRNWTKRHRRWLATVRFDHPAHQIVLQDDIAAVDDAGARLARLEAQVAELMPQWSMAPVVEAIQAMRGVGFITAITVAAETGDLRRFESPRQLMSYLGLVPSEHSSGSRTRRGGITKAGSKDARRVLIEGAWTYRSNARIGPAHQSRLDGLPKPVREIAWNAQVRLCSRYRRLAARGKPQTVVTTAIAREMAAFIWAIARHVQPAETV

SEQ ID NO: 456779 - protein, 450 aa, unidentified
MEGSFAGVDWASEKHDVVVQNAVGEELFAGTFMHDEAGLRALCRRLVRLNVQLVAIERPDGVLVERLLDAGLRMLALHPNQVAAARARFRVSGGKSDRFDAFVLCELARTDQHRFRVLEPDSDQTKALRALCRGREDLVQTRVAITNQLRAELERFWPGAVKIFRSIDSPIALAFLEKYPSPLDARTLGEQRLAAFLARQHYSGRKTPAELLRQLRSAPEGRAGDAEIHTRRQLVLTLVELLTPLVAQIKQLERHIAQALAEHPDGELFRALFRDPKSVITAAELVAEIGDCRARYPTSDALAGDAGQAAVAIESGKRKVACYRWACNKRLRDAVCTLADSTRHWHPWAADHYARAIARGHDHPRAIRGLGRAWCRVIWRCWQDQTPYDPARHRALQQHSTVTVPTPPGRRPDTAATQRMLGTAVTHKAARRAEREALDGTPTSATPRGG

SEQ ID NO: 456780 - protein, 402 aa, unidentified
MYFIGVDHHKQVSVMTVLEEDGQEWKTGRMPNLRSYVERFLEDCRPFTAVLEAGRSSYVMADLLRDLGGEVKIANALQVKAIAHARIKTDKRDSRTLAHLLRANLIPEVYQRGEWNRRAQRVMRMRAYWVHKQTEVKNKVRALLAQQREDVRLEVEKRESGLFSSKGLEFLAKLPLESKEKEVLEDLLQGYKEIQAHIKKSDGIVDALYGEMEEASRIDTVPGFAKTLSVLVAVEIADVKRFARAADLHSYAGVIPLDALIGREDVSRTHHQAREQMAEMGGFGSGLSGDQERPGVADLVQSAGPEKRTERGQDRGGPSAPDDHISNTDREERIYSRSHETNGCLVFSLTGPLGSRSSLGLGAEIECYGAHHGADRRVVQEAEAAMKIKRRKMYPRTCVSQS

SEQ ID NO: 456781 - protein, 389 aa, unidentified
MKIYVGIDIAKLNHFAAAISSDGEIIIEPFKFTNDADGFQLLVSKLESFDKNSIIIGLESTAHYGDNLVRYLVTELYQVCVLNPIKTCQMRKNNVRKTKTDKVDTYVIAKTLMMQDNLRFVSFFDLDMMDLKALGRFRQKTIKQRTRLKIQLTTYVDQVFPEIQYFFKSGLHQHAVYALLKEAPSPKEIASMHMTHLANLLKVNSHGHFTKEQAKELRVLAQKSVGANDSAISIQITQTIQQIELLDSQLEKIEAEMTDIMKFNDSVIMTIPGIGYINGGMILGEIGDIHRFSNPNKLLAFAGLDPSVYQSGNFQAKTTRMSKRGSRVLRYALVNAAWNVVRNNATFKAYYDAKRAEGRSHYNALGHCAGKLVRVIWKMLTDEVEFNLE

SEQ ID NO: 456782 - protein, 314 aa, unidentified
MSEKTFVGIDVAKDTLDVAIRPEGIQRNFPNDEEGWHSLLLFVRPLGPSLIVLEVTGGYQMGIVRVLAAAALPVVVVNPRQVRDFAKATGRLAKTDSLDAGAIAHFAEAVKPDIRPLKTGEAEKLDALMTRRRQLIDMITSEKNRLHSATEWTKQDIETHIAWLEHALEKTDSDLDNLIKKSPLWKEKRSILLSVPGIGPVTAATLIVDMPELGTLNRKKISALVGVAPFNRDSGTMKGKRTIWGGRASVRSSLYMATLTAVRFNPVIKPFYQRLVKAGKLPKVALVACMRKLLVILNTMVKTNTNWRINPCAP

SEQ ID NO: 456783 - protein, 347 aa, unidentified
MIMVETNRAVTGGVDTHLDVHVAAALDPIGGLLGVAAFDTTGAGYEALLAWLTSFGVVHRVGVEGTGSYGAGLAQFLMGHDVEVIEVDRPNRQARSRTGKSDPVDAVEAARAALSGRATGLAKTKDGPVEAIRALLVARRSARDHRISTLVQMRHLVFTAPQELRERFFGLSKTQLVKQAAGLRPRDNGDPVAYATKVALKGLAQRVQLLETQIKQIRSLLRPLITAAAPSLLDVNGVGLDVAAILLVAAGDNAHRLKNEAAFARLCGVAPLEASSGKVVRHRLNRGGNRQANHALYRIILSRLSSDPETKRYVQRRTPEGKSIAEIVRVLKRYAAREVFKHLPHTI

SEQ ID NO: 456784 - protein, 322 aa, unidentified
MNDKGNRVIGVDIGKRFLDVAREGVRAVRRHSNEAAEITRFVGDLDREHDIVVFERCGGYERQLEAQLAAAGIRWAVVHSRRVKAFREAKGIKAKTDAIDCRLLRDFGRDRLDDGQLRFGRLEDVTLAALVARRRQLNGLLHDERCRHETAAIALVQASIARTIATLEHELAATEAEIDRHIAADAELALKQETMCRRIGVGQTTARSLLAVLPQLGRATGKEIAALGGTASRVHQSGTLRKTRGLDPGREAVKTILFYPAQTAMRYDPDMKAFAQRLRQRGKPGKVIMVAVMHKMLVRLNAAIRDALNSSWRTCSAAPAAV

SEQ ID NO: 456785 - protein, 314 aa, unidentified
MKQAVVYLGVDVAKAHLDVAGAQGSGARFANTPAGLAELLQWLKQARPARQPLQVICEASGGYEQGLVRAVQKSGAFQVSLVQASRVRQYARAAGILAKSDALDARVLCAFGEALRPEPTPMIAPEQERLRELETQRRHLSRVLVAEQNRSAQLLWAPLRALSKRLLGQLQKQIAQIDRLIARAIAQSPTLSAKARKLTAVAGVGPRTAALLLAQMPELGTLNRREAAALAGLAPFNHDSGTFRGKRAIRGGRGAVRTGLYMAALVATRHNPILRPFYLRLRAAGKPPKLALTAVMRKLLLFLNHSLRIELIAT

SEQ ID NO: 456786 - protein, 333 aa, unidentified
MNKSETTFLPCGIEISAAILVVDLSGKAPCEFPNTPVGHQSLIRWLQLAGSEIRVCMEATGLYGLDLALALHAAGIAFMIANPRSVRNFARAMMQRSKTDRLDVIVLREYAARMPFEPWRPPSSQALHLMAIAHRLQALTRMITAEKNRLHAASLSRALPALVRRDLLRSIQSMERALKRLTQAALDLVLSDPQLARRNQLLLSVPGIGVTSALNVLAEILRLGPDCGVRQWVAFAGLDPRHYTSGTSVAKKTIISKSGNAHLRRALYMPALVTVQHEPHFRGFYQRLVARGKTKLQAIVAVMRKLLHAIYGMFKHNQLFDGSKVYALETSCA

SEQ ID NO: 456787 - protein, 345 aa, unidentified
MKTYIGIDLHKRSQTWVALSENGQERLFTREFAVTPQGVDAGVCLAKSIGSEALVAAIEPVCGWMWVVPQLRAAGFEVHVSNPRKVRAIADSLQKTDENDAHTLARLCRTGLMYESAEVSLEMQKLRSLVRERSFLIRVRAGMKCRLEGVVTRNGRHLIEGSLRSLKGVSAIVAGGEPEWNRALGAIADIGAYIKQLDREIGTHAKERVPQLLMSIPGVGAVTAVSMWAEIGDYARFPSPEKLCAFAGLVPTERSSGGVQKLGHITRSGSTILRYVLVEAAMRVRDSEKSSVLYDFYKTVKEKRGAMRARVALGRKILAISWYMVQRNERYQQRFKAVPASSCNP

SEQ ID NO: 456788 - protein, 341 aa, unidentified
MKIRSIGIDLGKTTFHLVALGERGKILLKKKLSRKQLLALTANLPASLIGLEACSGSHFLARALREQGHDARLIPAQFVKPFVKSNKNDFLDAEAIAEAVDRENMRFVPIKTDDQLDLQALHRVRERLVSRRTSVINQVRAFLLERGVTFRKGPATLRRQMPEILENADEQLSTRIRGLLAMLWQEWKELEQQIESLNSELEGMCRDDAACQRLQQIPGVGPLIASAVVAAIGNGAAFRKGRDFSAWLGLIPKQYSTGGKAKLLGISKRGNPYLRKMFIHGGRAAVLRLRREGTLIGKWMDGLEARAPRNVLIVAMANKLARITWAVLSSGESYRPATLAA

SEQ ID NO: 456789 - protein, 389 aa, unidentified
MQQQSWSKLLAAMKNFAKTLIMKQQTSATTETGIKIRNIVSYAGKTIFVGIDVHKKDWQVATFCEGMALGNHRMKADCDQLIRHLRHRYPDASLKCVYESCAWGFELHRDLKTVGIDCIVAHAADVPGSNKEFFNKDDSTDAMRLARHYAGGLIHGIYIPQQEIQKHRNLIRFRKKLVNDLSRSKNRLKSLLKYEGIIIPAQFDNTSWSNNFLKWIYEEGERDILLRDTIWLMLEQIKQLRQLLLKAERKVRELARDERYNQQARLLMSIPGIGCVTAMLLLLEIGNIRRFKSFDQLNSFVGFYPGTFSSGERNRDTGLSFRRHNQLRTHLVEASWQLLRRDPAMMECYQQLIKKMKGSEAIIRIARKLLRRIRAILLDGRPYQVGVIA

SEQ ID NO: 456790 - protein, 353 aa, unidentified
MEKKDIWIGTDVGKKNCVAAVDFPTAGSSFSRRKVADLPAFEFENSLVGVKKMLRWIDRLTKEYCQENNIPANIVEHHFLMESTGCYSRQLEGFILETRPTLKPIIENAALIHSYRKSLNLKNETDFLDAKGIAYYGSDRQPEYRQKNPEIYRTLAEMCRLRELYVTQLGTLQNFYESLQMPMLKRMNTATIKMLNSKIDDLTREIQKFVREHEELRQQAEIMVSMPGIAILSASIILAEIGPLRDFSNRNQIGAFCGLNPKQKISGTSIHRSKLSKAGSSLARKILYLDSTQAVKIDPYLAEFYHRLIVNGKSPKTAKCACMRKMLTILRAMVAANRRYTPELFTKKLQKTA

SEQ ID NO: 456791 - protein, 359 aa, unidentified
MTDASKGEPTMTTAGIDLGDRYSYLCFLDTQSGEVIEEGRLRTTPEAFQRRFGSQQRVRIAIETGTHSPWVSRLLEGCGHEVLVANARKIRLIYAEGRKTDRVDAEKLARLARLDPKLLAPIEHRGEFSQAHLALVRSREALVRTRARLINHVRFTVKPFGYRLPKCSAQAFHKRVAEGIPEPLQPCLGPMLEILGELSARIREYDRKLEALAEGFYPETRLLRQVQGVGPLTALTFVLTLEDPARFADGRAVGAYAGLVPGKDQSGESDPQRRISRHGNELLRRLLVGCAHYILGPFGEDSDLRRHGEKIAYRGGKNARKRAIVAVARKLAVLLHRLWLSGEVYDPLYNARRAGEYAA

SEQ ID NO: 456792 - protein, 429 aa, unidentified
MKNRNNIKLEAITPKTLIVGVDIAKETQWARFVDYRGIELGKALKFQNDKTGFETILASIETICKNKRLDDVIVGMEPTGHYWKPLDNYLLMQEVKVVMVNPYHTKKAKELDDNSQTKSDKKDALTIAKLVRDGRYYEVYMPQDIFAELRVLSNARISLMKRHNALKNTITAVMDEYFPEMKLVFKNALNGKASMQILKTCPFPSLILELGVEGVLAEIKKAVKKTVGRKKAQQLVETAQNSIGVSYGTASSKLKLELMIEELELLTKQLEQVESKMELALAETGIGEIILGIPGIGVVTAASFLGEIGDPLRFDHPRQISKMAGYNLVEDSSGKSKSGTAISKRGRKNLRSILYRMAMTMVAVNKEMKELYLYLKTRETNPLKKKQALVVISEKIITVIYNLVKKQTEYKAELVLGECRKNQISNQAA

SEQ ID NO: 456793 - protein, 371 aa, unidentified
MAKRLKYIGLDVHKETIAVAVAEGERGGEVRFHGTIPNEDDAVRGMVKRLAGPGITLDFCYEAGPCGYGLQRLLTRQGQPCIVISPSMMPRRPGDQIKTDLRDAMTLARLPRAGELAPIWMPDEAHAAIRDLIRALLSAQEDTSAAKQSVRSFLLRHDRRFSGKSAWTKTYWRWLSEQRFDFAHQQLAFEEAKRRVLEAQARTARLEAALVEAVDGWRFAPLVRSLQALRGVRLIVAATLVAEVGDLTRFQNPKQLMAYLGLVPSEYSSGARVQRGRITRAGNAHARTMLVEAGWTYRLPAREERRYRDRVADLPEDIQAIGWKAQVRLCQRFRRLSATGKPQPKVNTAIARELVGFAWDIARRVQPVVAV

SEQ ID NO: 456794 - protein, 298 aa, unidentified
MAEHAIGVDISKSHLDMFRLEDGAAQRFDNSAAGFRALIKWLGKAPVARIVFEPTGPYHRGFETALSGRFPLVKVNPLQARRFAEASGTRAKTDAVDAHVLARMGAALALEPDRSVSETSGELRDLQVARTGLVKERTRLRNRGQTRGNRVLKRQTRTRLALVERQIKELDAEIAKRIAGNEAMARKREILRSIPGLGQVAAAAILTFLPELGTMGRKQLGRLAGLAPHTRESGQWKGKSFISGGRKPLRDALYMPALVAMRFNPDLKAKYTALRAAGKPAKVAIVAFVGKTAPHAVF

SEQ ID NO: 456795 - protein, 356 aa, unidentified
MKYVGIDVYKKHCQAAVLDEDGELVDQARFLNRKKSIKEFAVKLLTFRDDVKAVVESTGNLWIQIYDILEKYGIDVSLSNPGKTRLIAEAKNKTDKVDAKILARLLRADMLFTCYVPGEEVRNRREFLRARQDFVKNKTQVKNRIHGILDKHGLRFPGTPYSKKSIVWLRKQDLGFMDNAVVKGQLALLETLDEQIRVLEDKIAVMGMEDPQVKLLMTMPGIGFFTASMLVAEIGDINRFGSDKKISSWAGLAPRIHQSGEKTHIGRVGRGNKRISGLLVQCAHNARRYDPRFKRFYDRYSKRSGKGKALVAVAHEMIRIVYFMLKRNEPYRGENVELTTRKLKSMKYRASIGLQI

SEQ ID NO: 456796 - protein, 335 aa, unidentified
MLYAAIDIHKRRFQGAVLDLESGEIREQRFDANREQLIDWAMPLQGRVAAVAIEATTGWRWVWRELAALGFDVRLADPSEVKALRGRSKRAKTDRLDARWLVWLLAKQLLPESWLPPAEIQLLRDKTRLRKAIAEDRTRWAQRLQAFLQHEGWPCARGKLLTAEGRRWVSALALAPAARAQVETLLRLIDLLEDEQRELEAELRRFARSDRRCQALETIYGVGPILACHILAELGEAKRFRRVRSAVRAAGLDPVVDESGETRRRGHLAKHGSPELRWALVQAAHQARYGQSPDRPLYERVKARRKASQPAVLTVARKIVRRSYHVLHALEQQAA

SEQ ID NO: 456797 - protein, 341 aa, unidentified
MRAIGIDTHKATLAACAVDELGGAVAERTFANDPRGHAALLGWIRTVGPGARIGLEGSAGFGAAAARSLLEAGETVCEVPSQLSHRERLRTRRAGKSDPGDALAIARVAAREPDLPPVRTADRTREIQLLVEAREDLVTEATRVRNRLHADLVVLLPGYQVSVANLVALRSRRSVGARLRLLRGIQAELARGRLARLGRLMAEAKALETRLDELVGDHPLRTLPGVGVLTAAKIIGEAGDVGRFRSADAFAMLAGVAPIPASSGQTQRMRLNRGGNRQLNRALYVIALAQAWHYAPAKAFIARKRAEGRTWREALRALKRHLARVVFRLLVNPPTFARLAA

SEQ ID NO: 456798 - protein, 324 aa, unidentified
MIDGVLGIDVSKNTLDASMSSCNKVRSKSFANSPDGWRHLLGWLIGQKIRRVHACLESTGRYSLGIACKLNEAGHVVSIVNPAQIRDFARTKLGRNKTDAVDASHIREYCELFKPPPWAPPSHAHRQLGELQTIRAGIVAGLTEWKNRKNSGMVDAMAQSLADATISHFTSQLGAVEKAIAQAIDNDSDLRRKRDLLLSISGVGETLAGVVLAELPGPDVLRSSAEAVAYTGLNPRRHQSGTSIDRLTRISKIGNAVLRAALYMPAMSAMRYNPAIVALVTRLKAKGRLNPKQIVVAAMRKLLVLCFGVLKTGRPFDPALAMGC

SEQ ID NO: 456799 - protein, 389 aa, unidentified
MLLDHPSDGPTAIRTQFGAIFVSLELSRSNWLITSLSPGKGEKMSKHGVTAGDVAGLMQLFADLRRKAAAGTGESYPIITIQEAGLDGFWLHRVLQQNGIESHVVDPASIATPRRRRRAKTDRLDGETLLRALLAYKRGEPRVCAMVVAPSPEEEDRRRLCRERATLIAERITHVNRIKGLLFSQGISDYAPLRRNRRSRLETMRTGDGRELPSHLRTQIGRELDRIELLLEQIKAVEAERDALLAAARKPASEEAAPDAVTMLLALKGMGANFAAVLWSEAFYRQFANRRQVAAYAGLAATPWQSGGIRHEQGVSKAGNPRLRTTMIQFAWLWIRHQPQSALTRWFKQRSQQGRKRAIVALARKLLVALWKYVTQGVVIEGAVMKPAA

SEQ ID NO: 456800 - protein, 352 aa, unidentified
MVVVEDHQLRGPSMSNITTVGLDLAKNVFQIHGVDADGAPVLRKRLRRSQVLGFFGGMQRCLVGMEACATAHYWARELRALGHEVRLMPPQYVKTYVKRNKNDAADAEAICEAVGRPSMRFVPVKTVEQQSALLMHRGRELLVRQRTMLVNALRGHLAEFGLVAAQGLHKVSELIAIVRDDNDERVPDIAHQELRVIAEQIDQLHARISTIEAQIIAWHKDNAVSQRLATIPGIGPIIATAMTATVVKPSEFRSGREFAAWLGLVPRQNSTGGKTRLGGISKRGDSYLRRLLINGAHAVLLRSKAGKTDPWLISLRARKHRLVVAVALANKTARIAWAIMSRGDTYRRAAAA

SEQ ID NO: 456801 - protein, 412 aa, unidentified
MEVQYEVCCGLDVHKKSVAACLRRTGPKARVSEVRTFGTTTRSLLELGDWLTGAGCTHVAMESTGVYWRPVYNLLEGSCELLLVNARHVKAVPGRKTDVRDCEWLAQLLEHGLLRGSFVPTTPIRELRELTRYRRQLVQEHSREANRIQKVLETANIKLGDVATDVLGASGRDMQKALIRGERDTEKLAGLARGMLRRKHDALREALLGRVTEHHAFMLRGLLDHVEFLERQIATFDQRIEERARPFVAALNRLDGIAGVGRRSAEQILAELGPDMSHFPTAAHAASWTGICPGNHQSAGKRLSGRTRKGNRWLRSTLIECARGAVRKKASYLAAQYHHIARRRGDKRAIVAVAHTILVAAWHLLQHGVEYRDLGADYFDHLNRDRLARYHQRRLGELGFKVMLVTSEEAVA

SEQ ID NO: 456802 - protein, 354 aa, unidentified
MKRTTKYVALDVHQAMTVASVREEGGRVIARTVVPTEAPALVEFFRGMRGSVHVVFEEGTQAQWLHELVTPLVDRVVVCDQRGRSRHGNKGDQVDADQLSELLRRGSLRAVYHGSTPQAALKELTATYRNLVEDGTRVMLRLKALFRARAIPTRGTQVYQPRARARWLALLPEHGARFRAEALYAELDVLRALRPPAKVAMIAEARRDPAWSVLRAIPFLGPVRIALLLATMQTPWRFRTKRNLWAYAGLAVVTRSSDDYRLVAGQPVRRRRTPLTRGLNRNHNRVLKDVFKGAATAATGRPGPLQDFYHGMLARGMREELARVTLTRKLAALTLRLWKKGERYDPAQLTIQAR

SEQ ID NO: 456803 - protein, 349 aa, unidentified
MIGVDYHPSFQQIAFLMEETGEYSEQRLNHSDGEAEKFYRDLQRRGVHVRVGMEATGYSRWFERLLAELGFEVWIGDPAEIKAKRVKKQKTDRQDAQLLLKLMREDRFPRIWVPSPENRDVRQLLWHRHRLVQMRTRIMNQLQALAMNEGRRWKSKLWSEQGRAELEKLALAPWASRRRHELLELLDRMNPTIEELTAAAEQEARKRPEALRLMTHPGVGPLTALAYVLIIGTPSRFHRGKQIGNYVGMIPSEDSSGGKQRLGHISKQGNSLLRFLLVEAAQAAVRNNPDWRRRYIHLAMRRDKSIAKVAMGRRLGVRLYWMWRNGCEYSPSMEFGSYAGQLGTGHGVK

SEQ ID NO: 456804 - protein, 318 aa, unidentified
MLIHYIDIAKRNFVIAVSSLSKTKTETNNPKGIAHTIEYLKKHKVALVVTESTGGLEIPAAKAIRRAGIAVIIANPRQTHQFAQSQPLTKTDAKDAKMPAFFAQMTAQKEDSQTMPYQPPTEAEEVLEALVNRRNQPADMRTAEKNRLHQVHETQVGSVKQLIAHFDRLIDELDKQIDDHTHTHFDGKAQVAEQIKGIGSITTATLMVMLPELGRLSHKRIASLAGIAPHPRESGETKFKSRCFGGKSAVRKALYMATVAATRFEPLIRDFYQRLLSEGKPYKVAVTACMRKLLETFAKFLSLPTAETQTQVFVYFRS

SEQ ID NO: 456805 - protein, 374 aa, unidentified
MTMMQHRQIRYIGLDVHKVSITVAIAEESGAPTSYGSIANDPSAMRKLMTRLGGPEVELRVAYEAGPTGYALHRQLAKMAVDCIVVAPSLIPKQPGNKVKTDRRDALKLARLLRSGDLTPVWVPDEAHEALRSLVRARADAKADQLRAKHRLSKLLLRQGCRPPSGVRTWSQRHVQWLRQLEFEHLPDRIVFADYLAEVTAAGERIKRLEAALYQCAQSSSQVAVIRALEAFRGIGFLSAVTLVAEAGDLRRFRTAPQFMAYAGLVPSESSSGGKQHRGSITKTGNSLLRHVLGETAHHARHAPRVSSKLKARQAAVPREIVALAWRAQLRLHARYRHLSSRIGSLKALTAIARELAGFIWAAGQVLQEVPTAA

SEQ ID NO: 456806 - protein, 339 aa, unidentified
MLKRKFTLGCDVGSSTIVCSVLETLEKMILEPKEFANNFAGFEQCISWLKSSDLKAKDVLVCMEHTGVYSESFCYYLYDQKIKVVIESGAKIKKSFKLATHKTDKIDSIAIAEYAIRYADRLIAWEPRQSAVESVKSLLSSRELFVKHRTAQKNALSAYKRKVVQNKLIREEYEKSIQGLNQTIKNLENEIESILKQNEHWIAVIKIIKTVKGVDKLLPYNMFVISNAFSMKLDYKKLAAYLRICPYQHSSGTSIKKKAKSPKYGPKIMRKLLFLAAKDACQYDEYFRAYYARKDNEGKCYFVIMNNVGNKLLKIICAIINSGKPYIPNYRSVNPILVK

SEQ ID NO: 456807 - protein, 330 aa, unidentified
MYLGIDTHKEYSQVAVVNGDGNLQDEIRLPNDRLDELAEEYAGGDAAIEASGNYRPIYEMLDEHLDVTLVNPSKNRIIADATVKTDRVDAKKLAHMLRADMLAESYVPPDEIRTLRDLVRTRKSLVEERTAEKNRVRAVLTRTDNTYDSELFGPTGREFLAELSLSDADRTIIEAHLSVIDTYDEQIEAIEETIEQKVLESPAAQRLLTIPGVGQYTAAVIVAEVGEIDRFDEDKELVSYAGLDPTVHQSGDKEIRGGISKEGSAPLRWALVQCANIAVRCDEYLGNFYTRLKERKNHQIAIVATARKMLVSIFHMLQRKEAYDPPEVSA

SEQ ID NO: 456808 - protein, 394 aa, unidentified
MILVGIDIGKNKHTFSIIDKNSGEILLSPSDFSNNLKGFLFLIQKLSSYTKSELLIGMEDTGHYHFALLKYLLDRRYTVALINPTTTDLTRKLQGGITKNDPLDSLTICDVISSNHRNKPYRVTTLNRFDLYEQKQLTRHHHNLKEELNTYKNRLQKCIDIVFPEFNSLFHSKYGIVYMNILKAFSSAKAIANADIRSIRKCFEFKGKGKRISLSAEQLKLIAKSSIGIPSVAEEIQIRHLVSQIELLKKQISEIDKRIEEFFLKNNSPILTIPGISHFSGTSIISELGDICNYTKASQIIKFAGVAPYHYESSQFTAQHTAITKKGSKYLRKTLYQIILPVISNNEVFYAYYTKKLNEGKGHRCAQGHCIRKLLRVIYHLLSTRQPFNPKLLV

SEQ ID NO: 456809 - protein, 342 aa, unidentified
MARFVGLDVSQKLTSICVVDDAGRRLWRGQCHSEPEPIERVVRRHAGDDASIGIETGPMTPWLVHELRGRGLNVVCLDARHASAALKMQMNKTDQNDAEGLAQIMRTGWYRSVHVKSLDAHRTRALLGARAQLVGMTTRLSNHIRGVLKTFGMLPGAMRGVPFDRRVETLLTDHDDVAAIVRPMLTAWRQLREQIAVFDKAVRTLAKNDPTCRLLMSVPGIGVVTVLAYVSTVEDPARFARSRSVGAHIGLTPRQYQSGEVDRSGRISRCGDTLARTLMYEAAVVILSRVKKASGLKDWAQAIAKRSGIGKARVALARKLCTILHSIWRSGEPFRWSAQPGA

SEQ ID NO: 456810 - protein, 342 aa, unidentified
MTKITTIGLDLAKSVFQVHAADQDGRPVVRKKLRRGQVIPFFADLAPCLIGMEACASAHFWARELQALGHEVRLIPPQYVKPFVKTNKNDAADAEAICEALIRPTMRFAAVKSSEQQSVLMLHRARELLVRQRTMLINALRGHCGEFGIVAAQGAPKVADLIEVIEDPEDKRVPTLAREALGSLIEQLRTAQAQILGLEKKLLAWHRANEASRRLETIPGVGVITATALVATIGDASQFHSGRQLAAWLGLVPRQYSSGGKERLGRISKRGDGYIRRLLVHGARADLRWSRHRKERRSQWQESLLARRPTNVVLVAMANKTARVVWAMLSRGETFRTEAPAA

SEQ ID NO: 456811 - protein, 343 aa, unidentified
MSIVGGFDVHRRQITFDYVDTDTGRLQRGRITPACRGVLRRWLVDRFAGRTDVAFAVEACTGWRFVVEELERAGIAAHLAETADTSTARGPKKRAKSDAADAALQRQLLAEGRLPESWIPPEQVQEIRAILELYKDLRDEHTGWVQRIHATLFHHGVPQLGTGGVTTPAGRARLEAGEGLSPAARQAVTAALRVMDALDAELDGLHRQIRSFANGQPGCTALQVQYGVGPITSTAIWAMMGDTRRFTASRQAVRHTGLDVTVDSSDGKRARGHLAKQGPPLLRWALYEAACLASHTRAPDHDYYASVKDRLDHKRATISVARKIARRSHHILRELGDHAYAAA

SEQ ID NO: 456812 - protein, 366 aa, unidentified
MQKTSTMRRTANKIFKGRQLTIGMDLGDRWSFYCVLDESGGVLLEDKLATTPEAMKQTFAMIPRSRIALETGTHSPWVSRLLTQLGHEVIVAHAQKVDLITKSTRKDDRNDAKALARLARIDPELLGPVQHRSAKAQMYLTVIRARAELVRVRTALINGARGLTKSYGERLPKRGTQQINGEFGAELSTELREVLEPLFREIESLNERIKEYDRRIEKTAIETYPETELLKQVKGVGDLIALTYVLTIDDPHRFRKSRDAGCFVGLQPGRRNSGDSEPQMHISKQGDEYLRTLLVQGAHYILGPFGEDSDLRRWGRKLAERGGKNAKKRAVVAVARKLAVLLHRLWVSGEVYEPLRNSQKVIRAAA

SEQ ID NO: 456813 - protein, 367 aa, unidentified
MGWMAPLRHLGAKVLVGENQSADKEPSMNEITTVGLDLAKNVFQVHGVDAEGTTVLRKQLRRAQLLAFFSRLPRCLVGMEACATAHYWARELRALGHEVRLMPAQYVKAYVKRNKNDAADAEAICEAVVRPTMRFVPAKTAEQQAAVLLHRGRERLVRQRTMLVNALRGHLAEFGVIAPQGLRNVGRLIAIIRDEEDARLPGLARQVLQVLAVQIEQLEAAIAALEKQLMGWHKSNPVSQRLATIPGIGPIIATAIAAMVAEPSGFRSGREFAAWLGLVPRQNSTGGKNRLGGISKRGNQYLRRLLINGASANLLRSKATNADPWVIGLRRRRPSLVVAVALANKTARIAWAVMHRQENYQRMATAA

SEQ ID NO: 456814 - protein, 353 aa, unidentified
MSWSTTTKEAPVEEYAGRQFVGVDLHRRRSVIVRMTADGQRLGPAVRIDNDPFELARQVASWGEAPEVVVEATYGWYWAADVMAEAGARVHLAHPFGIMGFAQRRVKNDERDAADLADLLRMGRLPRAWIAPPEIRGLREAVRYRAKLVALRTGLKAQVHSVLAKQGVRVPMSDLFGLGGGKLLDGLALDAPFHARVVSLRRLIDAVSFEVDITAKRVAAQLSNHRGYWAVQAIHGIGPVLAAIFVAEIGDVTRFGRPQQLCSWAGLTPRHRESDTKVRRGRITKQGNPLLRWAAVEAVQRQQVGPIGATRARLTDKRGANIAKVAAARKLLTLVFYGLRDGHIRCLSAAPAR

SEQ ID NO: 456815 - protein, 398 aa, unidentified
MTESSDYESVQVFIGVDVGKDTHHAVAINRSGKRLFDKALPNDENKLRSLISDLKQHGQILLVVDQPATIGALPVAVARSEGVLVGYLPGLAMRRIADLYAGEAKTDARDAAIIAEAARTLPHALRTLKLADEQIAELSMLCGFDDDLAAQTTQASNRIRGLLTQIHPALERVLGPRLDHPAVLDLLQRYPSPEKLASLGEKKLAAQLCKLAPRLGKRLAADIAQALAEQTVVVPGTNAAAVVLPRLALQHITLRKQRDEVALAVEQRVLAHPLYPVLTSMPGVGVRTAARLLTEVACRAFASVAHLAAYAGLAPVTRRSGSSIRGEHPSRRGNKALKRALFLSAFAALRDPLSRAYYTRKMSQGKRHNQALIALARRRCDVLFAMMRDGTFYTPQAS

SEQ ID NO: 456816 - protein, 341 aa, unidentified
MQIHSVGIDLGKTTFHLVALGAAGKVLVKKKFTQLQLLTFTANMQTSLMGLEACSGAHFLGRALRAQGHDVKLIPAQFVKPFVKSDKNDFIDAEAIAEAVERKNMRFVPIKTDDQLDLQAIHRVRDRLISRRTAVINQLRAFLLERGMVFAKTPAKLRAAMADVLENADADLTPQMRNLIGMLWDEWKLVEQQITALTDDLEKIADADAGCARIRQIPGIGPVVATAIVAAIGSGAAFRKGREFAAWLGIVPRQYSTGGKAKLFGISKRGNVYLRKILIHGARAAVLRIKRDRAPIGAWLDALDSRAPKNVVVVAMANKLARIAWAVLSSGNDYRPATVPA

SEQ ID NO: 456817 - protein, 339 aa, unidentified
MLSVGIDYHKKFSYGTIMDEKGKIIKQGMMQNSLTGVSKFINGSKGKEEIRAVMEATRNWTLMYDWLEEVTDDVKLAHPLKVKAIAEAKIKTDKIDSVTLAHLLRCNLLPEAYVASKPARDVRQVLRQRMFFVRVQTMLKNRIRGIIDKHPEAGNPPYEEVFGKAGIEWLKKAGFPETERKIIDEDLALLKTVKEQIEKSDKSVEEIGKTDLRVKYLSSIPGIGTFFSVLLCYEIDDINRFRTDKKLHAYAGLVPSTYASGNKVFHGHITKQGNKYIRWAMIEAVWPAIRSDIELRTHYEKLKIKKGANCAKVATAKRLLTIVYRVLKEERYYKVHRLP

SEQ ID NO: 456818 - protein, 348 aa, unidentified
MSQIHYIGLDASARTVNLCVVDHDGRVVHERKLSSDPGEIAQHILSLQFSIVRVGLEAGMLSQHIYGRLAEANIPVVCVETRHMKAALAAQLNKTDRHDARGIAQMMRVGLFKPVHVKTPNSQRLRTILTARQLLRNKLQDVENEIRGLIRNFGYHLGKVTARDFEPRVRELIADTHLHSVADALLLARRGLREQFGRLDDMLVRLARQDEVTRRFMTVPGVGPLVALTFRATVDVPSRFTRSRTVGAHFGLTPRKLQSGEVDRNGRISRWGDEMMRSLLYEAAQVLLTRVKRWSALKAWGAQVSRRRGHKKAIIALARKIAVILHRMWIDGTEFDWGKRPEAAAPSA

SEQ ID NO: 456819 - protein, 316 aa, unidentified
MKRQMNSTIGIDIGKDTLVIHRLPDKATLEVTNDKAGLTTLLRWLGNGAALRVVFEPTGPYHRLLEKTLAAADVTMLKVNPRQARRFAEAIGKLAKTDRVDAAMLARLGATLDLEARPPKSELLHDLRELQVARQGQMKDRIALTHRLRHATLALIKRQLRLRIRQVDTHLAEIDAAMLEAIRADEALSQRFDILTSIPGIGQIAACAMLIEMPELGQIEARQAAALAGLAPVTRQSGKWKGHAHIQGGRAGLRRSLYMPALVATRYNAPLREKYQKLIASGKAAKIALTAIMRKLIVLANALLRQNRKWTPNASC

SEQ ID NO: 456820 - protein, 368 aa, unidentified
MMGWMAPLRHLGAKMPVGQKPPANREPSMNEITTVGLDLAKNVFQVHGVDAEGTTVLRKQLRRAQVLAFFSRLPRCLVGMEACATAHYWARELRTLGHEVRLMPAQYVKAYVKRNKNDAADAEAICEAVARPTMRFVPAKTAEQQAAVLLHRGRERLVRQRTMLVNALRGHLAEFGVIAPQGLRNVGRLIAIIRDEKDARLPGLARQVLQVLAVQIEQLEAAIAALEKQLMGWHKSNPVSQRLATIPGIGPIIATAIAAMVAEPSGFRSGREFAAWLGIVPRPNSTGGKNRLGGISKRGNQYLRRLLINGASANLLRSKATNADPWVIGLRRRRPSLVVAVALANKTARIAWAVMHRQENYQRMATAA

SEQ ID NO: 456821 - protein, 349 aa, unidentified
MVADEVDYVVGVDTHLDEHVLAVVASPGGAVVAQGAVAANARGYVQALRFAHRHAGGTRVWAIEGAGHYGAGLAHHLSERGEAVLEASRSPRNERRLRGKDDRLDAVRAARTALTNEPLALPRFGQRREALRLLLVARRSAVDVRREALVQLRSVIVTAPDALRDELRGLPVQRLLERCNRLRRSSAAAPDELATRLVLRSLARRIAAATAEAGELEHEILTHVRALAPTLLDEPGIGPIVAAQLIVAWSHRGRVRSEAAFARLAGVAPIPASSGQTMRHRLSRGGDRQLNRALHTVILHRRQHDPATKAYIERRLAGGKPRREATRLLTRSLARHLYRLLQSQEPLMA

SEQ ID NO: 456822 - protein, 427 aa, unidentified
MPYRIAGIDVHKRMLAVVVSDVEVDGEYQFERRQFGSNPAQLRLLAGWLLEQQIEEVVMESTAQYWKPVWGALERYWKPICQKREGAGPMSGALHLAQAQSNRGRRGRKNDFADAERLVKRLVAQELILSFVPDPEQRLWRTVMRTKYQLTCNRVRLQNRLEALLEEAHIKLSSLVSDLLGASSRRMLQALADGETDSAALAALANYRLRATQEQLRDALGACQELNPVYRRLLKMALEELPLIEKQIGQLDQEMADLLRPHQDQVQRLAEVPGLGVDSAQQIIAEVGATAETFPSEGNLSSWVGACPGDDESAGVNYSHRSPKGNRHMRRILNQAANAAVKHKGSIFAILYRRYVPRLGHNQTIGVIAHRLCRLIWKILHRGVRYEERGPAVSKRSKRERTARMIRQLRSLGYRVELANSQSSVPA

SEQ ID NO: 456823 - protein, 414 aa, unidentified
MSNPLIVGVDVHRKTNTFCLMDASGQEVRSRFTLDNNRPGTQAFVQQVTELMEADGFSELQVATEATGWYWFHFFQSLQQEALLSAWPVDLHALNPRLTANFKKSYVDMDKTDPIDAFVIADRLRWGRDIGTPFEYDETYLALRFLTRYRYHVVHNLAREKAYCTAILYLKASEYSRQDKKPFSDLFGAASRAVLQEFASIEEIAAMPFEELVEFIDVQGKRRFPDPSENARLLMQVAQDSYSLPQALQQPINLVLNLSLKQISALENQAERLDTAIAERMAAIPNTLQTIPGFGPVFVAGILAEIGNPQRFNYDQSKVAKFAGFKWRKTASADFTADETRMTRTGNPYLRYYFCEAAFSVQRCDREYGLYFQRKLQEVRKHAHKRATVLTARKLVRLVMRLLATNQPYRPRRL

SEQ ID NO: 456824 - protein, 363 aa, unidentified
MRDPRTVAVGLDVHKTSVRLAAVRADELLGEVTLPYDHDRVEREVRRWPGARVAYEAGPTGFGLYRYLVAAGVDCEVVAPGLVPVRPGDRVKTDKRDAKRLAVLHAGGLLTAIFVPSPELEALRDLVRAREDARLDRMRARHRLGKFVLRHDRRMPTTCWGVTRRAWLGRQVFELPGQQQAFDDYLFAVDQIDRRVGALEGEIARIAAEGPHTELIARLRCVRGIDTLTAVGLVCEAGDFDRFKTAEQFMSFVGLVPSERSSGEGRRQGSITKAGSAHARRLLVEAAWNSRRRPTVGYELARRQRDQDPAVLERAWRCQQRLHHRWRRMAGRGKPHQKIVVACARELAGFVWAIATDQPLRTA

SEQ ID NO: 456825 - protein, 359 aa, unidentified
MAVIEGQERRIVGGVDTHKDLHVAAVVDEWDCVLGTRSFATTRQGYRQMLAWMRSFGELRRIGIESTGSYGAGLLRFMQQAKVPVLEVTTPDNQDRRRRGKNDDLDAQNAAHAAFAGQRTVTPRSRDGIIESLRILMACRKTAVSARRVALQMIQNTIVCAPDDLRDQLRRLTRMQLVRTLASWRPDLTAYRDLGSAYRIGLKSLARRYLELHDEIADLDAMIDAIVDELAPNLVARNSIGHLGAAQLLLTAGDNPERLRSESSFASLCGVSPVPASSGKTVRHRLNRGGDRAANSALHIIAIGRLRTDQKTKDYVARRIAEGHSKLDAIRALKRYLAREVFTLIIQRRREINATQIAA

SEQ ID NO: 456826 - protein, 352 aa, unidentified
MSNPTRWIGVDLHRRRSQIAIIDEHGELTLSRRIVNDPETFKELLGDPDGTHVALEATYGWEWLADLLEEVGYDVHLAHPLRTRAIAAARVKTDAVDAPTLAHLLRTGLLPEAYIAPAELRDLRELLRHRAVLTRMRTAVKNRVHALLARQGIRPEHTDLFGKAGREFLAALELPAGSRRRLDSLMSLIGDFDREITATTREIDARAKADDRVPVLCQIRGVGRYTAMLIIAEVGDVKRFPTARHLCAWAGLTPTVRSSDGKARLGHISHQGSPALRWALTEAAQKIPTGGGPPRAMFERIAKRRGRNIAKVAVARQILTLCYYGLRDGEIRCLANQPDIDDHDNQDLAEAA

SEQ ID NO: 456827 - protein, 312 aa, unidentified
MTQIICGVDVSGARLDARIGRDGVAERFAHTAEGIGALAAFCKAHGVGLVAMEATGGYERMPFGLLWAEGVPAAVVNPRAVRRFADAMGKLEKTDRIDAGMIAWYAETKRIVPEPPASRTQDRLEALVTRLRQLTELRTAQTNQRRLIKEATVLDGFADLLGCIRRQIRSLEQQIAELIDDDPLWRKLDAVFRSIKGVADRTVARLMADMPEIGTLSNKAISKLAGLAPLAKDSGQRKGPRPVRGGRCQVRSILFVVAEIVRRYDPDFAAFHKRLKDAGKPSKVVRIALAHKLLVRLNAKARECRAQLALAA

SEQ ID NO: 456828 - protein, 369 aa, unidentified
MSVRTLRTQQPASPLARVVQRGLEASTVIVGVDTHQLTHHAALIDSHHRRLGNREFPATTVGFRDLLAWAASHGTISEVGVESTGSYGAGLTRHLLGAGLEVYEVNRPEKSTRVKQGKSDPIDAYSAAEQVLTGRASGRPKIKTGVVEAIRMLKVPRDVAVKDRTRAYSQLRDLITTAPAVIHDELIKLSGKKRVAKALLMHPDPARIDEPVHAARHALRAIARRIRSLDSEIAEADKLLTNLVKKTCPNLLAMYQVGTQTAARMVITAGQNIDRMTSEAAFAKLTGVAPLPASSGKTNRHRLNRGGDRQANSALYLIVTGRMRNHPETLAYVQRRRAEGRSNPEIIRCLKRHLARSIYRALRTDLMTP

SEQ ID NO: 456829 - protein, 280 aa, unidentified
MKNTTIAIDLAKSVFELGISDRPGHVARNHRLSRTELAAFVAAQPPATVVMEACSSAHYWGRKFESFGHDVKLLPPRCVRPYVQRSKTDRTDVKGMLEAWRNSDIRPVPVKTESQQQLTSLHRIRSTWMATRTMRINSARGLLREFGIVFPVGAGTLPGHILEVIEDADTAIPMLLRDLLHHVVLEIRELESRIKATEKHLQMLAAETPIVERLRTIPGIGLLTATALVGFVGDVARFPSGRHFACYLGLTPSEHSSGGRRLIVVLTSRWPSSSWTVRMS

SEQ ID NO: 456830 - protein, 319 aa, unidentified
MAQNDLVVAGIDVAKDKVDVCIRALSLRRTFAATAEGRRELASWLRRQKVGKAVMEASRGYERDWAKALRGAKIEVRIVDPKRVRSFAQSAGRLAKNDTIDAEMIAWFAETFDEARSQAYDATREQLHQMVNARQALKGMQAKLESQGEHALPAAVQRMHARILKTITVELVKFEAAIAAMIQATPRFTELAEIIESVPGIGRTTSAALIAAMPELGQANNKIVAALLGVAPYDDDSGRRRGERHIKGGRRRTRNVFYMACLGAATQHNPVLKAFYDRLVAKGKEKKVALIACMRKLISILNIMIERRQKWDASRYALS

SEQ ID NO: 456831 - protein, 350 aa, unidentified
MLFVGMDVSKDSSSAQGLDREGKKLFYLELPMNGEGFSRLLSMIKTQVGDLSQVIVAMESTGCYHINLFSFLSSERIPCVVINPLLITNFARLSLRKTKTDKKDALTIAQFLLAHKDSLSQVAFSQNAQDLKDLSRERESLTVMISGLKNDIRRLLKMTFPELEHRCKIFTETMLQLLIKFPSARIIRRVKPREIAKALIHVEGKRKRVLISAEEIIQVAKASVASDSPAKELILSEKISTLLYLEEKKRKITGVLVKTCPSMRVDDLEIITSIDGIKQINGSTFLAELGEMNHFKSHKHVIAFAGLDPSVHQSGQYEGMSRISKRGNRHLRRVIFPMTIDYNSSFSDRS

SEQ ID NO: 456832 - protein, 588 aa, unidentified
MLPQAIVLPPTKIGVGIDTSRYGHYAAFLRDDLNAAAGELTFVESAAGYEQLRQRLAQIAAKHASVHFLIRLDAAGQYADNLLHFLRLLGNPAADAARLANATFTISCGDPQRNKNYRAALFGAKKSDPVEARAAARYAVTERPAPAAILNDAMRTLRQVAGRLQATVRQRTRLINQFHHLLALTFPELALVVNDLATGWVLELCHRYPTARHLADASADQLQQIPYLPHQRIDALLDAARTSIASLTNDIVAELVRDQVRQLRDTRARQVRLEKTLADAYHALPEPNHLDSIPGIGVVTAAVLTAFILDIERFETPTKLVAYFGTMPIEIGSGVDRDGSARPAKRYVMCRRGNDLVRRYLWMAAMSAISCNPAVRALYARVVPKHPDKKAVALGHAMRKLLHLVFAVWKTKKEFDKNNYPWDTPAHVELPGAPSGVSRRLEPASAQDQAAGLKLSADAGSKEVTAACAPSLPHNPPADTRAVDFAHVKQQLPIQRVLEHLGLTAKLRGPGAQKRCACPIHRADGRGRTFSVNLAQNVFHCFEASCQKKGDVIDLWAALHALDLRAAALDLVQTFDLDATPAAEKRHG

SEQ ID NO: 456833 - protein, 354 aa, unidentified
MENIATIGLDIAKNVFQVHGADKDGAPLLDRKLSRAEVLGFFERLPRCVVALEACGTAHYWARCISELGHEVRLIHATYVKPFVKRGKTDALDAQAIAEAATQKTMRFVPIKSVDQQAATMIFGARSLFVRQRAQATNALRGHLSELGFTTNTGLASFKSLAAAVRGTDGTQLPKIARDALEEIVLQIERLSERIEKLDREIVERADRDEDMRRLMTIPGIGPRIAAAVKAIVPDPSEYKTARHFAAWIGLTPKSHSSGGKILLGHISKMGNRELRSLLYLAGATVLGTVKDDSGMVRWSKRLKARRPFKVAAVAVANKLARIIWAILVKGGVYVRVKTASNSGVAAGEVQGLA

SEQ ID NO: 456834 - protein, 391 aa, unidentified
MIYAGIDVAKDKHDCFITNSDGEVLFKSFTIPNNREGFETLFQKILSVSDDLTKVKVGLEATGHYSYNLLGFLLNKGLTTFVINPLHTNLYRKSLSLRQTKTDKVDARTIASMLMSDVNLKSYSDISYHNEELKSLTRYRFDKVQERAKLKTSVSRLICILFPELEKLVPTLHMTSVYAMLSEFPGAKHVANAHLTKLSNLLSEASKGHYGKETAITFREAARISIGSNMPAKSLELKHTIKLIQELTSEIDEIENEIKIIMDKINSPILSIPGINYRMGAMIIAEIGDFSRFDSPDKILAYAGFSPSTYQSGQLDGAYSHMEKRGSRYLRYALYNATKYVCHWDSTFAEYLAKKRAEGKHYNVAISHAVKKLVRVIYHLEKTNQQYIKVT

SEQ ID NO: 456835 - protein, 347 aa, unidentified
MNFYNNTHPYYCGIDLHARSLYVCILDQEGKTCLHKEIAADPDKLQQLLEPYIGDIVVGVECMHCWYWVADFCEEAGIDFILGHALYMKAIHGGKAKNDRIDSFKIANLIRGGNFPLAYVYPKAMRATRDLLRRRMKIVRHGADLKAHVANTTSQYNLPPNKVNLKNRDAREQLRNTFPELSVQKNIDLDLVILDCYAEQLSKVEWYIQQQAKQHKPNHFHLLKSVWGIGPILALTIIYEIGDIDRFESVQKFASYARLVKCKAESAGKTYGTQGNKIGNAHLKWAFSEAAVLYLRGNEKAQKYLLKLQKRMSKAKALSALAHKLGRCVYFMLKNESVFDERRFLKG

SEQ ID NO: 456836 - protein, 419 aa, unidentified
MNRIETKKQRIVNTETMIVAIDIGKTTNTGYCRCPSGKDIKPFEFSNNAEGFKKLWDRICWEKISHHLGEVVVGSESTGAYGEPLMHYLRQKPVKLVQVNPMHTKRMKELEGNSPGKTDRKDPKVIADIIGLGHALSVVIPEGAAAELRRLTLARERSLQRRTALYNQLQDLVFILFPEFLQVMKDVKTKTAQYLLRHHPTPQDIVECGLEPLASILKRVSRGKLGRVRAQALYEAAGESVGLQEGKRGILLEIDEILSILEACNRFIEKVKEEMVRYLQEIPYSDCLLSMKGIGEVTVAGLIGEVADFRQFHTLREILKLGGLDLFEISSGKHQGNRHISKRGRPLLRKLLYFAAINTVRKGGVMHASYQRHLERGMPRIKALVAIARKLLKILFALVRDHSHYVENFSQKEVLKLAA

SEQ ID NO: 456837 - protein, 346 aa, unidentified
MKVTYQTCCGVDVHKSFLVATIVKTTGGIEPSYQKKRFSTFNNSILEFKQWLLDNDCHDVCMESTGKYWVPVFNLLEDDINVVIANPKWVKAVKGNKDDTKDSKWIGDLFRLGLVRGSYVPCKKIRILREYTRYRYKLISCRSSEKNRYQNALTVCNVALDSVVSDIFGKSSTSIIDYLLEQSGTSINHEEIASKLLRSLKSKEDAVIESVEGYQMTDAQKYRMRLVRAHMDYITAEINDVDKMMENMISSNPDFENAVQFLCTIPGVKRDSAITIISEIGTDMSQFSSSKRLCCWAGLTPGSNESAGKKKSVRITRAGVYLKPALVQCAHAAVKSDKSPYYKKKY

SEQ ID NO: 456838 - protein, 407 aa, unidentified
MDLLKTVFGIDVSSRKSNVCIMVNGQKVNDYAISNDMVGFNRLLGDLKQVTKPQIIFEATGVYSRRLQAFLDMHELRYVMMNPLEAKRKTKDDLHQNKTDKLDALYLAKLQSEHPQRLAYVQNKEYQELMANNRIYEQASHDLITNRNRLHKAVQLTFPEIEHLMVNPRGKNYWSIVLRFPHPDIVLETKEADIIDFLKGLTGIGKKRANDIAQSLIRLAKVACPAVKKNSAHIRGLKMAINNILSAEEECQTALQEMAKLAPKRDLEILTSIPGIGENTALRIISELGDIRRFNNPSQLNAFVGVDPQVYESGNLTAHLSISKRGTAIGRKVLYLAINQIQSAKKAGKPCHIADYYEKRKRSSETASHKKAAIASIHKLLRTIFALIKNDQLYSYDVAKHNQRLLS

SEQ ID NO: 456839 - protein, 400 aa, unidentified
MRAVFGIDVSKASSEVAILFNGEKVHGYTMSNDAIGFARLLGDLRTVHKPEIIFEATGVYSRRLQTFLEDNGYAYTRLNPLEAKKQLDSLRVRKTDQIDAEKPAQSQFVLNRKPTYVQEEVYQNLRALSRFYQNLTEDIVRAKNRLHKVLQVTFPELETILSTPSGQQYWNLVIDFPCKDFVLELSKDELSESIRQSTSKRISDKRVAYLVEKLTALANQSYCAVKKTSPIMEEVRYYAKELLRLSEQRQTVLDQMVELAQPLPEYDILLSIPGIAETTATSIIGELGDIRRFQSANQINAFIGIDLRHYESGNFLAKEHITKRGNPYARKILFKCIHNIASASHTNPCHIADFYEKRKRQSQTTSTKPHTIASIHRLIRTMYYLITHNKLYDYRSTRNQ

SEQ ID NO: 456840 - protein, 362 aa, unidentified
MTMLAEPNEKVEDPAILDAAVGGDTHRDTHYLEMLTGAGVLISRITIDNDADGYAEALAWIAEHTPGPRVLIGLEGTRSYGIGLCRALQAAGLEVVEAEQPKKAQRRGRGKSDPIDAHLAALTVLRMPADRKVLPRNDGDREALRILLGARREATTIKTKQTNRLRALLLTGDDDDRALSKGAMSDARLGTIARRRARKGENTEQQVRREEATRLALAIRRVTSELKANKTHLTELVEEFVPGLLDTVGIGPVSGAQAIVSFSHVGRCRNEAAFAALAGASPIQASSGRTHRHRLNRGGDRQLNRALHDIAKTRWRHCERTKAYITRRQAEQMPDREIRRCLKRYIARELFRTLTAAGVDNT

SEQ ID NO: 456841 - protein, 364 aa, unidentified
METVRFVGLDVHKDSVAIAVADSTGGEPGQLAVVPNDTAALIKRLCKLAPKRQLRCCYEAGPTGYGLCRDLRAAKIRCTVVAPSLVPRAPGERIKTDRRDAVKLARFLRSDDLTEVVLPDSSTEAMRDLERAREDAKNAERVVRHQLQKFLLRHGRRYPEKTSWTQAHLRWIESQHFEHEAQKRVLTDALRAVHLATARIEQLDKDIAELVESWSMKPLVDGLQALRGIQLLTAVTIAAEVGNLRRFERAPRFMAYVGAVPGERSSGERRHRTGITKTGDAHLRRVLVEAAWCNRFKPSSSRRLGRRQQGVSAEVRDIAWRAQNRLHSRYRRMLGRGACTQKTVVAMARELAGFVWAIGQVIEA

SEQ ID NO: 456842 - protein, 347 aa, unidentified
MNFYTQQHKHYCGIDLHARAMYVCILDQTGTKLVHKNLPTTPEAFLRVIAPYRDDVVVGVECIFTWYWLADLCSKEGIAFVLGHALYMKAIHGGKAKNDKIDAHKIAVLLRGGMFPQAYVYPAEMRATRDLLRRRCHLVRKRAELLAHIQNTNSQYNLPEIGKKLAYKANREGVEEHFPDPSVRKTIEVDVSLIDHYDQLLGEVELSITRTAKAHEVQTFSRLQSVPGSGQILALVLLYEIQDSARFPRVQDFVSYCRLVKCAKESGGKRLGTSGKKIGNVHLRWAFAEAAVLFLRQNQLGKEYFAKLAHKHGKAKALTVLAHKLARAVYYMLTREQAFDLKRFVSA

SEQ ID NO: 456843 - protein, 421 aa, unidentified
MNSLCTAKYSAFVGLDWADAKHDICLQAAGSDQREFDCFAHRTERIEQWAQALQQRFGGRIAVALELSKGPIVYALQKYDFLVLFPINPSTLAKYRQAFKPSGAKDDPSDAELALDLLMCHPERFQPIKPQSVPMRQLCLLVEQRRRFVGDKNRTVNRLCSALKQYYPQPVSWFARHDSVLFCDFIARWPTLTTVKRARQATLRTFFTAHNARSEKLINERICAIKAAQSLTHDVAVISAYRMQVEFLIEQLRVILKAIDHFDEEIATTAAKLPDYDLLFRPLPGAGPALAPRLLAGFGENRKRFANAEAIQRYSGVAPVTERSGGKTWIHWRWQCPTFLRQTMVEWAGQTINHSFWAGAYYRQQRAKGCSHQTAVRALAFKWLRILYRCWKTHTPYDESKYLNALRHRGSPLLEHLGETM

SEQ ID NO: 456844 - protein, 348 aa, unidentified
MLADQLDYVVGVDPHRDSHALAVVHVVSGVVVCEASVAASSSGYADALRLVEEHAPGRRAFAVEGSGSFGAGLTRFLSTRGERVLEVGRLRRERRSGGKTDRLDAIRAARSVLALERPATPRASGEREALRALMAARTGAVSAKRAGLCQLRALLVTTPEPLRGELRPLTRARLLNRLAATRPERQTNPELRGSLLALRAIARRVLQLTREEHELAREIETLTRNLAPQLLAQPGIGPLLAAQVVLSWSHPGRITNEAAFARLAGVAPIPASSGQTIRYRLDRNGDRQLNRALHMILVTRRRTHPPTIDYIKRRIQEGKTSREATRCLKRYLARNLYRLLEHQTPQAT

SEQ ID NO: 456845 - protein, 346 aa, unidentified
MMIVGCDFHPGKQQVAIFNQQTGEVEERELSHGDGEAEGFYRGLPAPALVGVEACGNSQWFIELLQRLGHEVWVGNAAQIRASYVRKQKTDKRDAEHILKLLLEGRFPRIWLPSWEQRDHRQLLIHRHKLVQIRARLKNGLQHLCLNRGLQQKHKMWTEAGQKRLEQLPLQGWAAVRREDSQTLLKQLDKQIELLDQAAEQAAESDPQAKILLQQRGVGPITALAFAVTIGEVSRFAHSKQVASYLGLIPSERSSGSKKRMGSITKQGNGFLRMLLVEAAQSVVRLDPTFHQEYVRRCHRKPKAVAKVAAARKLAVRLYWMLRTQQANPAVAHIESSPRVPLVGAS

SEQ ID NO: 456846 - protein, 356 aa, unidentified
MQSKKTEDIDVEIAVIGVDIGKDTFHLVGFDDTGHRVLRKKIKRLALKSTFEKFPRCVVGMEACMSAHFVSRMLRKLGFEPRIIPAIYVKPFNQGQKNDYNDAEAIAEAAMRPNLRTVTEKSQDQLDLQAMHRVRSRLVARRTATINQIRAFLIEQGITVRSGRHRLQSSFEAILENRRDEISPRMRSTLLGLYGDWLWVDEWIKAISSEIEEISKSEESSANIMTVPGIGPLISTAIVAAFGKGEVFDKGRDFAAWLGLVPRQFSTGGRTILGRISKRGNSYLRMLLVQAANVILMRPHRWDALGLGPWLRGVKARMPHNKAAVALANKLARTAWSILHHATTYSVQGDEALGGI

SEQ ID NO: 456847 - protein, 398 aa, unidentified
MFKHFLGIDISKDSFDIALLDSKARLVLKDKLSMSKDGFDTLKEYLLLYNKDEMLLILESTGIYHLPLLSFLLECDFKCCVVNPLLIKSFISSTTLRKTKNDAKDAKAIALFGLKSYSSLKLASLDELSSLRTIVREREGLAKQIAKLKTEIKTSVNTLFPEMLKNTNIFTRSILNLLLYAPSRKRIRNLKQKTIERILNDTKGNKSRISAADILSLAKSSIGINDKHLELVLQSKIRRLFSISEELALLDEQLNLCLKDSNINDDIDLLKSIPGIGEVTSKNFLVETDNITKFKSVKQLCAYIGIDPSLKQSGSSINIQGRISKRGNANLRRTIYQMAIGVIRSCEKFNTYFNKKRAEGKKYKQAVIAVANKLLRTIFVMLKNKTKFDENLAYSVSK

SEQ ID NO: 456848 - protein, 395 aa, unidentified
MKLVGIDIGKNKHFFCIMDKDSGEVLLQPSSFSNTKDGFDSLIQKLSSYSKDSILIGMEDTGHYYFALLKYLLEKNFTVALINPKTTDYTRKMQNGITKNDKLDTLTICDVLDTPVRKKQYRITKVNSFDLYEQKQLTRHHHNLKEELNVYTNRLQKCIDIVFPEFNSLFSSKYGIIYMNVLKTFGSAENIASTDIRTIRKCFEIKGRGNRISLTAQQLKDSAKSSIGISSAAEVIKIKHLISQIELINEQLAETDKKIEEFSIQNNSPILSIPGISHFSGTSILAELGEISNYSKPSKIIKAAGVAPYHYESSQYNAQHTAITKKGSPYLRKTLYQIILPVINNNNPVFKQYYDLKISQGKGHHCACGHCVRKLLRIIYHLSSTNQQFDDALLR

SEQ ID NO: 456849 - protein, 342 aa, unidentified
MERIIKQNVGIDMSKDSFDATIVQFSLKLEINVVAHKKFTNTTKGFQSLLNWSNGKKQKGLPLSFTMEATGVYYEQLAYYLSKHGQPVHVVLPNMAKKYTESLGINSKTDKLDAKSLGQLGAERKLRIWEVNPDVYQNLKQLTRERENLINERTRIKNQLHSMQHSANSIKSPMKRSQERISFLDYQVKEIEGELRQALSEDKELSNKAAKLQTIPGVALITSAVIIAETNGFASIENIKQLTSYAGLDIVEKQSGKWRGKSKISKKGNSHIRKALYFPSFTLIKNDENMNKLYSRLIEKKKLPMIAAVAVQRKLLGLMYVLWKNDIEYDPGYKQRKLSKAG

SEQ ID NO: 456850 - protein, 331 aa, unidentified
MEIKEVIGIDVGKKLNEARIHTNQKLFEFENNIGGFRVFEKWVMKNVEYQKNEIMFAFEHTGLYSYPMSVYFSEKKYSYIVIPGLELKRSMGITRGKDDKIDAKRIASYTYEKRRKLKPYELPQENIIQIKRLLSLREKLVKQRAGYKGTLGEFKTFLKRKDNKMLFDIHEKMIKELSKQIEKLEKKLDDIVQNDQQIKQMYKLIISIKGVGPQTALFLIVYTDKFTRFDSWRKFASYCGIAPFPNRSGISIRGRTKVSNLANKKIKSLLDLCAKTSIQYNPEMKLYYEKRVKQGKPKMSTINIIRNKILSRIFAVIQRGTPYVDTMSYLS

SEQ ID NO: 456851 - protein, 342 aa, unidentified
MAIAVVGLDLAKHVFQVHAVDETGRAVLRRQLRRAGVEAFFKILPPCIVGIEACASAHYWARRIAALGHEVRLIAPAKVKPYVQRGKKNDANDAAAIVEAVMRPHMVFVPIKNEEQQAVLMLHRTRDLLVRQRTMLVNAIRAHLAEFGIVAAQGRRKVKELIAGLDNTEMPELARIALWQIADQIDECDKRIDALERRILAWHKSDESSCNLATIPGIGPITASAMAATVPSPSAFRNGRQLAAWLGLVPRQNSSGGKDRLSGITKTGNTYIRRLLVIGATSVIRFARSKAPGTAEWLKKLLERKSARLASVALANKMARIAWSVLTRGEVYRDIHPVPKPT

SEQ ID NO: 456852 - protein, 453 aa, unidentified
MEQEEKISMEIVNPHAAGIDIGSRSHWVGIGQHEKDVREFGVFNQDLFEMADWLHQNKIRTIAMESTGTYWQNLYAVLISKGFHVILCNGKFTKNIKGKKTDIKDCQWIQKLHSLGLLSSSFLPDGKTEQLRTYCRHRANLLHNAASTSKKMQKYLRLLNLRLDVVVNDICGLTGLLIIRAICEGEKDPHKLASLRHGNCRKSEDEIARALQSNGRKDYLFALQQELDTYDHLHKKITECDVMIEQMLNEIIDNDDNKKQHYIDPKTHKRINKNTPKDIDLNLKSYQMFEGTDLLAIEGMGYSTVLALMSELGIEGIKKFPSAKHFCSWLRLAPNNKVSGGKVLSSKIPKGSNRLKIALRNAANAIGNLKDSTPLRDFFQRINFRKGRVSAISATARKLAVIIWNMVVKGSAYLNPENYLFLDQKRKLGLVKRIQKQIDKFALTNDDLKFASD

SEQ ID NO: 456853 - protein, 342 aa, unidentified
MQITTIGLDIAKNVFQVHGIDATEKVVVRKQLRRSQVLAFFKALPPCLVGMEACATAHYWARELTKLGHQVRLMPAKDVKAYVKRNKNDAADAEAICEAVRRPTMRFVQVKSAEQQGQLMLHRTRDLLMRQRTQVINALRAHMAELGIVSAQGREGIKELLKIIASEQDARLPVDAHTSLVVLAAGLQAVQTMIGSIEKRIMAQHRASEASQRLESIPGIGVIGATAIAATVPDPKVFRSGRDLAAWIGIVPRQDSTGGKQKLGPISKQGDRYLRRILVVGAHAVLKQARRQPEKYPRLTLLLARKPFKVVAVALANKMARIAWALLAKGGIYRAPALAAAA

SEQ ID NO: 456854 - protein, 319 aa, unidentified
MVDKEIAGFHDTANRMDDIYNKFAEVLEYGKIDIGEVLVCAEYTGKYIYPLVLACHKCRVDLWLESGYNIKCEARKERGKDDRTDARRIAEYGRKNQDDARIYRLPGESIATLRGLLAERAMYCSQRAAHKGQLRDMRGFMSPEAYTARAVRQLSLIKELDRLIEEVDNSMAEIVASDPELLRQQQLLLSVPGIGMVCAAALIAVTAGFSLFDNGRELCCFAGLAPFAYTSGTSIRSKRRVSCRADHQLKALLHMCALVAATRMKSGRFAEYYQRKTAEGKNKMSVLNAVRAKLMLTAFAVVRDNTPYDKNFKINLAES

SEQ ID NO: 456855 - protein, 411 aa, unidentified
MWVLFVGNDWAEDHHDVEVVDEAGQRLARRRLSEGVEGMAGFHALVAEYLPEDGEVSDVVIGIETDGGPWVTALVAAGYQVYAINPMQVARYRERHSTSGAKSDRGDAHVLAELVRLDRAHHRQIAGDSDLVEAMAVLVRGHQNLVWTRQRHTNQLRSMLRQYYPAALDAFDDLAGRDALAVLTVAPTPEQGRVLTVDQIRQLLREAGRKRYLDATARKIHTALHTEHLRALPAVAQAFGASTRALVSIISELVKQISMLASEVEQNFGRHPDAKIYLSQPGLGVILGARALAEFGDDPHRYVSGKARRNYAGTSPVTRASGSKTIVLARYARNRRLGDALFQQAFAALTASPGARRYYDAMRARRIGHHDALRRVANRLVGILHGCLRTRTTYDEATAWPTPQQDQQEVA

SEQ ID NO: 456856 - protein, 338 aa, unidentified
MRYVGLDAHWKQSTICVLDDRGRKILNRSVRGPWSKVLEELEKIRKPFEVCFEASTGYGYLFERLQGIARRVVVAHLGQLRLIFRSKRKNDRVDAEKLAKLLFLDEVPPVYVPRGDVRAWRRMIGHRRKLVASRIRSKNAIRALLRSQGIEAPKGLWTRKGMDWLRTVSLATELDELQRDILCEQIESLTRMIQRAHKLLNGIARRHPGVQLLKTIPGVGVRTAEAVVAYIDDPKRFHRIKAIGRYFGLIPSQDASASANRLGHITREGPSIVRYLLIEAAWQGIRRSQRLRAFYDRILRGDTGRRKIALVATAHHMLRTMLAMLQTGELWRSEQQAA

SEQ ID NO: 456857 - protein, 350 aa, unidentified
MRILALDLGKYKTVACDYEAETGGHRFTTIPTNPKALHDLIVDREPERVVIEICSIAGWVSDLVRSLGIELQVANPNDERWQWRKVKTKNDRADALKLAQLSAVNQLRLVHVPSSEMRQWRALIAYRQHLVQRRTKIKNHIRDLLLREGQLLPRYRSAWTQEGIANLEAMARPLAEVSPAELWRGELGVELAQFKAVQAQLAEVVGKLDELGAANHSVRLLRTIGGVGPRLAEAVVTMFDDPHRFRTAGQVSSYVGMVPKQFDSGETERSGRITRHGNRLVRSLLVEVAWCALRHNPWARETYQRISGGKKSRKKIAVVAVGRKLLVRCWAMLRHQTEWRYHPAAAAQGG

SEQ ID NO: 456858 - protein, 405 aa, unidentified
MIEATPTYAGIDWSWQHHALCIVDDDGQRIEEATVPHTRPGLAKITLLLRRHGVERVGIERGDGPVVEHLIRDGFEVVVISARQVKSLRARYRAAGNKDDRFDAFVLADALRTDAGRWAIVQPDSDETIALRMLVRARHDLIDHRIAEHNQLLAVLQHNFPGAIGLFSQLDIGISLAFLRRFPSEAKAAWLSELRMAHWLKANAYCGRHTPAQLVGHLREAATGRIAGAAAEASEVIVLTLVDLLTTLRQDQEQLEARIKEALLAHPDGPIFQSLPRAGVVRAATLLAEIGDCRARFPDPAALAAAAGVAPSTRQSGKHLNVAYRRGCNKQLRAALVDWAQDTPRANPWARDTYDRARARGCRHPHAARILAQGWTRILWRCWHDQVPYNPDLHGRLNSLLPEAA

SEQ ID NO: 456859 - protein, 394 aa, unidentified
MKLVGIDIGKNRHFFCIMDKDTGELIISPTSFANYKEGFDFLVQKLKPYSKSSVLIGMEDTGHYHFALLKYLLDQSFTVALINPKTTDFTRKLQGGITKNDKLDTLTICDVLDTPKRKKQYRITKVDSFDLYEQKQLTRHHHNLKKEINVYTNRLQKCIDVVFPEFNSLFKCKYGTVYMNVLKTFGSAENIASADIRTIRKCFDIKGRGGRISLTAEKLKECAKSSIGISSSAEVIQIKHLISQIELIHDQIAEIDKKIEEFSVQNNSPILSIPGISHFSGTSILAELGEISNYSSARKIIKFAGVAPLHYESSQFTAQHTAITKKGSKYLRKTLYQIILPVINNNPVFKQYYQLKLSQGKGHRCAQGHCVRKLLRIIYHLLTTGQQFDPELLR

SEQ ID NO: 456860 - protein, 338 aa, unidentified
MTILTVGIDLAKNVFAVHGVNEAGKAELVRPAVPRDKLHELIAGLPPCIIGMEACSGAHHWARLFQASGHTLRLIAPKFVTPYRMTGKRGKNDAADAAAICEAIQRPHMRFVPLKTLDQQSRLMVHRARQGFVEQRTATLNRIRGLLSEFGIVLPLKAATVRRRACECLEDLPGYANTVIGDLLSEVSRLDERIAQYDAYIQAMAKDDERARRLMQLGGVGPTTATCLLAMIGNGHDFDCGRQFAAWLGLVPGQYSSGGKTRLGRITKAGDAYLRNLLVLGAKALLAAAKSKTDAVSRWAVALAQRRGYWRAVVAIAAKNARMAWPMLRRGEAFVLPA

SEQ ID NO: 456861 - protein, 376 aa, unidentified
MLYIHNIQPGDKTKRDFHFIFYFTVKNKFVKKVIKQVLGIDVAQKELVVCLARMHDDWVPDLYATRSFKNTADGFKAMIEFVQKLVEPTIAVRYVMEATGVYHESLAYYLRDQDLEVSIVVPNKISNYVRTLEVKTVTDKTASQAIAQFGLERNLDKWEKPIPIYKKMKQLTRERDQIMTERTMTKNQLHAENAEAEPHKSSIERIKKRIDLLNKQEQEINVELAALIGKDAVVKDFIKLLCSITGIGVLTAATVLAETNGFELIRNKSQLTSYAGLDIKEKQSGTSVKGKPRISKKGNRFLRKAMHMPALTAIRHDQRFKAIFVRLVSKHGIKMKAVVAVQRKLLEMMYTIYKTKRAYDKEYLKKEETAKIKEAA

SEQ ID NO: 456862 - protein, 320 aa, unidentified
MTKVEKIIGIDISKENFDVAFSASGKMKTQKYSFSASDIKKFISLLDVESHCVMESTGVYHLRLAHALHEAGIPVSVVNPLSVKRFIQSKMHRTKTDKSDAMMLVEYGSMMEPALWKPDEAHYTQAQQLLNIQEQLIKNRTSVTNQMEAISLSVNQSKTALGLLKKQLLFIENQLIQIERELEELIGRHDDEDVHNLQTIPGIGYKTAVALMVYTKGMTGFDDHRQVSSYFGICPRIVQSGTSIKGRGKICKMGMGHIRMLLYMCARSAKKYNRACRELYERLLAKGKAKKLALIAVANKLLKQAFAIVKNKSAYVENYV

SEQ ID NO: 456863 - protein, 422 aa, unidentified
MESVIVAGVDVSKYFSDMCVLSADNLVLKELHFTHDHAGLNKAADTLRQIEKKSGLNVVIIMESTSHYHRLPYYFFRNSGIDVIVINPLQSNAIKNISIRKVKTDKVDAYRIALLYRLQHFEVTDQPIDILFDLRNLTRQYGDIVKSRTAFSNQLVACLDQAFPSFRKVFKSVTTVTALSLLQHWQAPQSILSADRTQIYELIRAVSRSGSAYALRKTDMLYQLATLDSQINLQAESNGILIRSIVSIILSLNENLKLLHDEVKRLINTDRFAFTQVTLLSTIPGISWFGAALLLAEIGDFTRFKKPAQLVAYCGLDPSQRQSGMFKGTKNKISKRGCRYIRRLLNMSAVTAVSKNSTGEYNNPVLAEYYQGKCLSKPKKVALCAIMNKIMHIVFAVLRDQKPFELRTPEEHAIKLHQKNVA

SEQ ID NO: 456864 - protein, 366 aa, unidentified
MCPTLPLESSLAVRQEVVLGVDTHRDQNTAAVVAIDGRLCGSGEFPTTAQGYADLLAWASALGEVERAGVECTGSYGASVSRLLQSQGIEVLEVNQPDKRARRSRGKTDAVDAEAAARAVLSGRASAIAKTGDGPVEALRVLKMMRDSAVHARTKAVNQLKATMVTADPALREALSGLGAKALVRRCSTLAEPTQDGISQRATVYVLRGLSQRILALTAEANQAEAHMNELLQQHAPDLIARTGIGPDSAAALLIVAGDNHDRIRTEASFAALCGVSPVEASSGNTQRRRLNRGGDRRANAALYRIVLSRLRWDTRTQAYMTRRLAEGRTRREIVRCLKRYVAREVFALIAGSTLPVVSTTQPRAA

SEQ ID NO: 456865 - protein, 346 aa, unidentified
MRFYNRQHTYYCGIDLHVKTMYVCILDGTGQVLVHRNVPSTPAAFLEIVAPYRDGLVVAVECMFTWYWVADLCAAEGITFVLGHALAMKAIHGGKAKNDKIDSHKIAVLLRGGMLPQAYVYPAGMRSTRDLIRRRLHLVRKRGQLLAHIQNTRAQYNLPVFGRKLAYRANRDGVAEHFPDPSVQKSIEVDVALIDQYDALVTDLELTIVREAKRHNADAFHRLRSVPGIGKVLALTILYEIHDITRFDRVQEFASYARLVKCKKQSGGKTLGTGGAKMGNVHLKWAFSEAAVLFLRHTEGKKLIARIEKQHGKGKALSILAHKIGRAVFYMLSRGTVFSMEKFLAA

SEQ ID NO: 456866 - protein, 329 aa, unidentified
MDYKWFIGIDISKKTLDVVLYKKELQKKSPYCQISNDAKGFKTLIKWLKEQGVKLKNTLFCMEHTGIYGIELAKFISNRTNYCFESPLHIKRSLGLTRGKNDKIDAFQIARFCYLHREELIPKKIPSKTMLTLKGLINERERLVKVRTMDKIVIKELNCTENNTCICRAKKRVDLFSKDITQIEKEIEELIKSDLEIDKNYKLAKSVTGIGLVNAVMFILFTNNFTSISNPRKYACYSGIAPFEHSSGTSIKGKTRVSKLANSRIKVNLTNGARSAIINDPEIKLYYKRKTEEGKEHGTVMNAIKFKLITRVFATVKRGTPYVKLRQAG

SEQ ID NO: 456867 - protein, 370 aa, unidentified
MAQSSTLFIGIDVHKDTIAVAYVAHDHGAEVPSLGTIGTRRCDLDQLVRKMQSQATHLIFIYEAGPCGYWLYRYLMKKGSDCWVVAPSLIPQKPGDRVKTDRRDAVQLARLARSGALTAVYVPTVEDEAIRDLTRAREDTISDRKDAKLRLKAFLLRHDIRSTGRAKGGPAHLRWLSEVVCPTPTQQIVFQEYVRAVPEHTERLQRLEQALQEHVKTWRLSPVVEALQALRGVQCTVAVTLVAEMGALTRFDSPRELMKCLGLLPSEHSSGAQRRQGSITKAGNTHARRVLVEGAWAYRYPAKVRRHVQLRLEKQPKVIQDISGKAQVRLCQRSRRLTSRGKHANVVTVAIARELTGFLWAIAKEVPSVV

SEQ ID NO: 456868 - protein, 391 aa, unidentified
MVCVGIDVAKDKHDCCILDSDGTIRADCITIPNNMDGFKQLLQTIRDCTKRSDKIKVGLEATGHYSYNILGFLLDNDLAVYVMNPLHTNLYRKSLSLRKTKTDRVDARTIATMLLSDVDLKSYTDTAYHNEELKSLTRYRFDKVRERAKLKQSVSRLVTILFPELEKLVPSLHIASVYALLSEYPGAKQISEIHLTKLTNLLVTASKGRYGKDKAIQIRDAARTSIGSVMPAKSLELKHTIKLIRELTSEIDEIEVSIQKIMDELNPPILSIPGVGIQSAAMILAEIGDFSNFESPDKVLAYAGCSPSTYQSGKLTNCYAHMEKRGSRYLRYALYNATKYVCHWNPVFAEYLAKKRAEGKHYNVALSHATKKLVRLIYALQKSGKAYLVAA

SEQ ID NO: 456869 - protein, 412 aa, unidentified
MDVMVERCAGVDIGKDEVVACVRIPGPSGKGRHKQTRTFSSFTSQLEAMADWFASEGVTEVVMEATGSYWKSPWYLLEERGFDLKLVNAHHVKILPGRKTDVADAEWLAELLEHGLLRSSFVPPAEIRQLRDLTRYRKRLIQEHTSECQRIQKTLEDAGIKLDSVASDVLGVSGRLMLEALVAGERDPEVLAELAKKQLRKKIPELREALRGRFGDHHALLVRLCLDHAKYLEAAIAELDTQVDRVMAPFVEARDHLDTITAVGKRAAECIIAEIGADMTRFPTAGHLSSWAGMAPGNNITGGKRQSGKTPKGNVWLADILNQCAWSASRSRNTYLSAQYWRLARRIGKKKAAVAVGHSILVICWHLLTNNTDYDDLGGDYFARRGNTARHQDRLVQQLQDLGYQVTLRKVA

SEQ ID NO: 456870 - protein, 404 aa, unidentified
MNAIGIDVSKGKSTVAVLRPYGEVVVSPFDVAHTGSDLRALADLIKKLPGETKVVMEATGNYFESIARYLHEQNIFVSVVNPVLISDFGGNTLRKPKTDKKDSVKIASYALTYWLDLKEYTPQEDLRKSLKLLNRQYQQSIKLKTMMNNNLISLLDLTFPGINKLFTSPSRESDGHEKWVDFVLEFPHCDMISKLTIKAFAKKYKKWSNKNSYHFTESSCEKIYAFAKDCVSSVSSDKAIVFSVVQAAKMLISATENCHAIQSEMNRVASKLPEYDTVMNMYGVGKAVGPQLMAEIGDPRRFHSRKAITAYFGYDSENNDSGQKTTRSNPMTKKGSGALRRTLFIIMQVLLQTKPQDNPVYDFLIKKKSEGKHYYSYINAATNKFLRIYYARVKEVLNVSEQMT

SEQ ID NO: 456871 - protein, 390 aa, unidentified
MIYVGIDVAKEEHECYITNSDGEVLFTFFTIMNNRDGFNELHSKIQSVADDLSKVKVGLEATGHYGYNILGYLLDKGLATYVINPLHTNLYRKSMSLRKAKTDKIDSRTIVMMLMSDVNLKPYSGTSYHNEELKSLTRYRFDKVKERAKLKTSISRLVTILFPELEKLVPSLHMVSIYTLLNKYPGASHIATAHLTALTNLLSKASKGRYGKEMAIIVRDSAKLSVGMDMPAKSLEIRHTIKLIHELDCDIKEVESMIKNIMDSIKSPILSIPGISYRMGAMIIAEIGDFNRFDSPDKILAFAGLAPSIYQSGQYEATHSRMEKRGSRYLRYALFNSAKYVCLWDPTFITYLAKKRSEGKHYNVAISHACKKLVRVIYKLEKAQELYIKA

SEQ ID NO: 456872 - protein, 334 aa, unidentified
MQNVTLIGIDLGKHSFHVHAQDKNGNALLRKKFSRNPLTAFLSTCAASTVVMESCAGAHFMARHISQFGHQVKLISPQFVRPFVKSNKNDFIDAGAICEAASRPSMRFVTPRTEDQQAMSALHRVRDAIVRDRVKTTNQMHAFLLEFGISMPRGIAVIRRLAAVLEEHELPPYLARLLMRLHQHYAYLTEQIEELEQELKTHMADDDTAQRLLTIPGVGLITASLLATKLGDGKSYASSRDFAASTGLVPRQYSTGGKSTLMGISKRGDKNLRRLLVQCARAFMQRLEHNQGRLADWVKAQLSRHHSNVVACGLANKLARIAWSVTTHRTAFIQ

SEQ ID NO: 456873 - protein, 387 aa, unidentified
MAQVNDLSRSLTAFDPISTLVVVVEMSKAKWLVSGAVPGVERQPLKKLEADATALLRLIERWRNEAVRAGRPISRIALAYEAGRDGFWLARWLIARGIEGHVIHSASVAVSRERKRAKTDRLDAAMLMRVFLGWLRGERGHCGMVAIPTMEEEDARRPSRERECLVNERSRITNRMKSALARLGVRGFKPHLRKAPERLAGLRTAEDTDLPANIIEELRRDMARLALLREQINSIEKTRAARLERAPDTGPHAMVRLLARVIGIGIETADMLVREILSRRLRDRRAVARYAGLTGSPDESGLKRREKGLAKAGNARVRRGLIQLAWRFLVFQKDSALARWYRTRTEGPSGARKTTMIVALARKLLIALWRLVTTGEVPDGVALRPAP

SEQ ID NO: 456874 - protein, 367 aa, unidentified
MKKHTIKSNALSSADVSACSTVAVDLAENVFQIAGEDTFGEVIYESRIKSREAFVAFLKTLPPGVTVLMETGPGAQSWARLLQAQGNPVRILPAQHVANHRSGAKNDRNDALAILRSGRDVNIASVPVKSTAQLAMQALHRIRQGYVKRLTAMGNQIRGLLLEQGIAMAQGAVALSRNVPRILEDATQPLPDMLRELIDELLGEWSQLGERIDVLTGRLEAAARQDETAKRLMTVRGIGPVIATALLAKQTEPERFANARMFAAYFGTVPEQNSSGQNTRLGKICKRGDGYIRSLSIQGAHAVLRQVRPDSEHPDDRRLRRWLSRHGQKGAAVRLANRNLRIVWVLLQNDQTYRRQPADCQEAAMNH

SEQ ID NO: 456875 - protein, 357 aa, unidentified
MLTINIILMSVLKQVLGVDVAQKELVVTLGRLLSDLSIELYAFKVFSNSEKGFISLLTWTKKLTDPNIGVRFVMEATGVYHQKFAYFLDDHGCALSIVLPNKISNYIRTLEVKTITDKSCSEAITRLGLERKLSNWQRPKKTYKSLQQLTRERDQVVLERSMVKNQLHAESQEAEPHERSLERLKERIKFLSSQEREIKEDIEQVVNRDAELKKEVDIISSIPGVGELTAAIILGETNGFELIRNKKQLTSYAGFDVKEKQSGTSVKGKPRISKKGNRSLRKAMYLPSMSAVKWDDNFKNIYVRIVSKQGIKMKALIAVQRKLLELAYTLFKTKASYDKSYESKKVEQKNSMSAQKA

SEQ ID NO: 456876 - protein, 343 aa, unidentified
MQAVKTIGLDIAKSIFQVHGVDADGQVVIRRKLKRRYVLAFFAKVPSCLIGMEACATSHHWSRELQALGHRVRLMPPAYVRPYVKRQKNDAADAEAICEAVTRANMRFVETKTTEQQSCLVLHRTRHLFIRQQTSVINAIRAHLAEFGIVAPVGRKGLEQLLDVLANSEDKRIPQVARACVAALGAQLHALKAQILEFDRQIMLWHRSHETSKRLDEIPGVGPALATALVASIADPKAFRSGRDFSAWIGLVPKQHSSGGKEKLGSISKQGDRYLRSLFTAGALAVIRYAKIYGTKHRPWLAALLARRPTKVAAIALANKLARMVWAMMTRGERYKEPVALAA

SEQ ID NO: 456877 - protein, 371 aa, unidentified
MKHNSIFIGMDVHKNSIDIAIAESGRTGQVRHYGKINGTLAALNKAVGKLVGKGDRAHFVYEAGPCGYQIYRHLTARGFDCAVVAPSMIPRQSGNRIKNDRRDSLMLARLHRAGELTAVYVPLAEDEAIRDLSRAREDAKSDEKRSKQRLLAFLLRSGHRYSGRSPWSQAHMRWLADIKMAHPSQQIVLQEYIDTINQCTLRLQRLTEQIRQLLPQWRLFPVVQALQSLRGVSLIVAVTTVAEIGDFKRFQNPEELMGFLGLVPSDNSSGEKIKHGSITKAGNSHVRRMLVEAAWAYRFRARVSRALLKRQEDLPQPICEIAWKAQLRLCARYRHFWAKGKVKPVIVTAIARELCGFIWAIAIKTDIPVAV

SEQ ID NO: 456878 - protein, 410 aa, unidentified
MQYFVGLDWASREHAVCVVDERGTMTMRFTVAHTDAGMTELVTRLTQFGAPAALRVAIERPSGLVVDTLVEHGFAVVPIHPNAVKAARPRYSAAQGKTDLGDAYLLGDLLRTDGHRFRTLSPPSDETKALRGLVRTRDDLIERRVALANQLRSLLGEFWAGAAEIFADVDSPIALEFLDRYPTPQSAASLGEKRLAAFLARHAYCGRRSVVDLLARLRNAPRSVAGGLEADAKGDCVRALVAVLRPLVAQISTLTAAVEHAVGAHPDGAIVTSLFRSGRVCAAQLLAEIGDDRARFVSDEHLAAEGGVAPVTRESGKHRAVTFRWACNMRLRTALATLADTTRHTMPWARALYQRARERGKEHAHAIRILARAWCRVLWQCWQKRTPYDPAKHRAAHSLNLHLVDAKEAA

SEQ ID NO: 456879 - protein, 386 aa, unidentified
MQTVADRPEAPTAIRTDLGAIFISLELSRSRWLITSLAPAGGEKMSKHVVRGGDVAGLLERFVQLREKTRARTGKVFPFVVIQEAGLDGFWIDRVLQNEGIESHVVDPASIATSRRRRRAKTDRIDGDALVRALLAYKRGEPRVCAMVKAPTPEEEDRRRLCRERKVLIAERVRHVNRVKGLLFSQGISGYEPLRRDRRERLDTLQTGDGRLLPDHLKAQVRRELDRLELLLKQIKAVEAERDLLLAAQQVAAPPTMLLDIKGIGPEFAAILWSEGLFRHFDNRRQVASYAGLAPTPWQSGSVNREQGVSKAGNPRLRTTLIQLAWLWLRHQPQSALALWFEERVRRNGGRLKKTTIVALARKLLVALWKYVTAGVVIEGAVMKAA

SEQ ID NO: 456880 - protein, 338 aa, unidentified
MKSYAGIDLHSSNNYTGISDEENNRLYGKRLPNRLDVILSVLEPFKESLEGVVIESTYNWYWLVDGLQDHGYKVHLANPSAIKQYEGLKHTDDKWDSFWLANLRRLNILPEGYIYPKEERPVRDILRRRLLFVKHRTSNILSLQSAVTRNFGYNISGNDIKKLDESDADQLFDEPFLNLAARCSISTIQFLGERIEEIEKAVKSHVKIRPEFEYLLTMPGIGNILGLTIMMEVGDISRFPEVSNYSSYCRCVKSERITNKRKKGEGNRKNGNKYLAWAYVEAANFAIRHYPECQSFYRRKKAKTNGVVAIKALSNKLARASYYVMRDKVPYDASKLFK

SEQ ID NO: 456881 - protein, 375 aa, unidentified
MKEKLRFLGLDVHAETIAVAVAEPDGEVRSLGTIPNRAESIRKLIKKLGPAGKLRACYEAGPTGYVVYWQLAELGVECEVVAPTLVPVKAGDRVKTDRRDAEKLARCYRSGDLTAVWVPDEGSEALRDLVRAREAAKQDQTRARHRLSKFLLRSGQRAPTGVRPWTRPYLIWVAQLRFTQIAQESTRQDYLHEVEHMRERVARLEQAIMEAVKLASPALQQVINDLQALRGIADISAVTIASELGQVSRFGSARQLMGYCGVVPSEDSSGKRTRRGSITKTGNAHLRRIVVEAAWSYRRPPGIWYGLRRRQESISEEAKEIAWKAQHRLHKRYLKLGAAGKDQRKIVTAVARELLGFIWAIGTRAETISRQQVAA

SEQ ID NO: 456882 - protein, 418 aa, unidentified
MSEEIQARPSRRYVALDIHKYYCVVAGVNRDGQVVLQPVRVEHADLAEWLKKNLQKTDAVVIESTTNAWYVYDLLEPLAERVVVANPIKVKQIATARVKTDIRDTLILARLLAANLVPDVWVPPVHVRQMRQLLSQRRQLVETHTQILNRMHSVAHRHHLKHERGKRFNEQNTGWQKDAQLSQIEQFQLSLEMENREYIEKQIERIGVEVKKICHQKPWSDSMAYVMSLPGFGVITAMTVLAAIGEIERFETSKKLASYSGLTPGLEQSGTKNRGKGITKEGRRELRWALVEAALQAVKSDPLLKRRFEELQKRMHRNQAIVSIARHLLELIWYVLTRHQPYRGFTQERIAYKYMTWAWQMKDVERDGLTRQQFVRYYLMRIGIGKDLTRIALDPKHPRRLASEAEVLALRPELRQLE

SEQ ID NO: 456883 - protein, 570 aa, unidentified
MSYKIAGIDVHKKMLAVVVSDVEGDGEYQFERRLFGSNPEQLRLLAEWLLEQEVEEAVMESTAQYWKPVWGVLERFWKPVRQKRDGAGPMSGTLHLAQAQSNRGPQGRKKDFPDAERLVKRLVARELTLSFVPDAEQRLWRTVMRRKYQLTRNRVQLQNRLECLLEEAHIKLSSFVSNLLGVSARRMLKALAEGETNPASLAALADRRLRATPEQLCDALGACMDLNPVYRRLLKMTLEELRLIEEHIGKLDQEMADLLHPYQDQVKRLAEVPGLGVDSAQQILAEVGALAAAFPSAKQLSSWVGACPGDNQSGGVNYNHRSPKGNRAMRRILNQSANAAVKAKGTIFEVVYRRSVSRLGHKQTIGAIAHRQCRLIWKIFHEGARYEERGPAVSKGSKQRRAWRMIRELRCLGYRVELENSTARPSIRRGFSTLECGCSPIVSIARAAAGTKKQRTETATGCKRRLEARGGQDAEIVALHPGAEPGLTTSGSYSKRKGQLGQVGPFREFCTLSGSSSRWARVKAHRLTRTFETLISRRVLKQDFGPHFRPQPGLCRASRKRRFLRPTVTL

SEQ ID NO: 456884 - protein, 343 aa, unidentified
MEQYAGIDVSLESSSVCVVDASGRIVREAKVASEPEALIAWFGELGVGLARIGLEAGPLSQWLYAGMREAGLAVELLETRHVRDAFKAMPVKTDRKDARGIAQLMRLGWFRPVHCKSLPAQELRALLTARKLVQGKRHDLEMSLRGILRGFGLKVGPTTPRHFEGRVRELVDGHTTLVAVADALLAGRAVLGEQLGKLEKRLVSLAREDTRARLLMSTPGVGVIVALTYVAAIDDPARFRSSKAVGAHFGLTPTKYQSGETDVTGRISKIGDASVRTALYEAASVILTRPVKGSSLKSWAMRLAMRAGMRKAKVALARKLAVVLHRMLVDGTEFIAGKAAAAA

SEQ ID NO: 456885 - protein, 357 aa, unidentified
MKQKKDNSINFEGQPFYIGVDVHKKSWKVTVRSQGLELETFSMYPSSKGLNNHLARRYKGGQYYSVYEAGFCGFHIHKKLTNLGITNIVINPADVPTTIKEKQNKSDKIDSRKLARELENGSLKCIYIPTEFQIELRSLSRLRYYLVKDQTRLKNRIKSYLYFNGVDNLATEKYWSANYINRLKEVEFEYDLGKEYLLHLIASLEDTRKRIAQVMGQLRKASEKYNFNNLLMRLVKSVPGVGMTTAINLYTEIMDMTRFRDIAKLASYVGLVPSIQSSGDKEYTTGITRRSSKYLRFLLIEAAWLAIKKDEALFLYYSKLLSRMNNKRAIVSVARKLLSRIRHVWLSGEDYVIGLVK

SEQ ID NO: 456886 - protein, 345 aa, unidentified
MNILKQTVGIDISYKTFDARFGTINTLQQNTLSPARSFKNSPAGFKLFLLWLKKYILSNDIPLVFVMEATGVYYEHLAHFLHSHKYQVAVILPNKIRNYAKSLESKSKTDPLDAAVITRFGLERQLSLWTPTSETVKALRDLCREYHCLKTNITQIKNQLHALNASFKPHRESFKRKTLLLKFLERQVSLIKKELHSLVKTEPDLAQRLKKIKTAKGLGDMTILTVLAETRCFELVTNQKQLASYAGFDIVFNDSGLKKGKTSISKKGNTFIRKALFMPALSACRANPRLKDFYQRLVAKGKNKKLAIIAVARKLLLLIYTLWKTNSPYINDFKPAHHASEALSA

SEQ ID NO: 456887 - protein, 357 aa, unidentified
MIPKTQENFSGQTFFIGLDVHKRQWTVAIRTQGVLVQRCSMNPSPKELKRFLEHTYPGGTYQSVYEAGFCGFWIHQQLLEQGIENIVVHSPDVPTSDKERKGKCDRRDARKLSRELENRSLTGIYVPDDHQQHLRSLCRLRERHIRSLTRVKNRIKGHLHFYGVVPPPDQKMRHWSGRFVQWLQTVEFSSPPATDYLRLCLTELEEHRRRLVEIMRLLRQYCRQQPHKEPIRCLISVPGIGFVLAVTLYTELMSMDRFATLDQLAAYVGLVPSITSSDEHDIDHGLTCRHNTYLRALLIEAAWIAIRKDVGLLRTFTQLTRRMNKKNAIIRIAKKLLNRIRYVWKQQTVYRMKSVAT

SEQ ID NO: 456888 - protein, 336 aa, unidentified
MNKNGEVLGIDVSKSKLDITLLLNGKAKSKVLQNTPAGHQALLEWIGKSKASKASLHICMEATGVYHEAVATTLHAAGFKVSVVNPACIKGFGHGENIRNKNDEIDAGLIARYCLTMAPELWTPQPLEQRQLRGWTLRVQALKDIRQQESNRVEAHTVSGMKEVAEHVKEHIAWLDDEIKKLEKEIDDHIDRHPGLKRDAEPITSIPGIGRATVARVLGHLGDIRRFKSSKAFAAFLGVTPRQATSGSSVRGRTIVSKTGNTSLRAALFMPSMVAQRRNPIIGQFAARLLATGMAKKAVLCAITHKLTHLIYGVIRTGKPFDANYLTKGLAIQDGI

SEQ ID NO: 456889 - protein, 365 aa, unidentified
MNFIGADLHKKSITLCVMDERLKILARKTVPCGQPDQIVESFRQFRPFKVVVEATASYLWFVELLEPLAEEIVLANPKKLRVIAESTKKTDRLDAQVLAEFLARDMIPRAYMPTPRQRQHRALVRHRQYLRGRMTSVRCKIHHVLADYNADRKDLFSARCGKSYFKQVALSDADGFVLKQLWSEWEDHQARLLATTRKIKAFIAKAPAREKEARAILKSAPGVGFVTAEVVLSEIGDVSRFGNAKKICAYAGLVPAVRQTGGKRSKDLHITKQGSGLLRWALVESAWRLVKSSPKWSALYSRLRERCGSKRAIVAVARKLLCVLYAMLKTSTPYKIIPAATPAEPPEPTRKRLVRVSTAAQAVTP

SEQ ID NO: 456890 - protein, 351 aa, unidentified
MNNATARKRTQLTIGLDLGDRRHTYYVLDGAGKMAREGSLGNTRQQLATMARSYPGATVVMEAGTHSPWVSRFLQELGLRVIVANPRKTRAIYQNERKSDRRDAMMLARLARMDPTLLHPVEHGSQEAQQDMLQLKLRDSLVRARVALINAVRFSLKSLGYPVSNPSSERFHKLVLSEVPESIGEMIAQNVAAIAELTQRIKALEVSISRLAAERYPETIYLQQVSGVGPITSLYFVLKVGTPGRFQRTRDIGAFLGLCPRRDQSGETDKELRISKCGDQYLRGLLVNAAQYILGPFGTDSALREHGLRLAQEGTARAKKRAVVAVARKLAVLLLTLWKSREPYESFPTMA

SEQ ID NO: 456891 - protein, 347 aa, unidentified
MRFYTNQHQFYCGIDLHARSMYVCILSHDGEVLLHRNMKAAPESFLKAVAPFRDGLVVAVECIFTWYWLADLCAELGIPFVLGHALSMKAIHGGKAKNDKIDSQKIAVLLRGGMLPQAYVYPAEMRATRDLLRRRTHLVRKRAELLSHVQNTNSQYNLPEIGKKIAYKANREGVAERFADPAVQKTIEVDLALITYDDKLLQELELSILKTAKRHDANTLYLLQTVPGIGKILSLVLLYEIHHIDRFPSVQDFASYCRLVKCSKESAGKRLGTSGKKIGHAHLKWAFSEAASLFLRNNPQGQKLLARLEKKHDKGKALSILAHKLGRAVYFMLKRKVAFDMDRFLQT

SEQ ID NO: 456892 - protein, 367 aa, unidentified
MKKVSTVAAQQIRNFSPVKLTIGLDLGDRSSWYCLLDEAGEVQVEKKVSTTQKAMKEVFSALPRCRMALETGMHSPWVSRLLAELGHEVIVAHARNVRLIGESRKKDDRMDARTLARLARIDPRLLCPVKHRSAKAQADLTVIRARAGLVRARTALVNTARGLAKSYGQRLRGCNVRNMNPEKAEGLSPELQAALEPLLACIASVSEQIREYNERIETLAQGSYPETALLKQVKGVGTLIALTYMLTLEDPHRFRKSRDVGCYLGLQPGRRNWGQSQPQMHISKEGDPYLRTLLVQGAQHILGPFGVDCDLRRWGLKLAERGGKSGKKRAIVATARKLAVLLHHLWVSGEVYEPLHNISRVPLPMTA

SEQ ID NO: 456893 - protein, 332 aa, unidentified
MTVLSEQSVLKKFTQDPSPAALNKFLTNTYPGAEYYSVYEAGFCGFWIHWELQNLGINNIVVNPADVPTMAGERLRKTDAVDSGKLARSLRSGELKGIYVPDSVATEIRSLIRLRDSLTKDQTRHKNRIKAHLRYLGIDIPEEFCRPGRTWTNRFVLWLKGLKLETKYGKKTLDLLIAQYEDLRGQQLKMMKELRVLSRTERFDKPLQFLMSIPGIGQLAGLTILSEVDDISRFKDAAHFASFIGMVPMCYSSGEHDGTGNITVRRHAKLRWLIVEAAWIASRKDPVLSAAYVEYCRTMKPSKAIIKIARRLVNRIYFVMKHQQPYVNCYVS

SEQ ID NO: 456894 - protein, 338 aa, unidentified
MTLYCGIDLHSNNSMVSLIDENDRLINEKRLDNDLEIITHHLQPYHEEIDGVVVESTYNWYWLVDGLIEQGYPVHLANTLAIQQYNGIKYTNDATDARYLAHLLRLNILPTGYIYPKATRHIRDVLRRRLLLVKQRTAQHLSLQSMIGRHTGRRLTSHQIKQLKREELADYFDHPASLFSAQHAFDLRQQLNGQIDAIEQFVLAAWPYPEQYALLTSTPGIGKILGLTILLETGPIERFASVGRYSSYARCVPSNKISNGKSKGKGNTKNGNRYLAMAFVEAAHYAAIWDSVIKRYYQRKCKKVPTMVAKKTVANKLTRACYHMLKNNEAFDVTRAFG

SEQ ID NO: 456895 - protein, 343 aa, unidentified
MDHFAGLDVSVKETSVCTVDDTGRIIREVKVASEPEALLEVLRNPAWHFKRIGLEAGPLSQWLFSALAEAGLPVICVETRHMRAVLKAQINKTDRNDARGIAQMMRVGLYRPVHVKTLRSQKLRMLLTHRKLLQSKAIALENDLRSTLRNFGLKVGMVGAVKFEGRIKELVENLPDLAVLVEPLLVVRRVLHEQIVILHRRLLDIVRNDDVCRRLMTVPGVGPVVALTYRATVDVPSRFKNSKAVGAVFGLTPSRHQSGESDRPGAISRCGDEMMRVMLYEAAQVMLTRTNKWSWLKAWAMKIARYRGMKKAIVALARRLAVIMHRLWVDGTEFRWTREVVAA

SEQ ID NO: 456896 - protein, 345 aa, unidentified
MPIVGGLDIHRKQITFDYLDTVTGQVQRGQVSPADREHLRAWLARFAGCEDVAFAVEGCTGWRYVAEELAAAGVTAHVAEPADTAFARGRKRHAKTDKTDSRHLRVLLEQGRLPECWIPPAQILECRALLEAYHDLRREHTAWIERIHAVFFHQGAPRLGEGALRTEHGLAALRQAAAVHLSPAGQLQVATALDMLAAIEARMDTLRQQLLHAARHLAGARALQARLYGVGPLAGLAMTCWLGGAGRFSSSRKAVRFAGLDVTVYSSDGKRSPGHLSRQGPEILRWVAYEAGKTHGRASAPGHDYYAAVKDRQDGKIAALSQARRLIRQACHILAELGDDALTAA

SEQ ID NO: 456897 - protein, 410 aa, unidentified
MTLYCGIDWATAHHDVAVVDDNGNVVARGRVSNDAAGFAQLLTLLAQAGDTAEHPIPVGIETDHGLWVAALRATGRVIYPINPLAASRYRARYAVSGAKSDATDAVLLANIVRTDAAAHRPLPADTELAQAIRVLARAQQDAVWARQQIGNQIRDLLKDFYPAALAAFDQQPAGGLARADARTILAAAPTPTQAARLTPARLRRLLTKAGRRRHLDRDIDRLREVFTDTYLHQPPQVETAMGIQLGALLRQFDAACTAADDLAEAAIAHFERHPDAEIITSFPGLGMLAGARVLAEIGDDRSRFADARGLKAFAGSAPITRASGKKTVVLHRHIKNKRLAAVGPIWALGSLRASPGARRHYDTRRAAGDWNHQAQRHLFNKFLGQLHHCLQTGQPYNEHRAFPPPLLLAA

SEQ ID NO: 456898 - protein, 343 aa, unidentified
MDHFGGLDVSVKETSICIVDDTGRIVKEVKVASEPEALLKVLGKPAYRFKRIGLEAGPLSQWLFSALAEAELPVVCVETRHMQAMLKAQINKTDRNDARGIAQMVRAGLYRPVHVKTLRSQKLRMLLTHRKLLQSKAIAIENDLRGTLRNFGLKVGMIGKVKFESRIKELVDNLPDLALLVEPLLIVRRALREQIIILHRRLLAIVRSDEVCRRLMTTPGVGPVVALTYRATVDVPARFRKSKSVGAVFGLTCSRYQSGEIDWSGRISRCGDEMMRVMLYEAAQSMLRSKKWSWLKAWAMQIARRRGMKKAIVALARRLAVILHRIWVDGTEFRWTREAVPAA

SEQ ID NO: 456899 - protein, 408 aa, unidentified
MEVVHPRCAGLDVHKDVIVACVRLVGPGGVQQEVRKFGATSAELLTLSEWLSDCRCTHVAMEATGVYWKPVWHVLEGNFELVLGNAAHIKNVPGRKTDVNDATWIADLLAHGLIRSSFVPPRPLQELRDLTRTRKQLVREVAQHTLRIQKTLEDANVKLSSVISDVLGQSGRAILDAIVVGESEPNVLAARGSSRLKASKEVLADALQGRVRDHHRFMIRSHLRLIDTIREEVARIDERIGEHLKSFRGAVELLTTIPGISDIAAHVILGEIGDDMSRFPTAGHLVSWAGLCPRNDESAGRRRSTRLRAGAPWLKTVLVQAAWAASRKKNSYFKAQFHRISMRRGPKKAVVAVAASMLTAAYHMLQRGVFYEDLGPNHFDRRDKDKVAKRLIRRLEELGLKVEVRAAS

SEQ ID NO: 456900 - protein, 398 aa, unidentified
MDLPVYYELETNNGNRDYRIQIGGHYMNYNTVYVGMDVHKESFTLCSCKYEDEKASHYQRTPASYKNVLRYLAFLRTIYGEDTRFVCGYEAGCLGYSLYHQLENFNVECVILAPTTMLEQRSKRRIKTDKRDAEIIARSLAQHNYSPVHIPTETDNQTKEFIRMRDDHKAELKKIKQQILAFCLRQGYQYDGSGNWTAKHVKWLRSLKPAGLYKEILDEYLLTYTILTDKLNRLDQRIEELASKEEYKESVSKLTCFLGIKTHTALSVIVEVGDFQRFVSARKFAGYLGLVPGQHSSGDDRNGLGITKAGNTHVRRLLVESAQSYTRGKIGYKSRVLRSRQAGNSPQVINYADRANERLRRRYYKMVLKDGKKYNIAKTAIARELACFIWGMMTDNIY

SEQ ID NO: 456901 - protein, 383 aa, unidentified
MNTIVAIDVAKDTSSFCVMRNQKPHISGFPMTKHGFDQLLKVTGKIRGPAYFMESTGRYHLTLLNYLVSHHRDAFVVNPILVKNFSKANTLRKTKTDKIDARLIAEFAQQHAHSLKKAEYGLTEEIRSLARRREQIAEEIAKVKTQVKADLTVAFPEILSLNVFTAGMLRLLSEYASPQALLAASENTITDLLREHGKGRSCTISVDQVLALAKESIGIESYGPLARDSVKNLISVQDREKAVTEALLKCIREHQSKEQDILTSIPGIGNITSAHFLAEVGDITKYPRYQNLIAYCGTDPSLYESGSIQKRGHITKRGNSSLRKYVYLMASGVRTYSPYFRAYYDKKRDEGFPHRKAMVALMNKLLRTMFALLTKGELYIIPD

SEQ ID NO: 456902 - protein, 357 aa, unidentified
MGKSIRNFATVTRVGLDLAKRAFQVHAVDAKGEIVVARKLTRNQLIPFFAELPPCVVAMEACSSAHHWGRALIELGHEVRLLPPAHVKPYVRRNKSDQIDAAAIYEAMSRPGQRFVPVRSIDNQAALMRHRARELLAGQRTAALNALRGHLAEIGLVAPQGAQHAYGLKRMAADGFNENGEIVVPDCVRVALRSLVGQIDAIDEAIGAIDKEIAASVKADETAKRLMTIPGVGPVTASAITATIQDAGEFASGREFAAFLGLTPRQNSTGGKTRLGRITKMGDRYLRKLLVVGACATLRHRKGHNDALRLWASGMLERKTVKYKFNLTAVALANKVARIVFVLMTRGGQYDDRPVAA

SEQ ID NO: 456903 - protein, 349 aa, unidentified
MLIIGCDFHSRFQQIAMVDTETGELIERRLEHGNGEAKKFYAELQKPVRVGMEATGYAQWFERMLTRLGHELWVGDAGEIRAAMVRKQKTDSRDALHILDLMLQGRFPRIWIPSPAERDLRQLLRHRHKMVCLRTSVRNQLQALAMGQGIYRKTKLWSSRGRKELESLALDPWAGRRRQELLDILDRLDPSLAELDRAVMKEAENYPAALSLMEQPGVGPVTALMFVLTIGPIERFRRSKQVVSYLGLNPRESSSGGRQRLGSISKQGNTMVRFLLVEAAQTAARYDEELRRNYRRLRFRRGSAVAKVAIARKLAVRLFWKLRKQPSPVSPARMQGSSESLLVGGSLSS

SEQ ID NO: 456904 - protein, 308 aa, unidentified
MEHYAGLDVSLKEISICVVDGDGKTVARGACPADPEGVAGWFRNRSLNPLRIVHESGMLSIWLQRGLARLGLPATCIDARKAHKALSARLNKSDAADAEGLAQLARTGWFTPVHIRMTGISQGRQRQAFRDQLAAAGEANPVLRVIADGFIVAHDTLCQAADDLDKAVKRKAKEHPVARRLMSIPGVGPVNALSFIALVDNPNRFSRTSDVGAFLGLTPRRHQSGEVDWSGRVSKCGDGAMRGLLFEAASCVIRQVKRFSPLKSWAVRLAGRRGIRKAAVATARKIAVLMLTLWKSKISYQWTKEATA

SEQ ID NO: 456905 - protein, 342 aa, unidentified
MVAFLIIVLKNKVMEKFQHIVGVDLSKKTIDMVCHQNRKYLQISNDKAGFKQLLLWFKGQSIDVSKTMLVMEHTGLYSFCFEKFLHEQSIRFTKVSALAIKNSMGLVRGKSDKTDAQRIACYGFEKQNVLQLQTPANEATQRLAMLLSTGERPVKQKAGLLNSLEEYRNIGLSGQDLIMQTQTKLVEQFKKQIDRLEKEMDAVIKSDEALQHNYELLLTIKGVGKVAAITALVKTDNFSRFGNARKFACYCGTAPFEHSSGSSIRGKTRVSQADKRMKTILDLCAKSAIQYDRELREYYQKRVAVGKSKMSAINVVWNKIIYRMFAVIKRQTPFIENYLHAA

SEQ ID NO: 456906 - protein, 393 aa, unidentified
MKDPYANVTAVGMDVHYRFTTVTMRDANARVVRRERLDHRDDSALRRKLKQWPAGVPIVLEASFGWAWLTDLMLELGLRPQLSNCWKLKQMRKARGWAKTNKKDADLLSLLPFEAGDWWKVWMAPPAVRDRRERMRHRSSLVAMQTGTKNRISGVLHRHGILHEFTDLFGVGGRRFLVELCRAGGTEERPFSVGAWTSLQSLLSLLDHVRWQLAGIARELRGQLDRSPLARRLDGIPGIGLILAYTLMAEIGQIERFESHRALASYSLLAPIANDTGDPDGKPPLGRRLGQRGNRTLKWAFIEAAHGAVRSGGKWRRLFDSVTEGGRRNRTRGYIKVARELVKVVYVVWSKQMDYTDTPPARPGRRVRSRGKSVLRDTRSGTGQPYRPMAAVR

SEQ ID NO: 456907 - protein, 408 aa, unidentified
MKTLHKRCAGVDVHKAEVVACLRLITNRKVEREVRRFPTTTHGLLELAEWLEKARCTHVAMEATGVYWKPVWHILDGRFALILANAAHVKTVPGRKSDVNDASWLADLLAHGLIRPSFVPPAAIQELRDLTRTRKQLTREVVQHSQRIQAVLEEANVKLCSVITDILGASGRRMLKAMIAGETDAHKLAALGSERLGCAPVALVEALTGRMREHHRFLLAQHLRTIEQLEETIRVFDTRIEAKLVPFRDIVERLKEVPGLGTTAAEVVLAEIGTDMSPFPSAGHLLSWAGFVPRLDESAGKRRSTRIRKGAPWLKPVLVQAAWGAARKKNSYFQAQFLRLKARHGAKKAAIAVAASILTTVYHMLRDGTCYRDLGPDYFARRNPAKIAARLANRIRNLGYHVEITAAA

SEQ ID NO: 456908 - protein, 339 aa, unidentified
MELYAGLDLHSRNTYIGILDKSFNRVFRKRVPNHLEHILQTLDPFQAQLKGLVVESTYNWYWLVDGLMDAGYSSVHLANPSAIKQYEGLKHVDDKHDAFFLAQLLILGILPQGYIYPKKDRPVRDLARKRMFLVQHKTAHVLSLQSLIQRCCAMKIRTNDMRHLTVKELEAWLEEEYLVLSAQANLDSINFLKQRIHRLEKAIRKKVKLKKAFHYLKTVPGIGDVLALTIMLEVGDINRFSKVGNFTSYCRCAPSRRLSDGKSKGHGNRKNGNRYLSWAFTEAAHLGRRYNERFRKYYNRKVAQANTSLATKALGNKLARICYYIMRDQVPFQEELFCH

SEQ ID NO: 456909 - protein, 369 aa, unidentified
MNKQCRLEATLVASAKELKDQKTPKAKRIVVGTDVHLRSYQAARKVDNAAIGAVANFCSETELLLYVDKQCEQAEEVVVVYEAGPLGYGLYRKLTARGVKCLVCAPDSTQQQRKRRKNNQIDARTLTSNLFNYLNGNEAALQLVRVPTEAQEQARLASRQHDQLIEERKRLGAKGNALLLSQGFGSWKNWWRPKAFSRLEQLLPAWLFKMLQTWVDLLRALDEKIQAAKAALAKRCSGPRPKGAGANSLVQLQSEVLDWELYANRRKVACLAGMVPSEWSTGDDQRRGSITKVGVPAIRRIITEMVWRIIQFQPQYPPVQKWQEVLRGTNRTLKKKAVVAIGRQLMVDLWRMETGRVTAEELNLVMVGA

SEQ ID NO: 456910 - protein, 350 aa, unidentified
MKKLSKVGKPVGETIGIDVGDKVSRYCVVDAEGEVVEEGTFRNQASSIEKHFGGARRRIALEAGGQSAWIARELTGLGHEVIVANARELKWITRSDSKNDAVDARKLALLARADVRLLAPVEHRTAGQQAEIGVVRARDAILRARTLLINSARGIAKGFGVRLPKSITATFGKRALADLPAMLGPALAAVLEQIDALSHRIAGYDQQVGKLAAAHPEVQRLTSIPGVGPLTAVTFTLTLGRAERFAHSRDVAGFLGLRPRQRQSGARDPQLGISKSGDPYLRKLLVQCAHHILGHFGKDSALRQWGLAKAEGGKKATLRAIVAVARKLSVLLHHLWVTGESFKPFPQTAA

SEQ ID NO: 456911 - protein, 386 aa, unidentified
MGVIIGMDPHKRSATIEIVDEAAAVLAAGRFATDKPGYDGMLAVGRRFQDRVWAVEGCNGIGKHIAHRLVHDGETVVDVPPKLSAQVRVFATGNGRKTDPVDAHSVAMAALRSPGLVRVQVDDDLVVMGMLADRRDELGRARTQVANRLHRLLLELFPGGAKRFLSAQQARAMIATIRPRDLPGKTRRRLAVELTGELEAIDKKIKAIKKELTELVTARGSTLLELHGIGPSSAARLLADTGDIHRFADRDKFASWNGTAPLDASSGSQVRHRLSRAGNRRINRALHIMAVVQLRNQTQGRAYYNMRKAGGMPSMMAMRALKRRLSNVVFARMLADQKRREAAGPGGHSGTTPDSSVTNLTPDIGSSDKPRPGPATQSRTPVSTAS

SEQ ID NO: 456912 - protein, 341 aa, unidentified
MRYVGIDVHQRMSAVCILDENGKKEKALTVRGNWSKLFKAVEAEREAGPVAVCYEASNGYGFLYDHFSRMAERVVVAHPGQLRLIFRSKRKNDRVDAEKLAKLLFLDEVPPVYVPRVDVRAWRRLITFRHKCIAERTRVKNRLRGLLRRNGIEIPEWIKLLWTRKGLAWLAGLEWPEEGLALERDILVEELHSCGERVGRIERHLNATAKSHPGVQILMTIPGVGPRTAEAMVAWIDNVNRFARIKQIGSYFGLVPSQDSSAGFNRLGHITRQGPGVVRMLLTEAAWQAIRRAPPVQAFYQRVQRGDPNRRKIAIVATAHHLARVMAAMLRSGEPWRKAAA

SEQ ID NO: 456913 - protein, 466 aa, unidentified
MQPNRRRSLGKPRVSPTVFDRLNPHVAGIDCGSGEHFVAVPPDRDPHPVQSFPTFTSDLLRLADWLAACRVTSVAMEATGVYWIPIYEILDARGFEVLLVNARHFKNVPGRKSDVSDCEWIRELHSVGLLRGSFRPTDAIVALRAYMRHRQTLVESAGTYTQRMQKALVQMHLQLPLVVSDITGVTGLRILRDIVAGQRDPQHLAAHRDARVRASTADIVAALTGHDRPEHLFVLQQNLELFDACQAQLAACDRAIDAHVQTLTAQRPPPVTPLPDPRVTKKPHDHQPRFEIRTPLFQLTGGVDLTQIDGVAPYTALKLISEIGLDMTRWPTEKHFTSWLSLAPKNKISGGRLLSSRTPPSANRAAVVLRMAAMSLGRTQTALGAFYRRLAARIGKPQAITATARKLAALVYRALKGELVYRDPGADAYDIQQRARVLRRLRQRAATLGFSLVNRDTGEILAPAIP

SEQ ID NO: 456914 - protein, 372 aa, unidentified
MKEETAGHPGVVGGVDTHKDLHMAAVVDEHDRVLGSECFATTRHGYRQMLAWMRSFGELLRVGVECTGTYGAGLLRYLQHAEVTVLEVTAPDRSDRRKRGKDDTLDAENAAHAAFAGVRTVTPRTRDGMIESLRVLKVCRKTAVAARRVALQLIHNTVVCAPDELRESLRTMTRMQLIRTLAAWRPDLSDYRNLTSAYRITLKSLGRRYLELHDEIADLDVMIAGLVDELAPDLVSRNSIGYESAAQLLLTAGDNSERLQSEAGFAALCGVSPVPASSGKVTRHRLNRGGDRAANSALHIIAIGRLRTDARTKAYVERRVSEGHSKLEAIRCLKRYIAREVYYVIRKRNRQIGQVQVASKGSVPDDRQAFAI

SEQ ID NO: 456915 - protein, 353 aa, unidentified
MNQYYVGLDVHKASICIAVLNADGKLVMESVVETSAATILDFLKALRGNVKVTFEEGTHAAWLYDTLKQTTATVIVCDPRKNRLLQDGNKSDRVDARKLAQLLRAGLLSPVYHGEHGTRDLKELVRSYEYLVEDSTRVMNRIKALYRGRAIACAGVDVYNLRQREGWLAKLPEAGVQARAQRLFSELDHLTGLRREARQALVVECRRHPATKLLLAVPTLGIIRIAQLLASVVTPHRFRSKRQFWSYCGLAVVTKSSADHHIVGAQVHRKKRTATTRGLTQSHNRTLKYVFKSAALTASRCEPFKAWYAELVERGLRPELARVTIARRIAAVTLAVWKSGEAFDADKLIKHEA

SEQ ID NO: 456916 - protein, 312 aa, unidentified
MRACCAGLDVHQKMVVACILKGPLEHKPKSEIREFSTVLAGLLELQDWLSENGCIDVAMESTGVYWKPIYNVLESTCDITLGNARHIKNLPGRKTDISDARWISELHRSGLIRKSFVAPKAIRELRDLTRYRKKLKGYETSERNRIIKILEDANIKVSTYMSDVFGASGRLMLQAIIHGEVIEPSHVADLAKGKLRHKIPELTQALNGRLTKHHRYILRQSLDHLIFLEHQIAEIERDMEQYFIPYQKEVALLRTIPGIGHHVAQVVLAEIGTDMSIFPSEAHLSSWAGLSPGNNESAGKKKVPECLRAIKP

SEQ ID NO: 456917 - protein, 447 aa, unidentified
MALDVATKTDKTPVLGRMLSKYVGRKTSSIENDITKARNHSRQRGNIMRVVFGIDVSKASSEVAILTNGEKVHGYTIPNDAIGFNRLLGDLKTVHQPEIVFEATGVYSRRLQTFFEDNSYAYTRLNPLESKKQLDNLRVRKTDKIDAEKLAMSQFILNRKPSYVQEALYQELRDLSRFYQNLTEDIVCAKNRLHKVLQITFPELENILSAPTGEQYWNLVITFPCNSFVLELDDATLTAIIRQSTSKRISEKRVTYLVDKLKKLANQSYCAVKKTSPMLEEVKYYAGELLRLSEYRQGVLEEMVTLAQPLPEYEILLSIPGIAETTATSIIGELGDIRRFHSANQINAFIGIDLRHYESGNFLAKEHITKRGNPYARKILFKCIHNIASASHTNPCHIADFYEKRKRQSQVTSTKPHTIASIHRLIRTMYYLITHNKLYDYTSTQNR

SEQ ID NO: 456918 - protein, 336 aa, unidentified
MKKLHNLRIIIKLVVTTPLTTIALLMSADEKELSHKSFDNTPTGIQSLLDWIAGYHLSLSKLLFCAENMGSYVTELSVSSVSMGFSLALVCPLTIKKSIGLQRGKNDRIDAKRIANYAVLHYRKLELYKLPDKDLVRLRGWIIIRDNLVKQKVSSIKLLETFSQMAKLADVTESISFLEEQLKSIKERILEVEEDMEQLIAASTSLYTNYLLLRSIKGIGIINAIVLLCVTDNFQRFDNPRKFACYCGVAPFEHTSGISIRGKTQTSSLANKEVKVYLTRAAITAISWDPQMKAYYKRKIAEGKHKAAVINAVRAKIIARSFAVIRRQTPFVTLAV

SEQ ID NO: 456919 - protein, 409 aa, unidentified
MLYCGIDWSWEQLTLFIIDDKGNPIKDFVINNDLDGFMYALSTIRHLCKEHDIIFAIETSNQRVIDFLISYDYKVYLINSNSMDKFRRRYKTSGVKSDSFDAFVIANVLRTDTSTLNTITADDQLTQELGMVLRDRESLVELKTRLSNQLRDSLRQYFPQALNLFNDISCIVSLQFLEAFPTHCDAQRATKKQIQSVLRENGYYSEKKLREIARVLRKKQFPPRANSIRAKKEFTLFLVSMIKPLIRQIKAYDEMIESLLEKHPDTELFLSLPGVGNNLAGGMISALGDDRSRFDSAKQIQSLGGTAPITKSSGNYRYTQFRFSCNKTLRKTLHQFAFSSITKSLWAKNYYNKKRSEGKTSSHAFRCLANAWVRVIFAVWKNKTVYDENRHLASVSRHMMSQNYVLALT

SEQ ID NO: 456920 - protein, 345 aa, unidentified
MTEAYDGRQVVGMDLHRRRSVLVRMTMDGRKLETARIVNGAAALRAVIARAGTRPLVVVEATYGWYWAADVLEAAGAEVHLAHPLGVKAFSYRRVKNDERDCADLADLLRMGRLPEAWIAPPPVRALREVTRYRHKLVGQRTSCKDQVHAVLAKCGVPVAGSDIFGRGGGIWLDGLPLPQPYAGKIASLRALIGVLDSEIARLEDQAAGLLAGHAGYAAIRQLPGIGPVLGAVIAAEIGDITRFRAPGQLCSWAGLTPRHHESDVKVIRGHVSKQGSRMLRWAVTEAIQHQPAGTRPQQVKEAIIARRGAEARNIAKTAAARQLLTLVFYAMRDGYLRRAAGPAA

SEQ ID NO: 456921 - protein, 344 aa, unidentified
MHNKNYISVGIDVGSAFSFMTILAPDETVILKPFKITHNNKDSLERAVSEIKKAEELYSLESRTFLESTGIYHFPLFCYLVDCGFNASIINPIITHSTKNGNIRKVKNDKIDSKGIAKLGLSKDIPVSQFPAKLVLELRSLTRKYYDLTDERSAHINKLKGDLHTVFPQYLDVFCDVTGKTSTMILRQYGTPDKILRGHKKTMIEKISKASRKGLAKASERYEKLCAAANAAKTFGCQIDSIYFNIFLTLDLVEKLDSALDSILNRIRQLITFNKNEKFIQQIKLLNTIPGVGFLTAVTIMCEIGDFSAFRNPKQLFAYFGLDPEVNESGKFVGTQLHLSLIHI

SEQ ID NO: 456922 - protein, 382 aa, unidentified
MKQAPPTVSAKLTAQSFISVGLKGGAMAPIYIGVDFHARQQTICYLKTETGELVISELKHQNKEQVRAFYQQFQEPVIVGLEASGYSPWFEALLEQLGCEVWLGHATEIRRRARWRQKNDRRDAELIWDLMVHDEFPRLHQPALSSREVLRMLRYRQKLIKLRTMTKNSLQAIALQAGLAKGPQLFTAAGQEQFKAAEMSPVLQWQRDHWFELLKPFNQQLLETVVWFKAQSKDDVQIQRLLTHPGIGLLTALCILHTLQPVSRFRNARKVAAYVGFDPVERSSAERQHFLGISKAGSRMLRYLLVEAVQTAVRHDEDLKRFYKRLAERRGRPKAKVAAARKLLIRAYIMLRDEIDYAEFRRRAVAARLARHGQGPTKCPRY

SEQ ID NO: 456923 - protein, 318 aa, unidentified
MGDEKLFVGIDVGKYHVEIALSDEGDVSRFKNDDEGIEGILGLLKGRNVGLVALEATGGYERQILASLLGAGIPAVAVNPRQARDFAKGLGKLEKTDAVDSRMLRRFAEVVRPPAPPKVSAELEQVQDWLTRRRQLIEMLVAEKNRTQHAKQGVLKSIREHIDWLRKRIRDSEKDLRDILSHAPEWNAEVELLDDIKGVGRVTALTMLAAVPELGTLNRKKIAKLVGVAPLARDSGTLRGKRTCWGGRADARACLYMAALVAARFNDTIRSFYRRLVFAGKPKKLALVACMRKLLTIFNARIRDHRATATTARPVGAI

SEQ ID NO: 456924 - protein, 323 aa, unidentified
MFYLGVDVSKKKLDCMLLNSTNGKLKSKSLSNTKAGIEELIGWLAENKAPEAHVIMEPTGVYHEPAALALTDAGLKLSLVNPAQLRQFAQGLGVKNKTDKADSTVLARYGDTLKPDAWQAPSQSARQLKALLARRDAVAEDLQREQNRQEAVDFGISPEQVKQSILQSIAFLQGELRRLEQMIKDHIDSDPELRNKRELLETIPGVGMRVSSNLTALFAAKTFTSAEQLAAYLGLVPVQWESGSSVRGRPRLSKAGPSHLRKLLYMPAVVARQWNPHIKSFSDRLIAKGKTKMAVIGACMRKLAHLCFGVVHTGRPYDPNYAM

SEQ ID NO: 456925 - protein, 429 aa, unidentified
MIDIEETDEAVDLVERVCALDIGKAALTVCIRVPHDDKPGHRRQEVREHATTTRSLLDLAARLHAAGVTLVAMEATSDYWKPAFYLLEAEGFTCWLLNARHVKNVPGRPKTDKLDAVWLAKVVERGMCRPSFVPPAPIRRLRDLTRYRRTLIRERTREKQRVEKLLEDAQIKLSSVASDIFGVSGRHMLQAMIAGQRDPKVLAQLARASMRAKIRQLEEALTGHFDDHHGFICQMMLERIDELTSRIEELTARIDEQVAPFAAQVAQLDAVTGIGGVCAQELIAELGVDMAVFPTAAHLVAWAKFAPQANTSAGKAKTAATGKGNPWLAASLGEIAVTAGRTNTFLGERYRRIAKRRGKQRALVAVGNSVLTIVWHLLADPHASYCDLGPDFYQSRSSRHRQEHNLIRQLQQLTGKTVTLSPRPATPAA

SEQ ID NO: 456926 - protein, 337 aa, unidentified
MEYYAGLDVSMKETHVCVVDRDGDVALETNTSTLPEAIAAALAKAPDCQRVVLETGRMAPTLYHGLAALGVPVICIESRQAHLALKSLATHKTDRNDARGLAQLAHTGFFKPVHVKSLPAHAVRALILARKKLVGQRVTLENQIRGLAVVFGLRLPRGLSPAFAEQVTSGSQGVAGLACAMAGLLTARNAVLEAITAIDRDMKRLARASEACRRLMTIPGVGQLTALAFVAAIDEPERFRRSRDVGAYLGLVPRRYQSGEVDYTGSISKCGDRRVRTLLYEAANVMLTRYRGKLALKEWALDIGRRSTMRKARIALARRLAIIMHAMLRHGTEFKAA

SEQ ID NO: 456927 - protein, 350 aa, unidentified
MNKVKMTYAGKKVYVGMDVHKKTYSVTAICEGEIVKRDTMRADAQGLIRYLKKHFEGAVIESVYEAGFCGFVLHRALKAAGINNIVVNPASIEVAANDKVKTDKRDSKKQAEQLSRGALSGINIPTAEEELARVLTRTREQVVEQRARVATQVKSKLHYFGVMAFDDDREVTELYLKELEEKELAEELKFGLGLLIGQWRFLTEQLKKVWQKMKEQASKDLALEKVYRSVPGIGPVSSRVLSNELGNLSERFANERALFSFTGLTPSEHSSGENVHKGHISRQGSARIRKYLVEIAWRAIEKDKALTDIFARIAKTRGKKRAIIAIARKLIGRIRACFVQGTTYQLGVIA

SEQ ID NO: 456928 - protein, 353 aa, unidentified
MTTMTGRRARVTAGVDTHRDVHVVAALDERGGELGVESFAADAAGYRQTLTWLAAFGTVELVGVEGTGTYGAGLARFLHTKGVAVVEVSCPNRQRRRSHGKSDPVDAVAAARAAQSGDAAGQPKTRTGSVEAIRALRVARRSAGHARIDAVNQMRALLVTGPEELRDAFRRTTVWRMVTAAVRLRPTDPTTATGATKFALRELARRVQALEVEIDRLDAVLRPLVAATAPKLVALHGLGTDTAGALLVSAGDNPDRLHGEASFAHMCGVSPIDASSGVVVRKRLNRGGDRTANEALWRIVMVRMVSDPRTRLYVERRTKEGLSKKEIIRCLKRYVAREVYPLLAGPQEPLDNR

SEQ ID NO: 456929 - protein, 457 aa, unidentified
MSRDQAQSKPAGLPIIHPFAAGIDIGSRFHVVAINPDISDEPVQTFQSFTSDLVRMADWLVAMGCIQTVAMESTGVYWVAAFEVLESRGLEVILANARETRSVPGRKSDINDAQWLQRLHACGLLRASFRPGKEIAELRAYLRARERHTDYAAAHIQHMQKALTYMNLQLHHVIATITGVTGMRIIRAIVAGERDPDKLAAMRDVRCKESLATIRAALVGNYRPEHVFALKQALALYDFYQNCIEECDREIEKTVARLNLCRPAPEVPLPKAKHRSRMPSDPDFDVRTAMYQLAGTDLTQIHGIGPFLALRLIAECGTDLSRWPTAKHFTSWLTLSPGCKISGGKILSAHTRKTSNRVTVALRLAAVAIGRSNTALGAFYRRLAARIGHAKAVTATARKVAVLFYNAMRFGMDYRDPGADYYEQQYRERVIKQLCRRAALFGFELQLQPAPSVEGVS

SEQ ID NO: 456930 - protein, 366 aa, unidentified
MKKVSTVQVFGNEIFKEQKLTIGVDLGDRWSFYCVLDEAGKIILEQKVSTTPEAMKQTFGKIPRSLMALETGTHSPWVSRLLTELGHKVIVAHAQKVELITKSNRKDDRHDARTLARLARIDPELLGPVRHRSAKAQIHLTVIRARAELVSARTALVNAARGLVKSFGQRLPKCGTDQVNEKLAEGLSAELRDVLVPLLREVESLSQRIQEYDERMEKIAKEVYPEVSLLKQVKGVGTQIALTYVLTIEDPYRFAKSREVGCFLGLKPGRRNSGKSEPQKRISKEGDRYLRTMMVQGAHYILGPFGEDSDLRRWGRKLGERGGKNAKKRAVVAVARKLAVLLHRLWVNGEVYEPLHNSQKAMRAVA

SEQ ID NO: 456931 - protein, 419 aa, unidentified
MFPRVDSACGIDVHRSKLTATIIDASGSYETKNYSTQLPDLIRLRDWIVENNCSRVLMEATGVYWVPVYTILEPAVPTFVANPYFIKYVPSSKTDTKDAVWIAEICLDGHFKASYIPDERVRDYRDLCRSYKNLVKERTRYRNRIHTILSRAGIRITPVISDLFGKSGLIILDGLLKRKTFDEIFAQLSHPSIVKKREKIEAAICGELTENDIFGIQSAHRMLQEIEKEIDIHLSRMVDLFENDSEQIKILLSVPGIQLQSASMMLAEIGDVTRFPSAKQIVRYAGLDPRVSESAGKTRMGSISKQGNKHLRTYLVECASALSRSKDNMFRQFYERIKRKKGHKQAVVAVARKLLTIIYHLLTNKEMYEDPLMTKPKQIKIPKLKTRQPIDLTNASQMLRSVMARIAVKTKTIDVYSHT

SEQ ID NO: 456932 - protein, 340 aa, unidentified
MTITTIGIDLAKNVFAVHGVDQNGKTVLVKSRVTRAALPGLIAGLPPCVIGMEACSGAHYWARLFRQYGHEPRLMAAKFVSPYRMAGKSGKNDAADAQAICEAVRRPHMRFVPVKDESQQAMQCLHRTRQGFIEEKTATYNRLRGLISEFGVIAPQSTDALRHMVSAQKNSLPLQVQQCVDDLLEHVDRIEANITEYDQILSRMARTDHRSQRLMKLKGVGPTTACALVACIGNAHDFKNGRQLAAWLGLTPSQYSSGGKSKPGRITKAGDSYLRTLLVQGARSVLIGAEKRTDSFSRWVCSLVERRGYWRAVVAIAAKNARLCWASLHYGDDFRLYSAS

SEQ ID NO: 456933 - protein, 354 aa, unidentified
MNDAKYIGMDVHSATISAAVRDSSGNLVMEATLETKAETILQFIRGLGGSLHVTFEEGTCAAWLHDLLKPHVTEVLVCDPRKNALLKVGNKNDLEDARKLSELLYLNKLSSVFHGETGIRTLRKLARSYLTITRDLTRVMNRLKAIYRGWGIACTGQQVYAPRYRAEWLAKITEAGVHRRAEIYYQQFDVLARLRQEARRELLVEGRKHFATRLLQQIPSIGPIRAALLIALMQTPHRFRTKRQLWAYCGLALKTYTSGEYRFVGGQLKRKKAVAIRGLNKNHNHDLKNIFKGAATRAAATAGPFQEFYEARIASGMKPPMARLTLARKIAAITLLVWKKGVCFDAEQLKQQAA

SEQ ID NO: 456934 - protein, 338 aa, unidentified
MKGFCISLDVSKGSSFYQWFKGFDEPITKSKKIEHNLEGFKELLKLKETIRKEYNEDYVVVFESTGIYHRSLQTYLDEHNFKYTIINQLLSAKVSKSDIRSTKTDAKDCASIAKVFFLKELRIYSKIDEIYDDLKEKSRYYDFLMDEMKRWKIEFRRLFDIIYPGFDRVYDDLYGDFIQTFLLEYSHPEIIRKRRLDTIAKFLEKHTCHKEAYCIRQAQTLKEYVENCASGCSSKSYLVRQFDTVIHNLNAQIKHLEIVLEEIVELAKTLPNYDSIRSIPGIGNNLAGRILAEIGEVNRFNNASQLVAYAGIDPQIYQSGQISGLHLKISKKGNKKLR

SEQ ID NO: 456935 - protein, 413 aa, unidentified
MDVLYPRCAGLDVHKDTVVAAVRSAANGPANTEVRTFDTTTPGLLGLSGWLAECGCTHVAMEATGVYWKPVWHILSDGDVTLILANAAHVKNVPGRKTDVADAAWLADLLAHGLVRASFVPEAPTQAMRALLRTRKQLVREQASHAQRIQKTLEDANLKLASVLTQVMGKSGRAIIGALIAGERDPDALLRLVQRGVKAPPERLRAALTGRVTERHRFLLRLHLRQIDALEAAIAEIDQEVDRDLDPFRQAVRLLRTIPGLSDLTAQVIVSEIGLDMSRFPTAGHLISWAGLCPRNDESAGKRRSTRLRKGAPWLKTTLVQCAWAGTRKKGSYLQAQFQRLRHRRGPKKAVCAVAASILTAAYHMLRDGTFYQDLGPDHLRRATPEVQASRLARQITKLGFTCTIAPEQKVKA

SEQ ID NO: 456936 - protein, 366 aa, unidentified
MRKLSTRRVMGSKILKGHQLTIGLDLGDRWSFYCVLNELGEVLREEKLPTTPEAMKRTFEKFPASRIALETGTHSPWISRLLTELRHEVIVAHAQKVQFITKSSRKDDRHDARTLARLARIDPQLLGPIRHRSAQAQIHLTVIRARAELVKVRTALINAARGLAKSYGERLPKRGTQQVGRELAARLSTALGEVLEPLLREVESLNERIREYDQRIEQIAKQVYPEVALLKQVKGVGTQIALTYLLTIDDPYRFSKSRQVGCFLGLRPGRRNSGQSEPQKKISKEGDRYLRTMMVQGAHYILGPFGEDSDLRRWGLKLAERGGKNAKKRAVVAVARKLAILLHRLWVGGEVYQPLRNAHRAMTAVA

SEQ ID NO: 456937 - protein, 380 aa, unidentified
MASMHDSVRFKTTVYAAIELSKKSWVVAIALPDRDRPSIHRIAGGNLADLIGRLRKAAGEKQRIVVCYEAGYDGFWLARSLAKIGIDCRVLDPASIQVNRRARRVKTDRIDSLALLRALIAIDRGERHVCAVVRVPTVEEEDARRSHRERQRLVRERTGHINRIKGLLFAQGIRGIEPKRRRTRIDFGKLTTAEGRPLAERLRRELEREYQRLELVQSQLRIVEKERDTADAQDPAVERKRELLCALQGVGGASAAILAREVFARPFASRRQLGSYLGLTPSAYDSGSTTRCQGISKAGNSWARRVLIEVAWLWRKYQPGSPLSHWYARKTADQSPRIRRIMLIALARKLAISLWRYVETGLVPDGAVMAKTTPHMATAM

SEQ ID NO: 456938 - protein, 345 aa, unidentified
MKITTIGLDIAKNVFHMVEISRSGRVLNRKMLRRAQLLAFFANHDACVVVMETCSGANHWARQFTSMGHQVKLISPKYVKPFLRGNKNDFNDAEAIAEASQRDNMRFAPVKTVEQEDIQALHRQRERMKKSRLALSNQIRGLLAEYGIVMNRGIATARRLLPEILEDAQNGLSAMSRDMFAELRDELLDLDQRMTRCERVIKAVNKSNPHCQRLDAIVGIGELTATATYAAIGDGRDFKNGRHFSAWLGVVPAQHSSGGKTQLLGISKRGNTYLRTCFIHGARSVLLASAGKTDALSVWAQSVKARRGHNKACVALANKLARIAWVVASGKEYRAAVGVETKAAA

SEQ ID NO: 456939 - protein, 422 aa, unidentified
MKSSTARKLRQVPVGYLLVGVDPHKKKHGAAAMTQDAVVHTKFKFANSREGYEAALERVRAQMVKTASCGVIFAIETGGHYWRNFAYYLEDKGVPFRLISQFTLKRRRDGKDLSRRKNDFRDAEMAADLLRVGDFTETRLPQGVYAELRSAYSCYFRLVKERTRISNLLKGLLDGLFPEFTQVFKDPCAQTALAVLSLCPVPGALARMTQDELICSFKAAYPQQRVMRKKLLALHRVAHTSIGISSGAASVALEVSSVIERLQLIRQQIGKVADLLSTLVDRTEEGKYLLSIPGVNYVSAAGLLAELGPMKAYRNAKQLTKMAGTNPIESESGGKRASRTPMSKKGRPRLRYCAWTAVIPLLRHNPDFRAWAKRLRERPVQANPLNGKEIVGAVLNRLLRLAYALVRKQTFYRLPGLTAVAS

SEQ ID NO: 456940 - protein, 346 aa, unidentified
MTYYAALDVSLRSVNICVIDDQGEIVVETKLDSEVTDIIAYLDSLEMEIASVGLEAGTLCQYLTYGLQSAGFEVVCMEARQVKAALSAMRNKTDKNDARGIAQLLRTGWYSKVHIKSMASHRIRVLLSSRKAVLCKCIDLEQEIRGLFKVFGIKLPPKLGHGAFDAAVRAIIETDATLSFALLPLLEARLVLYHCFRELDNRTRNMANTDPVCQRLMSAPGVGFITALTFKAGVDDPARFKRSRTVAAHFGLTPRRFQSGEINIDGHISRCGDRNVRSTLYTAANALMTRSSRWSSLKAWGMHKAKTRGHRRAVIAVARKLAVILHRMWLDDTQFNWGTEGCKVMK

SEQ ID NO: 456941 - protein, 410 aa, unidentified
MEVIVERPAALDVHKAQATACVRVPGQDGRVEAVQEFKTTVRGLLVLRDWLKAHKVTQVTMEATGVYWKPVWHVLEDDFELLLVNARHVKQVPGRKTDVADAQWLCRLAEAGLLRASFVPPKPIRELRQLTRYRKAQIAERQREANRLHKALEDTGIKLDCVASDILGVSGRAMLDALVSGTTDPVVLAELSKGRLRAKIHELTEALEGRFEDLHSLLIGSILAHLDFLDTQIEALSEAIEAKLAPFATGAVELLCTIPGVGERTAQNVIAEIGVDMSQFPTAGHLASWAGQCPGNDQSAGKRRSGRTRKGSKWLNLALKEAAMGAIRTNDSYLQALYRRKKSQGGHNKAIGAVKHSMICAIWHMLQTGEIYTDLGPDHLARRNPQRQTKRLLAQLERLGHTVTIQEVAA

SEQ ID NO: 456942 - protein, 366 aa, unidentified
MSSVTPAAGPIHLGMDTSKNTIVVGILMPGDEVPVIDRIWNEEGSVRHLVGRLGDPAALRACYEAGPCGFELHRLLASMGVACDVVAPSLIPRRAGDRVKTDRRDASRLARLHRAGELTPVRVPSAAEEAVRDLVRVRAALLADRKRAQQRLTAMLLRHGRVWRSGSSWTQAHEQQIAGQRFEEPALAAALAHYRAGLDTRRAELDAIEAELAPWAGREPLAGPVARLGCYRGIAELHSLALAAEVVDWHRFPSARAFMGFTGLVPGEYSSGDKTRRGSITKAGSEPVRTALVEAAWAYRFKPAIGVTLRRRQRDAEPDTLARSWKAQRHLHAKYKTMTARGKPQGVAVTAVARELAGFVWAEMTS

SEQ ID NO: 456943 - protein, 416 aa, unidentified
MDAIVERCAGLDVHLDTVVACVLYGKLDIKPKKEVKTFSTTTKGLLELLDFINQKECTHVAMESTGIYWKPVWNILESGAFDLIVANAKKIKNVPGRKTDVKDAEWIASLLRCGLIEKSFVPPERIRDLRDLTRLRKELLDEVNRNKNRIHKVLQDANIKISSVLSDVFGETGKSILNQIIDNQCITEEFIYSLYEGRGKSKLKSTPMEMYEALNGKIRGHHVILLGMHNSNIVFLEKQINELEKEIDILLQKERDSLELLETIPGISKISASSIIAEIGTSMDVFKTEKHISSWAGLCPKNNESAGKKKRSGIKSGNNWLRSMLCECAWSATKKKDSRFKNKYWSMVPRMGRKKALIAIANMMLRLIYHLLKTKSTYKELEIQYFIDKDKRREDRIIKELKSKGYLVEKDSLQMA

SEQ ID NO: 456944 - protein, 364 aa, unidentified
MIIIPPNATVLALDVHKFSITSAVLEPGSDSPLVDRLGSDQESIRRLVARLGHDSPISACYEAGPTGYELARYLNALGLHCDVVAPSLIPIAPGDRVKTDRRDARRMARLLRAGQLTAVNVPSPAEEAVRDLCRARADMVIDRVRAQHRLDRFLLRHGRVFRDGKNWSAKHEVWLAGQRFDEAAMTATFGHYRGALAAREAELRAIEAELTEYCERAPFATAVSRLSAYKGVTELGALTIATEVCDWRRFPTAGAFMSFCGLVPSEHSSGQQIWRGGITHAGNWHLRTHLVESSWVYQRQPYVGVTLQRRQRDASPELVARSWRAQLYLARKFRRLDEKKSVRKVVVTAIARELAGFLWAEMTA

SEQ ID NO: 456945 - protein, 343 aa, unidentified
MKISRVGVDLAKNVFQVHGVDRSDRPVLRRQLKRSNWLRVLMERLEPGCEIGMEACGGAHHWARELERRGYRVMLIPPQFVKPYVKSQKNDATDAEAICEAMSRPGMRFVGIKTLEQQDIQSIHRVRSSLIGQRTAQANQVRGLVAEYGLVAPKQLGPLRKAIPDWLEVAENGLTDRFRALLHGLWDALLRLDERIAGLDHEIDVISNTHPDAKRLKQLRGVGPLIATALVARFGDGRHFHRGRQAAASVGLTPRHHGTGGKNRLMGITKQGDPYLRSILIHGARSVVSTSHRKEDRLSRWATELKERSHMNVATVALANKTVRVAWAMLRNGTDYQPEFALA

SEQ ID NO: 456946 - protein, 361 aa, unidentified
MSSTVDRVVIGMDPHKRSATIEVMTPDEAVVGTGRFGTGRDGFAAMTKYATQWPNRVWAIEGCQGIGRHIANRLLADGEQVVDVPPKLSARARVFATGQGRKTDATDAHSIALVGTRMAGLHPVGNDEQLALLRILVDRRRSLGEDHTRMVSQLHQLLLELIPGGAKKNLSAAQAKALLAKVRPRDVVGKTRRRVAAELIVDLERVYQRSKQADKELTALVASTGTTLMDLHGIGPSGAARLLVEVGDITRFPNRAHFASWNGTAPIDASSGDQVRHRLSRAGNRQINRVLHIMATVQLRNPTEGRAYFDRKKASGKTSMEAMRSLKRRLSDIVYRQMVDDALTAGRRAREDTEERQLSPA

SEQ ID NO: 456947 - protein, 331 aa, unidentified
MEREYIGIDLHKAFFQACTMRETGERQWEGRFARTPEGIARFIARGVGPHQVLAVEASGPTWAFVEALRPTGARICVVDPRKTKLKAGFAAKTDRLDARRLADAVRRDSVVSIYIPPPAIRELREVCRGRHQVVRLRTRVAQMIRALLLRTDAGDPPTDRLYSPRALAWLAQVRLPPDADCSLRRLERLFRAVHVEATAADAAVRQRAAADPIAGALGAMVGVGPVRALTIRAEIGDIARFRRGPELASYAGLVPRVDRSADRGYTGRITREGSPWLRYVLVQAALNAMRRTDATGRWARRLAVRKGTYKARVALARVLCDEVVAHWPRSL

SEQ ID NO: 456948 - protein, 442 aa, unidentified
MNEEDRSRLEEFRQFRREVRGSKEYLLVGIDVAKDRHHAFFGTATGKTVFRRLVFDNNLEGFQKLLAQAEAMRGQEGLKKVVFGMEPTGNYHKPLGEHLIRCGREVVLVSGAAAHENRKTLDGRWDTNDTRDAANVADLMSQGKCLFYEFPVGALQDLRNLLSLKRRMKKEEQGYRVRIRNHLLAKYFPELDRYYEQSETTALAIVRWCLDPSEIAGLEYKRFFQLVSLSLARERSSQERRLQAIWKMAVDSVGCEAGPTVELEAQVMVEGLRRVRESLRQIDEKIHEICCQFPEYEVLLSIPGFGRDLAAKVLGAIGDPDRFQNGRQVLKTAGFDLNAERSGKSSERAVPVISKRGKADLRFALYQAALIASVKNRDFIGYYTEKLRGREREPGIKIKMRVKLAAKMLILAWTLMKKREPFDPTYLRAAGQAFSAGGRRER

SEQ ID NO: 456949 - protein, 350 aa, unidentified
MKICTIGIDLGKTVFHLIGLDEHGKVIAKKRCSRSQLLTYTANIPAALIGMEACCGSHHLGAALAAQGHQVRLIPPQFVKPFVKSNKNDYNDAEAIAEAVQRPRMRFVPIKTNDQLDLQALHRVRDRLVRGRTGIINQIRAFLLERGITFRPGRVYLRSHMAAILEDAELNLSPLMRGLLEQLWQEWKISESRIEEVTDQLGVLADQDTSCKRLQGVPGVGPLVSTALVAAIGNGSAFAKGREFSAWLGLVPRQVSTGGKPKLLGISKRGNSYLRRLFIHGARSILIRERKKYAFGDWMTQLESRAHANVVAVAVANKLARIAWAVLVKGESYRRIPTFSASNCEGNMAA

SEQ ID NO: 456950 - protein, 286 aa, unidentified
MRFSNDPAGLKSLCKWLGSVPVKVIYEATGRFHRDLEDTLSRAGHNTVKVNPSRARRFAQATGNIAKTDRVDAQMLAHMGSTLALEKTPVRSENMHEIKELHVARVALVKDRTACRNRLDTARNRIVISQLKARERQIDKQIAQIDAELIRLIKADPQLARRYEILTSIRGIGPVAAAAMIVDMPELGTLTPKEVGSLAGLAPITQQSGSWKGKARIHGGRSSLRTMLFMPAVIATRFNEPLRKVFLALQGAGKPWKVAITAVMRKLIVLANALIRDDRKWCENAP

SEQ ID NO: 456951 - protein, 341 aa, unidentified
MSIVILGIDLGKNSCSIVGFDANGTVVVRRRMRRDGVIAFAAKLAPCVMAMEACCGAHHMGRSLAALGHEVRLMSPEYVRPYVKAQKNDDRDAEGIAEAASRPTMRFVELKSEEQLDIQTLHRVRDRLVGERTSLTNQIRSLLLERGHVVAQGYARLRILLGELLDCGVGALSPRMVFLLGDMRERWAELDRRIAAFDAEFAAMARTDDRARRLTSIPGIGALNATALVAAVGGAATFNKGRDLAAWLGLVPRQVTTGGRPRLLGITKRGSRYLRKMLIQGARSAMPSLARSDTAVGAWLRALLARAHPNVAVVALAAKMARTVWALLRHGRTYQAASIAA

SEQ ID NO: 456952 - protein, 353 aa, unidentified
MDDHAKQEEVILGVDTHLDTHVGVAISQSSKFLGTYAAPTTQSGYLSLLTWARSFGCVCRAGVEGTGTYSAGLARVLREQGIEVLEVNRPDRSKRRLKGKSDPTDAESAARSVLSGVATAIPKIQSGAAEALRTISVARRSAVRAKTQGINQMRAILVSAPQDIRERLWKPKAEHCVAACSRLRDLGPTVLLQTLTTALPLLAKRWLTLAAELKELDASLETLTNVSAPHLRAQFGIGPQTAAVLIATAGDNPERLRSEAALAALCGVNPLPASSGKTVRHRLNRGGDRQANNALWTIAMVRMRSEPRTRTYVARRSAEGMSNKEIHRCLKRHIVRELYPLILAGLASVAEVS

SEQ ID NO: 456953 - protein, 380 aa, unidentified
MEKACGLDVHKGSVFACILDEQGKKVLEKRYGTLTPNLTELRDMLVEQGCGRVAMESTSIYWMPIWRVLESDFSLSLANPYFIKQLPGRKSDFKDAQWIAECLQKNSIKSSFVAGEIQQQMRQYTRQHRRLTKSRVRLEQQMDNQLQRCNIRFSNYVSNQGNNVSVRKIIKSIIAGERDPVKLCYLVHGRTLNRHGKDVITDSLDGIIGCADIEMLRQCMEQIDLLEKQQAACLHHLEELANRYFAEEISLLCTIPGIQKLSAMCILAEIGNDMSVFQKANHLVGWSGLRPRNEETAEKIKSRKILHGNKYLRQILVEISWSAARSGKSFLGRKFNILSLRMKSQKALIAITRKILVIIYNVLKTRQPFDPKRNIQALVA

SEQ ID NO: 456954 - protein, 354 aa, unidentified
MQYIAFDSHKRYTYAVVEEKEKGRVMEKRIEHRRGEIGAFLSQCEVGSPVALETIGSWYWIVDEIEAAGMLPRLVNARKAKMMIASSKKTDRLDAKGLNTLQRTGTLPTVWIPSSELRDIRELYRTRMVLTQMVIRLKNRILSCFSKYGISFDETSDAFNIKGRASLEAALEILPTQTCFAVKELLRQLDLLQEAVKEFEARMLQVQSNDPEIKLLQTIPGVGPILSYVIAYETGDIHRFPSASCFASYAGTTPSVHASGGKVRYGHTASDVNHYLHWAFIEAANVISMRHEVLRFRHTARLYERLRQAKGHDIAVGAVARHLAEATYWILTTKTAYREPNQNKQVVVVSSKEG

SEQ ID NO: 456955 - protein, 329 aa, unidentified
MSQNTIKTMQTNNTVVYAGVDVAKATLQLHLQGQQTEFNNTPKGLHQLCAQLQKAPTVHVVCEATGGYERALVKALHQEQIPVSVTNPARVRAAAQAQGQRAKTDPIDARMLTDYGQRYQPDPTPPTSATQDRLVALTQWLKQLVHGRALAKTQAEHHQDPFVGRQHAKLMTHLQSQIAAVEKQIEALLEQDAALKRRVDCLDEIEGVGPRTAWMVLAHLPELGRLNRQEVGALAGLAPWTRESGMMKGKSCIGGGRPEVRLALYMAALSAARCNPVLRSLYKRLRAKGKAAKVALTAVMRRLLTYMNHRIKALPSETATATAKKSKTP

SEQ ID NO: 456956 - protein, 358 aa, unidentified
MNSIKVIGIDLAKSVFQICVWMNDGSIAFNRKVSRAKLLDTIRQFPAGSIIAMEACATSHYWGRTFQSMGFLIRLIPTQHVKAFTHHQKNDANDALAICETALRPGIHFVAIKTVEQQDIKALRSARQLMVEQRTALANQARSLAAEQGVEIPVGIHILQQRLPDIIEDAEQLISPVLRQLLFSLLENIHSLNEQILSAEHSLAALCQQQPKYKVLMTIPGIGPLIAAAFLSEVNAGQFTNGRQLSAWCGLVPRQHSSGGKSSLSSMTKNGNRDLRTLIIHGARSVVHWAHKRDDALGIWLKRLTERRGKMKATVALANKMTRIVWRLLTEPTSFNIDRVILIKPRSALRFLFSPDYQ

SEQ ID NO: 456957 - protein, 415 aa, unidentified
MAEEIEWFVGIDWASQSHQVCLIDAHGECLGERAVTHGGAGIEELCDWLIARTGATPEVIGVAIEITHGPVVEALLERGFSVYGINPKQLDRFRDRFTVAGAKDDRRDAHVLADSLRTDRHAFRRLSNDEPVIVQLREWSRMADDLQQERARLASRMREQLWRYYPQMLELADDLAANWFLDLWSHAPTPAKAVRLRETTIERFVKAHRLRRWQAPEVLRILKQKPLSVAPGVVEAASDHIRTLTVRIRLVNQQLKAAHHKLDELCAQLVPSEENEPGQQCEQRDVVILRSMPGLGRIILAVLLAEVWQPLRRRDYHALRSLSGVAPVTRRSGKTCVVVRRYACNKRLANALYHWARLATQHDALSRRRYAALRQRGHSHGRALRTVADRLLSVACTLLEQQTLFDPSYEVAAGA

SEQ ID NO: 456958 - protein, 340 aa, unidentified
MKRYLGVDLHRNCFTVCTLGEDGKSELKKWSIHALGEFAQSVSAIDAVAVEATGNARHFCQALKERGCRLVVVNPHQFQVISRSVKKTDAHDAKTLAEFLAKDMLPEVRMKEDLPAEMASLLQTRDKLVKLRTTLKNKINNLLSARGILLPKESLSTEKGLAQVLQAEVGELPRVELMVLVEQIRHLNQGIAKLEATIKKQGPRLPGYENLKSIKGIGDIGGSTLLSAIGDINDFANEGKLAAYFGIVPRVANSNETERSGRITKRGNKLGRTALVQCALIAMRYSPYLANYYARLKAARGTGKAIIALARKFLGVIYKTLKNGWVFEDFPRFVLAPAGG

SEQ ID NO: 456959 - protein, 295 aa, unidentified
MELYAGLDLHSRNTYIGIMDETFNRVFKKRVSNDLDQILQTLKPFKKRLKGFVVESTYNWYWLVDGLIEHGYPVHLANTLAIQQYNGLKYTDDETDARFLAHLLRLNILPTGYIYPKAMRQVRDLLRRRLLLVKQHTAQLLSLQSMIGRHTGLRLSSHQVKQLTQDQLAHYFDAKATLFAAQQTHQLMQQLKLQTEAIEGFVLARCEDSEHYALITSTPGIGKILGMTILLETGPIERFAQVGNYASYARCVPTDRISNGKSKGQGNAKNGNRYLAMPFDEAAHYATSGAPTIKR

SEQ ID NO: 456960 - protein, 422 aa, unidentified
MKNNAARKLRQVPAGYLVVGVDPHKKKHAAVAITQDLTIHDRFKVDNTREGLEFLLRRVNTVMVKSGCRGIMFAIETGGHYWRNIAYYLDERGVPFRFINQYTLKRRREGKDLNKRKNDYRDSEVAAQLLCTGEFVESGIPQGVYAELRTAHNAYRRLVKERTRITNLVKGLLDALFPEFVRVFKDPCGLTSLSVLSTCSTPGIIAEMTEEGFIALIEAAHHGRRLMRKKLGELRSVAKSSIGIEAGAHSVSVEIAFLIEKQKLIKGQIQTIERTLIKLVDASEEGKYLLSIRGIHYIAVAGLLAELGCFKSYRPAKQMIKMAGSNPTESESGGKRRSRTPMSKQGRPVLRYCAWTSVIPMLRLNPDFRAWAKERRERPAHANPLNGREVVGAALNRLLRLCFAMVKNKTYYRSPHLVQVSN

SEQ ID NO: 456961 - protein, 414 aa, unidentified
MLKIVYRICCGMDVHKSFIVACIASTNEQGVTGYKSKRFSTFTGDLRRCADWLSENNCKDVCMESTGKYWIPVYNILESTCNIVLAHPKYVKAIRGKKTDKRDAKWIADIFKHDLVAGSFIPPADIRQLRDLVRYRWKLTNFTTEEKNRAQNCLTVSNFKLDDVFSDVFGKAASAITVRILENPAEKITDVSGFRTKGMKATNEQVLAAVDGEMCAQQAEKLRIIRSHMSNLELCKLNLESLILTTAEKYLPQLGLVMTAPGIQSFAAIGIISEIGVDMSVFPTSKHLCSWAGLTPQNNESAGKKKTTRISRAGAYIKPLLVQCALCAVRAKQFPEVRNRYMALKKRRGHKKAIIAIARMLLTVIYNMLKKNEPYNPELYRKGNRPPAHREVSVEEAIFILQRQGYLVTAPPAS

SEQ ID NO: 456962 - protein, 335 aa, unidentified
MTATHATQSTSKVGPVLYLSMDLGENSWTLGFTVGMGQRPRLRTIRARDTATLLAEITKAKKRFNLPEEAPVRSCYEAGRDGFWLHRFLVHHGIANVVVDSSSIETNRRWRRAKSDPLDTTKLIEMLIRWYNGESRVWRVVNVPAVEDEARRQLNRELTTLKDERTEHSNRIKGLLASLGLGGITVNASLPQKLEELRQWDDAPLPAEYKVRILRELERWKLVDAQIRQLEIQQRRTIRDQADPQAEQMALLLMLKGVGVVGAWVAVREIFGWRQIKNRRQLGGLVGLTPTPYSSGESQREQGISKAGNDRVRCLLIELAWAWLRYQPQSDLSRW

SEQ ID NO: 456963 - protein, 387 aa, unidentified
MSGARIIKGRPFLGTVWLLCEVVTTAEERNTLMNSIKYIGLDVHQSTVTAAVLDPEGKLIQQTILATQASALVDWCSGVRGELHVTLEEGTHSAWLYDLLVRRVSKLVVCNPRKNALLKAGNKSDAIDARKLAELLRAGLLSPVYHGQNSTQTVKQLVRSYSALTEDTTRTMGRLKALYRSQAIACAGKQPYGRRHRPAYLEQLHDAGLQRRAQRLYAQLDSLQQLRREARRDLIEECRRHEDAKILRQVPLLGPIRVATLIGRVQTPHRFRSKRQFWAYCGLALETRSSADYQMVNGQLQRRTKPVFIRGLNRNHNHDLKNLFKSAATTAAAQNGALRQFYENLLRKGMKPELARLTLARKLAAITLHVWKKGERFDANSVKPQAA

SEQ ID NO: 456964 - protein, 383 aa, unidentified
MARSKPKASRTVPPAPALPPQLAAANLHAAGIDVGAEAHFVAVPPSDDPQPVRGFGAFTADLEALAAWLVACAITTVALASTGVYWIPLFALLEARGFEVLLVDPQQVQKSKGRPTSDVHDCQWIQRLHTFGLLARAFRPTDQVCVLRSYLRQRAMLLTYAAQHIQHMQKALTQMNIKLQHVVSDITGVTGLAIIRAILAGERAPGTLAQLRNAHCKHDETTIARALQGNWRDEPLFALAQAMALYEVYHQKIAECDRHIEASLQTFADRSEGQPLPPAPRPRKRGRHQPAFAVRDPLYRIPGGDLPQIEGIDETTSLVILSEMGLERSRWPTVQHCTSWLGLCPHHRVSGGKVLSRRTKPCANRAATALRLAAACLHHSQSA

SEQ ID NO: 456965 - protein, 387 aa, unidentified
MHTVTSTTVVATAARANDNTLFASLELSKSKWVVTINSPGSEKFSKHVIEGGDGAGLLELLSRLRAKAEQRCGAGVKVVVIQEAGLDGFWIHRLLLAAGIESHVVDAASIALPRRHRRAKTDTIDGETLLRTVMAWARGERRVCSMVCAPSPEEEDRRRLTRERDTLLKERIRHTNRVKGLLSSQGVRDYHPLRRDRFERLETLRTGDGRELPPLLKVEIRRELERIGLVTTQLAAVERARDALIRADAEGPNTPAALLLKLKGIGPEFASLLWLEALFRSFVNRRQVAAYGGLAPSPWQSGAIERDQGISKSGNRRLRKTMIELAWLWLRHQPDSALSRWFRARVGAAKGRVRRIAIVALARKLLVALWRYVTQGVVPEGAVLKAA

SEQ ID NO: 456966 - protein, 426 aa, unidentified
MWDEKRRVLKMTSLKARNHLRQRGKIMRVVFGIDVSKASSEVAILVNGEKIHGYTIPNDAIGFNRLLEDLGTVYQPEIVFEATGVYSRRLQAFFEDNSYAYIRLNPLESKKQLDSLRVRKTDKIDAEKLATSQFILNRKPSYVQEALYQELRDLSRFYQNLTEDIVCSKNRLHKVLQVTFPELENILSSPTGKQYWNLVMAFPCNSFVLELDDAALRAIILQSTSKHISENRVTYLVDKLTKLANHSYCAVKKTSPMMEEVKYYAGELLRLSEYRQSVLEKMITLAQPLPEYEILLSIPGIAETTATSIIGELGDIRRFHSANQINAFIGIDLRHYESGDFLAKEHITKRGNPYARKILFKCIHNIASASHTNPCHIADFYEKRKRQSQVTSTKPHTIASIHRLIRTMYYLITHNKLYDYTSTQNR

SEQ ID NO: 456967 - protein, 350 aa, unidentified
MIIIGCDYHPGFQQIAFVDTETGELQETRLQHREQAEKFYRELAAQGVQVRVGMEASGQARWFERLLAELKIELWVGDAAEIRARRVRKKKTDREDARHILRLLVEDRFPRIWVPSWENRDMRQLLWHRHRMVQMRTRIMNQLQAVALNEGLRCKKRLWRENGRKQLEAFSLAPWASRRRRDLLELLDRLNPTIAELTQAIEQEVQKYPAAQRLMTHPGVGALTALAFVLIIGEAGRFQCGKQIAAYLGLVPEEDSSGDSRRLGHISKQGSGLMRFFLVEAAQVTVRSDGEWRSKYFHLAMRRGRKIAKVAMARRLAVRLFWMWRKQWDYEQLKKFGPHAGQPGTGVGVK

SEQ ID NO: 456968 - protein, 322 aa, unidentified
MSQPNPLCVGIDVSKATLDIAASSDVAQFTVSNDSDGFNAIITGLRRHSVALVLMEATGGLEVAVACSLQAEGFEVAVVNPRQARDFARAMGYLAKTDRIDARVLTQMAEVINRHPERKRFIRALPDAERQALAAMVVRRRQLIAMLVAERNRLYPSHPQNKKSINTIIKALEDELARLEEDMNSHIRNHFKEIAERLSSIKGVGTMTVSAMLAEIPELGTLSRREISALIGVAPVNRDSGTMRGRRTIFGGRAGVRSALYMAALVATRFNPVIKTFYVRLLAAGKAKKVALVACMRKLLTILNAMLRKNEEWDESYHHVAP

SEQ ID NO: 456969 - protein, 338 aa, unidentified
MDRQYVGIDFHRRRSVIVRMSASGERLAVHRVTNDGLEFAAVMADAGDSPAVVIEATYGWYWAVDLLQALGAVVHLANPRALNWGDRRVKNDVIDATDLADMLRLNRLAEAWIAPPAIRELRELVRYRAMLVQLRSGLKAQVHAVMAKEGVLPKVTDMFGPAGNRQLDHLELGAPFARRVGSLRQLIVAYDGEITALEREIHEHLRHHAGYRAVQTINGIGPISAAVLVAEIGDVTRFPTPAHLCSWVGLTPRHRESDLKTRRGRISKQGSRLVRATLIEGISRDHGGPHLDAQYRQLAKRRGRNKARVALARKVLTLVYYGLRDGEIRCLAPVETAA

SEQ ID NO: 456970 - protein, 323 aa, unidentified
MSSPLNSSLHDATFYIGVDVAKATLAFACAGLKAEYPNSAKGHLAILKDIQRYLKSSNAKIHVVMESTGGYQRPFLRFLHTHSIAVSVVNARQVRDFAKAMGQLAKSDAIDAGIITSFAQSKRPQPDRCPCANELKLEEIMSRRQQLVALCNIEGNRMEHYFEAKIIKSAQKLLDSLKAQIKEPDAMAKELIEADQILKAKAERLAQAPGVGPVTCANLLAFMPELGKISRNQAAALVGVAPFVRDSGTERGKRHIWGGRSHLRTLLYMNSLHAITKNRVLKEFYQRLKAKGKPSKVALIAVMRKLIIILNQLLANPNFSLAN

SEQ ID NO: 456971 - protein, 421 aa, unidentified
MSKGRYRSVECKRVNWQQVIEKASGRTLVFAIDVAKEAFVGLLQEKGGEALVRVRWSHPGETGDLLAGLERLAAAGAVEAVMESSGSYGDVLRWQLQRRGIEVYRVSAKRVHDAAEVYDGVPSLHDPKACELIGELHAGAVSQPWIEEDRQQRGRKAQLHMLHEANTRQGQLRNRLEAHLMRHWPEVLELLALNSSSLRTLIAAYGGPEQVDALADLARKTLHAAGGPGLSEEKIEAVIDSAASSLGIPCVLEERAHLRQLGKDLIDIAKRIRDLEGAIAREVGDDHVMADLAGTLGTTTTLVLFALFGSPAAYASAQSYCKAIGLNLKEHSSGKHKGRLSITKRGPSLGRFYLYFAALRLIAREPLVGRWFRTKTQRPGAVKGKQVVELMRRIAKGIWHHAQGRPFAVDKLFAPLPAEAC

SEQ ID NO: 456972 - protein, 344 aa, unidentified
MQIITIGLDLAKSVFQIHGVDATGQVAVRKSLRRSQMLPFFAKLPPCLVGIEACGTSHHWARELIKLGHEVRLMPPAYVKPYVKRGKTDAADAEAVCEAVTRPTMRFVPVKSPEQQAALSMHRTRDLLVKQRTQLINMIRGLLAEFGIDIPKGLERALLMARQIIDGKAPEVPFEAAKIVSTLSQQVLDTHVRLREIDRDLAIWLRSNDVARRLMTIPGIGPIGASALAASVTDPHQFRSGRQFAAWLGLTPLQKSSGGKERLGRISKMGDKYLRKLLIVGMTSLVRRAKYSPGKVDRRLADLLARKPTRVATVAMANKTARVIWAIMSRGETYRAGHRPTLAA

SEQ ID NO: 456973 - protein, 408 aa, unidentified
MAVVMIGIDPHKGSHTAAAIGPGEEPLGQVQVLASASQAGRLIEWARAWPGRTWAVEGATGLGHLLAQQLVAAGEVVLDVQPKLAARVRLLEAGNTNKNDANDARSVAVAALRSATRREVITEDQAAVLKVWSKRYRDLGRARTQVACRLHAVLCELVPGGFGREITAGQAAGLLQAITPSSPAAAARCELAAEFLADLRRLDAQRRDTRTKLAAAVRESGTTLTQIFGVGPVIAAAILGATGHAGRFGSQDRFAAYNGTAPIEVSSGGRKIHRLSLRGNRRLNHAIHMAAVTQIRHAHSPGRAYFDRKIAEGKTGKEALRALKRQLSDVIYARLQADAARRGRGIPAEAEGPGGQSGNGSVSSAAGSHPRRRLFGQATPGPQLSLRPAAPARRAVPTTPFKNSRRAP

SEQ ID NO: 456974 - protein, 320 aa, unidentified
MSEKGREEVFIGIDVSKEKLDVAVRPTGEFMSFSNNEDGISCAVDFVKRFFPTLVILEATGGLETAVVAMLADKALPVVVINPRQIRDFAKATGKLAKTDMIDARLIARFGEAVRPELRPLKDEEAQKLAALITRRRQIIGMITVEKNRLTSAPLWTRKDIQTNIAWLEKCLKRIDNDLQNLLKKSPVWREKDNILRSAPGVGPVLSMTLLSNLPELGTLNRKEIAALVGVAPLNRDSGLFRGKRMIWGGRAAIRSVLYMSATCAMRFNPAIKKFYERLRLAGKLHKVAITACMRKLLVILNTMIKNRTQWSPVQSQKLS

SEQ ID NO: 456975 - protein, 338 aa, unidentified
MKKGQNTRGYERYMALDIHREYLLVGAWNEEKEWVLTPRRVGIEKFPGWAKKNVRQGDMVVLETTTNVWTIYDIVVPLASRVLVANAAEVGEIANARVKTDKEDIKRLLKLLIGGIVPEVWVPPMEVRELRAFVSYRHRLVKTSTMIRNRLQSLLHKHNLMLSEAGLLDQVWWEAQKNISSLEKMQIRQELVLLQEVEKLKLAVDEELQRQSTSSTWGKQALQIMQLPGMGFVIAMTVLSAIGDISRFENAKQLVGYAGIGAGVHDSGKTHKKKKITKKGRRELRWAGSADVALLEGRIRKTLEAHAQTESGDRGDRAETPDRHLACPEQGRNRHSCQ

SEQ ID NO: 456976 - protein, 346 aa, unidentified
MKVVTLDVHAEACQMAVVTEEGEVVYETKVETSPEELRRAVEGVPGPKRVVLEGGPLSGLIHDALKDVVDEVISCDPTHNALIARAEDSNDERDARRLALLMRVRAIREVYVPPEPYRALRSLTHYDQALAEAVAAVKNQLKALCRRQGIRCKGTAVYRSAGREEVLKLAPNALVRWEMQSLYRRLDALRRERVGAARMVSKQVKKTGVMKVLGTIPGVHTKTGPAIIAWLADPRRFKSRGAKSSYGGLGLKQDVSNWKMTGRAHASKRGNRELKRALFLAARGVLKGKSALRKRYDARRAAGWEDKKAIRDIARTILFIACAIWESGEEYDDTKVSVPKAERDAR

SEQ ID NO: 456977 - protein, 411 aa, unidentified
MHNRQNYLYVGVDLHKEHHTAVIINCWQEKLGEIQFENKPSTFSEFLLEVETYVSNGLSVVFGLEDVGGYGRALAKYLVDHEQVVKEVNPALSFLERKSQVMIQKNDSWDAECVARILVNKFNQLPDAKPNDLFWSIQQLVSRRNALVKAQSALKNQLHIQLNHHYPSYKKFFSELDGKTALAFWQQYPSPSCLEGTNIKRLTAFLLDVSNNTCSIKKASDILKLVKEDGHTMKEYQETRDFLVRSIVRDIEFKKTEMKYIERELKQLVNLLDYQLETMPGIELVTASALIAEIGDVRRFSNANKLARFAGIAPVYFGSGGKGKTHKSKQGNRALHALFYNLAVQQVQVAKGSKLPRNPVFHAYYQKKLKEGKTKGQALVCIMRRLVNIVYGMMKYKAAYELPVVEEKEVV

SEQ ID NO: 456978 - protein, 370 aa, unidentified
MNVTTFAGLDVHARSIKAVALDIVTGEVRSATFGYDACAVAEWVRSIDPGARCVYESGVTGFDLQKKLSSLGVDCVIGAVSKMIKPAADRRRKNDRNDAEFLARMLSVGNVVEVWVPDDECEAARDLARALDDAREDLRRQKQRLSKFLLRHGLVFDEKTPSGQRKGNWTGAYWTWIKGISFREKADNDTLAFYVDAVRRAEEDKRCLEKLVADEASRPRWKKRVDSLRCLKGIDVMTAADIVFEAGEFARFRNARSFAAWLGLAPSEHSSGEKVARGGITKAGNKHLRRVMVEAAWHYLNASPHSKGLAPGQAPDPAARRHASKGVRRLVGRRAALLERGVHKNKANVATARELACWCWAVGSMAEGAR

SEQ ID NO: 456979 - protein, 404 aa, unidentified
MLFVGVDWAEAHHDVCVIDSEGRVLGRRRINDTLEGVRDLHTLLATCGDDETDVVVGIEKDRGLIVTALVASGYEVYAINPMAAARYRDRHHVSGAKSDPGDAKMLADLVRTDRHNHRPVAGDTPLAEALKVLARAHQNAVWSRQRHVNELRSSLRDYYPGALEAFGTDLAHHDALAVLGVAPTPALARTLSKAKLMSALKRGGRQRRLEDRALELQEILRREQLAQPALLEHAYGLTTSATVAIIAATNATIDELEAGLSEHFEQHPDAKIIRSLPGMGMVLGARVLGEFGDDPNRYADSKSRRNYAGTSPVTKTSGTRKVVLARRGRNRRLASALDQWAFSSLLQSPGARHYYDELRAREKSHRKALRQLANRWVGILHICLERGALYDESLAWPHLIEQAA

SEQ ID NO: 456980 - protein, 401 aa, unidentified
MLYIGIDVGKRNHEATILDESGKELCESVKFSNSIAGAEKLLSKIPNLKDAMFVLEATGHYWLNLYCYLSSKELAVQVINPIQSDSLRNLYIRRSKTDKKDSFIIADIARINRIPQTKLADENILKLQTLTRLRFELIDQVTALKARIIGILDKIFPEYESLFSDVFIKSSRELLKNTASPEEILEFDLSELTELLDKASKGRFGTAKAKELQSKAANSFGITLGMDAFKLEIKLLLSQIEFLEEQIKTIDSSVKELLQEFKTCFITTIPGISDVLAASILAEIGDINRFSNAKKLVAYAGLDATVYQSGQFIGTRAKISKRGSPYLRRSLWSAANSARRFNPVLRNFYQLKIKQGKHPQVALGACARKLTHLVYYILKEQKPFDPNYQWSINSKIYVDSL

SEQ ID NO: 456981 - protein, 411 aa, unidentified
MEAAVITAVGIDVSKSKSTVAVRRPGGEIVLRPFEVHHTNSDLKKLASTLKKLGGDIRIVMEHTSTYWRPIALTLKEAGFFVSVVNAMLIHDFSDNTIRKLKTDRADALKIANYALTFWDTLPPFNNEEETRLLLKMQSRANERITATATALRNGLIALADQTFPGVNIAFDPNTKNATGHEKWVDFFLRYWHKDCVCQYSMEAFTESYRGWCKRKNYKFRTDTAHKIYLLAQEGVATLPKCESTKMLITQACKSLNAVCEAKQSTQLEMQRLAAMLPEYEVVMQMEGAGPITGPALMAEIGDVRRFKNKKALVAFAGIDAPPFQSGAFESKSRHVSKRGSPHLRRTIFIVSNIILTRSNPENAVYCFMDKKRSEGKHYYVYTVAGSAKFLRVYYARVTEFLRSQPSPDAC

SEQ ID NO: 456982 - protein, 412 aa, unidentified
MKDLLEISCGLDVHKDKIVACILSGPIGKTTVSEIREFTTLIPDMAALRDWIVSCNCHHVAMESTGIYWQPIYEILEDAYSGDITLLVVNARHMKNVPGKKTDMRDSEWIATLLRAGLLNGSFIPDKQIREFRYLNRYRKSIIRDITSQKNRVEKFLQSSGFRLSTFISDIFGASGRNIICHLIQHGCIDRESLDSCLKTKTRNHINEILVAVNGTLSQIQQDFLEMLMDHYDSLKSHLAEIETALEEAMAPFSLHIEQLTSIYGINTTASCAIIAEIGTDMSYFKTAEHICSWAGLCPGNNESAGKRKSTSITKGNPYIKSMLCEIAWVIAGKRNTYLSAWYWRIKQKKGAKKAIVALARKLLVIIYTMLKQGTLFGENCFETRRKNCEQKQVSHYIRELEKRGYHIEASA

SEQ ID NO: 456983 - protein, 352 aa, unidentified
MDRYIGLDAHSSSCTAAVVGPSGRRLQSQVLETNARVLVSFLKTVPKPRHLCLEEGAHAGWLYEVLAPHVQEIVVAGVGGEPSRGPKSDRRDAFALAEGLRIGAIKTRVYKGLGQFRRLRELSRGYSMIVADSIRVQNRIKSLFRSRGIPAVGKEVYARASREKWLTKLPVSVRPLAGLLYQELDAIRELHKVAEKELLTEARAHAVFGRLRSCPGMGPIRVAQMLPVVVTPYRFSNKRAFWAYAGMAIVVRSSSDWVRARDGSWERAMVQQTRGLNHNYNRTLKQIFKGAATTVIQRARQEEPLYQHYLRLLEGGTKPNLARLTIARQIASIILSMWRSEEVYEPAKLRTT

SEQ ID NO: 456984 - protein, 347 aa, unidentified
MVTLGTDSHKQSHTLVAVDENGRQLEELRVAATAAGHMDALAWARQWPERRWAMENCRQLSRGLERDLLMAGEEVLQISPRLMGTSRRSGRQPGKSDPIDALAVARVALREPNLPVAHLEGKSRELKLLVDHREDLVGERTRIQNRLLWHLHELETSFAVAPGGLTRRVVLTAVSRCLERHEGVVAEIARELVERLTQLNVSVKRLQGRIDLLAAELAPALLQLPGCGGLTAAKLVAETADVRRFHSSAAFALHNGTAPIPVWSGNQERHRLNRGGNRQLNAALHRIAITQIRLGGEAHAYVLRRVSRGDTKREALRALRRRLSDEVYRRLRWDSSEQRQAAVYKAA

SEQ ID NO: 456985 - protein, 402 aa, unidentified
MNAVGIDVSKGKSMVAIMRPFGEIVSAPFEIKHTAGDIHSLVELINSVEGESRIVMEHTGRYYEVLAHQLSKANLFVSAINPKLIKDFDNDSLRKVKSDKADAVKIARYALDKWQNLKQYNVMDELRNQLKTMNRQFSFYMKHKTAMKNNLIGILDQTYPGVNTYFDSPARSDGSQKWVDFASTYWHVDCVRKMSLNAFIDHYQNWCKRKKYNFSQSKAEEIYGKAKELVPVLPKDNITKLIIKQAVNQLNIASATVESLRTLMNETASQLPEYPVVMAMKGVGTSLGPQLMAEIGDVSRFTHKGAITAFAGVDPGVNESGSYEQKNVPTSKRGSSNLRKTLFQVMDALIKTHPQDDPVYQFIDKKRAQGKPYYVYMTAGANKFLRIYYGRVKEYLSSLPES

SEQ ID NO: 456986 - protein, 346 aa, unidentified
MKLSACGIDLAKAVFQVHGVDLHGKPCLRRQLRRAELLTFFVNLEPCLIGMEACGSAHCWARKLSQMGHTVKLMAPQFVKPYVKTNKNDAADAEAICEAVTRPNMRFVAIKTEQQQALLAIHRARQGFVKARTAQANQIRGLLAEFGIVIPKGLCNLGPRLASLSDESAGQLPGSFCSLLQRLAENLKELDRQVQDLEKEIQLWHAQNEASRRLAEIPGIGPITASALVASIGDARCFKNGRQLAAWMGLVPRQHSSGGKQVLLGISKRGDGYLRALLIHGARAVLRHAEHKVETATSWLGHLLSRRNKNIAAVALANKNARRVWALLMHDGRRFRADYVPAGAGT

SEQ ID NO: 456987 - protein, 405 aa, unidentified
MINAVGIDVSKGRSTIAVLRPGGITIRRPFDVSHSSADLSSLVQYIGSLEGDTRAVMESTGRYHEPVLHALSDAGIFVSAVNPHLIRNYGNNSLRKVKTDPADAMKIARYTIDNWSELREYTGMDNIRSQLKILNTQTAFLMKQKTAVKNNLIALLDQTYPGVDKLFTSPVRTDGSEKWVDYVYSFWHVDCVRKIGIKAFSERYAAFCKRHGYNFQKGKPQELFDASKELIATQPKDLICKKMIQNSIEQLKLLSRHIVELRSEMDRLASTLPEYSTVMEMYGVGPVYGPQLIAEIGDVSRFPRRESLTAFAGVDPGKNDSGQRISKSVHASKCGSSRLRKTLFQIMSTILQLGDNDDPVYRFLDKKRSEGKDYLVYMTAGANKFLRIYYGKVKECLRQQTNATE

SEQ ID NO: 456988 - protein, 415 aa, unidentified
MKYAPVSRPGPHPGGVTAGIDWASADHAVCVVDGAGEVVSRFSVEHSAEGLRALVSRLARAGVREAAIERGDGPVVDALLAAGVTVVVITPRQIKNLRSRYGSAGNKDDRFDAYVLADVLRTDRARLRPLIPNSPATVTLRQACRARQDLVRHRVAVTNQLRAHLLCVFPGAVGLFCRLDSAISLAFLARFGCQDRAGWLSEKRLAAWLKGAGYSGRISPAVLYERLRSAPGGATGEQGAASAQVTRALAAVLASLNTQIKALEAQIAGQLAAHADGHIFTSLPRSGTVRAARLLTEIGDCRARFPDPQALICLAGAAPSTRQSGKHKAVTFRWAVSKQLRDAVCDFADGSRHASPWAAKIYNDAITRGKDHPHAVRILARAWLYVIWDCWQHHAAYDPAQHRALQRLLATGQAA

SEQ ID NO: 456989 - protein, 329 aa, unidentified
MKKNWFIGIDISKKTLDVVIYDQVNKKPGKHFKVLNETKGFKELLRFLKKEGIKFAETFICLEYCGIYGLEIGFFFEGKIDFTFCAPLQIKRSLGMTRGKNDKLDAAKIARYCYMFREELKASSMPTQTMIKLKSLMSERNRVTKGLKTEKIVLKELSKQLDKKSLKRTQSRLKMFTADITTIEKEITELILKDNKLSKNYILLLSITGIGMVNAVMMILCTNNFEGINNARSFACYCGVAPFEYSSGSSIRGKTKVSNLANKRMKADLTNAARSALIYDPEIKIYYKRKRAEGKAHGTVMNAIKFKIITRAFAVINRQTPFVKLRQAG

SEQ ID NO: 456990 - protein, 356 aa, unidentified
MSKRQILAQGISVAMGLDVDYQGSAIVVLDIRDGQKLYEGRLPHDETAWRRFLMRWPQCQVWACYEASGVGFHLCRLLRSLGVDGRVVPVSKIPKTPESRQQKTDRRDALSLAQLYFHAPRTFVRVPTEMEEAHRQLFRTRDQMMKDKVRTLQRLKAFLVYHHVEKPASLKRAAGAAYLGWLRRRPCPRDELNACLQVYLDELDKVTALIQTLNEKIQALSQTERYRPACQRLTEQVPGVGPLTAMTFLCEVFRPEEFPTAEALACHLGLTPCEYSSGKRHRYGHLTHWGPPHLRKLLVEAAWAWVRWDPQARQRYQSIRAGAKPKIAIVAMARRLAIVLWAMTVKEQDYHYRWAA

SEQ ID NO: 456991 - protein, 407 aa, unidentified
MFAGIDWAADEHAVCVIDTGGRVADRFTIDHTADGFERLIRRLARHGDPAELAVAIERPDGRLVDRLLDAGHPVVPVKTTAIKAWREAEVASGAKSDPGDAQVIADYLRLRRPDLRELRPFSEETRALRAVVRTRGDLVDARVAAGNQLAALLAAFWPGASELFADVWSEIALAFLERYPAPIAAAHLGEVRMAAFLRKHGYSGRRSPAELLERLRSAPAGLADGPESEARRDTVLAMVRLLRALNRSIKDLDRSVVAHLDEHPDAVVFRSLPRAGQVNAAQILAEWGDCREAYDGPEAVAALSGMAPVTRRSGKHLAVGFRWACNTRFRNAMATFADNSRHASPWAASVYGDAIGRGADHPHAVRILARAWIRVIYRCWVNGVAYDPARHGATRRLEDMGSVVVAA

SEQ ID NO: 456992 - protein, 358 aa, unidentified
MEQKRFVGIDLGKRTFEIKFIASNGSVTGTNGKTCPSGRKELYKKLLPTDRIAIEVCSLGMVMAKEIIQQVGAEVVLLNPSQIALIYRSVKKNDKEDALKLARLVQKFTNEELPKVELPTEHEENLRQILTELRQLKNDRTKEINRVHAIFVECGITEIKKSNLATHKNRSECIRILKGIFLSQAERSLKKLELIEDQILEVEELLDKEIDGDKNIDTLITVPGVGKQLAASFVAFLGDGSRYPNVSSIGAATGLVPRLDMSSTSLRLGHITKKGNSNLRSLLILAAWSHVRAKNGGALKEKYLYMTIAQSKSKKVAIVAIARKIAELMYSLLKNNTQYEKRAPVSIKKLATEALCSS

SEQ ID NO: 456993 - protein, 349 aa, unidentified
MYYVGVDYHKRYSVATVLDEAGTMEARKRLDNRLDDFRDFLRPYDKAEVEAVVEATRSWGIPVDILEQLADRVILANPGEVKLIAKARIKTDKVDSLTLARLLRMDWVPEAYLRPKDNRDHQLILRIRCFLVQLRTRVKNRIHDLIDRQDESVREMATGFSDLFGKKGLTWLASLELGYPSGTLLCRLLAVYNALDKEVRQSDRLVAELFAADEDCKLLVKTPGIGVFFAVLIKTEVGNIERFANSPRFCSYAGVVPSTESSGGKIWHGRIIKQSNCWLRWALVEAVIPATVADAGLRAHYEYYRRTKGSKVAKVITARRLGCIVYRVLKERKPYFERPVQSRGYRQAG

SEQ ID NO: 456994 - protein, 343 aa, unidentified
MQVSTIGIDIAKNVFQVHGVDAAGKVVIVRQLRRKQVLELFAKLSPCLVGMEACATAHHWARELAKLGHDVKLIPPSYVKAYVRRQKNDAADAAAICEAVSRPSMRFVPVKTVEQQATLAVHRARALMIEQRTRITNALRAHLAELGLIAEKGREGLAQLIAMVKEDSTLRSLPIAMLEVVRALVAQLAAVQTQIGELDRAIRNQHRANPVSRRLESIPGIGVIGATAIAATVTDPGAFHSGRELAAWIGLVPRQNSTGGKERLGGISKQGDRYLRRLLVAGAMAVIQHARLHPEKHPWITRLLTRKPAKVVAIAVANKSARIAWAIMSRGGTYQPPALAATA

SEQ ID NO: 456995 - protein, 391 aa, unidentified
MTYIVGIDLAKYHHECLIISQNGKIIFKSFSFDNNAQGFDFFLSFLNQLSNSNQIKIGFEATGHYGDNLKNFLIKSGYGFMEIHPVLINRFSKASTLRKTKTDKVDVSIICSYLNSVDYEPYSTESYHIKYFKSLTRSRDSLVKERSLQLQRMTNVLDIMFPEFKPFFKNSLKSATAQYLLINYSTPGKISRMNQISYKKMSSKLRRTISYAKFTKLKELAQNTVGTENPLTEFQLNNYLSLYQTLNTMIQNTDTLILEEFSRKESYLQTIPGIGPISAATIMSEIEDINKFSNPNQLVAYSGLDPAFYQSGETEFTGRMVKRGSSLLRQCIMNCAQSSLMYNPTLYDYYHKKRQEGKAHRVALSHVAKKIVRIIFTLETKKIEFDSNLMR

SEQ ID NO: 456996 - protein, 410 aa, unidentified
MEVLHPRCCGLDVHKETVVACVRLLTDGKVVKEVRTFSTTTASLIELSEWLTATKCTHVAMEATGVYWKPVWHILADGGFELVLANAAHIKNVPGRKSDVKDADWISDLLAHGLIRASFVPDGPTQEMRTFLRTRKQFVREKASHILRVQKTLEDANIKLDSVITDIIGVSGRKMIEALIAGETDPAKLASLAHRRLKASQQTLRQVLRGHVTAQHRFLLRLHLDQIDALDAAIARIDQEVEASIAPFRTAVEQVMTAPGVKSLAARTILSEIGTDMSRFPTSGHLVSWACICPRNDESAGKRRSTRIRKGSPWLKTTLVQCAWAATRTKDSYLNAQFHRIKARRGPKKAILAVAASILTAIYHMLKDGTMYQDLGPNHFDPRTKERQKNRLIKRLADLGYAVELVPQGS

SEQ ID NO: 456997 - protein, 343 aa, unidentified
MKRYVGMDVSLKETSICVVDGKGEIVSEGTVTSEPAVIAAFIKTKAAGAKRIGLETGPTTTWLWHELRALGLPVICIDARHAKAALSMQINKSDRNDAVGLARIMQAGWYKEVQVKSLPCHEIRAVLNSRAQLVKIKRDIENQIRGLLKNLGLRIGKAGGKVFHRRAEELVGEHRLLQEAVRPLLGVREIVRREIASLTRKLLALARDNDESRRLMTVPGVGPINALAFCAAIDEPARFRRSRSVGAYLGLTPRRHASGEVDWTGRISKCGDAMVRTYLFEAAGVLLTRVPQWCKLKAWGHRLWKRIGFKKAKVAVARKLAVILHRMWRDGTDFIWSSKEAPA

SEQ ID NO: 456998 - protein, 377 aa, unidentified
MQKPSTIDIDPVIYLAIELSASTWLVVSKIPTSEKTGLHRMEAGDSQALLALIADLRKKVAAKLGVEASVMSCFEAGRDGFWLHRLLSEHGVINHVVEPTSILVNRRARRAKTDRLDAQGLLRILAAHAKGDHDVCSVVRVPTIEEEDAKRQHREREHLVQERVRIENRIAALLTTQGIRKRPSLRSWEKDMEEMRTGDGRPIPSLLRAEVNRLRRRLVMTLEMIRELEAEREQALQTQDDMASRMIRALCRIRGIGDNFAAVLTREVFYRPFQNRRQIASYLGLTPTPFQSGGMDRDRRISRAGNARARKTLIQLAWLWLRYQPDSSLACWFRERVGNLQGRTRRIAIVAMARKLLIAIWRYATHGIVPEGAQISI

SEQ ID NO: 456999 - protein, 348 aa, unidentified
MSKHSVPAGDIAGLLRRFAQLKEKARARTGRDFPIVVIQETGLDGFWIHRMLQSEGIESHVVDAASILTSRRGRRAKTDRIDGETLVRTLMAFKRGEPRVCSMARAPTPQEEDRRRVCRERRTLVGERVTHVNRIKGLLFAQGVFGYQPLRKGRREQLEELRTGDGRPLPVHLMAQIVRELDRLEVVLEQLKTVEAERNALLKPATGAAASPPAMLLELKGIGPETAAVLWSEGLFRQFDNRRQVAAYAGLAPTPWQSGSIDHEQGVSKAGNPRLRTTMVELAWLWLQNQPASALSLWFHERVRRLGGRMRKTTVVALARKLLIALWRYTTAGVVIEGAVMKSAPATI

SEQ ID NO: 457000 - protein, 496 aa, unidentified
MKSTARSKTAARLAKIAQRKARQRKKVKAPRVDGAVLEGMEVIHPHAAGIDVGSTENYVCVPARSVKAGEPNVRCFGVFTDQQDDLVEWLLACGIKTVALEATGIYWLSLCDKLEAAGIEVVLVEPRSVKQVPGRKSDVMDCQWLQKLHTYGLLSGSFRPEASIRRLRTLMRHRLELTQAGGSCLQQIEKALIQMNVQLHLVISDIQGETGLRIVEAILRGERDPKALVQLRDERCKKSTVAEMEAALKGHYTEELLFVVQQSLESWKHYQKQMATCDQEVAKALSALPTAKPVQRELPPKPIPAAPGAKKTKKRSGRGNNELNLDLKEVSAQLQRVCGVDLMNVCGLNLLSVLMLIAEIGLDMSRWRSAKAFSSWLGLCPGAKISGGKVLSRRTRKVVNRASTILRVAALAVGRTDSWLGRFYRRKRAHLGAPKAITATARKLACIIYHMLKYQEDFVPLDIMVYELKAAEARQRRLRREAEELGFELVQRKEVA

SEQ ID NO: 457001 - protein, 390 aa, unidentified
MILVGIDVAKDKHDCFICNSEGEALCKTFSFPNSMEGFNDLYVKIKSFSEDLSKLKVGLEATGHYSYNLLGFLLNKGLPTFVINPLHTSLYRKSLSLRKTKTDKVDAHTIAMMLMSDVDLKPYSNTLYHNEELKSLTRYRFDKVRERAKLKSSISRLVTILFPELEHLVPTLHMKSVYALLTEYPSAHHIADAHLTKLSNLLYTASKGRYNRNTAIRLREAARNSIGSVMPAKSLELKHTIKLLGELTVEIDEIENEIKQIVDNLNPPILSIPGISYATGAMIIAEIGDFNNFSSPDKILAYSGMSPSTYQSGQLTNCYSHMEKRGSRYLRFALYNAAKYVCYWEPTFAAYLSKKRSEGKHYNVALSHAVKKLVRVIYHLEKTGQSFKAA

SEQ ID NO: 457002 - protein, 333 aa, unidentified
MDLAKHVFQAHGADASGKVVFRKRLRREKVLEFFAGKPACVVAMEACSSAHHWARELARLGHIVRLIPPAYVKPFVKRQKNDAADAEAICEAAQRPTMRFVAVKSVRAQANAVVFRARDLLVRQRTQAINALRGHLGEYGLVAAKGPGHVIKLVEHVEDPGSNVPDAARLVLRTLVEALRFLSERIDLLDREIARRAREDDEVRRLTSIPGVGPITAVALAALAPPASAFRKGRDFAAWVGLTPLQHSTGGKQKLGTTSKMGERTLRRLLIIGASSVVRKAVRQGTAAGSWLGRMLARKPRMLVIVALANKMARIAWAVQAKGEVYRAPAVVA

SEQ ID NO: 457003 - protein, 338 aa, unidentified
MKLYAGIDLHSSNSYIGVIDENDKRHYSKRHYNNMNTLLKVLKPFKKNLQGVVVESTYNWYWLVDGLQEQGYKVHLANPAAIKQYDGLKHTDDKSDSFWLAHLLRLNILPEGYIYPKEKRALRDLLRRRLRFVKHRTSTILSLQSMLARQKGFTTPGSLIKTFNEGYVEGMFECPNLTFAAKADVAEIQNLNEIIKSIEKEVWPQVQLAEEFEHLLTVPGIGEILGMTIMLEVGDINRFKKVGNYGSYCRCVKSERISNKKKKGVGNRKNGNRYLAWAYVEAAHHCVRNCERARKFYQRKKARTNGAVATKALANKLARASYYIMRDQVSFDEGKLFQ

SEQ ID NO: 457004 - protein, 317 aa, unidentified
MTQTSMTTAGIDTSKSKLDIAVHGRSERWQVANTVAGWRTLADRLAETEVKRIGIEATGGYERGVVEHLRAAGFAVKVLQPAQVKAFGRVHLRRAKNDALDAVLIAACTAALDLSGTVPDPRLTKLADQMTFLDQTGEDIARFKTRLEHIDDPRLRRIVLGDIARLKARKLARIRDIARQLRSHRDLAARLDLVLSIPGIGELTALAIVIRMPELGQVSREEAAALAGLAPFDSDSGQYKGQRRIAGGRSRLRRSLFAAALPAAFRWNDALITLYRRLIAAGKAHNVALIACARKLLIYANTVVQRGTPWTERPVHV

SEQ ID NO: 457005 - protein, 361 aa, unidentified
MSVERMHVGLDVHAHVVVGAALDAKTGELVRRRLGSSPGEVLAWLGSLPGPVAAAYEAGPTGFTLARALRAGGVRCEVLAPSKLQRPVGERVKTDARDALHIAKLLRLDEIVTVRVPSETQEAARDLVRAREDARRDLMSARHRLGKLLLRHGVAYPGKTAWTRAHHDWLRQQRFDPPGLQAAFDAAHEAVVAVEDRRDRLDDAIRSMAADSEFTGVAQRLACLRGVSTLTAFGLAVEIGDWSRLDGRRIGAYLGLVPTESSSGQSRSQGGLTRTGNMHARRLLVEAAWHHRPRYTPTSPTLRARWALASPAARERAHQGNQRLHRRWRSFEARGKRKVVANAAVARELAGWCWSLAVMEA

SEQ ID NO: 457006 - protein, 416 aa, unidentified
MGLDWADQKHDLWIRPADGSKAEHLRLEQTPEVLHEWVAKARERFANRRIALAVETSRGPVISVLMAYDFIVLFPVNPKCLKDYRGAFSVSGAKDDRTDAQLLEEFVRLHRDKLRALEPDTELTRKLAGLVENRRRLVDERTRLVNQVHATLKTYYPMAETLLDGQMNTAMAADFLARWPDLESLQKVKPEVVRSFFYKHNSRGAKKTEERLAAIQKAEALTTDAAIIVPARHLILAFAGMLRPLHQAVARLDKEIQQAMDQHPDAAIFRSFPGAGPALAPRLLVAFGTNRDRFQKSQDVAEFYGIAPVVVQSGTSKTIHVRYRCPKFGRQTFHENAGCALKKEPWARCYYEQQKERNKGKHHQACRALAYKLVRIYFACWKHRKAYEPSRYLKALKDHASPLHRKLENLTAALCE

SEQ ID NO: 457007 - protein, 408 aa, unidentified
MQVLYTRCAGLDVHKDTIVACVRCVSPPMHQEVRSFGTTTTQLLELADWLGEHGCTHVAMEATGVYWKPVWHVLGDEFELVLANAAHIRNVPGRKTDVNDAMWIADLLAHGLIRSSFVPPHAIQQLRDLTRTRKQLVREVSQHSLRIQKVLEDANLKLGSVLSDVLGKSGRAMLDAIVAGETDPARLAALAQGTARNKTAELREALRGRITEHHRTMLRLHLQVIDALHRTLGELDTAVGKALAPIQQRTRLLTSMPGVSDLTASVMVAEIGVDMSRFPNAGHLISWAGLCPRSDESAGKRRSTRVRKSGTWIKTTLITAAWAAVRVKTSYLRAQFLRIKARRGAKKAILAVAASMLTAAFHMLRDGTEYNDLGSEHLDRQDRSKTIRRLLKRLQDLGCEVPQMAHEA

SEQ ID NO: 457008 - protein, 404 aa, unidentified
MWYVGLDWADTHHDVEVLDEAGKRVGARRFAHSHEGLNALKQFVLSIAAQPENLACIVETNHGLLITFLLEAGIPVYPVNPKTANQLRKAAGAKTDQIDAHLLAKIGRLDLAELRRLEPDSDTVAELKTLTRDQDALIQSQTRLVNQLTACLKDYYPAALHLFAKLQQRSTLVFLQTYPTPQAAQAASVEEITATLRMGKHTSPTRVAPKIVEELHRPQLVASEVIVRAKSRLMLSLVKQLLVVIEDIATYDEEITTLFLTHKDQEMWRSLPRAGKRLAPRLLAEWGDDRSRYADATSVQALAGTAPVPFQSGNYAKAHKRFACLKPLRNALHQFAWQSTLQEAWALDYYQRKRAEGKTHSMAVRALANVWVRIIYRMWVSKTDYQTATFAAAQRAHAPRRHVA

SEQ ID NO: 457009 - protein, 357 aa, unidentified
MRKIIRVGVDLAKNVIQVHAVDEHGTVVVARALRREKFITWCVQLPAGCLIAMEACSGAHHWCHKLQALGFDARMIPAQFVAPYRIQGNSGKNDANDAAAVCEAASRAHMHFVTPKTVEQQGMLSVHRLREGIKEERTALINRIRGLLAEFGIVVPQSPDVLRSQLQELLEDASNEIASLARLVLQRAQQHWQELDEHMRWCDERIAAHHQSDERVQRAAQLMGVGPVTASALIATVGDFNQFKNGAQLGAWLGLVPKQNSSGGVARLGGITKRGDIYLRTLLIQGAKAVVLTGKQCTNNPIGQWAQSLRQRSNWYKAVVALANKNARILWAIMTRGENFDACHVSTKHVRMPRPAI

SEQ ID NO: 457010 - protein, 366 aa, unidentified
MKKISTMQAFSNEILKEQKLTIGLDLGDRWSFYCVLDEAGKIILEQKVATTPEAMKQAFGKIPRSLMALETGTHSPWVSRLLTELGHEVIVAHAQKVELITKSNRKDDRHDARTLARLARIDPELLGPVRHRSAKAQIHLTVIRARAELVSARTALVNAARGLVKPFGERLPKCGTQQVSRELAGGLSAELREVLEPLLQEVESLNERIQEYDERMEKIAKEAYPEVSLLKQVKGVGTQIALTYVLTIEDPYRFPKSRAVGCFLGLRPGRRNSGESEPQKGISKEGDRYLRTMMVQGAHYILGPFGEDSDLRRWGLKLAERGGKNAKKRAVVAVARKLAVLLHRLWVSGEVYEPLRNSQKAMRAVA

SEQ ID NO: 457011 - protein, 369 aa, unidentified
MTESSDYESIQVFIGVDVGKDTHHAVAVNRSGKRLFDRALPNDENKLRALISDLKQHGQILLVVDQPATIGALPVAIARSEGVLVGYLPGLAVRRIADLHAGEAKNDARDAAAIAEAARTLAHTLRTLKVADEQIAELSMLCGFDDDLAAQTMQASNRIRGLLNQIHPALERVLGPCLDHPAVLELLQRYPSPEKLASLSEKKLAAQLSKLVPRLGKSLAADITRALTEQSVVVPGTNAAIVVLPRLALQLITLRKQRDEVALEVEQRVLVHPLYPVLTSMPGVGVRTAARLLTEVACRAFASAAHLAAYAGLAPITRRSGSSIRGEHLSRRGNKTLKGALFLSAFAALRDPISKAYYTRKINQGKRHN

SEQ ID NO: 457012 - protein, 430 aa, unidentified
MGRVIIGTDPHKASATIEVVDDRGVCLATGRFGSDTRGYRALLGYVRGQWPHRSWAVERANGVGRPLAARLLADGERVLDVPAKLAARVRVFDTGQGRKTDATDAHAIALVALRTRGLRELSVDAELVALRLLTDRRDELSRARAQTVNRLHRLLAELIPGGAPRHLSALQAKTMLASVRPRDLAGRTRREIAAELISELAAVDRKLTELKRRLSAAVLARGSTLMTLFGIGPAGAARLLVDVGDVACFPSRHHFASWNGTAPLDASSGAQVRHRLSRAGNRRINHVLHIAAVVQLRHDTPGRTYYRRKLAEGKTTMEALRCLRRRLSDVVYRQLVADAIDRQAGPGGHSGATLTSSAADLTPVVGSSDQPLPGPAPATLPPATARSEPPAASAAAPPRRRARGVNVQRPTGRTTPTSAGAQSRPSRPRP

SEQ ID NO: 457013 - protein, 358 aa, unidentified
MSDSLCWAGVDTSTRTYAVCVTGDGGKILSEAELSADAEAVHAFLSGQPRIPVQVALETGTTSVHLARALTEMGYPVSVYDAFKVHRFLQTHPNKTDNSDARGLAEIARIGCERLKKVYIRPLRLAVPRSKLVIRERLMKMRKLNEAAMMSLFHAYGVRADERVSSSTSLRRVLPKMIKAVERNYDIPIRQLVTPLLRLSLTLRKEELRLENELKAFAAQDETCRRLMEIPGVGVITAVSFVTAVGDPFRFKRTEDVAAYFGLTPRVWRTGSYVRRRGISKFGSGMTRRHLHCAARQALDARKEGTLQLWGRALAARSNRRLAIVAVARKLAVVMLAIWKNGSKYDPAGGLTQTENCC

SEQ ID NO: 457014 - protein, 440 aa, unidentified
MTNLSVLDAHAAFVDVGSEQMHVSIAGGPPQVFGAVTSQLHALRDWLLSNAVRSVAMEATGVYWLPLYGVLEAAGLEVLMVNGRQTRNVPGRKTDMQDCQWGATLHSHGLLRAGFVPPEHIRRLQDYLRLRGEHVSSAASHVQHMQKALERMNVKLHDVISSLAGASGLAVVRAILDGERDPDRLLALCDMRIQRDKAPRVKESLRGTWAEEHLFALRQAVASWDHYQAQIAECDRQIEALLRNTGGHEDPADIDAHCKPRKRPGVNAPQIPKLRETLARMCGGQDLTVLPAHTEYSVLQIVGEVGTDLTKWATEKHFTAWMGLAPGTRQSGKRRGSVKRNRNRAGRMFCVMARSLARSKNIALGGFYRRMAARRGGLIANIALARKLAILFWRVMVKGIDYVEQGLVHYENKVLETKQRALRRLAKQLGQQLVPITPTT

SEQ ID NO: 457015 - protein, 401 aa, unidentified
MPTVRENSQRIKRFRELKATLRTDRTRLLVGIDVAQAEHVAHVRQAHTRVVIPQLTIPNTPRGFTQLWTRLQQAQRATGCREIVCGLEPTGTYHQALATFLEAQGADVVLLSSSVAYWNRRTQDGTWDKHDQKDAANCADLLEQGKVLFYSQPTGPLAELRQLVRCLRRARTELAACKARWRTTLRPALAPMGAALPQRLWAELPPVLQAWERAAPGRPAVPKGRLPLGLATACADLGAQVTAVQARITTLEAACTPVAERLPAYPLLRSIPGVGATVAAVLLAEIGDIAWFTQFSQLRKLAGLDIVRVQSGQFAGQARISKCGRSLLRWALYHAAMGLARTTAGRPRLAALKAKRHGDRYAGFKAIVELAAKQLRVVWGVWRSGTPYDPRRAGGLRRQAR

SEQ ID NO: 457016 - protein, 377 aa, unidentified
MNKQSQQTNTPQNLSDAVVVGIDWADREHVVCVIDQNDRTKIETLKQSPEAIDEWVAELSRRFPDTTIAIALEQSKGALIHALMKYEHLVLYPINPKQLSRYRDAIHPSGSKNDPEDAKLLAWFLKRHAAQLRPWKPDTEATRKLARYTEIRRKIVEERQRLSQQLGSLLKGYFPLMMELFPRKLSLMTAVIKHWGSLEKLKRVHPKTLRTFLKENGMRDQDKQTEVFDAVRAAVPLTRDKAIIEPNAVYAQMLAGQIQALSNTIEQLEGDIAIAVAAHPDNKIFRALPGAGDALVPRLIAAFGSDRDRYDSAEDIQCYSGIAPVTRQSGKTRHVSRRHACPKFLKQTFHEFADHARKWSPWSAAFYNQKRAAGCKH

SEQ ID NO: 457017 - protein, 337 aa, unidentified
MKYCGIDLHGNNNWLVIIDEKDRAVYSRRQANDLQRILGVLAPHRSELSGIVVESTFNWYWLVDGLQEAGYRVLLANTAAIKQYEGLKHRGDESDARQLAHLLRLGLLAQGYIMPKAMRAVRDLARKRMQLVQQRTAQILSIESSLSRHCGWKLSSNRIKCLRQADLEAMKLEALPLRGIQANVAVLWALQTQIDSLEKVLAEYCRGEAGYALLRTVSGIGEVLATVIVLETGDIERFADAGHYASYCRCVGSRYLSNGKKKGEGNSKNGNRYLAWAFVEAANFAVRHCEPARRFYQRKKAQRNSTVAIKAVAHKLARASYHMLKTRQAFCVERCFT

SEQ ID NO: 457018 - protein, 428 aa, unidentified
MSSADKPKEEKSIAAFVGIDWADQKHDIAFRATSSQAKLERYQIESQPEALNDWVLQMRERFGSQGKILICLEQSRGALIHFLMGFDSFELYPINPKQLDNYRKAFRPSGAKDDPLDAELLCQFLSLHHDQLRPWRPDDEQTRKLALFCEKRRQAVDARTALSNQLKSELKQYFPLALVVLNNDLSTVLAADFLLQWTTFESLKKASAHKLRKFFYAHQCRSEQKIQARIERIQGALPLTQDSAIIAASSLTVEMLARQLKDLAPYIARYEKQIEQLFSQHPDRGLFDNLPGAGEQLAPRLLSAFGSDRDRFPSAGEALTFFGVAPITERSGKTTWIHFRWACPKFLRQSFHEFAGHSVRFCDWAAAFYEQQRARGKGHHAAVRALAYKWIRILFRCWKTRQPYNPDLYLAALSRRGSPLASAVKNSP

SEQ ID NO: 457019 - protein, 322 aa, unidentified
MEQFSFFTGIDVSKLWLDIAVFKPTDGFVYQTRIDNNVKSIRGFLRDLKKHLKAEITEHLFCMEHTGKYGHAFLNASILERAKVWVELPIQIKRSQGLVRGKTDKWDAARIAQYAYRFADKAAFWMPADKTIQDLKELQAKRNILVKTYSQLSQENKSDPFFKKPLLALKQGIEAIELKMEQLLNQNDRAWHQYNLLKTVPGIGKQTAMALIIVTNGFTRLTESRKLSCYSGLAPFPYQSGSSVKGRTKVSKMGDKKLKVLLNLSAWNAIRSITAFKDYFNRKVSEGKHKMSVINAVRNKLLALALAVIKRNSPFEKNYSFS

SEQ ID NO: 457020 - protein, 428 aa, unidentified
MTHPPPNAVTSMEHAEERRICDAGRFIGLDVHKHYLVVVGVDAELNVVLPAQRVDFARLETWMKKTLTKQDEVVLEMTTNTWELYNELSGYVGSVTVVHPPHVALITRSQVMNDKIAASILARLLAKGLLVGIWVPPQEVRELRALVAQRSKMTRLATQAKNRLHALLQRHHWAPPEGNPFHSDQSEWWQALPVSRLEKLNLQNDLDTLGFAVTQLARLTSMMKEIAAKDEQVTRLIHLPGFGVVVAVTVWAAIGDIERFADPKHLVGYAGLGATIHESGLTSRTGRITKAGRKDLRTTLVEAAQIAANTHPHWKAELARLEPRLGRNKAIVAIARKLLIAVWYVLAQQAADRFAEPEIVARKLMKLAYQIGKHNRPAGQSGAQFVRQHLDALHLGTDLTAISWNSKKPIIMPPSALQENQVSDVPDT

SEQ ID NO: 457021 - protein, 363 aa, unidentified
MAKCIMVGCDLHDRSMLLRIAVDRGPAVTRPWGTDLKARPAMGADLRRRAAEAGASRIVFAYEACGFGFRLHDELRAAGIECYVLAPSKMERSAVHRKRKTDERDAQRILELLRGHVLAGNELPSVWVPDLQTRDDRELVRHRLAVAQDAAAAMVRNRWLLKRNGVEARPGAEGWTEKHWAWLQELAQAGLPWGAGAALASLLRQVQWLWSERERLDAQVETLSQAPRYAPLVAALRRWKGVGLLTAMVYLTEMGDPGRFENRRQVGAFLGLVPGAHESGEDDDHKGHITHQGPSRVRKVLCQAVWSRLRVVASERTSYERIVARNPQHKKIAVVARMRVLAVVLWHEAMRAKQSSEAGKVPA

SEQ ID NO: 457022 - protein, 343 aa, unidentified
MWSVGLDVHQRSSTLCILDESGKRVKQQQVRGPWQKVIDLLGQLGHPFAICYEASCGYGALYDRLSRLAKRVVVAHPGALRLIFRAKRKNDRCDAGKLAVLLFLDQVPPVYVPSGQVRSWRGLIEFRHRVMTNRTRCKNQLRSLLRGHGVAAVTGKRLWTRAGLRWLEHVELPTEAAALQRDLVCEQLSHLEKQIKRVERTLNRMGRAHPGVMLLRTIPGVGPRTSEAVVAYIDDPRRFSRTRKVGSYFGLVPCQDQSAAVNRLGHITRQGPSTVRKLLTEAAWQAIRRSRHVRAYFDRIQRGDPQRRKIALVATAHYLVRVMQAMLRTGQGWRYDDRVAKAA

SEQ ID NO: 457023 - protein, 428 aa, unidentified
MSYRIAGIDVHKKMLAVVVSNVEVESEFQFERRMFGSNPEQLRSLAAWLLEQEAEEVVMESTAQYWKPVWGALERYWKPIREKRAGARRKSGTLHLAQAQSNRGRRGRKRDFPDAERLVKRLVARELTLSFVPDAEQRLWRTVTRKKYQLRRDLVRLHNQLESLLEEAHIKLSSLVSDLLGVSARRMLKALADGETNPAALAALAHERLRATPEQLCDALGACTDLKPVYRRLLKMVLEQLQFLEQQIGQLDQELATLLHPHQDAVQRLAEVPGLGVDSAQQIIAEVGPTAATFPSGEQLSSWVGACPGDEESAGVNYSHRSPKGNRQMRRLLNQAANAAVKVKGSIFEIIYRRCVPRLGHNQAIGVIAHRQCRLIWLILHQGTRYEERGPAVTKQSKYQRTWRMIRQLRSLGYTIESPNPQPSQAQA

SEQ ID NO: 457024 - protein, 366 aa, unidentified
MKKTSTVRVNRNMIFKGHKLTIGLDLGDRWSCYCVLDEAGEVLLEQKLPTTPEAMKQSFEKIPRSLMALETGTHSPWVSRLLRELGHQVLVAHAQKVQLITKSNRKDDRHDARTLARLARIDPELLGPVRHRSAKAQIHLTVIRARAELVRARTALVNAVRGLVKSYGQRLPKCGTQQVSRELAAGLNAELREVLEPLLKEIESLNERIKEYDERMEKIAKESYPHVELLKQVKGVGTQIALTYVLTLDDPHRFAKSREVGCFLGLKPGRRDSGESQPQLHISKEGDRYLRTMLVQGAHYILGPFGEDSDLRRWGLKLAARGGKNGKKRAVVAVARKLAILLHRLWVGGEVYEPLRNSHQAMRAVA

SEQ ID NO: 457025 - protein, 370 aa, unidentified
MRTDFKTFVGLDVHKDSIAIAYADADFGQAPRFLGTTGYSVISLTKALATLGEPKELSLCHEAGPCGYGLVRSLRKRGYATEVIAPSRTPRRPADRIKTDRRDALLLARLHRSGDLTPIVIPDPKDEAVRDLVRTREDAMHDRQRARLRLRSFLLRQGHSYTGRRWGPAHQLFLSKIKFEDSAHHIAFTEYRLAVHFRTECVERLESALRAEVQSWRSLPVIKALMTLRAIDFLSATTIVAELGDLRRFPHPRELMGYLGLVPSEHSSGPTQHRGELTRTGNTHVRRILIEAAWNYRFAARIGESLQPRLEGQSKEIVTIAWKAQVRLCARFRRLRARGAYHNKVTAAIARELCGFIWDIGRRITVSGAG

SEQ ID NO: 457026 - protein, 379 aa, unidentified
MSSENAIHIAIELSVSSWLVAVKTISGATKSRLHRLEGGDASGLLKLIAELQTRASTQPGDVAEVSCCFEAGRDGFWLYRLLTAHGIAAYVLEPTSILVNRRARRAKTDRLDAEGMLRVLAAWLNGDRQICSMLRVPTPDEEDAKRTHREREHLVQERLRIENRIEALLFTQGIRGRPSLRSWERDVAALRTGDGRELPPFLRAELDRLRRRLLLALELIRELETERAKTLDAAAMDDRVTQKIVSLKQIRGIGENFAAVLVREVFYRRFDNRRQLASYVGITPMPYQSGSMDRDRSISRAGNPRARTAMIQLAWLWLRYQPASGLASWFRERVGTLKGRTRRIAIVAMARKLLIALWRYVETGSIPDGLAFGTGTTAE

SEQ ID NO: 457027 - protein, 345 aa, unidentified
MTQYKRIGIDTSKAVFTLHGIDQQDRPVLRINLRRAQMRPFFAKLPPTEIAMEACGGAHHWARELAALGHNVRLIPPQYVKPYVKRGKNDRNDAEAICEAAGRPGMHFVPVKPVSQQAQGMVLKVRETLVGQRTLLVNTLRGHAAEFGVIAGKGLAQVGPLLTAVEQQTTIPPEARDMAALLGRQIEELDTRIKELDAKLTAAHKANAVSQRLATIPGVGPVTALTLAIEIDPEAFESGCHLAAWAGLTPKDQSTGGKQRLGGISRAGNERLRVLLVAGATSVIHAAMRPGSKQMTDWLRALLQRKPRKVAAVALANKMARMAWALMAHGEAYRRPPAVAGAAGA

SEQ ID NO: 457028 - protein, 363 aa, unidentified
MNEITTVGVDLAKEVIAVCGAERAGKIVFRRIFRREAFAAWAVQLPPCVFGLEACGAAHYWARWLTSHGHTPHLMAAEFVKPFRKSRAAKNDRNDAEAILTAVRQPNMRFVAVKSIEQQAYLSWHRMRQGWSEERTALINRLRGLLGEFGVWRGRSAAVLTGALPGLEHDEALPLMVRRLLSEARPHLARLDEAIAGCEVEIKNHIKGNEVAKRLTAITGVGALTAAAVLATVSDAREFKNGRQFAAWQGVVPRQDSSGGHTRLGHITKRGDTYLRGLLTQGARSALQAALTKQPLRRTRLQAWIVQLHARVGYHKTLVAIANKHARMIWAILAKGEDYDPDAWRRWSRTAPSTPPAMCGVTP

SEQ ID NO: 457029 - protein, 407 aa, unidentified
MFAGIDWASEEHAVCVHDDAGRDKAAWAIAHSADGFEDLVRRLARFGDPAELPVAIERPDGRLVDRLLEAGHPVVPVSPNAIKAWREAEVTSGAKSDAGDAETICEYLRLRFHRLRALRPYSDHTRGLRALVRARTDLVTQRVAANNQLEATLDAFWPGAKAVFADVTSKIALAFLERYPTPASAAGLGEKRMAAFCAKHGYSGRRSAAELIQRLRGAPAGIANGAESTARKDVVLASVRVLRGLNQAIADLDRAVIARLGEHPDAAVFTSLPRSGQINAAQMLAEWGDCREAYESPDSVAALAGVSPVTKKSGKYHSVEFRWACNKRFRNAITTFADNSRHASPWAAGVYQAAVQRGHDHPHAVRILARAWIRVIFRCWHDRAPYNPALHGSLKRREAAQAEELAA

SEQ ID NO: 457030 - protein, 360 aa, unidentified
MTMLAEQVDGVIGVDTHRDTVAAAAVSSVGAVLAHAEATTDQRGYRKLLDFARKQIPGVRCWALEGAGSYGAGLAAFLDAAGERVVEVCRPKRPPQRGGRKTDAIDAVRAAREALTAEHLIHPRRRGEREALRVLLATRQGAVTATTAAINHLKALIVSAPDDLRAELRGLGSKAVVSHCARLRARPAQTIEHRMTVRALRSTAIRVQALRAEAEDLEAEIAELVEAMAPELLQLAGVGPISAAQVLVSWSHPGRFRSEAAFAAFAGTAPIPASSGLTTRHRLNRSGDRHLNRALHTIVLVRTRVDPATKAYIQRRVSEGKTPREARRCLKRAVARQVFKLLENRSADDLTPAEELQPAA

SEQ ID NO: 457031 - protein, 437 aa, unidentified
MSDNKALELRVSVDVGYRRHSVAIGLPSGEVLEEFEITHRPEGFEEFFSRIEKHHKARNCEVAVAMEGYNGCARPLDRMVRRRGYRLYNINNLKLARFKEIFPGAAKSDRIDARKGLELFQLSDHLPLAKEVLQEVKGTPQENEVLKRLTRRRRRLVDERIRVSNNLQTDLQAVCPGLLEMTKNAGNQWFLNFLVSAETLPQLARLRPSTLLKIPAVGRKYARLIEDWQKRAHFSEEVEWVSEMIQEDAQRCLELDEKIKALKAKIKAVAKDSKIAKILLSIPGFGTICTAELAGEIGTIERFSKEGSLALYLGMSILDNSSGKYQGSKQPKHVNTRAKAAMMIALDRHRKYVPESQRYYEKKRSEGKKHNQAIRALGRHLCRIIYKMLKEEREYEIRPEKGNTKSKVSSRSLIKRQIRKPKISAKGKNNKIYQQSA

SEQ ID NO: 457032 - protein, 339 aa, unidentified
MQVTTIGLDLAKNVFQVHGITADGTVAFNRSLRRAQMFTFFQKLEPCLIGMEACGSSHYWARELSKLGHVVKLIAPVYVKPYVKRGKSDAADAEAICEAVTRPTMRFVEVKSPEQQAILSIHRARDLIVRQRTQTINMLRGLLAEFGIIFAQGVGHAVRFAKRAHEGYLPDLPQAACDVIIDLSEQLLTLHARVNWYGRRMAAAAKSEPRIALLETIPGIGPITASAIVATVGSGEQFRSGRDLSAWLGLTPINKSTGGKERLGRISKMGDQYIRRLMVVGMTSRMKQIRENPERFDPWFADILQRKPAKLAAIAMANKTARIVWAVLSRNEPYAARTV

SEQ ID NO: 457033 - protein, 351 aa, unidentified
MKNITTYGIDLAKRSIQVTEVSASNIVKRNQAVSPDRLRKILATCRPAKFVFEACGSAHYWARIATGYDHEAVILPSQFVAGSRQGQKTDANDGLACAVASKHPHAKPVMMKSAELQGLQSVERVLQGLTKQSTALNNLLIGLLFEFGIKLAKRSGELLRRLPDILEDAENGIPDFLRDTLALSADHYREIRRCLAQVKAQHDRLVKQQLECKRLLALEGVGPMNALGLYLAIGDGRAFKHGREASACIGVTPKQHSTGGKVKIGTVGKKRGNQRLRYTLFQGAMSVLRQLKNRPPRTVKEKWFLDLIERRGERCAAMAYANKTVRTAWSMLRHKTSYEPILLAPMLIAAH

SEQ ID NO: 457034 - protein, 354 aa, unidentified
MRRTTKHVALDVHQATTVASVREDGGRVIARSILPTEAPALVEFFRGMRGAIHVAFEEGTQAQWLHDLLDPLVQQVVVCDRRGESRRGNKGDQVDADALSELLRRGSLRAVYHGSADRATLKELTRSYDNLVEDATRVMLRLKALFRARGILAPGKRVYHPAERAAWLAPLTNRGARCRAETLYAQLDPLRALHPKVKAAMLAEARRDPAWTILQTIPFYGPVRVAQLLATMQTPWRFRTKRNLWAYAGLAVVTHASAEYLLVAGRPVRRRRTPLTRGLNRNYNRGLKNVFKGAATAATAQPGPFRDFYQGLLARGMRAELARVTLTRKLAAVTLRLWKKGERFDPTKLTVQAR

SEQ ID NO: 457035 - protein, 364 aa, unidentified
MSSVSQRSLVHLGMDVHKDSISIGILRPDDSMDVEKIFHDEESVRRFIARMGEPRQLVACYEAGPTGYELERLLKRLQVRCDVVATSLIPKAPGDRVKTDRRDCRRLARLHRAGELVVIRVPSPEEEAVRDLCRARGDVVIDLDRARRRLGAFLLRHGRVWRGGSNWTLKHEDWLLGLRFDDPALASTFAHYRSIVEERRLRLQALAADLLPYCEKDPYAEGVHRLCCYRGVDSIGALTLVSEVCDWRRFAKASSFMGFVGLVPSEYSSGERTQRGHITKAGNVHLRTQLVESAWAYQSGPYVGTRIRRAQQQCPPATAERAWAAQVRLCGRFRRLAARKNVKTVVATAVARELAGFLWGEMTA

SEQ ID NO: 457036 - protein, 339 aa, unidentified
MNATTFGLDLAKRVMQVHWVETGTGEICRRQLKRGQVLEFFARRAPAVIAMEACGSAHYWGRKLTALGHQVRLIAAQFVRPFVKTNKTDAADAQAIWEAAQRPGMRWVALKSEGQQAVLMLHRMRRQLVEMRTMQVNQLRGLLYEFGAELPPGRQAGLARIPDELAKLEAVLPAMVIDTVREQLARVQGLDKDVAEIERRLAAWKKDDVASQRLLDIPGVGLLTATAAVATIGEARAFKSGREFAAFVGLVPRQSGTGGRVKLLGISKRGDVYLRTLLIHGARSVITHGKQHDAWLTRLLARRPFNAAVVALANKMARTIWALLAHERTYRKDYAAQAA

SEQ ID NO: 457037 - protein, 416 aa, unidentified
MPTKNKPKANVVVVDHRNIVGIDIGKRKHAAAAITPKGTVIASLNVFENNKEGVDLLEREVLVPANCRGKPLVALEATGMYWNALHDELTRRGYHCVVLNPLQTNRRGQKRIRKTKTDRIDSEIIARTILAGDAQATLVPNEPMWELRLLVRHRWRLIRSQNTILLYAISLVDRVFPELEGVFSKPFLKSVRTLIREVGLTPDVLSAKPKIVREVLEKASRKKLSSETIDDLLQRAKTSIGTRQAETVVNNQLRMIVDYLDFMDGQVEQINRELRRRMEELKCPIMTLGIGPEVAATILAESGAVERFAGPREYAAFCGLDPSVRDSGDSIRGISHISKRGSPLLRWAFYMAAIAVYKKHWDFGKIYARHTKKQPKGRRQKGHRYALIAVAHKVARVVWRLMKDNRPFTKNPPKRE

SEQ ID NO: 457038 - protein, 353 aa, unidentified
MKRDKYIGMDVHQATTVLAVLDANGKVNWETIIATQAGPIIELLESLSGPLHVTFEETTQAEWLYEIVRAHVAEVVVCDPRRNKLLTEGSKADKVDARRLAELLRVGMLRSVYHGNEGARKLKQLARGYQTLLSDMQRTMARIKAMYRSRGIHTPGRGVYQAKQREQWLSQLTDPGVRQRTAWLYEQLDLLGPLRRQAKLAMLAESRKHRVVGLLRTIPQLGPIRSALIVAILDTPHRFRTRRQLWSYSGLAVVTHMSSEYEIKDGRVVRSRKPIATRGLNRNCNRVLKDVFIGAATGGGQREPYRQYLQGLQDRGMRKEMARLTLARKISSIALTIWKKGEAFDPKKLNWAT

SEQ ID NO: 457039 - protein, 359 aa, unidentified
MPVTMTYVGLDVHARSIHAAAIDVRSGELRRARFGGGGDEAIAWLAGLLQPLRGCYEAGPTGFGLYRACEAAGVAVEVIAPSKTPRASGDKIKSDRKDAELLARLLLAGQLTAVTVPPPPFEAARHLARAREQVRGDLMRCRHRVSKLLLLHGRVYEGSAWTKAHRGWLEKQRFDQAATELAYLDTLSAVDGLIARKTALDERLSRLALEGDWWPTVARLRCFRGIDTLTAFVLALEIGDFGRFQRPAQLASWLGLVPSLDQSGESRRQGAITKTGSGYARRLLVEAAWHYLPQPGPGVALAERRRGQPDHVIQIALRAQRRLHRLHQRLRERRKPGNVTTVAVARELACFLWAAATAD

SEQ ID NO: 457040 - protein, 334 aa, unidentified
MEIIKQVFGIDISMDSFVCRSGIIKIDQQTEISSFKEFKNIIQGFRMFYKFAQSQQIDGVTQYFLMEATGVYYEALAYFLKSQGAHVIVVLPNKAKHFAKTLTIKSKTDPIDAHMLTQMGLEKRLSEWEPPSELMKELKLLTREHLSLKELKTDAKNRIHAKTHSFKPGKDTVRRLRREITLYEALIKEVELSIRSLLQSDPQMWVKIQNILRVNGVGLMTVAKVLAETNAFALIRNGKQLTSYAGLDVVFNESGKHQGKTRISRKGNSHLRQSVYMPAISAIKSNPNLKSYYDRIIEKGKPKKVGVIAVARKLLLLIYFLWINETEYDPAYAA

SEQ ID NO: 457041 - protein, 482 aa, unidentified
MSATGTTDENTLLVEARSRDVGRGGWDNFRASILFLKLALFAIEGHTVSENTDVKLTFEANPLSTPEVCRRMKEKACGLDLHKKFILAAIIDQGGTTVEHRFSRTQTDLFALRDWVLFHDCEVVACESTSDYWIQVYDLFVGKIPVIVGNARDIKAISHKKTDTIDAIWIAKLALHDLIPASRIPDPETRDLRSLIRLRKFLVEKRTDLKNQVHHILDSCLFRLSTVFSDIFGKSGMLILTGVTDGKSIAEILATLPVRTRKRSEEIQSILETTLPELAIIRMQCCLNLIKELDNQIETLMQRVHQCVARQTRLLRILTSVPGIGYIAAVTLIAEIGNFTNFSSGDKLASWVGLVPTVNQSADHLRMGAITKRGSRTARWILVEIAQAAVRTRSSRFHAFFTRKVGVIGFSKAIVAVARKIVTILWHLVVNDEEYEETEGNRKQEIHIPKAKQPKFLTLNEMFRILAEANIFLKQSDPHGGG

SEQ ID NO: 457042 - protein, 347 aa, unidentified
MKEQSNRSEFTIGLDLGERRHRFCALNGKGEVEEEGTLGNDRACLARLTARYRGALAVMEAGAHSPWVSRYLEGLGWEVIVSNPRKVRAIYQHERKSDRRDALMLARIGRMDRALLYPIRHGSEEAQQDLLRIKLRDSLVRARVALINSVRFSLKSLGYAVVNPSSERFHKVALEPLPEGVREMIAPSVQALAELSGRIAVLEREINLLARTKYPQTFWLQQVPGVGAITALYFVLKIEDPQRFKHVRAVGAYTGLCPRRDQSGENDPQLRISKRGDAYLRRLLVSAAQYILEPFGPRSALREYGLRLAADGTKRAKKRAVVAVARKLCVLLLSLWKNQTPYQPYPA

SEQ ID NO: 457043 - protein, 313 aa, unidentified
MSRNTMTTIYAGLDIAKLNLQLHLTGRVYDLPNSAAGHRRLRKLLAAQPGSHVVCEATGGYERDVVAALHEAQVPISVLNPARVRHFAHATGQRAKTDHIDAAVLSAYGQALQPKPTAPRTEQEQQLAELVRRRVQVLEILVAQRQQAQRLTLPALRRQAQSLVRRLERDLTQIEAQLKALRRQTATLDERVQKLEAITGVGAITALSVLAELPELGTLSRRQAAALAGLAPHPRESGQWHGRRSIGGGRVPVRRALYMAALVAARANRQLKVFYQRLRSAGKPAKVALTAVMRKLIVLMNHILKNPDFLLSN

SEQ ID NO: 457044 - protein, 353 aa, unidentified
MQYIGCDFHPSFQMIAQLDKKTGELVRRRLGHGEGQGEVQRFYQALPGSWVVGVEATGSTYWFERLLEKLGHQMWMGDAGKIRQQDGRKQKHDKRDARLILRLLLEERFPRIWIPSVAERDLRQLLLHRWHLVRMRARIKNQLQHIALNQGLQKKSKLWTKAGLEQLRKLELEPWARQRRDELLEMLEQMVERIGPLDQAVEQAAAAQPRTSRLQTHPGVGPVIALATVLTMGEVGRFPDSRSWVSYLGLNSSEKSSGEKRWLGAISKQGNPFLRHLLVEGASSAARGDKDLGRVYARLKARKHHGVAKVAVARKLAVRLYWMERTEKSYPEVVRMQGSLSHPVASSHGRDLE

SEQ ID NO: 457045 - protein, 334 aa, unidentified
MQNITLIGIDLGKHSFHIHCQDKSGKALLRKKFTRTKLMQFLATCPPSVVVMEACAGAHFMARCISDFGHETKLISPQFVRPFVKSNKNDFVDAEAICEAASRPSMRFVQPRTETQQAMRALHRVRESLIRDKVKTTNQIHGFLLEFGISLPIGDAVIKRLSLVLAEHEIPEYLSRLLVRLHTHYFYLVEQIAELESELSQSINADDTAQRIMTIPGVGPITASLLSSQLGDGKQFSCSRDFAASTGLVPQQYSTGGKSTLLGISKRGDKNLRRLLVQCARSFIMRLERKHGKLAEWVREQLNKKHSNVVTCALANKLARIAWAITTQKKEYQA

SEQ ID NO: 457046 - protein, 324 aa, unidentified
MAAEVSIGIDVSKARLEVALGATGELFAVANDARGIAGLSARLVELGPELVVLEPSGGWETALVAELGAAGLPVAVVNPRQVRDFGRAGGQLAKTDTLDARLLARFGDRMRPAVRRLPDAQELELKALVARRRELVEMITAERNRLGTAAKVLRKEITAHIRWLEGRLKERDRELGRMLRSSPLWREREDLLRAVPGVGPVLCATLQANLPELGQLSRHQIAKLVGVAPLNRDSGAMRGRRTVWGGRAQVRATLYMAILAAVRCNPALKTFYLRLRNAGKPAKLALTAAMRKLIVILNALLKKPYSLELPMRPNHLTPNTVALP

SEQ ID NO: 457047 - protein, 456 aa, unidentified
MARRSKAKGTRQRTKLHMIYPRAAGIDVGSTFHVVAVPPELSAEPVQTFQSFTGDLYRLATWLVEIGVTTVAMESTGIYWIPVFDILEAHGLEVLLVNAQHVKTVPGRKTDVHDAQWLQQLHTYGLLRGSFHPAQDWSALRVYLRHRERFVEYAAAHIQHMQKALMPMNLQLHHGLSDITGTTGMKIMRAIVAGQHDPAVLATYRAARCKASEETIRAALTGHYRREHVFALRQALELYDSYQARIEACDQEIQATLASLQNEEIAIDTLPAARHKKRQSHEPLFDVREALFRVLGVDLSHIDGFSAYTALKLVGECGMDMSRWPTEKHFTSWLTLAPGNKISGGKVLNTKTRRSANRAAAIFRLSAMNVGQTQTALGAFYRRLASRAGKAKAVTATARKLAVLFYNTLRYGMAYEDPGAAYYEDRYRQRVLQGLHRRAKEFGYKLTEVGALEGVS

SEQ ID NO: 457048 - protein, 383 aa, unidentified
MNAGKMRGDNDSKATASAVLLVAMEMGLKTWRLALGVAGSNGQRQVTVTAGHYEELRSAVQQAKEKFGMAENSQAVFCYEAGRDGFYPYRTLKAQGQEAWVIDSSSIEVHRRARRVKNDAVDAAKILLLMQRQWRGEQALKIVRVPSVKQEDRRQRTREREELVIERGRVRMRMQSLLFAQGVRDFPGGIAKISHWLQQRGEGWPQQLLDRLQRELSRLKLVDDQLKEVSKQQLDDCAHATASDSVADPTAQRLMQLKGIGDTGASILSTELFGWRKFSNRREVAASVGLTPTPYDSGESSREQGISKAGNKRVRRVIVELAWKWLRFQPESALSLWFNERFGVGKRSRRIGIVALARKLLVSLWHYLEHGAIPQAAVLKTAA

SEQ ID NO: 457049 - protein, 446 aa, unidentified
MAMRKRAKHHQAERVFPNAAGIDIGASSHWVAVPAALAEQPVREFGGMTDDLNAMADWLVQCGVDTVALESTGVYWVPVYEVLEQRGLSVWLVDARQIKYVPGRKSDVLDCQWIQKLMSLGLLRAAWRPGQAVCAIRAVVRQRDVLLTEQASWVQRMQKALVQMNIQLTEVLSDIMGVTGQAIVRAIVAGERNPAVLAQHHTRRLKASQEEIQRALTGNWREEHLFVLQQALTVFDDLGQRVAECDAKLEALLAPLQRHAVALRPVPKARVKHAPAFDARQALANWAGVDLTRIDGLGVSAVMKLLAETGTDLSRFANVKHFCSWLCLCPGTKISGGKVLAAGTRRSANRARQTLKMAAMSLARSDSALGAFYRRLCTRMDKPRANTAVAHKLARMVYFMLTRGEEYVDQGRERYEAQQRQRSVVALKRRAKALGFEITPTATATA

SEQ ID NO: 457050 - protein, 367 aa, unidentified
MHERTHVGLDVHALTVVACAIDGQTGEILRDRLTPDHGEILAWIKALPGPSRVVYEAGPTGFVLARALRAAGIDCVVAAPSKLQRPSGDRVKTDKNDALHLARLLKLDQITEVTVPSPGQEAARDLVRAREDTRGDLMRARHRVSKLLLRQGLRYSGDTWTQAHMGWLYQQHFDSPALQLTYDLAVETVTETLNRRDRLDKAITKIAYESEYTPVVRALECLRGISTLTAFGLAVEIGDWNRFTGRTIGAYLGLVPSENSSGQHRSQGSITKTGNTHARRLLIEAAWHHRRAYTRPSMQMRARWEAATPAARTRGQAGNRRLHERWLVYLEHRKRPVIANVAIARELASWCWSLASEAQKATSQPAP

SEQ ID NO: 457051 - protein, 373 aa, unidentified
MQQNIRVFVGLDTSKMKISVALAEEGRQGEVRFLGDIDNTPDAIRRLVNKLTGKYQQLLFCYEAGPTGYGLHRQITAFGHECSVIAPSLIPRRPGEHVKTNRRDALTLARLHRAGELTAIWVPDPGHEAIRDLVRAREAAMEDLRAKRQHLQSFLLRHGRIYPGLRSWTLVHARWLSSLTFEHSAQYLVLREYRQAIEDAEARLERLTQQVADVVSTWSMAPVVEAYQAMRGVAFLTAVTFVAEIGDVRRFETPRQLMAYLGLVPSERSTGEQVRRGSITKAGNPRARRVLIEGAWTYRYPARLSRPLQVRQESLPKIVRAIAWKAQVRLCARYRRLVATGKRQSLVTTAIAREMAAFLWAIGHEVEPRRAVA

SEQ ID NO: 457052 - protein, 310 aa, unidentified
MESIIIGIDVSKDRLDVAVRPSGEAFVAERNATGLEVLAQRLKMLSPHIVALEATGGFETVAAAALAGAGLPVVVVNPAQIRDFAKAIGRRAKTDPIDAAVIAHFAEATNPEPRPLPDEATRLLADLVARRRQIIEMIVAERQRENRVAIPRLKKSITRLLKALEKELTSLDGDIDDAIRNSPAWREKENLLASVPGVGPTIARTLIAELPELGRLGRKQIAALAGLAPFTRQSGQWRGKSFIAGGRTAVRATLFMGALVAKKHNPVLKAFFDRLVAAGKPKMVALIAVARKLLTILNAIIRDNRPWQIA

SEQ ID NO: 457053 - protein, 342 aa, unidentified
MERTEGVKSFVGIDAHSGHCSIKVISAAGENLSELRVPTEVKRLRAALQGLAAPAWAMLESSFLAGFVKDSIEREVARVIVCETRENRWIARSEDKSAPKDADRLARLLRVGAFKEVYVPKGIGRDRREILRMYGKAQGDVARTKNRIKGKYRERGIFPKGSKVFSAEHRGEWLEKLERPALRLLVEALYEKRDRDVGFRDQVLEQLVELMKGTQEYALLKTIPGVGKVLAGVMSAVIGDAARFEGKRQLWSYAGLGLCSRSSGDFGQSRVRGSSGGNRGLKHAALSAATSSIRGANRFSRHYEKMVGEGIDPAMAKRTVARQILATALARLKRGQVYREEP

SEQ ID NO: 457054 - protein, 376 aa, unidentified
MLSTILIEVLQAYGRPVVCAFEATGNYHRPIGWRLAEAGFEVRLVSSLALARTREALHNSWDKNDPKDAQVILHMLRIQATQLYHDPLRAGINDVQELSKTHEAIARAKTEIQHRILTHYLPLYFPEIDRFRGNSRSDWFFAFLHAFPTPASVTALTKEEFVAAAWDVVGRKVSKTQILMDIYETARSSIGLPLPLDAPAIRMFRMVIDEARSLIRQRNEIEAQADELLRHSQDYQLLRQIPGIGPINALTIIAEAGDLRRFGHHRQFLKFCGLDLSTQQSGQYRGQTRLSKFGNARLRRTLWIAGQVAIRQRENGFRHKFERYIAKDRDNPDLRRKAMTAITAKMARVVHAVVKGGSDYRPFVEGRVPGGRTSVS

SEQ ID NO: 457055 - protein, 319 aa, unidentified
MNILGIDIAKAKFDVTLLCEGKATNANFTNTEEGFEKLGKWLKKMGTEPVHACMEATGNYGEKLATWLFDKGHQVSVVNPLVIHAYAKSQMTRNKTDKTDAALIARFCEREQPALWKPKPLEIRVLHALLTHLDGLKEERLRWSNRLSAQPDSEFVQDSIRQHIAALDRDIQRVETQIASHIDSHPTLKKDALLLDSIPGIGPATVAWLLSIQLRNFANARAVAAFVGLSPKSHSSGSSVHRPDTLSKMGNSALRKSLYMPALSAIRFNLIIAALAKRLSDKGKHARLIIGAAMRKLLVLAFGVLKSNSLFDPHFALAH

SEQ ID NO: 457056 - protein, 346 aa, unidentified
MNNNTKKGSVTVLGIDLAKQSFQLHGVDNAGQVVIKKKLNRTQLSAFVANLPVCLIGIESCGGAHHWTRLFTEMGHTVRMMAPQFVKPYVKSNKNDSADAEAICEAVQRPNMRFIPAKSIEQQDIQSLHRIRSQLVARRTAQANQIRGLLMEYGIVIPQGISYIRKSLPDILEDGENRLSVLFREQLSGLYEEMVHLDERIEALELSLKTISAQNEDCKRLLTIPGVGLMTATALIAAVGDVNVFKSGRELAAWLGLVPRQHSTGGKPTLLGISKRGDSYLRTLLIHGGRAVVRSANKHEDKRSQWVAGVEQRRGKNITAVAVANKNARIAWALLTKKENYQSCAA

SEQ ID NO: 457057 - protein, 415 aa, unidentified
MADQRQWYAGVDWASESHHVFVTDGDGRKIGERVFKHSGEGLAEMAAWLMAASGAADPSQILAAIEVPHGPVVETLLERGFKVHAINPKQMDRFRDRFTMAGAKDDSRDAEVMSSALRTDARCFRLLAVADPMVCELREWSRIAEELGVERNRLTNRMREQLWRYFPAFLEFDSDLSAGWLLDLWQAVPTPDKAASVRETTIAKLLKRRRIRRFDAAHVLSVLRKPPVQVAAGTIEAASAHITTLIARIRLVNRQIEQAHQRLDSLIARLSPPEEAAPGQNKQHDAEILASLPGVGRIVLATLLAEAHDALQRRDYAALRSLTGAAPVTKRSGKSCTVIRRHACHARLAGAMYHWARVATQHDPTSRAKYAALRSRGHSHGRALRSVADRLLNVACAMLRAGTTFNPDLAVQKTS

SEQ ID NO: 457058 - protein, 364 aa, unidentified
MDLLHTHGAGLDVHKKSVVAHARITDASGRVTRHTRTFGTMTSDLLALAAWLLNLEITHVAMESTGEYWKPIYTILEGSFTLLVVNAQHIKNVPGRKTDVKDAEWIADLLCHGLLRGSFIPPEPQRDLRDLTRQRTNLVRDRATVVNRLQKVLEWANIKLAAVVSDVVGVSAREMLAAIVDGQSDVSVLAELARGRMREKRAVLEGALSGRVRDHHRFVLASHLEQIDFLDAQIASYDEQIVARVHEQAPPAPPDAPGAPGAAAAPSTGDTDALSWEQAIEIWDSVPGIGRRLAEQLVAEIGPQMQQFPSAEHLASWAKVAPGNRESAGKRLSGKTGKGNRWLRTSLVQAAHSAVKVKSSAVAL

SEQ ID NO: 457059 - protein, 371 aa, unidentified
MKKDSTTKFIGLDVHSKTISVAIADEGREGEVRHYGTIENTIEAIDKVIKKLTATGVELKFIYEAGPCGFALYRYLTGNGFTCIVISPAMIPRRKNVRIKNDRRDAMTLARLYRAGELTGIYVPEPEDEAIRDLARTRDDARVAERKAKQRLNSFLLRQNLIYPGKTKWNRTYFNWLGSVGMKYPAQKIALQEYIETVNECTGRVARLTEQIGLAVEEWKMAPMVKALQALRGVSLICATVTVAELGDLSRFQNPKELMAYLGLVPSEHSSGETIRRGGITKTGNGHARRVLVEGAWTYKHHARITSPLIKRQRDLPKSICQISWKVQLRLCARYRKMVARKKPNNVVVIAIARELAAFMWAIAQEVRAAA

SEQ ID NO: 457060 - protein, 435 aa, unidentified
MSTLGVDLAVRAAHVATLSNERGEVIWSRRRFTSHPHDLAALSAAVGPASELTVVMEPTRSAWVVVAAHFRATGAKVVMIAPEQSADLRNYYKKHTKNDRLDSLVLSRVPLLHPEGLTEVSGLGPAEPLRRAVRRRVDIVDQRRACHQRIDAMLDLLGPAYNEVLGSRGTKTSAVVLERYGNPKTLRRLGLSRLTDLVRKTSGGHLDAEYAARLLEAAAQAITLWKGGGLDFDELAWDLAQEVRLITQLDIEIERLDGRIAELYEVADPKGIVASAPGVGPVLSAGIAGRLGDATRFANLAAVRSFSGLVPGVNQSGFTETRPGITKQGDPGLRRDLFLAAERARHQDPQLAAKYYRLIMERRLHHYSAICHLATTLVTRIAACMRSGQLYVVRDVDGTPVDTEEARAIIAKRYSIPPAARRRSRIPDAVSEPTR

SEQ ID NO: 457061 - protein, 324 aa, unidentified
MIKDIKYFGIDISHLVFDITDSNGNYHQFKNNPSGFKKFVKLLNQQSHCVMEATGYYHYQLAYHLLESGIKVSVENPLAVKRFIQMKLSKIKTDKSDSKLICEYAQKVDLKLWKGNTKDEMECLQITRALSVYTKQSTMLKNKLHGEAVLGEPSKAVVRSLKRSLKQLTKEMKTLEDKLLVLVKQSHQDLLTRLKTIPGIGPKTSIMLVVLTGGFDRFTSAAELCSYAGLTPVIRQSGSSVKGRPRISKIGNQKLRNLLFMCSFNACKYNKACRDLYERIVAKGKSKKLALIAVCNKLLKQAFAIAKSGLIYDKEYKSTLVRNK

SEQ ID NO: 457062 - protein, 419 aa, unidentified
MGKIIENCAGIDIGKRFLLCCVLTGSAAEEPRSETLRFEVTVAALQRLREWLTNKKVTHVVMESTGSYWIPVFNILEDHFVIVLANPEEVKNRKGHKTDRKDAEHLADLLRHDHVRSSYIPPKPVRDLRDLTRRRLQLTEDATRERNRVQKLLEHVNVKIGNVLSDIFGVSGLNMLLALLSGQATPEEIAQLARGSAKRKIPQVIEALEGHRMSDHERLLIRSCLRHLACLEEEVEELDGEILRRMQMPPFEAAYRLMQTLPGVGQLAAASILAETGTDLAPFPTADQMASWAGLCPGNRESAGIQKGGQTTHGNSYLRTALVQCAWAATRKQGSVFQARFQQLSSRRGQKRAIVAVAHQMLTIAYCMLKQGVPFRDAESIPRQRRRKRRAHHHLCCLRRLGLSVRVVADSNGVLGERV

SEQ ID NO: 457063 - protein, 369 aa, unidentified
MGKYIWVGLDVHLESITAAILEGDSDEVEIVKMSGDLMKVRRLLRRLSEKGTVRACYEAGGAGYVLHRVLRRDGFHCDIIAPSLIPRKTGDRRKTDRLDAVMLAKLYRSGHLTSVHVPAESHEALRRLIRLRYSYQEQCKSTKRRICGILLAHGLVYREGKTYWTKKHKKWLGKLRQELEGPIQTALAMELEHLEYLQMQRTALDTDIERYAQQPPFRVYVEVLCCLRGVKTLTAMTLLSEVDDINRFRSPRSLMAYFGLVPSERSSGDRERKGPITKAGNTHARRVLIEAAWNNRHNAGADLILNRRRQGQHPEVVAIALKAQHRLSRRFYYLSHKKHLHVAITAVARELCGFVWAIMKAAPCHQDAA

SEQ ID NO: 457064 - protein, 414 aa, unidentified
MVEIIHKSCGLDIHKQFFIATILCRSGEKHQQRFERNDDGILAFKKLVISEKCDVVACESTSDFWVPIYDSLIKHIPVIVGNARDMKAFTHKKTDKIDSEFIAQLALNNMIQSSRVFTKNHRNFRSYVRLRLKLVQKRTDLKNEAHSILASEMFNLKDVLTDIFGKSGRIILSGVFSGKTVDQIIESLSPKLRKKYDQIRDILDREISQNTAFRLQTCLKLIENLDNEIKSLEIEIFNYVYENHKHEMGILMSVPGIGELSAATLIAEIENFKDFSTGDRLASWLGIVPNVYQSADKYHNGRITKRGSKVARWILTQIAQAAAKKKNSKLKEFFNRKKKSIGHAKAIIALARKITTIIWHLIINDEIYEDETGYKKEQIQKRRIFEKVTISVDERIKIISGIFAIVEKEHKEST

SEQ ID NO: 457065 - protein, 347 aa, unidentified
MEKITRIGMDTSKSVFQLHGVNAAEQPVLRKKLTRGQMIGFFENLAPTPIAIEACGGSHHWARLLGSFGHEVKLIAPQLAKPYVKRGKNDAADAEALCEALSRPTMRFVPAKTADRQAALMLIGMRSRLIHNRTQLANAIRGFAMEFGLTTGTGIYRIEPLLERIAADEALPGLARELFALHAREYAQLRKEIEKVDDRLMAWHRESECSQRLAQIPGIGPIGASLLMLKTPDPGLFKSGRDFAAWMGLTPRDHSTAGKVRLGAITRAGDEQLRSVLVVGATAVVRHARKGKGRNATPWLVGLIERKKPKLVAVALANKMARIAWKLMVTGEQYRRNTVPSPLARAA

SEQ ID NO: 457066 - protein, 389 aa, unidentified
MSQSFDASKSMSTLDPDSTLIVVIEMSLTKWLVAAMVPGMARQPLKKIDADAEALSQLLCRWRGEATEAGKTLTRVVVTYEAGRDGFWLARWLLARNCEAYVIHASSVAVSREHRRAKTDRLDTELLMRAFLGWLRGEKGHCRMAAVPTVGEEGARRPNRERDSLVRERTRIVNRIKAVLACFGLSGFKPTSRKAADKFSDLLTPEGMSLPENTLGELRRNYARMRMLTEQIHEIERDRLSRLAAAPPTEKSPPAMVRLLARVVGVGVDTADMLVHEILSRGLRDRRAVARYAGLTGAPDESGKRRREKGLARAGNARVRFGMILLAWRFLQFQKQSLLARWFEERTRDGRPGTRKTMIVALARKLLIALWRMVTVGVVPDGVVMRPET

SEQ ID NO: 457067 - protein, 338 aa, unidentified
MALYCGIDLHSNNSVISLIDDTDRLVSEKRLDNNLELIEHHLQPYQDEISGVVVESTFNWYWLVDGLIEQGYPVHLANTLAIQQYNGLKYTDDETDARFLAHLLRLNILPTGYIYPKAMRQVRDLLRRRLLLVKQRTAQLLSLQSMIGRHTGLRLSSHQVKQLKLEELAHYFGSAATLFAAQQSHQLMQQLNTQIEAIEAFVLARCEDSEHYALITSTPGIGKILGMTILLETGPIERFAQVGNYSSYARCVPTNKISNGKSKGKGNAKNGNRYLAMAFVEAAHYAAIWEPTIKRYYQRKCKRKPVMVAKKTVANKLTRACYHMLKDGTAFDVARAFG

SEQ ID NO: 457068 - protein, 342 aa, unidentified
MTAIGIDTHKATLAACAIDELGKPVAEATFANDPDGHVAFIAWARSMAPGATIGVEGSSSFGAPLARSAQDAGLSVREVPPHLSRAERHRTRRPGKSDPGDALAIARVTARETNLPPIRLPDRTSELGLLLEAREDLIAEATRARNRLHAHLLVLLPGYGGTVANLVAARHRATIGRRLRGNTAVQAELACSLLARLIRLGREIDVLTRRISAGVVGHPLLGLPGAGPITVARLIAEVGDVRRFRSADALAALAGVAPVPASSGQIQRMRLNRGGNRQLNRALHVIAVTQARFHPPAKAYITRRIEADGKTWREAIRALKRRLVRPVFRLLAEGSDFQLAAA

SEQ ID NO: 457069 - protein, 358 aa, unidentified
MKITTIGIDLAKEVFQVHGVDVHGKTVLRKQLRRSNMAKFFVNLEPCLIGMEACGSSHHWARKLSEFGHTVKLMSPQFVKPYVKTNKHDMADAEAVCEAVSRPNMRFVPIKNVEQQAILSIHRARQGFVKARTAQANQMRGLLSEFGIVMSQGIRSINKRMPDIPEDAENGLPGTMRRLLERLNNHFKELDRQVEELELQIKLWHKENEASQRLEAIPGIGPITASAIVATVGDAAEFKNGRQLSAWFGLVPKQRSSGGKQTLLGISKRGDTYLRTLLIHGARAVIRFSGNKAEPESWLRRLMARRNKNVAAVALANKNARIIWALLAKDTKFGSVALSVFRPIVSLISLKKNCREIA

SEQ ID NO: 457070 - protein, 377 aa, unidentified
MERTTRVTKFVGLDVSKRTIAVAVADDGREHARYLGGVENTPEKVRHLMHHLGPAESLLVCYEAGPTGYGLYRQLTKMGITCVVVAPTLIPQRAGDRVKTDRRDAVRLAELLRAGELTPVWVPGVEDEALRDLVRAREDAKMDQLRARHRLSKFLLRHDLHPPGKMRPWSGVHRAWLDRLDLKGPAGVVLAEYLHTLDEIGARITRLEQAIHEAAQTSSRAPVIQALQALRGVKEVTAATLVAEVGEFSRFRHPRQLMAYSGLVPREHSTGEGRWRGGITKAGNAHLRRVVVEAAWAYRHRPALKGDLRRRQEGQSAAVTDIAWRAQVRLHRKYMRLVMRGKGGGVAAAAVARELLGFVWAVATEVEAHQRQEHRVA

SEQ ID NO: 457071 - protein, 343 aa, unidentified
MQIHSVGIDLGKTTFHLVALGAAGKVIVRKKFNRKQLLAYTANVPASLIGLEACSGAHFLGRALREQGHDVRLIPAQFVKPFVKSNKNDFIDAEAIAEAVERRNMRFVPIKTDDQLDLQGIHRVRDRLICRRTAVINQLRAFLLERGMVFAHRPANLRAAMADILENAETDLTPQMRSLINMLWDEWKLVEEQIKKLDLELERISAADAGCTRIRQIPGIGPVVATAIVASIGNGAAFHKGRDFAAWLGIVPRQYSTGGKAKLLGISKRGNVYLRKILIHGARAAVLRIKRDRAPIGPWLDALDARAPKNVVVVAMAYKLARIAWAVLSSGEDYRPMGNTVAA

SEQ ID NO: 457072 - protein, 339 aa, unidentified
MKDQDVSDVVRTKKRTAMRYIGIDVSKATFVVAYSSDKGGEIRTFNNTTAGIRQFIGTLPKDGSIHCVMESTGNYSALLLYMLNVAGITVSMENPLKVKNFAKAMLSTIKTDKSDARLITLYGEKMNPRPFKVQGEAILRLRQKRTVIRQLTKQITAMSNLRGSLACLPVPDKGATHTVDETIKFLEKKRDRLQSELTDLVEVEFSRQLALLTTIKGIGITLATALIITTGGFTYFQNAKQVSRYLGICPTYEQSGTSVNIKGHINRNGDAYTRGLLYIAAWPASRFNAQCKETYTRLRQNGKSGKLAMIAVANKLVRQAFAVVAHDKEYVDGFVSNRP

SEQ ID NO: 457073 - protein, 404 aa, unidentified
MEGPVITVDVSKGNCHYQPFIENGHPMRKPKVLDDTIDGFSRISRLMEDLEKKTGATELPVVFEATGVYHRPLQKYLQDKKIPYYIISPMLSAAYRKTTLNGNKTDSLDCTHIAKAYYSEELRPYYEQSPEYLRLMRLNRYYEGELVHLRKRKVALRSCLDIIYPRIDKKFSGNQNIYDPLPMEVLKQYPHPSLLLKHREDVIVKRISGPSGHKQGYAEKIVHKIYETAKECYSGCDPDGIEVIKLPEMIRKMQEQEQLCKHILSDITTLAKEAPYYACVASIPGIGDNLASRIIAELGDINRFHNRSALVAYAGLNPKILQSGDIDGTHLKISKKGNKHLRCLLYIAASCNYRLKKYDSFYEFNKKKRQQFGSHKSKAATVATAHKLLVVIYAMCKNGSLYSF

SEQ ID NO: 457074 - protein, 441 aa, unidentified
MELCIPAARTLVSRTRGLEAKEIFSPSGRGRKMPLTSPLIDQALALKASGSGVNECNRSDDNVGSQVRVELVVPKPTNGLGERSRAMIIIGTDYHPSFQQIALVDTESGEFQEKRLTHREEAESFYRALAGAEKKVRVGMEASGYARWFERLLTELQIELWIGDATEIERKRARKQKTDREDAQHILQLMLKDDFPKIWVASWENRDLRQLLWHRHRLVQARTRIMNQLQAVALNEGLHYKKRLWRGSGRQQLEGFQLGPWASRRRRDLLELLDRLNPTIEELSQAVEQAAEKCPEAQRLMTHPGVGALTALAFVLIIGNAQRFECGKQVASYLGLVPLEKSSGQRRRLGHITKQGNSILRFLLVEAAQATVRKDPEWRSKYFHLALRRGRNIAKVAMARRLAIRLYWMWREGQEYQQTKSSVRTQDSPEIPMVCSRTPSY

SEQ ID NO: 457075 - protein, 402 aa, unidentified
MQVDDIDVFIGIDVGKSEHWATALTTAGECLHDRPLPNDEARLREVYEHLGEHGRLLVVVDQPATIGALAVAVAQDMGITVGYLPGLSMRRIADLSPGSAKTDQRDAAVIASAARTMPHTLRSITSSDEDAAALSMLTGFDLDLARQVNQVSNRIRGLYTQIHPALEGVLGPWLEHDSVLEVIATWPTPAALRKAGRARIDAKLKANGCRRHAAWAQAIVEALSKQTVTVAGTDAAGVVLPHLARQLIALHTQRADIAAQVEALVEAHPLYPVLTSMPGVGVRTAAVFLAGTLGKTFTTGAHLASYAGLAPVTRRSGSSIRGEHVSHGGNKRLKRAMFLSAFASLRTDPVSRTYYERKRAQGKRHNQAILALAHHRILTLHAMIRNGTLYNPQPAQPLTTTA

SEQ ID NO: 457076 - protein, 466 aa, unidentified
MVLSTFNHIQGNNGSHWNRLMRGENAHQICIVAIDAAKYVHSAMISNIFGDILTKPFDFSASHSGFRELIEAIEQVKEAYDFKEVVVGIETTGHYYEDLVRMCEHQHYIVRIINAATTAEERKATLNYTKTDSIDLMAITQSLLHGRGVTSREAIPLLKELQTLSRAHRTLINSSSRAINHIRLYMDHIFREYQGTVMEIDGRMKKVELFSSFVSKASLYLMRYYPHPSDILTLGKEGLRRVSIEQNLKLRDLTIERLIEFANQSVSKPKKDLRAEIILLELKLDEYALLINQIEQLKIEIEQVLLQTDGGILLSIPGVGVTTAAELTAEMGDLSNFTRPEQLIKMAGTNPIIKQSGGKRATTYHYQISRQGRADFRAVLYRAGRSMMLQNPSMQEKYKEMKDRGKKVKQIYIALGNRLLRLAYAMITKKQLYHSSQEGYCLQSVIAGKLRNKEKQALFYDRYVLV

SEQ ID NO: 457077 - protein, 316 aa, unidentified
MTTSRTRVTGIHVGVDVGKYTLDIHIHERDLYWQVENTPEGIRSALNRIGRYAVSRLVVEATGRYELELVSAAYDRGIPVVIAKPSAVRQYARATEQLAKTDKIDARVIAEYGAVTQPRIRLQESKNIRFLKDLLVRRRQLMEMRTKELNRQGIMGTGRLAASYRRHLKQLDQEIVWIDRQIEKAIDTESLWAERKALLSSVPGVGNVLIHTLLGDLPELGTLNNKQIAALSGLAPINRDSGRSKGKRRIQGGRGTVRVILYMATVSAIQCNPVIKSQYDQLVAKGKHKKVAIVACMRKMITILNAMVRDNCEWAY

SEQ ID NO: 457078 - protein, 419 aa, unidentified
MPGSKTTRGKSAGRLLTINPDAAGIDIGATFHVVAVPPDRDERPVRTFRTFSSDLHQLADWLKEVGVKTVAMESTGVYWIPAFEVLEAHGFEVLLVNARHVKNVPGRKTDVTDAQWLQQLHQHGLLRGSFRPRDGVVRLRAYLRHRERLVDYAASHIQHMQKALMQMNVQLHHVVTDITGVTGMRIIRAIVSGNQGPEQLAEFRDVRCSASKETIREALTGNYRPEHVFALRHALELYDVHQAKIAECDVEIAAVLRTLNEERPAPEEPLPAVRHAKGRNEPKFDARPALYTLLGADLTQIHGFGPYTVLRLVAECGDDMRKWPTAKNFTSWLTLAPGNKISGGRLLSSKTRRSASRAAAPECRGHYVCGVIGVLGGSESITPRFKDHVLPIRDRAGPISWQMWFIPNLAGLYFPSIML

SEQ ID NO: 457079 - protein, 347 aa, unidentified
MRFYTKQHKFYCGIDLHARSMYVCVLSQEGEILLHRHMQAAPEPFLKAVAPYRDGLVVAVECIFTWYWLADLCADEGMPFVLGHALYMKAIHGGKAKNDKIDSQKIAALLRGGMLPQAYVYPAAMRATRDLLRRRTHLMRKRAELLAHVHNTNSQYNLPEIGKKIAYKANRDGVAERFAEAAVQKTIEVDLALITYYDELLKDLELSLLKTAKHHDANTLYLLQTVPGIGKILSLVLLYEIHRIDRFPSVQAFASYARLVKCSKESGGKRLGTSGKKIGNAHLKWAFSEAATLFLRNNPQGQKFLARLEKKHDKGKALSILAHKLGRAVYFMLKRKVAFDIEMFLQT

SEQ ID NO: 457080 - protein, 339 aa, unidentified
MQVSTIGLDIAKNVFQVHGVDGQGRTVLRRQVRRNQLLQLFGSLHPCLIGIEACATAHHWARELGALGHEVRLMPPAYVKAYVKRNKNDAADAEAICEAVTRPNMRFVPIKSAEAQSVLMLHRARHLLVRQRTAQVSALRAHLAEYGIVAAKGRSRLRDLLPVLGAEGILPELARQTLLLVAQLIEALTIQIRNIDTELLRWHRTNPASQRLETIPGVGFITATALAATVRDARVFRSGRQFAAWLGLVPRQNSTGGKERLGGISKMGDRYLRYLLVVGATAVVRYTRRKATAISIWANRLLERKAARLVTVAVANKMARIAWAVMARDESYRATSVAA

SEQ ID NO: 457081 - protein, 421 aa, unidentified
MSLRISHKAVALIGTEDNSLPKSTESRVRGMFYVGIDVGKRNHVASMMDGGKKPLFRAFSFTNTTDGAEELVARIERFAPERDTVAIGMEATGHYWLSLYSFLHDKGYLIHVINPIQTDGWRKGIEIRKRKTDDIDSLLIADLIRYGDFNETHLSDEAILSLRSLTRFRSYLVDSIADLKRKVICVLDQVFPEYEALFSDVFGVTSKELLIQYASPAELEFLSVEQLTEFLEAASRKKCGELKAEQILAAARSSFGLTHCRDTFSFQLRAMLEQMKFIEQQVSDTEKEIKSVMDRLNSPITTIPGIGPTLGAVILGEIGDIRRFDSPAKLVAYAGIDASVSQSGDSESSNNKMSKRGSPYLRRALFIAANVAAQYDPDLAAFYKKKREEGKHHNTCVGAVSRKLCYILHAILTENRAYVKR

SEQ ID NO: 457082 - protein, 368 aa, unidentified
MNRVQMVEVPEQGGHQAQRPQPDTAVVLAIDLSRSKLVYCLRWDGAEQRRLSTPAGLEHVRAVVEQYQGCRLHVVYEACGFGYELAWWLQTHAIPTTVIAPSRVERAPGLAVKTDGLDVGKMARKLEEGQLHGIYIPPRALHERRQLGRTYAQCVKERKRAQIRLRSLLQEQGRLGPLPAAGWSAYTQWLATQSLPPPVERCVQSLQRVRLVADQEAKRLHAELLTVGRHPDYAHLNTALCAQPGVGPLSAIRLILELGDMARFPTAASLPRYLGLTPSEYSSGEVVRRGHILKCGPGALRALLLQCAWAAVSKAKCPELRAVFERLAPRIGRKRAIIAVARRLAIAVRRRWLAALRARDAAPGAASS

SEQ ID NO: 457083 - protein, 373 aa, unidentified
MDNSITHVAMDTHKKEHAVAWANPDTGEVEAFTVKNTVKDITKMVKKIQRQAPGAVRFCYEAGVCGFTLKRRIEALGSSCAVIAPSLVPVKKGDRIKTDRRDARKLLDHFSAGQLTEVYPPNVEQEAAREITRCRQAAQEDLKRARHQLLKFLTRHGYLYSDGRHWTQKHARWLLALQFDAADLREVFDWYHTQLQHCQQRLATLDKEVTALAQRAVYRPIVGRLRCLRGIDTLTAITLVTEVFEFGRFASPRKLMAYLGLVPSEHSSGEKRRPGAITKTGNGRVRRLLIESAWHYRHRPWVSRDLKRRRDGQAQWAIDTADRAMVRLHQRYWRLTERGKAPPKVVVAVARELAGFIWALLHEHQVRESQQAL

SEQ ID NO: 457084 - protein, 430 aa, unidentified
MKSTQNKKIEQVKETTMIVGIDVGSEKHYFRAFIWRGIELTRKPIPFSNSMAGFDMFHSAVIELMENNHLEEALVGFEPTGHYWFNLGQFLSGKNIKFVMVNPHHVHKTKELDDNSPSKNDRKDPHIIANLVKDGRYFYTYMPTGVYAELRNASNRRFVLVEEHTRAKNRLQKWIAVYFPEYKGVYTHIDAKGGLKVLKKAATPDDIVKLGVDGIQQIWKDAKLRGSGFKKAMQIVTAATNSIGLKEGLEEAKMELLDLIEDYELQTKRIERVNDLIKNLCSQIRYVDKLLEIKGIGITTVAGFIAEVGDITRFGNAKELQKLAGLELVSADSGKHNGRTKISKRGRKRLRYLLVQAAVSVIGKNDEFKEIHQYYTTRDNNPLKKMQSLIAIACKLIRVFHVILTKGVDYDASKMLEDIRHPGVADRKVA

SEQ ID NO: 457085 - protein, 352 aa, unidentified
MRTSQKTPETITTIGVDLGKNTFHLVGLDKRGAIALQRKVSRSQLEHRLSNVPRCLIGMEACSGSHHIGRQLTALGHDVRLIPAQYVKPFLKGHKNDYRDAEAIAEAVQRPTMSFVAIKTPEQMDLLALHRVRSRLVGQRTGTINQIRGFLIERGIIVRQGVVPLRKALPDILSSSSDILSPRMVNLIAELMQDWRRLDERIETVSTEIEALARQDDSCQRLMTVPGVGPIISSAMVAAIGNGAGFKQGRDFGAWLGLVPKQESTGDRTILGKISKRGNKYLRTLFVQAAHVVLVRRPSTAKRGLRPWIEQASKRLHRNMLAIALANKLARIAWAVLARGQAYQPRIAANAA

SEQ ID NO: 457086 - protein, 333 aa, unidentified
MKDVAAFCGIDIAKHLISVHLENEDRKVISQKNMRRDSVLTFFSNMPPCLIGIESCGGSQHWARELRKFGHDVRLMNAKYIIPYRRKGKNDLNDAEAICEAVSRPSMKFVAVKTEQQQSILMVHRLRQQCISHRTSLSNQLHAYLLEFGISLPKGAKAIHKNLSAFFGNCELHPLVVEMLHELLAAIAREEEREAYFNKRIADWVKHDERAKALLKLGGIGPLSASAIVATAGDPSSFKNGRQFAAWRGLVPRQYSSGGKSKLGGITKAGDRYLRTLLIHGAPSVLLMASRGKGQQREWVNQLRTRRPENVVAVAMAAKQARMTWAIMAGKVV

SEQ ID NO: 457087 - protein, 344 aa, unidentified
MQIASIGIDLGKTTFHLVALGERNKVLVRKKFSRATLLTYTANLPASLIGLEACAGAHFLGAALRAQGHQVRLIPAQFVKPYRKSNKNDFIDAEAIAEAVTKQNMRFVQIKTQEQLDWQAMHRVRDRLMQRRTALINEIRGFLLERGLTFAARPIYLRKNLPTVIEDAEQNLSPRLSWLLDRLWQEWKQTEIDIKAITDEIERISNDDARCRRLRQIPGFGPLVSTATVAAIGNGAAFRRGRDFAAWVGVVPRQYSTGGKQKLFGISKRGNIYLRRMLIHGARAVLLRVKYDTGGFGQWVHRLAQRAPRNKVVVAIANKLARMAWAVLSSGKEYRHQPLQLAAA

SEQ ID NO: 457088 - protein, 436 aa, unidentified
MRRVIGIDIHRTFGEVVIWENGMTRHEGRVEMTRTALEGFGRQLLKTDEVVIEATGNCMAVSRVLSPHVKRVVIANPLQVKAIAHAHVKTGKVDAGTLASLHAAGYLPEIWTPDAATERMRRLVARRYQVVRHRTRIKNEVHAILHAHLIPKCPHADLFNRRGRDWLSRQPIPEDERAAITRHVRELDRLGEDLAMLDRDIARDALEDEPIRRLLTITGVNLAVAAGLMAAIGDVERFSSPQKLVSYFGLNPRVRQSGLGAAHHGRISKAGRSHARAMLVEAAWAAAKAPGPLRAFFIRIRAKRGHQIAAVAVARKLAGLCWHMLTKGEDYRWARPSLVAHKHRSMELAAGQPQKKGNKRGATYAYNVKELRHQEMQIAERAQESYEHFVAAWRSHPPSKGKCAAASNRQGLHGLPGSASSRHATLRHEVDRTERE

SEQ ID NO: 457089 - protein, 428 aa, unidentified
MSYRIAGIDVHKKMLAVVVSDVEIESEYQFERRMFSSNPEQLRSLAAWLVEQKAEEIVMESTAQYWKPVWGALERYWKPMCEKREGARRKSGTLHLAQALSNRGRRGRKRDFVDAERLVKRLVARELTLSFVPDAEQRLWRTITRKKYQLRRDLVRIHNQLEALLEEAHIKLSSLVSDLLGVSARRMLKALADGETNPAALAALAHERLRATPEQLCDALGACTELKPVYRRLLKMTLEHLQILEQQIGQLDQELATLLHPHQDAVERLAEVPGFAVDSAQQIIAEVGPAAATFPSEKCLSSWVGACPGEEESAGVNYSHRSPKGNRHMRRLLNQTANAAVKAKGSIFEIIYRRCVPRLGHNQAIGVIAHRQCRLIWLILHQGTRYEERGPAVTKRSRYQRTWRMIRQLRNLGYRIELPNPDASQAQA

SEQ ID NO: 457090 - protein, 367 aa, unidentified
MKLSVGVDLHKGQFTVYWLSGDRSVGEFGRFGTSAAGYEEFEGRLREYVQAGHEVEVAVESTGNTRYFKTRVERAGVVVKVINTLKFKVVNESVKKTDRHDARTIAEFLEKDMLPESRLCSEESEQLRRLLKSRKLLVRTVVSLKNQVHGLLLGCGIETRRGQLQSKKERRRILDVLAEQGLASQAVEPLFETIDCVEKEVKKLEKLLIERVSGDRMVELLMSIPGTGIITAATVRAYVDDISRFAGYKQFSAYAGLAPWVQNSNERERYGSITKRGPEPLRTALVQMVLGMVRTQRLTGTYRLMMHYQAMKPHKGSGKSIIATARKLSKIVWYMLRNDEPFDPLRMTDPYIRKIANEMRTAVAEAA

SEQ ID NO: 457091 - protein, 402 aa, unidentified
MNSIGIDISKGRSMVAAMRPFGEVVISPFEVHHTDSELSELAKLLKSLDGETRVVMESTGNYHAPVAQLLHDAGLYVSVVNAKLVHSYGNNDLRRVKTDRKDAVKLANYGLERWLTLPRYIPEENTRLLLKNCYRQYRQYSKVQTVLKNNLISLLDTVFPNANRLFNSPARADGSEKWVDFVAEFWHCKCVCERSEKAFVNKYQRWCRKHGYNFSEDKAHAIYDEASGHIGVMPKAETTKLLVEQAVSQLRTTSAALAALKQEMHSLASQLPEYPVVMEMFGIGPTLGPQLMAEIGDVRRFYSKKALVAYAGIDAPPNDSGDVIGRHKSMSKVGASSLRRTLFLVMSIYLQTSPPDEPIYQFMDRKRTEGKPYRVYMMASANKFLRIYYATVKAYLESLEQI

SEQ ID NO: 457092 - protein, 337 aa, unidentified
MKRSLFIGVDISKATLDVSILSPTDISLIHYHQFTNNSKGFTQLLKWIKQKSEGVKVENWKACMENTGMYSMELNCFLQQKGIWQCLENALQIKRSMGILRAKNDKADSKTIVLYTYRFSDKLKPYVFPSNVLLRLKALFSQRERLVNMHRQVQLGMESLSGYDQKLVRDIKKQSEALLQNLTRQIKDIDQLLKQCLKEDASLCRKAELMQSVPGIGLQTAVYMLIASRGMQSFDSPRQFACYSGCAPFEHQSGVSVRGKSRVHFIANRKIKSLLHMAALSAVAFNEELKTYYKRKVQEGKNKMSVLNAIRFKLICRVFSVVKRGELYQLNYNKLVA

SEQ ID NO: 457093 - protein, 360 aa, unidentified
MELEEVPMRIVCALDVHRRQITYLTVEVDSGEVSRGRISPATRQSVCAWLAQFDGVDEVHFALEGTTGWRFVVEAIERAGHRAHLADPAETAAKRGRKRRAKTDRADCDLLLRLLASGELPESWIPPAQILELRTRVRLRKALIDERTAWQQRLQAQLFHQGVAAGLKPRTRAGREALASVELSPAGRELVALALRMIDRIDRELAPLDSLLARFARRQPGCRALITELYGVGPITATAIIAELGDARRFRCSDDAVRHCGLDVTVHQSDNKRAPGHLSHEGPGLLRWALFEAAQQACRPASPDHEYYRQVALRIDHNRACLSVARKLCRRAYHILRELGDEALAPIDAPVAEEVIAAAA

SEQ ID NO: 457094 - protein, 374 aa, unidentified
MEENSAVYVGFDTSKQSNAVAVAEGGRSGEVRYLGEVENTPEATVKLVRRLSKKHARLVFCYEAGPTGYGLYRQLTGLGHECLVVAPSLIPQKAGNRVKTNRLDALSLAKQLRAGELTAVWVPDDHHEAVRDLSRARQAAKESERRKRQQISALMLRQGRVYAGKTSWGKAHMAWLASQKLEQLEQRIALEEMLHGVRQEGERIKRLERAIAEAVPRWSLGGSVTALMALRGIDLIAATTLMAELGDLTRFGTARELMGYVGLVPSERSTGKSVWRGGITKTGNRRARRMLVESAWTYRHPPRVGAAKLRRVAAAPPEVRDIAWKAQVRLTGRYRALLRAGKRDVVAVTAIARELVGFVWAVARAASSPGATAE

SEQ ID NO: 457095 - protein, 440 aa, unidentified
MRLRTRILEIVPFEELLSVHIRSDLMEMIKNKVCGADIHKKFLVATILSRDGTKTSERFGMMLDDILKFKEWVIANNCEQVAVESTGVYWVPIYTVLEDKIEVIVANAYQIKHTPGRKTDLRDSEWIAELCLKGMIEPSRIFPKEDRELRTLTRARETLVNNRTQMKNRIHQALESSCIKISSVLSDIFGKSGRYILDGLLEGKTIDEILVGIKLKQIRKKDQELREAIKNSLDPAQILFIRNCLELMEEIQKRINNLDTEIMSRMERMKEDVEIAMSIPGIAFTSASSILAEIGNYRDFANGNKLAAWCGLVPTVSESAEKRILGSITKQGSKHVRRMLVQVAHAISRTRNSRLKSFFLRLKAKKGAKKAVIALARKVLCILHHLLVNREMYEEKGNLKPKTIKFDRTSSPIQITEQYMIDTLVKAGYIIKKNGILGGE

SEQ ID NO: 457096 - protein, 452 aa, unidentified
MLGTEHTSQRGITSTPRKGLGMKNITKNQKLAAITETTLIVAIDVGAYKHHARAFDWRGIEQQKKAFTFSNDRHGFESFLNWIEHIQLESQSTEVMVGLEPTGHYWFPLFEFLQAHKLHLVITSPVSVKQTKETSTNSASKSDTQDPKAIAHVMMSGNYQEVYRPQGTCAELRKAYTVRNSVMEQNKATVNRIHAWASTYFPEWHKVYSCIQCVSLLMVLRQAPLPMDIVELGVKGILKHWRACQLRGVGRDRAERLVEEAKRSVGITEAAEIARDEIQILLQHYDLQKAQLARLDKRLEQLVEKYPRGTRLRQIPGIDLQLAAGFLAEVGEISRFPSAAQLQSYAGLDILQNSSGKHKGRSRISRRGRNRLRRVMFMAALSVVSNTSEFRAVHEYYKHRKKNPLTPMQAMIAVACKLLRLFYAILVKGVSYDPAKVTLGAAPPCSETTQAA

SEQ ID NO: 457097 - protein, 365 aa, unidentified
MATIVSSEPRRVVGGVDTHKDVHVAAVIDAVGRSLASESFPTTRHGYRCLLSWLRSHGELVAVGVEGTGSWGAGLARHLTTRGVAVVEVNRPNRQNRRLRGKSDAVDAEAAARAVLNGQATVTPKSGTGPVEAVRQLRIARSGAMKARTAAANQLHSLCDTAPDPIRAQLARLSLTKKVAIAERWRPGSATTVETAAKRALTTVARRWRALDNEARELDRHIKAILDQIAAALLAVHGVGYATAGQLLVTAGDNPGRLGHEKSFAALCGSSPVQASSGRTNRHRLNRGGDRQANSALWTIVLTRMVSHAPTKAYVERRTTEGLSKTEIMRCLKRYVARELYPLLQAITTATTLEQRHANPAESHP

SEQ ID NO: 457098 - protein, 414 aa, unidentified
MDTIVSRCAALDVHKDTVMGCVRVPDEFGGRVQEVREFRTFTAGLRALRAWLAGHGVTQVAMEATGVYWKPVWHVLEAEPGWALLLANAQHVKNVPGRKTDVADAIWLAQLLECGLLRGSFVPPRVIQRLRDLTRYRKKLIEERTREIQRIQKLLEDAGIKLDSVVSDVMGTSAREMLEALIGGQGDPGVLAELARTRMRPKIPELRLALEGGFDPHHALMLRLHLDHVDQLSVAIEGLDAQVDRVILPFSEQHRRLTTIPGVGKRTAEVIIAEIGVDMSRFPTASHLASWAGICPGNHESAGKRRSGKARKGDAALRAALCESAWSAAKTRGYLGSLYRHLLRRFGKKGQAKAAFAVGHAILVIAWHLLHDERDYQDLGADYLDKRKDNQARKRYLIRQLETLGHRVTIEPAA

SEQ ID NO: 457099 - protein, 408 aa, unidentified
MRVVGLDIHRVFAEAVMLDDGRVTRLGRVGMTRDHLAAFAQTLTHDDDVVIEATGNASAVAEVLRPHVGRVVIANPRQVRLIAEARIKTDVIDATVLARLHASGFLPEVWIPDEHTLGLRRQVTRRTQIVRQRARLKTIVQSILHAHLIPQCPHADLFGPRGRAWLLRQPLPADESDAVERHLREYDRLTDDLRVVERELARDALTNPKVKRLMTIPGVDMVVAVGLMAAIGPAERFPGPDRLVAYLGLNPTVHQSGEGRPRHGRISKQGRTHARTMLVEAAWQAVRGPGPLRAFYQRVARRRGNHIAAVAVARKLAVIIWHLLRREEDYAWVRPALHAKKLRDLELRSGEPARRGQRGAAYAYNLSRTRVEEKRRAEQAETAYRRLTEGWSRRSRRVPTGPAKEERP

SEQ ID NO: 457100 - protein, 409 aa, unidentified
MNPLYVGIDVSSRNNVVYLMKPDGSKIKNFSVPNSRDGSHKLVKEILAALTSFSLTDVIIGLEATSVYGDNLVCFLREDGSLTPYNRKIHVLNPKQVSNFKEAYNDLPKNDFVDSFVIADCLRFGRINKEVYLDDYRFKALQNLTRARFVAVQNLTREKQRFLNVLFKKYSSLAQEKVFSDTFSTTALAVYEEFDSADTLAYMDLHELTAFLQEKGKNHFSNPEEVAKAIQKAARSSYRLPKTVNDSVNQVLSISITSIKAMEAQIKEFDKAIAAQMELIPNTLTSIKGIGPIYSAGIIAEIGDINRFPNQAKLAKYAGLAWKQHQSGDFESQNTRLIQTGNRFLKYYLGEAAMSLVKCDAEYSRFFHLKYKEVNKYQHKRALALTARKLVRLVYRLLKDNRMYIAPRA

SEQ ID NO: 457101 - protein, 334 aa, unidentified
MKKVKEITESIGIDVSKATLDVFIHTKQLHKQFLNNKKGFTELLKWVAKEKVNAEETIWCFEHTGWYCILLSHFMYSNKFYYCCVNPMEIKRSMGLKRSKTDKQDAQEIARYAWLRRNELESSIPMPLNLVDLQRLVSLREQLVKQTTALKNLCKGFKVTVEKESTDFGMKTIKQTLKQLESQIKKVEKEMTQLIKQDGDMYHNFKMSKSVKGVGDVMAIQMLLHTHNYSRFGTWREFSSYCGLVPYPYQSGTSINRKPTTHSISDQKMKSLLTMSAISAIQADKELKQYFKKRVEEGKPKMVVLNIIRNKIVSRIFATVKRGTPYVEMYKFAA

SEQ ID NO: 457102 - protein, 354 aa, unidentified
MQQFVGIDWATRRARWCAVNRAGALIDEGWSPADEDGLASMVARLGPDAVACLEMMSGAAWVRDRLQAGGWTVQVADARKAKAVGSLAAKTDKLDARVLAELARRDLVPQVHVPTFADRELKERLGRRMHMVRLRTAAMNRAHGVLSQFGVTLAFKRLRGPDREELLIARGIPEVWRRSIAEAVAVVAMLDQRLIPLEQELRPLARDDPRVQLLITIPGVGDLLGLTIASEIGDISRFPSARKLIGYSGLTPRVYQSGQKARTGKLSKSGSTMLRWAAIEAAQQAWRPNNPWNQLYLDVKQRCGGKGNPAKAAVARKVLIATWHVLALQQPFNPSRPRGASAPVPASSSCVLAD

SEQ ID NO: 457103 - protein, 376 aa, unidentified
MNYKQNEKINQVKESTLVVGIDIGSTTQYARAFDWRGIELGKVFPFSNSREGFESFKAWMQHLQDKYRKSDVIVGIEPTGHYWFDLGAYLEDEGILLVMVNPYAVKQTKELDDNSQSKNDRKDPKVIAKLVTEGRYSAPYTPDGVYADLRIMVANRKRLIREMTQIKNRFARWFAIYFPEYTDVFGDYEAQSSMLLLKKVCTPEAIVELGAEKINQIWRDAKLRAVGMKRATTLCETAKRSIGLKKGSSAARYEMKLLLEDYEYKKAQLDAVMEEIEKLCRKIPESEQMLAIKGIGVITVAGFLAEVGDVRRIESPRQIQKLAGLSLRENSSGKHKGQTTISKRGRSKLRAVLFNAAIPLIAKNPCLLYTSDAADE

SEQ ID NO: 457104 - protein, 347 aa, unidentified
MRFYTKQHRYYCGIDLHARSMYLCVLDRQGEILMHRNMTCSPESFLKAMAPYREDVAVAAECIFTWYWLADLCARENIAFVLGHALYMKAIHGGKAKNDKIDAHKIAVLLRGGMLPMAYVYPAEMRSTRDLLRRRMHLMRKRSELLAHIQNTNSQYCLPQFGKKIAYKRNRHDLPEHFTDLTVRRSIEMDLSLIDHYDKLLAEVELYITQNAKIHDVNAFNRLRSVHGIGRILALVMLYEIHDIKRFPTVQDFVSYARLVKCSRESAGKRHGSSGKKIGNVHLKWAFSEASVLFLRANPKGQRLVDKLSSKHGKAKALSILAHKLGRAVYYMLQRDKAFDMNKFFNS

SEQ ID NO: 457105 - protein, 355 aa, unidentified
MQKYNISFKGQNIFVGIDVHLKTWHVTTLTESGYKYSFAQHADARELFERLNKKFPEARFKSAYEAGFCGFSVHYALIEYGIENIVVNAADIPTTGKEKAMKTDAIDSEKIAWALKRGELTGIYIKDKRFMDDTNLMRLRQRFITDLSRQKNRTKHLLYTQGVAYPERFRNSKTHWSRNFMRWLREEVELLTEEKQTLMLLCDQVDNTRKAILKVTREIRRLSTTEKYKDNFDLLISVPGFGLVMAMTMLTEFDNNIMRFPNERKFVAMLGLIPTCHDSGEKKVSGEKTFRGNKQLGPLVVESSWVAIQRDCELSSYYSNCCQCMKPQRAIIKVARKLACRAYAVMKTKKAYVLP

SEQ ID NO: 457106 - protein, 402 aa, unidentified
MVFSMFYIGIDIGKRHHEAGLINEKGDHVGKTIRFANSKDGSEKLLQFINQYKLTPDNSFVGLEATGHYWLSIFSFLHKLGFKTTVFNPLQSDALRHFYIRKTKTDVSDAYLIAQVIRIDSPDETPFLEEDLLQLRHLERLRFSFVDQCSDLKRKVISLLDQVFPEYEKIFSDVFGMSSTEVLLHSPLPEDLLNIDTKKLADLLNQVSKGRYGESRALTKANQIQESALESFGITVGSDVFKLQIKLLLEQIKLIEDHLKTIEQTMIEISNRQTHFLTTITGISDVTACVILGEIGSISRFERPEQLVAFAGLDASVHQSGDFNSNRSRLSKRGSPYLRRALWQAAFVASNHDPALSLHYQKLRKRGKAHGTAVGAVARKLTHIIFAILRDNKPYEPRPTLE

SEQ ID NO: 457107 - protein, 340 aa, unidentified
MGEITTIGLDLAKHVFQVHGVDADGATVLRKQLRRGQLLAFFSKLPPCVVGLEACATAHYWARELGAFGHEVRLMPAQYVKAYIKRNKNDAADAEAICEAVSRPTMRFVPMKTAEQQAALLLHRGRERLVRQRTALVNALRAHLAEFGVIAPQGLRNVGKLIGIVRNEEDARLPGAARQVLQVLAAQIEQLETAIAELETQLMAWHKSNPVSQRLATIPGIGPIIATAIAATVVEPNGFRSGREFAAWLGLVPRQNSTGGKNRLGGISKRGNQYLRRLLINGASANLLRSKATNADPWVIGLRRRRPSLVVAVALANKTARIAWAVMHRQENYQRMVAAA

SEQ ID NO: 457108 - protein, 397 aa, unidentified
MCNCECGFVTKPPKYLFDIAKYKHAAFIMDASTGESLCEPFFFKNNKEGFQKLYMELNKYAKDELLIGMEDTGHYNFTIESSLLAEGYKVALINPITTKNLRKASLKSVKSDKEDALLITKALLDKDYYRIISIQDEKLNEAKQLTRYRIQLTIEMNRKKNILQRHMDIVFPEFNTLFKNGYTITYLNILRKYGDAYTIAHTDIRSLRKCFKYCSSFTAEELKELASNSVGIHDVSISFIIQSIVSSIDLINSQIEELDKKIEELAITQDSSITSIPGISKISGTSILAELGDISKYSNAGKVIKFAGVNPYISESGEFSADKTAITKKGSKYLRTTLYRVIIPVIRHNPAFNNYYHLKRSQGKGHLCALGHCVRKLLRIIYHLETNNLSFDINLLK

SEQ ID NO: 457109 - protein, 418 aa, unidentified
MKCFIGLDVSSTKLDYCILTDDVALHILDNGSVPNDIVGASEIKNQILELNQHYQFNRIVVGMEATSLYSFHPAMFFNEDEELQDLGVEAFIEQPQKIKKYREAFEENKNDTIDAFYIADYFRIERFTNSIIKEEQYIALQHLTRTRLQLMEQLVRTKQHFIENIYYKCNTLASTLKKDDLSTSIFSATLIQLMTENYCLDELAQKPLEEFSDLLQEMGKGRFKKPEKLAKAITKAIRGSYRLGKLQKNSVDIVLSVLVREIRSLQKAIKDIDKAIEDLVEIIPEYQCLTSIPGIGKVFAGGIIAEIGQIERFAGHPQVAKYAGLNWKQTQSGNTNSQNTELVKRGNRYLRYYLVEAANSVRRHLPEYQEFYTKKYNEVPKHQHKRAIVLTARKFVRLVETLLRNHQLYTPPRRYMDQ

SEQ ID NO: 457110 - protein, 386 aa, unidentified
MQASTVGTPTASRYGTIFITIELSQKSWLVTLHSPDQDKLSRHQLAGGDHAGLVALIDRIRDRAARALGGVPAVASCYEAGYDGFWLHRLLLAAGITNYVFDPASIAVDQRARRVKTDRIDGETMLRTLMAFLRGEPRVVRIVRVPSAEQEDARRDTRERQRLITEQTAHTNRIKALLRLLGMAVGNPRRRDWLIWLAAQRDWQGQPVPPRLAAELEREHARLMLVREQLEALSQAAVGADAPAAAAQMARRSALLLRLKGLGPVFAATLTNEVFYKDFRNRREVAGYCGLAPSPWRSGATNHEQGISKAGNPRARHKAIELAWLWLRHQPDSALSQWFRERTLNGSGRIKRIAIVALARKLIAALWRYLTAGLVPQGAMFNMCNG

SEQ ID NO: 457111 - protein, 452 aa, unidentified
MRTIGLDLAVQTAHKAVVLDEHGHFCTPLLTVHTQPSELSQLLARAREGASSAEVQIVMEPTGMAWFPVAVYSARQAVPVFLVNSQEVADLRRYYQRHAKSDRIDARVLARLPLVNPDKLHRLTLPSSTALACQRGCKQLDHLTTQITAIKNRLQAIDRFAWPGLEEQVFADPFAPAARFFREHWYDPRQVVQVGANALRLQWEARAVDADDGGAWVELLLTLAQQVLTLYGTDGQFLDFAQLQAEVQRDQAWLTWLEQQHHTLRLRTVRPLYRAIHPSRNLETLKGVGQDSAAVYASFIGDPRRFSSTRLFRGWTGMVPSSEQSADTEAKGLHITQAGPDLIKKYAYLDAEIARRYDPQIAAIYYDQMMHKGKHHKQAVCACATHLLDRVLAVLRADKPYEMRDTDGTAISNQQARELIEERYTVPPEVRRRTNKRNRRQQADQRAERRAT

SEQ ID NO: 457112 - protein, 449 aa, unidentified
MTKTKRRLKGIPVIHHGAAGIDIGSRFHVAAIPPDLSEHSVRTFQAFTSDLHAMADWLIQAGVTTVAMESTGVYWVPVYEILEDRGLDVILANARDAKGVPGRKTDVTDAQWLQKLHACGLLKASFRPDRPISALRSYLRQRERHLDYCAAHIQHMQKALTFMNLQLHHVISDITGVTGMKIIRSIVQGERNPQYLATLRDGRCKATEETICAALVGNYQPEHLFALEQAVLLYDFYQSRVHDCDEKIAMTLNRLNQSTSAPEAPIPKPRHKTRQPNALNFDVRVPLYQLVGTDLTQIHGIGPYLALRLISECGTDLSRWPSAKHFTSWLTLSPGSKISGGKVLSSHSRKTKNRITAHLRLAATTVGRTNTALGAFYRRLSARIGKAKAVTATARKIAVLFYNAMRYGMAYQDPGSDHYEQQYRKRVVKGLHRRAAEFGFTLHEIECVS

SEQ ID NO: 457113 - protein, 355 aa, unidentified
MNSKKYIGMDVHKESISIAVMNDAGKIVMECLIETKASMILQFIDGLRGDLQVTFEEGTSAAWLYDLLKPHVTRVVVCDPRKNASMKEGNKSDKIDARRLAELLRLNHLSPVYHGEHGLRSLKELVRSYLTITKDLGRVMSRVKAIYRSWGIACTGKEVYAPRHRSEWLGKITEVGVRRRAEFYYQQLDALRTLRRQVRRDLLAECKKHQAWKQLCQIPSIGLIRAAVLLGILQTPHRFRTKRQLWTYSGLGIETRSSADHRSVDGQLERAKKQICIRGLNQNCNHDLKNLFKGAAIVASSKPGPFQEFYTALLTKGIRPEMARLTLARKIATIVLIVWKRGVSFDAQHLKPQTA

SEQ ID NO: 457114 - protein, 368 aa, unidentified
MSKAITSFVGLDVHIDSIAVGVAPAGRTEPHFVGTVAPQWAALAKTLGRLGKREALHIVYEAGPCGYGWARQLRAHGYRCEVIAPAKIARRPGDRIKTDRRDALLLARAARAGELVSVTIPDERDEAIRDLTRAREDAVRARLKARQQLKAMLLRHGHRYTGRSSWTAAHERYLASISFQQPAQDVAFAEYRGAVRDAHERVERLTEAMRSQLKHWRMRPVVEALMSLRGIELVAAMTLVAEIGDFTRFARAPELMGFLGLVPSEYSSGSTRRQGAITKTGNSHARRVLVEAAWNYRFPARLSHALQLRQEGQLKAVREIAWRAQLRLARRYRHLSARKLAVNKICVAIARELSAFIWDIARQVKPTA

SEQ ID NO: 457115 - protein, 366 aa, unidentified
METIYIGVDFHARQQTICYLKTETGELVICELQHQDKAQVRAFYQQFPSPVIVGLEASGYSPWFEALLEELSCEVWLGHATEIRRRARWRQKNDRRDAELIWELMVHGEFPRLHRPPATSREVLRMLRYRQKLIKLRTMAKNSLQAIALQAGLAKGKQLFSRVGHEEFKSAAMSPVLHWQHEHWFALLQPLNQQLLETTVWFKEQSRGNISIQRLRTHPGIGLLTAICILHTLQPVERFRNTRKVAAYAGFDPVERSSAERQHFLGISKAGSRLLRYLLVEAVQTAVRYDEDLKRFYKRLAQRRGRPKAKVAAARKLLIRAYIMMRDEIDYAEFRRRAVAARLARTGQGPSNVPEVLIGQPASPDA

SEQ ID NO: 457116 - protein, 430 aa, unidentified
MSHMIVPHADRRPVPSLERGLVIGIDISQGRFDWRPCRHQGWGPRRQHPQSQAGFLTFERHLEGFVAQGYEVWLAQESTGPYGQCLQEWLLARGWKLVLVNPFHVHRTKETRDNSPHKDDEKDPGVIADLIWHGAYHAPRRLTGAYAELRAGIAEWGSLARKRTAIRNEAQALLEGWFPEVKGQFKDRLCLSVQSLIRRYESPRTLVQAGKRSLRATLRRGTHGRGERYAEALWELAQSSVALPHGQRSRVRALRGLVEQLVLVEARQAALQEELRHWLAQTEEGKYLLSVPEVGQITAAGVLGGCGPLAEFRNARALEKFVGLQLCRNASGQRQGKFHITKRGRSSTRHLLGQMAARHMQAGGLGYDWAQERKAQGMPPLAVEVALARKLLAMLYALARERRDFDPDRWSLWTQAADGVPALQGTPLAA

SEQ ID NO: 457117 - protein, 375 aa, unidentified
MKNKVRFLGLDVHAETITVAIAEPDGEVRSLGTIANRAESIRKLVKKLGSVEQLKACYEAGPTGYILYWQMAELGVACEVIAPTLVPMKAGDRVKTDRRDAERLARSYRSGDLTAVWVPDEGSEALRDLVRAREAAKQDQLRARHRLAKFLLRMGQRPAAGMKAWTAPYMAWVRQVHFTQGAREATLLDYLHEVDHMGERVRRLEQAITEAVKLASPQVREVVKGLQALRGIAEISAVTIVAELGNIARFETPRQLMGYSGAVPTEDSSGQRTRRGSITKTGNAHLRRIIVEAAWSYRYRPAIGPRLRKRQEGVSEEIKEIAWKAQVRLSKRYARLAAAGKDQRKIITAVGRELLGFIWAIGIKAEAASELQMAA

SEQ ID NO: 457118 - protein, 342 aa, unidentified
MQITTIGLDIAKNVFQVHGIDANEKVVVRKQLRRSQVLAFFKALPPCLVGMEACATAHYWARELTKLGHRVRLIPAKDVKAYVKRNKNDAADAEAICEAVRRPTMRFVQIKSVEQQGQLMLHRARDLLMRQRTQVINALRAHMAELGIVAAQGREGIKDLLKIIASEEEARLPVDAHASLVVLAAGLQAVQTMIGSIDKRIMRQHRSNEASQRLESIRGIGVMGATAIAATVADPKVFRSGRDFAAWIGIVPREDSTGGKHKLGPISKRGDRYLRRLLVVGAHAVLKQARRQPEKYPWLTQLLARKPFKVVAVALANKMARIAGALLAKGGTYRAPALTAAG

SEQ ID NO: 457119 - protein, 331 aa, unidentified
MTREYIGIDLHKAFFQACAVTGTGTRLWEGRFARTTEGLAQFVARGVGDAHAIAVEASAPTWAFVDALTPTGARICVVDPRKTKLKAGFAAKTDRLDARRLADALRRESVVSIYIPSPAIRALREVCRGRHQLVRLRTRLAQMIRALLLRSDAGEPPGTRLYAPAALAWLAAVALPPDADRALRRLERLYRAVHVDAQAADAEVKQRAAADPIAAALAQLVGVGPVVALTLRAEIGDITRFAGGPALASYAGLVPRVERSAGRIYHGRITRDGSPWLRWALVATAHHAMKRRDSIGQWARRLAIRKGINKARVALARVLCEQVVTTWPKTT

SEQ ID NO: 457120 - protein, 363 aa, unidentified
MNYVGVDIHKKYSVLCAVDEVGKKVGEGRVEGNSEKGFARFFAGLEGPSKAVLEACWNWGLIHDLLEEIEEVEEVVLAHPLKTRLIAEAQIKNDRLDAYALGTLLRGELVARTHIPGRETRARKNLLRQRLYWARLRTMLRNRIHALLDRQRGMQLPQCSDIFGVRGLGFLRRLELGEPDGTLLREALALHDLIAQQIKAQEKRIVPEFEDEAEHRCLRSVPGIGATLAAVIGCEIDGILRFGSAEKLCAYAGVVPTTYASGGKVVHGRLLPSCNKWLRWALIEASWVAIGCSAYFGTFYQQQRARRKKPNTAITIVARRMCRILYQLLQEKRDFEKQPPRAHSKSCPRLLRVKTDGNTTACC

SEQ ID NO: 457121 - protein, 367 aa, unidentified
MDAPCTGVECAKMEVLLTPQQGTPMSEITVIGLDLAKHVFQVHGADPDGRPVLRKRLRRGQVLEFFASLSPCLIGMEACAGSHYWGRELRALGHEVRLIPPQYVKPYVKTNKNDATDAEAISEALTRPTMRFTAVKSAEQQSVLMLHRTRELLVRQRTMLVNALRGHCGEFGIVAAQGLSRAGDLIKRIEDPADTALPDLARQALQCLTSQIRAIQEQIALIEKKLLAWHSSCEASRRLAEIPGVGLVTATAVVASVGNATQFRSARQFAAWLGLVPQQHSSGGKERLGHISKRGDGYIRRLLVHGARAHLSWSRRKKQIRSAWLTGLLARRPTNVVLLAMANKTARIAWAMLSRGERYQEMIAAAA

SEQ ID NO: 457122 - protein, 349 aa, unidentified
MRFYNRQHRHYCGIDLHVKTMYLCILDSTGQILLHRNVATTPAAFLAAVAPYRDDLVVCVECMFTWYWLADLCAAEGIAFVLGHALAMKAIHGAKAKNDKIDSHKIAVLLRGGLVPQAYVYPAAMRATRDLLRRRLHLVRKRGQLLAHIQMTREQYNLPPFQRRLAYPANRDGVTRHFSDPVVRKSVEVDLALVDQYDVLIADLEQVLVREAKADDADAFHRLKSVPGIGPILALTILYEIHDIHRFDRVQQFASYARLVKGRHESGGKVLGTAGAKMGNVHLKWAFSEAAVLFLRHTHTPRMQKQRARWEQRHGKGKALSILAHKLGRAVFYILTRGTVFSMEKFLAA

SEQ ID NO: 457123 - protein, 349 aa, unidentified
MIARPDAACFVGIDLHKDTLTACVLRGRDREVTYVKLACKCRDQIRSFFAALPQPSAIAIETVGFYRWLWAELEPLAGQLVLCDARGARALAGRRIKTDREDALNVALLLADGRLPLAWAPPENVQVLRTWTRHRNGLTRQHAKVLHHVKSILNRLNFPGPVRLDAAALQRYLLAGVERFTADDLTMLWQHQRRLVEIEQDRAQSERRISELMRAPEFSRLREILESVPGVGLVTSATVIAEIGDFSRFADSKAIGRYAGLAPTVYASGNSSRLGHISKTGAPDLRWVLQQAAWTAIRCDAGFKKTWLRIAKTAGKKAAAVAVARKILVLMWTLQRKDEPSKSRDPVAA

SEQ ID NO: 457124 - protein, 386 aa, unidentified
MRQANDLSRSLAAFDQPTTLIAVIEMSQSSWLVAGIVPGLERHPLKKLAVDEGSLLRLLQRWRDQAIRAGCRIERISVAFEAGRDGFWLARWLRAHDIEGYVIHPTSVAVSREHRRAKTDRLDTELLKRAFLGWLRGEADHCNMAAIPTIEEEDGRRPHRERESLVAERTRIVNRMKGCLARLGIRGFKPTLQRAPKLLSTLRTPEGTPLPPNALAEMGRDLARLHFVEGQISEIETARLERLEQAPTEKSHAMVRLLARVIGVGIETADMLVREILSRNLRDRRALARYAGLTGAPDESGSKRREKGLARAGNARVRRGMIQLAWRFLMFQKESALAQWYRSRTVDARQGTRKSLIVAMARKLLIELWRFVTTGETLLGVKMRPA

SEQ ID NO: 457125 - protein, 334 aa, unidentified
MTSIAHTRQVNVTGTICGVDVASKSLEARIGQHGAAGSFPNNAEGIAELGAFCRSHQAELVAMEATGGYEQQAFALLSEQGLGVAILNPRAVRQFAESMGSLEKTDRIDAGMIAWYAEVKKSRPVCLAPQSQQHLRALVTRLRQLTEIRTAQLNQQRLVIDRSVQASFTKLLTFVGRQIRDLEQRITKLIEQDPLWRELNQTFRTIKGVADRTVARLMAEMPEIGTLSNKTISKLAGVAPIARDSGKHQGKRIVRGGRPAVREILFIVASVVGRYEPDFIAFQQRLRAAGKPPKVVRIALAHKLLVRLNAKAREVRQHSAALQPASSALLLEKI

SEQ ID NO: 457126 - protein, 345 aa, unidentified
MLAKDIDYVIGVDIHKDSHSAALVNSTGGVITALDVTASEAGYRRLLALANRQAVGRRTWAVEGTGSYGSGLATFLVQQGEQVLEIERPRRPRQKPGKSDQLDAIAAARQALAGDKLAMPRRRGAREALRILLATREGALKARTQALCQLHALVVGAPEMLRCRLRRLSTETLVSRCAQLRRQPDHCLELQIITQALRSIARRAHALEIEAAECEKELVWLIGELAPALLEQPGIGPICAAQIICAWSHHGRLRSEAAFAALAGVAPIPASSGQAIRHRLNRGGDRQLNRALHTIVMWRMNFHPETKAYTLRRRSEGKNDREVRRCLKRHLTRRIFRLLNDLDTL

SEQ ID NO: 457127 - protein, 361 aa, unidentified
MNATTAAIDLAKNVFQVALADANARVLEQHRLTRAQFERFFDNRSVARVIMEACGSAHHWARVFAARGIEVMLLPAHYVRAYVRRSKTDAADALALLEAARCPDIVAVKVKSVEQQSLQALHRTRSLWMGTRTSRINALRGFCRELGLHVPVGARTGLEAMGRAVADDQSPIPALLRPIMQQLIDEIRLLEVRVAQLERQLALVAREAPACKLLMSIPGVGLLTATGILAATSGSVAHFKSARHFASWFGLTPKESSSGGTRRLGRISKMGDRYLRMLLTHGARSVLHAAKVAKMRGQQLLGVRQWAIELQSRSNHNKTACALANKMARICYAVLRDQTPFGQPATRLGKKMQRQSFELAH

SEQ ID NO: 457128 - protein, 324 aa, unidentified
MSSHEIVGIDVAARKLVMIGERVALAEYENTVAGRSKLAKALSRSPRPVRVVLEATGIYFLDLACELAAAGIAVMVVNPKATHHFAEAILQRRKNDPVDAAMLREFGRRMDFVPWQPPRHELFAFRALTREAQALSKAVAAAKNRLHAITATQLAPDTLIRALERQIAQNQALVDELVAAALAETKTNRELARLVARTDSAPGFAVKAAVLVVGELAVLPPMTARQWVAQAGLDVREESSGTSLARRPRLSKRGNKRLREALFYPALTAARCCPLAGAFVERLVAAGKTRLQAIVALMRKLLHGLHAMWRNDEDFDAEKLFAPA

SEQ ID NO: 457129 - protein, 337 aa, unidentified
MKKKWFVGIDVSKLTLDIALYTAKSKMTASDHIQVKNTVSGFQEFLDWLKERGITRSGCVVGMEHTGIYSLDISLFLENKRFDYCLFNPIHLKRSLGLVRGKNDRVDAFRIANYCYLHREDLVYSHMASSSMLEIRSLLSERKLYVEQMATHKGFLTESKGRKSSSRGQRCARIVDYLEKQIEEIEKEINDIIDADTTLKNNYELVTSVKGIGFVNAINFLVHTNNFMNFENARQYACYTGIAPFEYSSGTSVRGKTRVNKMGARQVKADLTQAAKSAVQHDPQMTAYYVRKKQEGKSHGSIMNAIKFKLVERVFAVIREQRVYLDAEKFQELKKAV

SEQ ID NO: 457130 - protein, 358 aa, unidentified
MTTDAGPVTGGVDTHGQTHHAALIDGVGRHLGDREFPTTPTGYRALTAWLSSHHRLERVGVEGTGAYGAALARHLHAHGIAVVEVDRPDRRARRAKGKSDPLDAYAAARAALSGAAAGTPKQRDGRVEAIRTLRVARRGAVKARTQAMNQLKALLLTGPAELREQLRHLSATVLVTTCARLRPDDQDLADPAQAVKTALRRLARRHQHLTEEVRDADTDLTTLVSDAGPQLLALHGVGIDVAGQLLTTAGDNPDRLRSEAAFAHLCGVAPVPASSGRTHRHRLNRGGDRAANNALHTIALCRLRYDPRTHAYVVKRTKDGLSKTEIIRCLKRYIVREIFTALQPLPAPNGLLHVLDTP

SEQ ID NO: 457131 - protein, 356 aa, unidentified
MTADSTTTAATAQSARTGAMHYVGLDVHARRSSVCVLNADGKTVRQAEVRGDWPALLERIATEVPRPFAVAFEASCGYGYLHGRLSALADRVAVAHPGKLRLIYGGKRKNDRVDAAKVAKLLYLDAVPQCHVPPADVRAWRGLVEYRRRLVDRRVAVKNQVRALLRGLGVTGVPSGKALWSGKGLAWLRALTLDADADALRRDLLADELAELAAKVKRVERELDARAARHPGVALLRTIPGVGVRTAEAVVAYLDDVRRFARVRQVGCYLGLVPCQDASAGRDRLGHITRDGPGTVRKLLCEAAWQAVRRSPGMRAYFERVAGGKADRRKVALVATAHKLARAMAAMLRSGEAWRG

SEQ ID NO: 457132 - protein, 309 aa, unidentified
MKEEFVYCGVDIAKLYLDAAIGNERRRFCNDAVGHGELVNWVKQVPGSVQVICEPSGGYERVLIQALARRQIKISLVQANRVRQFARAAGILAKTDRIDAQVLCAFGAAIRPPIVTASNLEQRQLRELESQRRHLSHLLVMEQNRGARLGEASVQRLNRCLIKQIKKQIEQFDLLIKNQIEQSKELSSKAQKLTAISGVGSRTAALLLAQMPELGQLNRREVAALVGVAPFNRDSGKLRGKRTIFGGRRAVRNGLYMAALVAARHNPILRAFYLRLRALGKPPKLALTATMRKLLIVLNSSLKPDLTYA

SEQ ID NO: 457133 - protein, 410 aa, unidentified
MSYNVAAIDVHKKLLVVVVADAAEPDVTLQARRFGTGAAELCRLAHWLGEFGVVEAVMESTAQYWKPVWMELEPHMRLHLAQAQSNRAPKGRKTDFGDAKRLLRRFVAGELMLSFVPDTEQRAWRMVTRARLQLVRERVHLQNQIESLLEEGRIKLSSVIRDLLGASGRRILRALSNGETNPEALADLGDPHLRCGREVLMDALTGSMNGIHRQLLQQHLDRIELVDRQIEELNQLAAAQMREHQEAVVRLIEVPGIGAEAAPEILAEIGPAAAAFPSSAQLASWIGVCPGSSQSADHNHSGRSAKGNRFLRRLLCQAAQAAARTKGSRLESLFKRLIVRLGYVKAIWAIAHRLCRIVWNILHQGARYIEPGDAINPKAVQRCIHHHLKALRRLGYQIPAVTAPAMPRSR

SEQ ID NO: 457134 - protein, 339 aa, unidentified
MEVKRISIDTSKHTFTIHGVDLQERPILQRDIKRTQLEPFFAKLEPTEVALEACAGSHHWGRLLSRLGHRVKLIPPQYVKPFVKRSKNDRTDAEAIGEAASRPTMRTVPLKTVAEQAATIVVKHREMLVAQRTQAINALRGHAAEFGTIAAKGCTNVTALLAVLAADEVIPHSARAMFEQMGQHVADLDSKIEALDRQLLDQHKINPVSRRLATIPGVGPITAITLALTVDSGNFESGRHLAAWLGLTPREHSTAGKHRLGQISKAGNERLRQLLVVGAMAVIRVAKPGRPSASGWLLQLLERKPRKLAAVALANKMARIVWAIMAHGEAYRRQPATAA

SEQ ID NO: 457135 - protein, 315 aa, unidentified
MDERAGRIVGIDISKDRLDVHVLPEGEHVTLGRDEAGLKALTKRLAKQALQVVAMEATGGLEAPVAAELHAAGLPVRVVNPRQVRDVARGLGILAKTDAIDAAMIARFAEAAKLTGAPVPDAQAQHLGALVARRRQLIGMRTAERTRLQQTTDKRIRRSIERLLRSIEAELEGVDRDTDGAIKGSPLWCALAELLDEQPGLGNTTARVLVAELPELGRVSGKKITSLVGLAPYPRDSGVLRGKRAIWGGRASVRTALYMATLSAVRCDAVLKEFHQRLIARGKLPKVALVACMRKLLVHLNALVAKYYAKIEQTA

SEQ ID NO: 457136 - protein, 406 aa, unidentified
MEVLYPRCAGLDVHKDTIVACVRCVSKPQRREIRTFGTTTRELFALADWLEESGCTHVAMEATGVYWKPVWHVLEGRFELVLANPQHIRNVPGRKTDVNDATWIADLLAHGLIRSSFVPPARIQELRDITRTRKQIVREIAQHTLRIHKTLEDANLKLASVLSNVIGTSGRSMLGAIIAGEEDPVRLADLAVGTARNKTADLMEALRGQVTPHHREMLKLHLGLIAALQKALATLDEAAGKALAPIQERAALLTTMPGVSNIVAHVIVAEIGVDMARFPSPAHLISWAGLCPRNDESAGKRRSTRVRKSANWLKTTLVTAAWAAVHKKDTYLKAQFLRIKSRRGAKKAILAVAASMLTAAYYILRDGVPYRDLGPLHFDRRDHSKTIHRLIRKLTQLGLRVEVHAA

SEQ ID NO: 457137 - protein, 368 aa, unidentified
MSKHSHYKVGCDAHKHFSVFAVLDHRGRVVKRDRVDHEPGAIRTFLCQFPAGTPVALETVGNWYWIVDEIEAAGCVPHLAHAAKAKGMMGYVHKTDKLDAEGLGTLLHNGTLPSVWIPPSELRDERELPRTRMAFSKIRTKLKNRIHATLAKYALSLDTDSDIFAAKWRPQLLALVSRVPAETQRCMQQELELLDQVQEQIHRLEARILERVRVTRTIQLIQSVPGPAEILSIVIDREVGSIDRFSCPKHFAAYAGTVPKTKSSAGKTHYGRMIKQANNYLKWAFIEAANVVVRQRHHPNWRNKYVVRLYERTRQRKGHAVAVGSIARYIAESTYSVLKKGEPYREPLAEHPAGRRSVVPPRQGRVRA

SEQ ID NO: 457138 - protein, 357 aa, unidentified
MTKVLQKAEFGGETIHIGLDVHLKSWNVSLYYGSQYLRSFHQPPNPDALSSLLHRDFPGATFNCAYEAGFSGYWIQRELSKRGIRCIIVNPADVPQTDKAFKSKTDRNDSKRIGLALQAGMLNPLYIPFEETEADRQLVRTYEKLTRDLTRSKNRIKGMLYHSGILIPERFGSGNWSNVFINWLKDLPIPYITMRTALNHQIKIVEDIRAERILILKAIRKLAISEKYQPIISKLKSVPGVGPITAITLVTEIEDMNRFSNFEKLNAFIGFYPSEFSSGEHVRTGHIMSRHHKRLRSLILEAAWVSIRRDPAMTQYYNQAKHKVGGKRAIIKVSRKLLSRIRAVWLLKTPYETGVLK

SEQ ID NO: 457139 - protein, 455 aa, unidentified
MTRTTTCDRPELKPVNVGAAAIDIGSTMHMAAVDPACADTPVRAFGTFTQDLHELADWFKVCGVTSVAMESTGVYWIPAYEILEQHGFEVILVNARYAKNVPGRKTDVSDAAWLCQLHSYGLLRGNFRPDAEIATLRAYLRQRERLVEYAAAHIQHMQKALMEMNLQLHHVVSDITGATGMRIIRAIVAGERNPDVLATYRDVRCHASIETIRAALVGNDRDEHVFALTQSLELYDTYQAKMLDCDRKLESLITALTNKAAKPVGKLFGPRVKTKQVNTPSFDVRAALYGVLGVDLTEIHGLGPSLALKLIGECGTDLRAWPSAKHFTSWLCLAPGNKISGGKVLSSRTRRSSSRAAALLRLAATSIGRSDTALGAFYRRLSSRVGKAKAVTATARKIAVHFYNTLRHGMTYRDPGADHYEEQYRSRVLANLKRRAKSLGFVLQAVPCDAEVAVS

SEQ ID NO: 457140 - protein, 387 aa, unidentified
MPQPNDLSRSLVTLEQDATLIAVIEMGQSSWLVAGIVPGIDRQPLKKLAVDQEGLLQLLHRWRNEAVRAGCTIKRIAVAYEAGRDGFWLARWLRAHEIDAYVIHPSSVPVSREHRRAKTDRLDTELLKRAFLGWLRGEPKHCSMAAIPPLEDEDARRPSRERESLVKECTRITNRVKSNLARLGIRGFKATLAHAAERLETLRTPEGVAVPANTLAELRRDMARLRFVRQQIKEIEAARVERLKRGPEERRSAMVHLLTRVVGVGVETADMLVQEVFSRNLRDRKAVARYAGLTGAPDESGKKRRERGLAKAGNARVRRGMIQLAWGHLLHQKDGALAEWYRRRTADARGGTRKTMIVALARKLLIALWRLVTTGEVPAGLLLRPAP

SEQ ID NO: 457141 - protein, 414 aa, unidentified
MELLHERCAGLDIGKKDLKACVRTPNPSGKRSRHQRIRTFATTTNSLLELRDWLVAEKVTLVVLEATGDYWRGAFYLLEDSLNVILVNASHAKGLPGRKTDVSDAAWLCQMGECGLLRASFVPPEPIRQLRDLTRYRATLAAERTREAQRLEKELEDAGIKLSSVATDILGVSGRAMLTALIEGERDVHVLAEMAKARMRPKIPQLMEALTGNFGAHHAFSCRLHLERIDQLSATILELSARIEEDMHPFARQLEQLATIPGVGQATAEVIIAETGADMSRFRTAGHLASWAGICPGHHESAGKRKSGKTRHGNRWLGGALGTAAMAAARTKDTTYLGARYQRLIPRLGKKKAIVALEHSILTAVWHMLTHDVDYHDLGGDYFTRLDPNCALRRIIRQANALGYTVRLDPIQTA

SEQ ID NO: 457142 - protein, 368 aa, unidentified
MNKQAQKTATFLRYCVGIDVSKDTLQICLSVIDINGKVTIKGTTKINNKISAFDSFLTWINKHCQIKDLPVRYVMESTGVYHEQIAWFLFQKDLALSVILPNKAKHYLRSIGNKSKNDKIDARGLAQMGLEQNLKLWQPLSKNIYALRMLTRQHQRLQELKNQSENQKHSLLHSQYTDKFVIKQLDKLIKIYEQQIEQIAQEVTRILNEDLILKAKIEQLTQIKGLGLLSAATLVAETNGFTGFENIRQLVSFAGYDVIENQSGQRVGKTRISKKGNSRIRRILFMPAFNAVKWGEPACKALYERIMSKNVPKMKAYVAVQKKLLILCFALWKNNTEYNPMYYANNVKELNGKNKKIVPINGTTQDVA

SEQ ID NO: 457143 - protein, 315 aa, unidentified
MTHACAAGVDVGRDWLDVGLAPSGKVFRLANAPAGVAELVARLTREGVAKVVLESIGTYGARLVRGLAQAGFEVGVVDPKRIAALRTAEGRRAKTDRLDAGLIARFALLMQDAARPVPSARAFEIRALSTRRRQLVEMAAMEKTRLKQSLDEAVADSCRRAIAWLAQERADIEARLQALILEAHDGPARQALLQTIPGVGPAVSMTLLADLPELGSLDRKAVGSLAGLAPHPNQSGTRTDQAHIGGGRPCVRAALYMAAVSAARSDKGFKREYQAMRQAGKPAKVALVALVAIARKIVVAANGMLKSGKPWLKPA

SEQ ID NO: 457144 - protein, 386 aa, unidentified
MQKLNDLSRSLTALEPNGTLIAVIEMSLSSWLVAGIVPGVERQPLKKLAVDESALLKLLHRWREEAEKAGRRIERIAVAFEAGRDGFWLARWLKARGIEAYVIHASSVAVSREHRRAKTDRLDTELLKRSFLGWLRGERDHCKMVEIPTMQDEDAKRPNREHDSLIGERSRIVNRMKAALVRLGIRGFNPKLKRATTRLDGLRTPEGEPIPPNALAELRRDMERRRLVNNQIRQIEEERLERIEQAPCDGAHVMVRLLARVMGVGIETADMLVHEVLSRNMRDRRAVARYAGLTGSPDESGRKRREKGLARSGNARVRRGMIQLAWRFLLHQKNSALTKWFRSRTENARGTRKPMIVALARKLLIALWRLMREGIVPDGVVLRPAQ

SEQ ID NO: 457145 - protein, 316 aa, unidentified
MATVGIGIDVSKDRVDVAVEGQERTRRFAITDSGLRLLVTWLGDLEVHRVVVEACGGYEHPVLEALEEASMPVVQLQPYRARSFARAMGQQAKTDPIDARVLARMAGGFVDDLPLWRPQPAHLQELRGLVVRRQQLLSMREAELKRQQQTRGAMREHIEEVAAYLKRCVVNIERRIMDLVGAHRDLSEPVETLLEVKGVGLVTAVTLLTSLPELGRVNRREAASLAGVAPINRDSGTKRGQRYIQGGRKQVRRALYMAALVGVRFNPHLKAFYARLRSRGKPAKVALVAAMRKLLIHLNALMKRVLAAPTHAAQAA

SEQ ID NO: 457146 - protein, 369 aa, unidentified
MLYLAIDQHAKQITVCVRNEDGDTVLRRQVSTRPEKIEAFFQQLTEMDAQFMAILEVCGFNDWLIEVLRKWNCREVVLIHPERPSKRKTDRRDAHKLADLLWLNRQRLAAGQLVHGLRRVYLVTQKEREDRQLTALRKNLGQRRTRTLNKIHRIINRHNLIWNYPTKTFQTQAGRRWLETLQLPEIDRLEMNMLLEEWKSWDEQIAKVDEKIAQRASEAQPGKIFSATQILMTAPGVSHYSGLTLASRIGPIERFPRPRSLANYFGLTPGCRNSGNAQDRLGSITKEGSKIARFILGQLVLHFLKHDPKMRQWYRRIKLRRGSKIARVAVMRRITTVFWHMLTHEEAYSIGGPPPRLRREAQTARSEVA

SEQ ID NO: 457147 - protein, 355 aa, unidentified
MTSTKYIGMDVHKESISIAVMNVSGKIGMECVIETKASMILQFFDGLRGDLQVTFEEGTSAAWLYDLLKPHVTKLVVCDPRKNASMREGHQSDKIDARRLAELLRLNHLSPVYHGEHGLRSLKELVRSYLNITKDLVRVMMRVKAIYRSWAIPCTGKQVYAPRHRAEWLGKITEPGVRRRAEFYYQQLDALRTVRQQVRRDLFAESQKHQPWKRLCQIPSIGPIRAAVLLGILQTPHRFRTKRQLWTYSGFGIETQSSADHRNVNGRLERAKKQSSIRGLNRNCNHDLKNLFKGAAIVASSKPGPFQEFYTALLTKGLRPEMARLTLARKIATIVLIVWKRGACFDAQHLKPQTA

SEQ ID NO: 457148 - protein, 314 aa, unidentified
MIDLTTPPTRFIGCDVGKSAIAVFDAGASRGFTLPNEREALDAFAAGLDASCFVICEATGGHEAGLLDALVGAGRAVHRADARKVKAFIRSLGTLGKSDAIDARALARYAQERHDRLPLWRPRERVRDDLHVMVATRRDLVAERVACANRLAAPGAAPVAARLKRILAAIEAEIAGLEADMAALIAANAPLERAAKILQSIAGIGATTAVALIALMPELGTLDRRKAAALAGLAPHPRQSGKTDAYRRTRGGRPDIKRLLFMAALSARRHNKTLKPVYERLIANGKKPLVALTALMRRIIVIANAKLRDAQCAI

SEQ ID NO: 457149 - protein, 443 aa, unidentified
MSKFKKTFDLTYPNAAGIDIGASSHFVAVPADRDDQPVREFASFTEDLHALADWLSVCGIDTVAMESTGVYWIPLFELLESRHFTVFLVNSRHVKNVPGRKSDVLDCQWLQQLMSFGLLSGAFRPQGDYAALRVLARLREMLLRCQATHIQHIQKAMLLMNILLTEVLSDVMGETGLKIIRAILAGERDGETLAKYRNCHVRASEEDIAKALQGSWRDEHLFSLKVAVKSYDFYAEQLVACDQEIEQHMKDLARYDLTPEKSKRRGGKSRNAPKFDARLLLMQMCGVDLTRIDGIDVTTAFKVLSEIGADMSKFKSAKHFTSWLGLCPGTKISGGKVLSAATKRTANKASQALKMAAVNLRNSQSALGAYYRRLCGRMDKGKAVTACAHKLARLIYAMLTKGEEYVDQGQTYYEEKYRERVLKNLTKRAEALGFQLTPAPEMA

SEQ ID NO: 457150 - protein, 342 aa, unidentified
MKTHVGVDLHQRFCYVTAMNASGKIFRQAQVVNEGEALRAWLRQLPGPRQVVVEASGFWPAFARAAGPESERLVMVHPQRVKAIASAKLKNDRVDSETLAHLSRCDLLPEAWMADAATQQLRLLVRLRITLGRQRARAKNQLQAVLHQEGFKKPVTDVFGKRGRAWLKELELSAAARVVVDTWLREVDHLDVELEAQTRELERLAEADARARFLRTVPGIGAYAAMVILAEVGDVARFESKRALASYAGLTPVVRESAGKRKRGGIGRQGSATLRWILLQVAQVAARHSPAAKAWYSRLRARKPAQVARIALAHKLLTAVWALLRNGVCFDEKIFAGGLDVS

SEQ ID NO: 457151 - protein, 339 aa, unidentified
MQIRSVGIDLGKTTFHLVALGAAGKVLVRKKFTQKLLLAFTANMQSSLIGLEACSGAHFLGRALRKQGHDVRLIAAQFVKPFVKSNKNDFVDAEAIAEAVERKNMRFVPIKTDDQLDLQAIHRVRDRMISRRTAVINQLRAFLLERGMVFAQTPAKLKAGMADILENAEADLTPQMRNLIDMLWGEWKLVEQQVEELNDELERISAADAGCTRIRQIPGIGPVVATAIVAAIGNGAAFRKGREFAAWLGIVPRQHSTGGKAKLLGISKRGNVYLRKILIHGARAAVLRIKRDRAPIGAWLDALDSRAPKNVVVVAMANKLARIAWAVLSSGNDYRPVPA

SEQ ID NO: 457152 - protein, 403 aa, unidentified
MELLIGIDWSQDHHDVRVLNEAGASLLRFQIPHSPAGFDRFEERIARFNAPPTHCFVALETAHNLLVDFLWSRQYQVYVIAPSVVHAARGRLTSSGAVNDDQSAFLLADLLRTDRHRFTPWKPDGPLVTQMRAKLSLIDSLSHSITRYTNRLHAVLQRYYPQACTLFSNLQTPISLHFIIAYPAPDLAHALSFSQFAQFCRDHHYPFPHRLPELYVRLRSPALQPDPVITPVYQEESTFLAQLLLTLLERKEQTLREVRALFAQHPDAPIFASLPGAGPLLEPKLLVMFGDHRERFPSPAAIQALAGTCPVTDQSGKRRRVYFRKACNHDYRNTAQQFAMESAMHSEWAATYLADALARGMSKSHAYRCLANRWLAIIWHLWQTREPYDEAIHLQQVNQHRKR

SEQ ID NO: 457153 - protein, 392 aa, unidentified
MDDTIRFVGLDVHKRRTVVAIADSGRDGEVRQYGAVETERSAIAKLAGKLARGGKTLRFCYEAGPCGYSMHRWLTGLGHECEVVAPSLIPRRPGERVRTDRRDAVKLARLHRAGELTAVWVPDPAHEAMRDVVRARAVAVSAVRRARQQLSGFLLRHDRIYSRKAWTGAHRRWLAELKFEHAAQRVVLEDYIDAVGAAERRRDGLTEQIRELLPRWSLAPIVEAVQALRGVAAIAAIIIVAELGDPRRFDNPRQLMAYLGLVPSEASSGEKVYRGGITKAGNRSARRALVEAAWTYRFPARRSRHLLARCQAASPAIQAIAWKAQLRLSSKYRKLVGRGKLATVAVTAVARELIGFIWAIARELPAIPPEPVPGCGATNKVTTQRQLATLTG

SEQ ID NO: 457154 - protein, 342 aa, unidentified
MEEITIIGVDLAKNVFQVHGAAADGSIVFRKKLSRPQFARFMTEQSPCLVAMEACASAHHWAREMARHGHEIRMIAPHYVKPFVKRQKNDAADAGAIVEAALRPTMRFVEPKSADQQARAVAFRTREQLVKQRTEAVNALRSHLYEFGHVAPEGIGFVPRLARVIEDPDADMPELARDICRMLIEQIAHLTDRINALKARIATMSNEADMPRRLQTMPGVGPITALAVETFAPPMEQFRRGRDFAAWLGLVPRQHSTGGKQRLGKTSKMGQRDIRRLLVTGAMAVIRWASRRGSPKGSWLARMLERKPPTVVAVALANKMARGIWTMLTREEDYRGPVLIGA

SEQ ID NO: 457155 - protein, 315 aa, unidentified
MTNTKTRKTAVNVGVDVGKASLDIVIHEKGLHWQEDNTAEGIKRILKRLSHYQVERLVMEATGRYEFELAQAAYEKGLPVCIAKPLSVRRYAGAIEQLAKTDKIDAAIIAEFAAVVKPRITPQRSKNLIAIKNLVVRRRQLVNLRTQETNRLKIMGKTLEVSCRRIIRTLDAEIERMEQRLATQVAQQAEWTEKHTLLTSAPGVGNTLCYTLLADLPELGTLNNREISALVGVAPINRDSGRLRGKRRVQGGRACIRTVLYMATLSALQCNPVIKAFYRKLVTQGKHKKVAITACMRKFITILNTMVKNKTEWAY

SEQ ID NO: 457156 - protein, 402 aa, unidentified
MAGMTAGIDWASEAHEVCVSKEGEVLERFSVAHDERGIAGLARRLTKLGVARVAIERPDGILVERLLAAGLEVLAIHPNQVKAARARFAVAHGKSDRFDAYVLAELARTDSHRFRALVPDTEETKALKALTRAREDLVGVRVELANQLRAQLQAFWPGALVFAAIDSPISLAFLRRYPSPADTKGLGAGRMAAFLARNSYSGRTDPAELVARIEAAPKGTAGKSEREARRGVVLGLLRALEPIVAEIAALDGKIRERLAAHPDAAIFAPLFRDRRTAICPATLIAELGDCRGRYPTEAAMAADAGMSPVALESGKLRVATFRRACDKRLRSAVATLADSTRHWHPWAKEVYRRARARGQDHPHAIRTLGRAWIRVLWRCWQDGVPYDATLHGNSHRLQPARG

SEQ ID NO: 457157 - protein, 405 aa, unidentified
MGARRRSPGPSHVLITPDHASNVVGIDPYKRTLTAMVIDPRGGILASEHFRVSGEGHRALEAWALQFGAVARWGIEGSASWGRHTAVFLADRGHDVRDVCANRTARQDRARQRGKSDVLDSERIAREVLAHPLLPKAFKRAGQDQGPDEQHQLLAIWHNQRRSILTSRQHLVGEAESLLCELPLELRDDLPSSKAVRPRLAALERRNRRRRYDAPTTLRLHMLDEYRAQIVALDREEKQVVAELKKLVQASGSTLTELCGLDTRSVAELLVETGDPRRFTEGGFARFNASAPLAASTAEGPGEPVRHRYNPGGNRRVNAILHRMAVTQLRCEPRAQRIYANARANGPHTKKEARRILKRHLSDVIYRCMIRDMAHSPTAPSLMSEPRAAAGQSRVARQGRAKRAA

SEQ ID NO: 457158 - protein, 460 aa, unidentified
MILRMGIDIAVRAPHQASLADERGELLWSGHRFRTTVADLDALWARLPKEFQAAEVTVVMEPTRNAWVPLAAWFRRQGARVVLVSAERSSDLRAYYAKHTKSDRLDSVLLARLPLLHPEGLHPQRGLGPGGDPLRRATKMHSTLVKRRTTSIARLDALLEILGPDWHAAFSADLTNKTPLQFLAAGYADPHTVCRLGRARLTRFLYRHSRGAFGEIHAERILAAARASLDLWGEDICFPDLAEDIAVEARLALALTAEVKELDERIAVLVRDRDPHGIITSAPGVGAITGAVILGRLGDVSRFQSLSAVRAFSGLVPSLDASGVSGRHGSPTKRGDHLLREALFISANQARRLDPTLAAKYHRLMIDGKHHNSALCHIATTLLTRVAACWRAQTPYQIRDADGRPISAHEARAIISERYSVPTKIRQARTTTGTGRRSKESLSAPSTGPSNTHAKHTGAA

SEQ ID NO: 457159 - protein, 342 aa, unidentified
MGEVSIIGVDLAKNVFQVHGAAADGSVLFRKKLSRPQFTRFMAEQPSCCVAMEACASAHHWARQMTQQGHEVRLIAPHYVKPFIKRQKNDAADAEAIVEAALRPTMRFVEPKTADQQARAIAFRTREQLVKQRTETINALRSHLYEFGHVAPTGIGFVPRLAKVVEDPDTDMPELARDICRMLLEQFAHLTDRLKALKARIEAMSSEAEMPRRLRTMPGVGPITALAVETFAPPMDQFRRGRDFAAWLGLVPRQHSTGGKQRLGKTSKMGQRDIRRLLITGAMAVIRWATRRGSPKGSWLARMLERKPLSVVAVALANKMARGIWAMLTRDEDYRGPVLIGA

SEQ ID NO: 457160 - protein, 371 aa, unidentified
MSNTIICGMDAHDNTLTNRIGVNRETPETKTVRNTQDGRQGLFRHLKDLAQKNDGTRIVVAYEASPLGFGIYDDCVEAGIECHILAPTKMPKAPKDRKKKYDERDAQRILELLRAHVLAGNDLPDIWIPDHQTRDDREIVRTRLNVGQKLTALKTQVQMLLKRNKVVKPKDVGKSWTKSHRKWLEGLELKPGARIALSSYLRQIANLDEEIKILDKEIETLAETDRYQLPAEALVVQIKGVGLLTAMVYLTEIGDMRRFSNRRQVGSFLGLVPSSNESGEDSDRKGHITREGPARVRKVLCQATWSRVANDVEEARVYYRIVNKNPKHKKIAVVASMRRLGVLMWHIAWDAQVKAEVFKDVQNKAAYAQTV

SEQ ID NO: 457161 - protein, 338 aa, unidentified
MNYVGIDHHRQYSHLTVMDQTGQVLRSGRVANVLSEIERFLEGLEAREAVIETGRSSYTMVDVLEEMGIMVKIVHPNEVKAIARAKIKTDKRDSEVLAHLLRMNMVPEVYRRSQENRQAQRVLRQRAFYVGAMTALKNRVHAFLAQQKEEVREEVARETNIFSVRGQKMLLGLDLAHDEKKLLEALLKTYRHLETRIKESVTFVDQLYEEIREAQLIRTIPGFGKYLAVLVAVEIADLARFADAAHLHAYAGVIPSTHSSGDRTHHGKIVRAGNRWLRWAAVEAVWPAIRADFDLRRFYERLARNKGSNKAKVATARRLLTIIYKVWKEGRNYIAYRR

SEQ ID NO: 457162 - protein, 345 aa, unidentified
MTSVATIGLDIAKSVFQVHGVDAAGQVVVRQRLARRRVLAFFEKLAPCLVGIEACSSSHYWARELMARGHEVRLMPAQYVKPYVKRGKNDAADAEAICEAVTRPTMRFVPVKTPEQQSVMMLHRVRLMLNRQRTQLSNSIRAHLSEFGIVAPIGRRGLDQLLAVVADAKDTRVPADARLCLQMLAAQLAVVKEQILDNDRRVLASARATELGRRLMEIPGVGPLLASALPATISDPAAFKTGRDLAAWIGLVPKQNSSGGKERLGSISKAGNRYLRQMLVVGAMAVIRYAERHGTRRPWLVQLMQRRSTKVAAVALANKTARIIWALMTSGERYREPATTGAIAA

SEQ ID NO: 457163 - protein, 412 aa, unidentified
MQILYRCCCGLDVHKKMIVACLLRIDQDGEFFQQVRTFGTTTEELLQLSDWLVEAGCQTAAMESTGVYWKPIYNVLEGQMELLVVNAQHIKALPGRKTDVQDAEWIAELLQHGLVRGSFIPPQPQRDLRDLTRYRTSLVRERARIVNRLQKVLEDANLKLAGVATDVMGVSGRAILEALVSGQTDTEQLAELAKGRLRKKIPQLKQALTGRFRQHHRFMLTEQLSHIDYLDEAIARLNGEIAERLHPFEQELQLLDTIPGINRRIAENLAAEVGLDMSRFPSGAHLASWAAMCPGHHESAGKRHSGKTRKGDGWLKLTLIEAAHGAARTKDTYLSSQYHRVAGRRGKKRALVAVGHSLLVIAYYVLKRQQAYFDLGSNYFEQLHRQRLERNLVRRLEKLGYQVTLKALQPAA

SEQ ID NO: 457164 - protein, 423 aa, unidentified
MKERVGRELWVGLDWGDESHAVVALEAESGVVVKRFEVQHSAQGLDELVGALQGCGKVLGVAVESSRHMVVIKLLQSNFPVYPINPKVSKKWRQCEKPQESATDLSDAEVLGKNLRHRHKELRELRPDDEETRTLAMLCSDESQLIAERTALVNKLIATLKMYYPQALRWFGDWTLRSAWDFILTFHTAEAFRVGSKKKVLGFLKGHRIGVTEKWREVEEKERKAPNPWPVDGAVEEAKCFLAVRLCKQLRTLDDTLEEYRKRIEELYAQHPDHDIFSSLPGAGPKLAPRLLTIFGSDRDRFSDARGVQELSGTVPVTKKSGKRKDKGTVYFRRSCNKAYRNDLHLFSQGSKRFCAWAQAFYKGCREEGQDHNEAVRRLASKWLKIMFRMWQDREPYDEARYLNALIQHGSPTIRRMQQSFEA

SEQ ID NO: 457165 - protein, 347 aa, unidentified
MAVVAELFDYVVGVDTHARTHTFTVIHAKTGAVVDTASFPASPSGMTRAISWIDRRAQGRVFAAVEGTSSYGAQIAEALAAHGIPVGEVRPPSRNARALAGKSDAIDAEAAARSVVGQQICRVAQPRATGTRAALRILLASRSLLDQQRTASRNALTALLRTIDLGVDVRKPLTDKQISSIAAWRITSRDPILTIARTEARRLARAVIDISSQLTNNLALLRRHAEGMAPGLQDTPGIGPVTAAIIICAYSHHGRVRSEAAFAALGGIAPQPASSGNTTRHRLNRSGDRQLNRAFDVIVRTRMSFDPDTRSYIQRRRAEDKTNREIRRTLKRYVCRAVFRQLQILMA

SEQ ID NO: 457166 - protein, 451 aa, unidentified
MNNGSGVSRGDRNRNARLTRLRDAVPVTNAIVGIDLADRKQMVVVCDHDSKVLARRTFRCKAWDLGAALDWARDRAAKAGFAGVTVACEPTGHRWRVLGQLAADRGMPYVCVQPALSSWARKTEDLTTDKTDDKDAVLIARLAAQLRCYLPEPVDETWGRLRHFGARREALLEEHTACVQQIRDLLECVWPAVLPAAKQPFKSTTWVAALTVIVVRDGGDLPRTRRLGAARFAEQVRKEVVRRGKTKPCLRIVRNVFNALSDPSGVVTHRLGALERVGWVLADWDAARTNQRVVEQRMVAVLDELGLTELVCTIKGLSAVGAAAILAETGDLRRFTSARAVVKHAGLAPRERLSGTFTGKARLTGAGRPGLRLAAWRAIFATLRSNPVHAARYTHLTTRAEHPLKPTQAQAAVAAALLRQLYAIVTTGQVWDPAIATHGTRRDRVEVPQAA

SEQ ID NO: 457167 - protein, 339 aa, unidentified
MLIIGCDYHPSFQQIAWLDTESGEIGERPLSHRDGDAEKFYRKLKDDGVKVRVGIEATGHARWFERLLTELEYELWLGDAAQISARRVRKQKNDRDDARLLWLPDVDNRDLRQLLWHRHRLVQMRTRVMNQLQAVALNEGVRRKKGLWSKAGRAQLESFPLLPWATVRREDLHKLLDDLTPRIAALTAEVDKQAEQRPEARRLMTHPGVGPLTALAFVLIIGSPTRFRCGKQIGSYVGLIPCEDSSASRQRLGHISKQGNSLLRFLLIEAAQAATRSNPTWRREFVHLTMRRGRQIAVVAPARKLAVRLYWMWRNGWDYEKSLQFGSHVGQPGTGDGVK

SEQ ID NO: 457168 - protein, 402 aa, unidentified
MNCVGIDVSKGKSMIAVMRPFGEVVVSPFEVRHTANELSELAGLLKSLDGETRVVMESTGNYHAPVAWLLHDAGLYVSVVNAMLVHDYGNNSLRRAKTDKKDAVKLANYGLDHWLTLPRYIPEEDTRLMLKICYRQYQQYSKVQTMLKNNLISLLDTTFPDANRLFTSPPRADGSEKWVDFVATFWHCECVCGRSEKAFTTQYQKWCRKHGYNFSEDKALDIYASACRHFGVIPKTDTAKLLVEQAISQLQTTSSALAALKQEMQSLAASLPEYPVVMGMFGVGPTLGPQLLAEIGDVRRFHSKKALVAFAGIDAPPYQSGQIDIRSRSISKRGSASLRRTLFLVMSVILQCAPIDEPVYQFMDKKRSEGKPYRVYMMASANKFLRIYYASVKAYLESLEHD

SEQ ID NO: 457169 - protein, 403 aa, unidentified
MNNVAGIDVSKGKSMVSVLRPFGEVVAKPFSVGHTGSELKELADYLKSLDGETRVVMEHTGRYYEPVARFLHEEGVFVSAVNPKLIKDYGNNTLRKVKTDKADSRKIARYGIDNWAELRQHTPMDTIRMQLKTLNRQQSLYTKTKTMMKNNLIALLDQTYPGVNALFDSPVREDGSQKWVDFATTFWHVDCVRNMSLTAFAERYRKWCKRHGYNFRQSKAVEVHTGAQDLIAMLPKDALTKTMVRQAIDALNAVSASLERLKAEMQALAAQLPEYTVVMAMHGVGDSLGPQLMAELGDVTRFTHRNAITAFAGVDPGADQSGTHEAKSTRVSKSGAPELRRALFLVMDCLLKTQPQDDPVYRFMDKKRAEGKPYLVYMTAGANKFLRIYYGRVKEYLASLEGN

SEQ ID NO: 457170 - protein, 356 aa, unidentified
MKSLTTARLSTLPARSKVCLGIDLSTKSWHVTARCAGETVFAASMPPSVSSIGSLLAPLRGRRVASVYEAGPFGFGLHDWLCGRGVESMIVAPSLVPSQAANRVKTDRRDSLKLATTLEAGLLRPIYVPDAEHRGYRELVRQRLRLQKCRRASMQRIKSFFLTYGLTIPVRPHWGEAFDTWLLQLSLEDPYLQKTLVTARDLYRDLDRRLHALDKDLRCLARIKAFAPSVKLLTSAPGIGTITALIISVEVVDWSRFADGEAFSAYVGLTPSQYSSGDMVHFGRITRMGNAILRSLLVESSWSLIRKDPGMKAFFERLRIRRGSKRAIVAVARKLCHRLVLMTHRKEPYRIDSVKA

SEQ ID NO: 457171 - protein, 421 aa, unidentified
MDVHRQSTQVAKLEDGRLTHLGRIPTTPEALRAFARTLRRDDHVVLEATGNTYAIVQVLKQHADRVVVSNPLQTRAIADAKIKTDKIDAEVLVRLLAGGWLPEVWVPDADTQALRQRVAHRIRLVRHHVRLKNRIHGVLIRNLVPGCPRADLFGQAGHKWLLETAIPQLPEHEQEIVLATLRQVEAVRAELGQLGQTLAALALQAPAVQRLMTIPGIDAITALTLVAVIGDVHRFRSPAKLVGYVGLDPRVRQSGLHTASHGRITKRGRAYARTALVESAWAAIKSPGPLRGFYQRLRTRRGPHVAAVATARKILVLTWHLLTKEQDYAFMRPSLFAKKRRTLELAAGQPARFGTRGVAYEYNLKTVRQREIALCAQAERAYTQLTHNWQPQKPQQDAGAAKGNAPPRRRSATQRGGAFIP

SEQ ID NO: 457172 - protein, 347 aa, unidentified
MRFYTQQHQFYCGIDVHARTMYVCILNQDGEILVHRDMQASPETFLKAIAPYREDMVVAVECIFTWYWLADLCAHEGLPFVLGHALYMKAIHGGKAKNDRIDARKIAVLLRGGMLPQAYVYPAEMRATRDLLRRRMHFMRQRAAWLTHIQHTKSQYNVPEIGKKIAYKANREGVAARLPDPAVQKSMEVDLALIDHDDRLLRDMALTILKTAKPHDANTLYLLRTVPGIGELLSLVLLYEIHDIHRFPRVQDFVSYCRLVKCAKASAGKRYGTSGTKIGHAYLTWAFAAAAVLFLRAHPTGQRSLTRLEKKHSQGKAFTVLAHKLARAVYDMVQRKTVCDMPTFFRG

SEQ ID NO: 457173 - protein, 403 aa, unidentified
MNAVGIDVSKGRSTVAVIRPFGEIVSRPFDINHTPKELCELANFILSLEGESRVVLENTGKYSDPVIKVLSEAGVFVCPVNAKLIHDYGGDTIRRAKTDKIDSLKIAGFCLDKWAKLERYSPADELRKTLKTFNRQLDEYMRVKIMLKNNLISLTDQTFPGINNLFSSLARESDGHEKWIDFLSCFWHCECVTTLSEEVFAERYRKWCKRNGYNFSSAKVVQIYESASNQQATLFKNDFTKSLITQSVAQMNSLCTTIAKLKAEMTKIAKTLPEYETVLAMHGVGIALAPQLMAEIGDIRRYPKRSSLARFAGIEPPENQSGTYNQHSRRISKQGPPQLRKALFQVMMCVLQKSNPNEDTFKFIDRKRAEGKPYKVYMIAGANKFLRIYYARVMECFNTLATA

SEQ ID NO: 457174 - protein, 255 aa, unidentified
MSQPNLQCMGIDVAKLSLDIATTDTIEPFTVGNDEDGFAVITDKLKHTKINLILMEATGGLEAAIACKLQSEGYDVVVINPRQARDFARSMGYLAKTDKLDAAMLAQLALVIDRHPDRSRYIRHLPDEARAVLAAMVVRRRQLNHMLVAERNRLYPSHPQSRKSIDNIIDALQNELDRINEQMKQHMTAFFQEQARLIGSVKGVGDITVASLIAELPEQGKLNRREISALTGVAPLNRDSGKMRGKRTTFGGRAE

SEQ ID NO: 457175 - protein, 460 aa, unidentified
MRRKKKPKKRAVVQDIPKLEALAQINLNAAGLDIGDDEIYAAVPEGRDTQSVRVFGTFTVDLYALADWLEACGVDTVAMESTGVYWIPTYEILEECGFEVYLVNARHIKNVPGRKTDILDCQWIQQLHTYGLLHASFRPAEEICALRSLVRHRDTLIRSCAREIQHMQKALQQMNVKLTNVISDITGVTGMLIVRDIVTGEQDPKTLAKHRDPRCRKSEEEIAKSLQGHYKPEHVFALQQALEVYDFYQKQIKECDAEVERLYATFEPQVDVSEKPLNLDKNKRHKRRGNEPHFNLRLYLYQWAAVDLTQIDGLDALTVQKVLTETGVDMSPWPTVKHFTSWLGLCPHNDKTGGKVIRSSTKKTQNRAAAALRIAAQSLARSKSALGAYYRRMRAKLGGPQAVTATAHKLARIVYAMLKNQTEYVDSGEGYYEEQARQRAVKRVKRKAKNLGFELVSTTS

SEQ ID NO: 457176 - protein, 409 aa, unidentified
MEVIHARCAGLDGHKRTVVACVRVADGETVRHEVRTFGTTAAELEGLAGWLRAEGCTHAVLESTGVYWRPVWAVLSEGLTLVLAHAAAVRNIPGRKSDVKDARWLADLLAHGLVRPSFVPPAAQQALRELTRTRRQLVREITAHTQRIHAVLESANVKLAAVMSDVVGVSGRAIVAGLAAGETDPERLADRLHVRAQGKRAAVVAALRGSRLQPHQRVLLHQHVALIESVEASVAAIETAIAAALAPFRGAVARLVTIPGIQATTAAIVVAEIGSTMAPFPTAGHLRSWAGLCPRLDESAGKHGVRRIRPGNPWLKPTLIQAAWAAVRVPDSYSRALYTRLCRRSGKKQAIVAVAAALLTAIYHMLKTDQPYQDRGAQHLTDTDRQRMAHRLTKRLQHLGYEVSLHTAA

SEQ ID NO: 457177 - protein, 343 aa, unidentified
MTKITIVGLDLAKSVFQIHASDQDGRPVVRKKLRRTHVVPFFADLAPCLIGMEACASAHYWARELQALGHEVRLIPPQYVKPFVKTNKNDAADAEAICEALVRPTMRFAAVKSAEQQSVLMLHRARELLVRQRTMLINALRGHCGEFGIVAAQGAPKVADLIEVIEDPEDQRVPTLARDALGSLIGQLRMAQAQILGLEKKLTSWHRANEASRRLEAIPGIGVITATALVATIGDASQFESGRQLAAWLGLVPRQYSSGGKERLGRISKRGDGYLRRLLVHGARADLRWSRHRKAQRSLWQESLLARRPTNVVLVAMANKTSRVVWAMLSRGETFRTETPATA

SEQ ID NO: 457178 - protein, 353 aa, unidentified
MINSTKYIGMDVHKESISIAVRNAAGKIVMETVIETKSSMILEFVEGLHGDVHVTFEEGTWSAWLYDLLKPRVTRLVVCDPRRNALLQEGNQNDRVDARNLAELLQNNQLRSVYHGDHGLRALKELVRSYLTVTKDLSRVMTRVKAIYRGWAIPCSGKQVYSSRLRAEWLGKIQEPGVRRRAEFYYQQLDALRALRQEVRRDLLAESKKHKIWKQLCQIPSLGPIRAAMLLGILQTAHRFRTKRQLWTYSGLGIEVHSSADHHAVKGQLERKKKHIEIRGLNKNCNHDLKNLFKGAAVVASTKPGPFEKFYAALLAKGMRPEMARLTLARKIATIVLIVWKRGVCFDANHLKP

SEQ ID NO: 457179 - protein, 358 aa, unidentified
MKMIAWIGNDVHQETITLSMYVSDEQEPRIEKTIRNEKRAVEKFYKRITREYEVRACYEASGNGYVFYRWLKGMNIKCEVIAPSLIPKKSGERIKTDRRDARKLGRYYRSGELTTIHVPSEKEESCRGLVRLREQISKEAKDSKHYILKYLQARGLHYKEGTNWTKRHREYLRSLKFEESIDQRVFNEYVMLLAYKEETLKQIDGEIFEMAHGHEYRERVEKMMLLRGVRETTAIGLITEVVDFKRFSKPRELMAYLGLIPSEHSSGTERKQGGITKTGNTRVRRLLVEAAWHYRHRPTITARVEHEKDEAWMISQKAQKRLHAKYWHLVNAGKCSKKAVTAVARELTGFVWAIMQTA

SEQ ID NO: 457180 - protein, 377 aa, unidentified
MESIIYVGIDVHKDTYSLCSFDMQKDLFFSQHTMKASTVNVASYLKKISESNGNAITICGYEAGPTGYRLCLDLQRQGFNCVIMAPTSIAKTAKDKMLKTDKADAQMLARTLAYHSYKQVVLPTENILAIKEVVRLRASVLKSCKKAKQNLLSFLLYHGISYPGGGRESYWTIKFFTWLKTVTFASDYLTYCFEEYVSEVSRQIQRLDQLNAKLKELESDKEISESVKKLKCISGIDTVTAVSLIAETGDFNRFRSAKEFASYTGLIPGRHDSGLSVGNSVGITKQGNQNLRHLLVESAKSIKRATALSHGQKSRRLLARQEGMEPVIINYADRAALRIKSRMRKLELRGVNYNKAAVACARELACFAWGMMTNHIQ

SEQ ID NO: 457181 - protein, 255 aa, unidentified
MSQPNPLCVGIDVSKATLDIAASSDVAQFTVSNDSDGFDAIITALRRQSVALVLMEATGGLEVAVACSLQAEGFEVAVVNPKQARDFARAMGYFAKTDRIDARVLAQMAEVINRHPERKRFIRAVPEAERQVLAAMVVRRRQLIAMLVAERNRLHPSHPQNKKSINTIIKALEDELASLEKDMNSHIRSHFKEIAELLSSIKGVGTMTVSALLAEIPELGTLSRREISALIGVAPVNRDSGTMLVDEPFLAAGLA

SEQ ID NO: 457182 - protein, 391 aa, unidentified
MISVGIDVAKDKHDCFIINSEGVILADVFTIPNNMEGFTTLLDKLRVCSTPQDNIKVGLEATGHYSYNILGFLLDNGLATYVLNPLRTNLYRKSLSLRKTKTDRVDARTIAAMLLSDVGLKPYTDTAYHNEELKSLTRYRFDKVKERAQLKQSVSRLVCILFPELEKLVPTLHMASVYALLAEFPGAKQIAAAHLTRLKTLLADASHGRYGRDMAVEIRNAARCSVGSRMPAKSLELQHTIRLIRELDAEIEEIETAIQAIMDELQSPITTIPGIGYRMGAMILAEAGDLSRFDSPDKLLAYAGMSPSTYQSGQLKNCYPHMEKRGSRYLRYALYNAAKYVCHWDPTFAAYLAKKRAEGKHYNVALSHAAKKLVRLIFALEKSGQPYCPVL

SEQ ID NO: 457183 - protein, 411 aa, unidentified
MIKENYIYVGIDLHKETHTAVMIDCYNQKLGEITFPNRPADFPKLVAKVKKCNTDGKTIVFGLENAYGYGRALAVWLIDKGYLVKDVNTAISHRQAKHRGAMYRKSDSDDAEAIALATLNMLDKLPDAYPNDAYWSLGQLVHRRDNIMKQRTRLVNQLHEQLCIAYPSYKQFFNDISRPTALYFWEHYPSRKYLKGKSVEDLRAELVPVSHNKCSTKTCEKILDAVASDKVKNNAYQDARDMVTLSIVSDLQHYDSQLAEVDKMLEQMYKMLGCTLTTIPGVNVITAVKILAEIGDIKRFSNANKLAQFAGIAPLHLSSSGKGKDVATKQGNRRLQATIYFLAIQMVQLSSKGTPRNPVVRAYYEKRKAEGKTSQQALICISRRLISIIYGMLKNGTEYRMPVVENAGEKL

SEQ ID NO: 457184 - protein, 411 aa, unidentified
MKDLLTCCCGLDIHKDVVVACLLQGPTDNKPTSEIRSFSTLHTALVELRDWLAQVNCHHIAMESTGIYWQPIYDVLESVFVDEMTLLVVNARHMKNVPGKKTDMRDAEWIATLLRAGLLNGSFIPSRDIRYLRQLNRYRKALVHDITAQKNRVEKFLQSSGFRLSTFMSSIFGTSGINIMSILIGKGSISLADLDLCLKARSRNRIDEIMPALNGSLDEKQRRFLKMLLTHLQDLQDNLAEIEDDITQAMLSYQDDVAIIKTIPGISDIAAASIIAEIGNDMSRFKTSQHLCSWAGVSPGNYESAGKKKKARINKGNPYLKSMLCEVSWVIAGKRNTYLSSWYWRMKQRLGAKKAIIALARKLLVIVYTLLKGRSSYNELCFEQRRAAVERKRVGHMIRELVNLGYGIVPA

SEQ ID NO: 457185 - protein, 315 aa, unidentified
MDTQVFVGIDVGKDVLFVAIRPFGDNLEIANREDGIVDLVKRLRFLRPTLVVMEATAGYETPVAVAIYRAGIPVVISNPRLVRSFARATGHLAKTDKIDAGVIAHFAELIRPEPRRLEDPDEERLGRLVKRRKQLLRMIVMEKNRVAKGVPEMRKEIQKHLDWLAKDLERIDQALNDFIQSSPIWSAKNDLLQSVPGIGKVGAQAIISDLPELGTLNRKQIASLVGVAPLNRDSGNFKGRRSIWGGRAHIRTVLYMVAVVASRCNPVIKEFYERLCKAGKPKKVALTACIRRLLAILNAMMRNGTRWGEFKPAIT

SEQ ID NO: 457186 - protein, 377 aa, unidentified
MDSSRFCGRESAATTDANQLNKEETEMDATTIGVDLAKSVFELALASAAWRIIGRRRLTRPQFERFLASEPTAHLVMEACGTAHYWARIARTHGHRVSLLPAQYVRPYVRRNKTDRTDAEALLEAVRSGGINPVPVKTAAQQELQALHRVRAEWMATRTARLNAMRGFLQEHGVTIPRGARTAIATIPRLLADAEAPIPARLRALLMHLLEDVRALDINLVALERDLATIADTDPVVSRLMTIPGIGLITGTALVATVGHIHGFRTARRFASWLGLTPSERSSAHRRRLGAISKMGDVYLRCLLTHGARSVLLTAHRAQARRGRVLTRLQQWGLSIETRRGHNKATIAIANKLARVVWAVWSREVAYEHRPALPAAA

SEQ ID NO: 457187 - protein, 430 aa, unidentified
MNYTQNQKIEQVTESTLVLGVDIGSSEHYVRAFDYRGRELTRKVFRFSTDINGFNSFYDWVTQICIKHGKNEAMIGCEPTGHYWYTFYQFVKDYGMKLAFVNPASVKKAKELDDNSPKKTDLKDPKTIAKLVIDGRYSFPYVPEGIYAEIREVTSSRDRIMKELNAASNRIQRWLKIYFPEYLTVYKKFDTTTGMMILEEVPLPTMVTALGVDNIIKIWREHKVRGKGASFNRAKTLVDAAHDSVGKSGGQGAVMEIQMLLEDYKVKKQQLEMVTSVMEELIMQIPNAEKMLSVDGVGLVTVAGFISEVGDISRFKNPKQIQKYAGFELVENRSGKHKGRTTISKRGRKKLRKIIYQVVLPLIQSNKEFRSIYDYYRKRIKNPLKGRQAMIAVGCKLIRVFFAIMTKGVVYNGSKMIEDIHRPTQLPQAA

SEQ ID NO: 457188 - protein, 405 aa, unidentified
MDIIVDKGCGLDVHKGTVVACIMGTGIRKEVKTYTTMTNDLLRLKEWLQENGITHVAMESTGVYWKPVFNILEDGFEVILVNARHVKNVPGRKTDVQDSEWLCKLLRSGLVKGSFIPPRDIRELRDLTRHKRKLIQAITAEKQRVEKVLEDANIKLSSIASDTFGASGKRIIEELIKGKLRAEEMAELSKGRLRQKREDLKEALVGEVREHHKFMIKASLRHIGAMEKILSEIERRIQQKINRHYKEEYELLQTIPGVKGEASTLIAEMGVDMERFPSEMHLSSWAGMSPGNNESAGKKKPGSTTYGNKCLKTMLTEFVWVASKTKDTYLRSKYHSLVGRRGKKKALVALGHKILIMCYHILKYRHPYKELGGDYLDNRRKDKITRSYIKRLNHLGYEVTLKQAA

SEQ ID NO: 457189 - protein, 440 aa, unidentified
MKKVTFFETFFEHAAGIDIGAEKIFVSPDGVEVVNFDTFTSGYYQCIEYLQQKEITDVAMEATGVYWMALYAMLESCGFKVCLVNPKETKQVKGRKTDVKDCQWIQKLFSAGILRQSFIPEEKYMEVRQLVRERIDIIEMGSTYVNKMQKSLELMNIKLKEVISQIHGASGIKMIRAILEGNRDKDYLLSLCDKRIIENKGEAVLKALEGNYNDTYLFMLEQNLHMWEKHQEHVGVIDGRIGHLLQQLSKDKELLVKDSKPKPVRHHAPKIEGLHEMLIRLYGVDASSVSGINDYTLLRLAGETGVDMSKFPSNKHFVSWCGLSPKHHKSGKINKRVKGTRCNKTGQIFKEIAQALINSKHIAIGSFIRKLKARKDSAIAIKAGARKLAVAYYDTLTKGSDYVEQGTKKYEEQIVKREKAVLKKLAKKYHMQVLDSQMAV

SEQ ID NO: 457190 - protein, 496 aa, unidentified
MRTNIFPRRSQAVETVMAGGDLRKTLVVPIDFAKETHVVQIARGTGEYLRKRPLNVHNSVAGSQYLIEAVERCCAKYRIGRSRVLFGGEDPPEYVWNFIGSIQAAGYAFVRVNAKEAKKHRTNTRATSDVLALDGIAQVMLLRRAYDLACRDEVYGAMKMAERARRKLKRQETALKNRLHRIADVLFPGFLKESLSGLLPFGVSCLDLMEAGCSVVRVKRMRVETLTKRLKQGRTQTPDKVAATLKELAESALPPAPGIVPYLEKSLATKARHMKALRESLRMEENEMARCLVQTPGFLLTSIPGLGVILASGITAEYGDTHDWRIPDQMASYAGIVCREHQTGGPASAPVKGRLPIDANHHLKDQLLQAAFHTGHNTHPAWRRLGLPGEHPLFEQYRTVELREGRSRLSTAKKLLRVASAMVREERIYLPASALNPNAPDAMTAEQFVAYLEIVAEMLKSKWKGYDLSGIPDERNQLTRWLQSTNKLAEHLLKDK

SEQ ID NO: 457191 - protein, 482 aa, unidentified
MAKRKMSTFERLRSGKMNHKERKQWQQRLYAEDTGLKVVHPDAAGIDIGNESHFVAVPPDRDERPVREFGSWTADLRRMAEWLKRCGIRTVAMQSTGVYWVAVQEILEQEGLEVYLVNARGTKNLPGRKSDVQECQWLRKLHTYGLLRNSFHPPEQIRAVRTIWRQRDRLVREAGREVQQMQKALTTMNVQLANTISDVSGVTGQAIIRAILQGERDPRQLAKLRDRRIAASEAEIAYSLEGNWREDILFELQQVVDAYDFHQKQIAACDVQLQRYLSALPIRSEPGAGEASQADAPSERANKRRKHKLQKNQPIFDLAAELQRTLGVDLTTIDGVEVITTQVILSELGPDLSASFPSEDHFASWLELAPRRDVSGGKLIRQKSRKSNNRVATALRMAAQSLWRSDSYLGARYRHLKARLGGQKAVKAMARYLACLVYRLLTKGRAYVDRGAAHFETKRTERELFALRRKASELGMQLVAVS

SEQ ID NO: 457192 - protein, 487 aa, unidentified
MQGLYLQHHLIIQSKNKDLIRAYYKEVSPERIQQAMIMEEKEHGNYNLLRLVSVGNKNTLTGGVTAMHRKNDNRQVEKRQRITDATLVIGMDIGCEFNAMCLMSKEGTILGRYPKIYNSRKGFDYFHGIVESMKEKYGFTDVLIGMEPTGHYWRKIAYFAMDKQYEVRFIRTTALKHQRELDESSSAKNDIRDAYTIANIAREGKYIDTVIEDNIFRQLRTLAHTREKIQRISTGAKHALKGMLEDYFPELKHIFWSMKAKGLWALLEHYPFPEDVLKTDIDTVTELIAQSTRRKIQAHEKALQIYKAAQHSIGLQRVGDADRFRVAAYLSEIRHSETQLKEIEAQMEALLKKIPLAEYILSMPGIGTLTCGVFLGELGNPCNFTNPKQIVKYAGCDPKEHDSGQRTGRRIISKKGRWLLRKYLYFMAMRVVHRSPFLKDYYENKQKTMTKKEALCAVVIKLIKVIFALLRDKRTFTEKQSCLKQAA

SEQ ID NO: 457193 - protein, 343 aa, unidentified
MQTVTTIGLDIAKSVFQVHGVDAGGHVVIRRQLKRRYVLAFFQKLPRCLVGIEACGSSHHWSRELQALGHTVRLMPPAYVKPYVKRHKNDAIDAEAICEAVTRVNMRFVATKTPEQQSCLTLHRTRHLFIRQQTSVINAIRAHLAEFGIVAPVGRHGVEQLLGVVADASDKRLPEVARACVAALGVQLQTLKAQILEFDRMIRAWHRCSEASRRLDDIPGVGPVLATALIASVGDPRAFRSGRDFSAWIGLVPRQNSSAGKDRLGSISKRGDRYLRSLFTTGALAVIRYAKIHGTKHRPWLTALLVRRPTKVAAIALANKIARMAWAMMAKGERYKEPAALAA

SEQ ID NO: 457194 - protein, 333 aa, unidentified
MHGAFRRALEIVDAWAWPPDADGLRGLAARAAMWGPAVRGVIESMNGARFVHDRLEEHGWEVLIADAVKVKGLAPLACKTDKIDARVLATLSARDLVPEIWLPDPSIRRERELARFRLHLVRHRTTLKNRVHATLVTFGHPCPVSDLFGHAGRELLDRLEIPDPWRRNVDVSLGLIDDLELQIAALTVSLRRQGADHRYIPLLVTAPGLGWIDAYTMASEIGDIGRFASPAKLCGYTGLCPKVKQSGASDARGPISKHGPKYLRWALFEAALNACKHPLYAQRYQHTKRRLGRQRGPKVAQIDLSRKLTEAIWHTLTRNQPYAPAGAPFRLAA

SEQ ID NO: 457195 - protein, 355 aa, unidentified
MNDAKYIGLDVHQATISAAVRDSSGNLVMEATLETKAETILEFVHGLRGSLRVSFEEGTCASWLHDLLKPHVTEVLVCDSRKNALLRVGNKNDREDARKLSELLFLNKLHPVYHGETGIRTLKELARSYLTITRDLTRVMNRLKAIYRGWGIACAGQQVYAARYRAEWLAKITEAGVRRRAEIYYQQFDVLAALRQEVRRELFAESRKHPAMRLLRQIPSIGPIRAALLIALMQTPHRFRTKRQLWAYCGLALRTYDSGEYRFVGGQLKRSKKAVTIRGLNKNHNHDLKNIFKGAATRAAATAGPFQKFYEARLASGMKPPMARLTLARKIAAITLLVWKKGVRFDAEQLKQQAA

SEQ ID NO: 457196 - protein, 359 aa, unidentified
MDNNEDGTRHVVGGVDTHKDLHVAAVVDGQDRVLGTACFATTRQGYRQMLVWMRSFGDLRRIGIESTGSYGAGLLRFMQQAGIDVLEVTAPDKHDRRRRGKNDDLDAQNAAHAALAGRRIVTPRSRDGMVESLRVLTVCRKTAVAARRVAIQIIQTTIVSAPDGLRDALRSMTRMQLVRTLAAWRPDLTAYREVEAAYRISLKSLARRYLELHDEIADLDAMISAIVDDLAPELIARNSIGYTSAAQLLLTAGDNPERLRSEASFAALCGVSPVPASSGKTIRHRLNRGGDRAANSALHIIAIGRIRTDSATKAYVARRTSGGHSKLDAIRALKRYIAREVFHIITRRHREINQTCIAA

SEQ ID NO: 457197 - protein, 385 aa, unidentified
MSQFSGSSQAAIDYNSTIIGALELSEKKWVLAVQLPGVGRHSRHALDACGDGLVSFVERLKAKCAAAGRKIARVILTHEAGRDGFWLARFLARRGIEVHVMQPSSLPVDRRARRAKTDMIDAEMLLRTLMAWLRGEPRVCSMVPIPSEADEEARRAHREREDLTRERRSIVNKIDGILATLGIKGYKALRRDRREQLNCARQPDGDPIPPKAKARIERLLDRLDLVLKLIEQVESARDAVLKKDAPADEAERMIRSLTDLRSIGPDFATLLVREAFVRQFRNRRALAGYVGLGGTPFSSGGSEREQGIGKDGNRRVRAAMVELAWMWLRWQPDSALSVWFRGRVGAMGGRIRKIMIVALARKLLVALWRYVNDGVVPDGAKLKAA

SEQ ID NO: 457198 - protein, 369 aa, unidentified
MTNMTYVGLDVHARSIVAAVARPGREPARVVSRIASSIKAIDGLIERLRRDYGGELRFAQEAGPTGYWLHRHLEARGVVSVVVAPSRTARAPGDKVKTDDRDACKTAEQDRAGALTEVWVGDAAHEAMRDLVRQRSVAVRALRRERQQVTSFLLRQGRHWPRQQWTKKHRAWLSQQEFSAIEQRWLWEEMLAQVGLGEARLARVAGTIEQHVETWAQAPVVAALQSLRGIALINAVVLAAELGDLRRFASAPGLMAYLGLVPSEHSSGERVHRGPLTKTGNRRARTALIEAAWQYRWRAARVGAALARRRANLPPAVIAIATKADQRLSQRFARLARRKLLVVAVAAVARELAGFVWAIGQVVAPAQRR

SEQ ID NO: 457199 - protein, 361 aa, unidentified
MKKPAQHLIAEVPRRRSRVEMTIGIDLGDVWSHYCTLNQDGEVVDRGRFRTTPKAIDKWFTNVSPARVAMEAGTHSIWISAQLQELGHEVIVANVRELRAISHSDRKSDQVDAEKLARYARLDPNILRPIAHRTVAQQEALTLIRARALLVRLRTAAVNAVRGLTKSCGYRMPASATTCFAQRSLAVMPPGLAQALGPVLQQITEMTVKIKLYDRQIQQLGQTEYPETQALLKVHGVGHLTALTFVLTLGSKERFGRSRDVGCYLGLRPRRSQSGDHDPQLGITHAGNAYLRSLLIECSNHILRPHGRDSALRQWGLSLAARGGKQAKSKAVVAVARKLAVLLHHLWNTQEPYMPFYEQAA

SEQ ID NO: 457200 - protein, 315 aa, unidentified
MSEMAVEKFVGIDVSKGALDLCTAPAGEALHVDYDDKGIGHVVNYLAALTPTLIVMEATGGLEMRLAGELVAHRFPVAIINPRQARDFAKATGQLAKTDVVDAAILAAFARAIRPVVRPIKDADTRDLDDLVTRRRQLMDMRVQEMLRLGTASKVQKKSLTAHITWLEKRITELDDELTKRLRASDVWRAKDDLLRGIPGVGPITSLTMLAKCPELGQLNRRQIAALTGVAPLAKDSGKHRGKRFVWGGRADVRAVLYMATVSAVRFNSCIKAFAERLRRAGKPGKVVIVACMRKLITIMNVIIKNNMPWHPKNA

SEQ ID NO: 457201 - protein, 334 aa, unidentified
MWHVGIDLHRATIVLAAVNDMGEAMNPVTIPCKDATTIVSTVNALGSFRAVIEATGTYRWLYNLLRPYGTVLLAHPMRLRAMIQRRSKTDKLDAQLLANLLRINQIPLAYIPPEPYQQLRDLTRSRARLGRHLTEVKVQLRALLARQNRESPYRTPFGPRGLGWFRGQDFGPIEDMVRDELLERFRHYAKQMTLFDKRLEEMRPAFPQVDALADIHGIGLYSALLIVAEIGEAERFRTAKQVGAYTGLTSRVHQSGGHCYQGSITRQGSPWLRWILVQAAMKAVRRDAALKNFYNRIRKRSGAKIARVAAARKLAEICWKRLRRWQREHASQAA

SEQ ID NO: 457202 - protein, 418 aa, unidentified
MSRDENTRDTRRYVALDIHKHYCVVAGVDREGRVLLQPVRVEHADLEEWLKKKLLSSDQVVIESTTNAWHVYDLLAPLAERVVVANPIKVKQIATARVKTDVRDTLILARLLAANLVPDVWVPPMHVRQMRQLLSQRRQLVETHTQILNRMHSVAHRHHLKHERGKRFNEKTIGWQKDERLSKMEQFQLSLEMENKVYIEKQIERISKEVRKLCHQKPWADDMTYLMQLPGSGVITAMTVLAAIGEIERFETSKHLASYSGLTPGLEQSGTKKRGKGITKEGRRELRWALVEAAQMAVKSDPLLKMKFQTLQKRMHRNQAIVAIARHLLELVWYVLTRHQPYRHFSHERIAYKYLTWAWQMDDEARDGLTRQQFTRYYLMRLGIGHDLTRIALDPKHPRKIASEAELLALRPELKQTE

SEQ ID NO: 457203 - protein, 311 aa, unidentified
MDAIVVGIDVSKDRLDVYIRGKDESFAVPRDAEGLAVLIERLRPLEPRAIGLEATGGLETFVAAGLASAGLPAVVVNPAQVRAFANALGKRAKTDPIDAFVIAHFVEATAPEIRPLRDAETRLLADLVARRREIVAMIVAERQRENHAPARVKKSIVRLLKALQRELDSLDSDIDDAVKTSPVWREKEDLLASVPGIGATIARTLLAELPELGALDRREIAALAGLAPWTRQSGKWRGKSFIGGGRAAVRTALFMGAMVAARHNPVLKAFRDKLVAAGKPKMVALIAVARKLLTILNAILRDAKPWRKQTA

SEQ ID NO: 457204 - protein, 407 aa, unidentified
MNLNVGIDVSKLKLDYCGMDSNKQVCFQGEVTNTPKGAGHIRDEILKRSQQADQIIIGMEATSVYNFHPTLFFEQDDRLNQLNVTVVTLNPKVTYRYSKLFDDDKTDTVDAFHIADFLRIGRYQVPVTRDEKHIALQRLTRERYHLVHQINDCKNHFLNNLYYKVNTIDTVLPTSVFGSTMLSILSDEKYSLDDLVQIPLSTLTDELNHLSHGRFGDAKSVAKALKKAIRSSYRLSKTVADSVDQVLAMYANQLRMLNQQLKLLNKSISDLCSVISGADSLQSIPGIGPVYAAGLLAEIGQIDRFPNDASLAGYAGLSWQRSQSGNHERQLTPRTKSGNQYLRYYLVEAANSVRRYDPTYARYYQKKFREVPKYQHRRACVLTARKLVRLIINLLTEHKLYTPPKLV

SEQ ID NO: 457205 - protein, 393 aa, unidentified
MVCVGIDVAKDKHDCFIISSEGEILADVFTIPNNAEGFDTLLQAIRRSTRPEDKIKVGLEATGHYSYNILGFLLDNGLPTYVINPLHTNLYRKSLSLRKTKTDRVDARTIAAMLMSDVDLKSYTDTVYHNEELKSLTRYRFDKVRERAKLKQSVSRLVTILFPELEKLVSSLHSASVYALLSEFPGAKQISSTHMTHLKAVLKNASQGRYGQEMAETIRNAARSSVGSVMPAKSLELQHTIRLIRELDAEIEDIETAIQAIVDEMQSPITTIPGMGVRMGAVILAEIGDFSRFDSPDKILAYAGMSPSTYQSGQLSLSGAYSHMEKRGSRYLRYALYNATKHVCHWDPTFAAYLAKKRAEGKHYNVALSHAAKKLVRLIFAMEKSQRPYCAAA

SEQ ID NO: 457206 - protein, 311 aa, unidentified
MEHYVGIDIAKNTFDVHVLPEKAARHFEYTEEGIQACRQWLVAFHPSLILMEATGGHEKQLARELFAAQFPVAVINPRQVRDFARAKGRLAKTDKIDAFIIAEYAQTMQPPAQEAMDELSEKIRALIARRRQLVNMCTQEKNRREHAFDDYISGSLSCFIASFEKALQEIDELIENHINGAPALKKKADLLVTAPGMGKSTAMFLVAELPELGKVNRREIAALIGTAPVNRDSGTFRGKRMTGGGRRHIRTQLYMPTLAAIRYNSVIRTYYQHLLKNGKVKMVAVVACMRKIITILNSMLMSNQPWNPDFA

SEQ ID NO: 457207 - protein, 358 aa, unidentified
MQRNKKTFKGQNIYIGIDVHKKNWQVAVITESGYTERLSTAADAKALFKFLKSHYPDGNYRAVYESGFSGFATHYALSELGISCVVAHAADIPSSQYELTMKSDRIDAEKLARALRAGLVRGIYVRPKDNLDDRGVLRIRKTIQIQVGGYKTRIKHLLHSNGVELPERFSRSGTHWSRAFIAWLREDVRLLSDTRRSLELLLLQVETLRANLLEATRRVRALSMTDRYREDCALLMGIPGIGLTVAMTILTEVCDIGRFGNERQFASYLGLVPTSHSSGERVSHGEMTFRGNKHIGPLLVEASWVLIVRDRELGRMYTEYRWRMAGQKAIIKIARKLSNIIFAVLKTRKAYEPYRRDA

SEQ ID NO: 457208 - protein, 404 aa, unidentified
MHQRCAGLDVHKDEVVACARVVSGRKVLRTSARFPTTTRGLSALSEWLRTQQCEMVALEATGVYWKPVWHILEAHFRLVLANPGHVRAIPGRKSDMNDAAWLADLVAHGLIRGSFVPPVAIQELRDLTRTRKQLVRQMAQHSLRLQKTLEDANLKIASFVSDLLGVSGRAILQGLIEEETNPERLLARTTGLLRADPEQLRAALEGRVRDHHRFLLRLHLTQIEAIEEGLRTVDARLDILLRPFTPVVDRLVTLPGVGTLVAQTVIAEIGADVHRFPTPGHLRSWVGLCPRLDESAGKRRSTRLRHGAPWLKTVLIQAAWAAVRRRDAYPHAQFQRLKAKRGPKKAIVAVAASLLTAVYFMLRDDVPYRDLGVHYFDRHDTTRAAARLTKRLEALGFKVVLSAA

SEQ ID NO: 457209 - protein, 359 aa, unidentified
MKDSSTGVMETYELTVGIDLGDKYSQVCVLDGEGEVIEEARIATTQAGLKRKLSGLEPSLVVIEVGTHSRWVSALAEALGHSCLVANAYRVRRLAEGEDKSDKLDAEALARFARSDPRLLKPIQHRGEQVASDLAVIHSRHALVGARTKLINHVRGLVKSAGGRLPSCDADYFHRKVAGCVPEGLRPAVEPLLEIIAEHSAKIAAYEAKIETMIEERYAEAQHLKRQVKGVGPLISLAYVLTLEAPERFRRSRDVGPYLGLTPRQWQSGGQSRQLGISKAGNQYLRWLLIQGAHHILGPRGKDSDLRRWGLQKAQGSKNAKRRAIVAVARKLAVLLHRLWRSGEAYQPLRGEPAGARAA

SEQ ID NO: 457210 - protein, 411 aa, unidentified
MRIIHQRCCALDVHKKSIVACVLVWDGKQAVEERKKEFGTMRRELERLRFWLMACKVDAVAMEATGVYWKPVWNVLEQQKQFQLKLINAQHFHGVDGQKTDQADAAWLAELLQCGLLKSSFVPPQEIRELRDLTRVRVALLEDQNRVQNRIEKILEDANIKLGSVASDTLGTSGTKIIKAIVKGDKDPGWMADYAQGRLRAKRKELEESLRGRVTDHHRRLLDMLLRQSEFLDREIGRIEAEIRERLAPRQELVDRLAEIPGFGEVTAWTILAEIGFDMTVFRTPERLCSWAGMCPGNRKSAGKRKSGKTRKGNRWLRRGLTQTGLAASNSKNSYMRSFYWRIAARRGAKKARIAVGRKQLIVAFFVIRDGVHYREPGPDYFDRRQPEKTRNQLVKRLENLGFKVSLEAAA

SEQ ID NO: 457211 - protein, 353 aa, unidentified
MSDYYVGLDVHKASICVAVLNAAGKLVMESVVETSAATVLDFLKGLRGRVEVTFEEGTHAASLYDVLQNTKAEVIVCDPRKNRLLRDGNKSDKVDARKPAQLLRAGLLSPVYHGEHGTRDLKELVRSYEYLVEDSTRTMNRIKALYRGRAVACAGTDVYKPRQREGWLAKLPEAGVQARARRLFSELDHLNGLRREARKALAAECRRHPASKLLPGVPTLGVVRVAQLIAAVVTPRRFRSKRQFWSYCGLAVVTRSSADYMVEGAGLRRTKKAAATRGLTRSHNRTLKYVFKGAAQAASRCEPFKPWYSGLLSRGLRPESARVTVARKIAAVTLAVWKAGESFDADAVMKQAA

SEQ ID NO: 457212 - protein, 385 aa, unidentified
MQKLNDLSRSPSPLDPDSTLIAVIELSLSSWLVAGIVPGVERQPLKKLAVDESALLKLLHRWREEAAKAGHRIKRIAVAFEAGRDGFWLARWLSARDIEAHVIHASSVAVSREHRRAKTDRLDTELLKRSFLGWLRGERDHCKMVAIPTTQDEDAKRPNREHESLVGEQSRIVNRMKATLIRFGIRGFNPKLKKATERLDGLRTPEGEPIPPNTLAELRRDMVRRRLISDQIRQIEDARLERLKQAPNDGPHAMVRLLARVIGVGVETADMLVQEVLSRSMRDRRAVARYAGLTGSPDESGTKRREKGLTRSGNARVRRGMIQLAWRFLMFQKESTLAQWFRARTESARGTRKTMIVALARKLLIALWRLVREGVVPDGVVLRPA

SEQ ID NO: 457213 - protein, 339 aa, unidentified
MKEVSTIGLDIAKNVFQVHGVDRAGAVVMRRALRRSQVLAWFAKLPRCLVGMEACATAHYWGRELQKLGHEVRLIPPAYAKAYVRRNKNDPADAAAICEAVGRPSMRFVTIKTDQQQALAGIHRVRDLLLKQRTMLKNQLRGLTAEFGIVAAKGRRGLNELLAILSDPADRRIPSPLREGLIAVTQTLCGIERRLEEIDRQMVAAGRGDATYRHLITAPGYGPILSSAMAALVIDPGAFKRSGDFAASLGLVPRQDGTGGKVRLGPISKRGNGYLRRLLVNGATSLIKCQHLRRDPWVAKLLAAKPRKVVAVALANKLARIGWALMRRQEDFRGRPAAA

SEQ ID NO: 457214 - protein, 414 aa, unidentified
MAVEGAVALVGIDWASEEHAVCGIDPEGVVRVAFTIAHSADGFDQLVRRLAKLGAPETVWVAIERPDGRLVDRLLEAGHPVVPVSPNAIKAWRESEVVSGAKSDPGDAEVIAEYLRIRARRLKRLQPYSDDTRALRAVSRARQDLVEQRVAAHNQLEACLDAFWPGAKEIFSDVTTDIALDFLERYPTPSAARNLGEKRLAAFLVKHSYCGRRPAGELLERLRAAPAGIPSGAESEARRDAVLGYVRVIRALNASIKALSRSVAAHLGEHPDNEIFTSLPRSGQVNAAQMLAEWGDCRQAYDSPEAVAALAGLTPVTKKSGKHHSVHFRWACNKRFRVAMTTFADNSRHASPWAADVYQRAIDRGCDHPHAVRVLARAWVRVIYACWTTHTPYDAAQHKAASALNKRPARKRAA

SEQ ID NO: 457215 - protein, 449 aa, unidentified
MARPKRSRPMRDISPTHPNAADIGAKMHVAAVPPDRDADPVRTFGTFTGDLHRMADWFESCGVRTVAMESTGVYWIPAFEVLDQRGFEVVLVNARDAKHVPGRKTDVSDAQWLRQLHEYGLLRASFRPKGELATLRAYLRQRERLLDYAASHIQHMQKALMQMNVQLHHIVSDITGATGMRIIRGIVAGERDPAALAAHRDRRCHASAEEISAALAGNWREEHIFALGQALDLYDLYQAKVAESDARIEQVLARLRTASERPACRLPPARHRDNSANAPAFDARAILYSVLGVDLTQIHGLGPSLVLKLVGECGTDLSPWPDAKHFTSWLCLAPSNKISGGRVLSSRTRHSGSRAAALLRLAAVTVGRTQTALGAFYRRLSARIGKAKAVTATARKIAGLYYNAVRHGMVYADPGASYYEERYKARVLANLRRRATSLGFVLQEAPSSA

SEQ ID NO: 457216 - protein, 350 aa, unidentified
MDHYAGIDVSLECSSVCVVDASGKIVREGKVGSEPQALIGWLGSLGIGVSRIGLEAGPLSQWLYAAMREAGLAVELLETRHVRKALETMPVKTDRNDARGIAQLMRLGWFRPVHCKSMAAQETRAVLTARKLMQSKLRDIENSLRGILRGFGLKVGKTTARSFAARIRELVAGHSNLEMIAEALLAAHAVLLREFEGLQKHVRTMARLNVQAKLLMTTPAVGPIVALTYASAVDDPGRFKSSKAAGPHFGLTPKKYQSGQTDVSGRISKIGDAAVREALYQAAHIMLTKPVKGCSELKSWAMRIARRAGMRKAKVALARKLAVILHRMLADAKPFNPAARTETKTMAAAA

SEQ ID NO: 457217 - protein, 314 aa, unidentified
MEHPASPSFVGIDVSKDRLDVHVRPSGQTFAVARDGQALEQLVDDLRILAPALIVLEATGGFEIVVAAALAGAALPIAVVNPRQIRDFARATGRLAKTDALDAQVIALFAERIRPEPRPVANADRQTLAELVARRRQVVEMIGMETNRLHQARNPRVQRMLKATLKTLKVQLAELDRDIDDTIKRSPVWRAADDLLTSVPGVGDVTAHTLIADLPELGLLDRRRIAALVGVAPVNRDSGQMRGKRTIAGGRADVRHSLYMATLSATRWNPVISQHYRNLVKRGRPKKVALVACMRRLLGILNAIIRTKTSWQCA

SEQ ID NO: 457218 - protein, 392 aa, unidentified
MVVSVGIDVSKDKHDCFIVSSDGEVLADVFTIPNTLDGFTCLLQRIRECTTPQDKIKVGLEATGHYSYNLLGFLLDNGLATYVLNPLRTNLYRKSLSLRKTKTDRVDARTIASMLLSDAGLKPYTDTAYHNEELKSLTRYRFDKVKERAKLKSSVSRLVCILFPELEKLVPSLHTASVYTLLEEFSGAKQIAAAHLTRLKTLLETASKGHYKRDMALEIRDAARNSIGSRMPAKSLELQHTIRLIRELDVEIAEIEEQIQSIMDELCSPITTIPGLGFRMAAMILAEVGDFTRFDSPDKLLAYAGMSPSTYQSGQLKNCYPHMEKRGSRYLRYALYNATKYVCHWDPTFAAYLAKKRNEGKHYNIALSHAAKKLVRLIFAMEKSRAAYRLTA

SEQ ID NO: 457219 - protein, 405 aa, unidentified
MEVIYERCCGLDIHKASITACVIIGSQKEIRTFATMTDSLLQMTAFLRERGVQMTAMESSGSYWKPVFNIMEVEGIQAILVNAAHIKAVPGRKTDVKDAEWIADCLKHGLLRASFVKPRDQRELCELIRYRGSLIEERAREYSRMGKVLEGANIKLTSVASKMDTVSGMNMIRALIDGVVDPAVLASMAKGRMRSKTDDLKRALNGLIAPHQQMILKAMLDHIDQLSNSISGLDTEIEKRMSQDVELIEALDEITGVGKISAQTILAEIGTDMSRFPTAAHLASWACMCPGNNESAGKKKSGQTRKANSTLKKTLVQCGRAAGNSKDTYLSVLYHRIAARRGAKRAAVAVGHSILVTCYHMIQNRTHYRDLGADFFQNRNKEALVKQNVKRLQALGFKVILEQTA

SEQ ID NO: 457220 - protein, 347 aa, unidentified
MRFYTKQHKFSCGIDLHARTMYLCILNQEGKIVLHRDIKANPDIFLKTIAPFREDIAVAVECIFVWYWIADLCSEENIPFVLGHALYMKAIHGGKAKNDKVDAYKIATLLRGGMMPMAYVYPSEMRATRDLLRRRNHLANKRAELIAHVQNTLHQYNLPEIGKNIGKKGNRIGVAQRFPDPGVQKSIELDLALIDNYDQLLHRIEHEISLIAKVHDADAYFRLRSVPGIGRILGLVILYEIHDIDRFPRVQDFVSYCRLVKCAKESAGKIMGSSGKKIGNAHLKWAFSEAAVLFLRRNPEAKRYRDKLARKHGTAKSLTILAHKLARAVYYILKHKEVFQPKAFFAK

SEQ ID NO: 457221 - protein, 347 aa, unidentified
MQFYTKKHKHYCGIDLHTRIIYLCILNNDGEVLLHKQTHSNPESLMKLIKPYLEDLIITVECMFTWYWVSNFCTEHNIKFILGHALYMKAIHGGKAKNDKIDSYKIAKLLNSGMLPQAYVYPEHMRATRDLMRRRTFFVRECAELKTHVKIMNHQYNLPALSLDLRVTSNHEMIIARFDDPSAKRSVQADTDSIRYLTKKITSIEFFIKKQAKVDDYQSFMLIKSIKGVGDVLAMTILYEIHTIDRFPTVQKFASYCRLIKCKAESAGKIYGTSGNKIGNAHLKWAFSEAVVLYLRGNDKAKNYHVRLIKKHGKGKAMGILSHKLGRAIYFMLKNKEAFNESAFLNG

SEQ ID NO: 457222 - protein, 344 aa, unidentified
MKLFVGLDVSLAKTAICVVSEHGKIVKEAQVASEPETLASWIGEQNGSIAAIGLEAGPLSQWLHRGLSEAGLDVVLMETRQVKGALKAMPIKTDRRDAEGIARLLHLGWFRPVHCKSVSAQEVRAVLGARKAVQQGMIALEMSLRGLLRNFGLKVGAISRGQFEHRIRELAGGNLMLEAATEPMLRARASLRRELAELERRVRQLAQDDSVCHRLMSMPGIGAVVALTFRSAVDDPARFTSSKKVGPWVGLTPSRNQSGERDVSGGITKAGDVNLRRALCQAATVMMNRGRSTWLRTWAAQIARRRGRKRAMVALARRIGVILHRIWVDGTAFQAEAPIIPQAI

SEQ ID NO: 457223 - protein, 318 aa, unidentified
METLYVGIDVSKRQLDVHLRPAAEVFAVSRDAAGIEALIGRLAGLDVKIIGVEATGGFENVVVAGLAGAGLPVVVVNPAQVRDFAKALGKRAKTDPIDASVIAHFLEATKPVIRPLPDEETRLLSDLVARRKQIVEMIGAERQRERRTSNLRLRKSIARLLKALDKELASLDQSIDDSVRGSPAWRDKEDLLVTVPGIGKTIARTLIADMPELGSLDRRQIAALAGLSPYTRQSGKWRGKSFIGGGRCNVRAALFVGALVASKHNPALRDFRDRLVAAGKPKIVAIVAVARKLLTILNAILRNGQPWRQEQAHAAASI

SEQ ID NO: 457224 - protein, 406 aa, unidentified
MRHYIGVHRADAEHAVWVEDETGTKVLSRALPQTAEAFADWGRWLDERRAHGVELWAAIEKPEGRVVDFLLDHGVVVFPLNPKTLDRARDRFRVSGAKSDPFDAQVGAGFLRTDHGHLRPLLPASEAAQELKGLTRDYGRQVRQQTRLLNQLTITLKEYYPRALELGGELTSQWVREFLRVYATPAALQALSERQWQRWARSQRLSAERTAALWTLLQRPPLPVPPHVVRVKARRVAVLLAQLEVTSEAVEAYRKAIEDFFAALPAAKWAASLPGGRRGTTVPMLWAELGDAAGRWQSFQHLQGYAGAVPVTERSGKGHVVKFRFACNTQLRYALSQFAFLSLRSSEWARAYYHRCRQRGHTHQHALRALGAKWLKIIFVLWSRQIPYNEEHHLASIARHQLRQPA

SEQ ID NO: 457225 - protein, 372 aa, unidentified
MYAACKANLKKEMKNMNHLGIDVGKRKCSRAALKDDKGMMLDEFFFGNDMSGIHNMLSRIQSHGKGATIRAVLESTGNMWIRIHDTLEENGIDTKLANPYKTRIIAEAKIKSDKLDARILSDLLRTDLIYESYVPNSEDRDKRSLVRHRITLSRTKTKLANKVHSILDKYDYQTDLTDIFSKSGIEWLKSLSSIVTPVDRIILNTSIESIEAINQQVDTVSKEISKYARDNKDVKILLSITGIDIFSAMLISAEIVDVRRFSTPWKLVSYASLAPSIRESSGKIKTGKITKQGSPCLRWILVQCALTAIRFDAHLRIFYDRIRNKRGHATAIVATTAKELLVIIWYMLTRNELYRYMNKQRYEQKLHKLEHR

SEQ ID NO: 457226 - protein, 433 aa, unidentified
MEEAQDEPLFCERAAGIDIGKLMVAVTVRVPSETRKGGRQQETREFGTTRRQLLELADWLRCWGVERAGMESTSDYWKPVFFLLEQQGLDCVLYQASQVKALPGRAKTDKLDSVWLAKVTERGSLAGSFVPPEDIRRLRTHTRYRRRLTQARTAEKERCEKLLEDAHLKLSSVISDIHGVSGRDMLNAVIAGERNPRVLAEMARGVMRRKTARLEEALDCSFFTPEHAFILQMMLDNIDHYTAQIAVLNERIAVLCEPYERQLAQLDEIPGFGVKNAQDLIAEIGVDMTAFPTAGHLCSWARVAPRVKESGGKRKGRSATGRGNPYIGGTLGEAAASVGRTQTFLGAKLRRLCKHMPKKKAQGAIMRTQLVIAHGLLSDPAAEYRELGPGYYGQRAGTRRQASGHVRGLERLGYKVTIELLDPETGELTTAAV

SEQ ID NO: 457227 - protein, 322 aa, unidentified
MTESGCFVGIDVAQATLDIAVVPSGESRRVSHDDSGIEVLVSWLCDLTPTLIVLEASGGLETLLAAALAAAGLPVVVINPRQARDFAKATGRLAKNDHLDAQVLACFAERVRPPIRLLKDAETRELQAWVTRRRQLIGMLTAEKNRRSRARGAMCDHIDAHIVWLEDQLRTINRQLGEAIQQMPVWRERGLLLQSVPGVGPVATATLIAELPELGTLSRRQIAALVGVAPMNHDSGRFHGQRRIRGGRPSVRQALYMAALAGIRWNPAIRTFHRRLRDAGKPPKIAITACARKLATILNAIVREQIPWSSTTIAAAAHQHSC

SEQ ID NO: 457228 - protein, 363 aa, unidentified
MHSINNTELSSLEETRRQFNGGRCAIKLGIDVHQDFYVVAEQVGATNPKPPQRFHKQAFLHWAAKLKQSGAEVYAVYEACGFGFSLQRQLAALGIDCYVVCPQKLDERNKRVKTDGLDAKALCLKLDRFVQGNRDALAVVRVPTEEEERSRAIHRQREQLVGARKRLEAQGRSLMVNHGLEPVQNWWKPRAFAALAVPQWMRELLLKSQPILLALQEKIALLTLQLQSAAAPNQARGLGKMTSVIIDREIGDWRRFNNRRQIASYTGLCPGEYSSGNTRLQSCVTKHGNPRLRAALVELAWRLVRFQPNYKPVVKWRQILAKGALATGAARKKAIVAVARQLAVDLWRIKTGRLTAEQLGLTI

SEQ ID NO: 457229 - protein, 351 aa, unidentified
MPRRSTVRAVATIGIDMGKNTLHMVGLDSCGAIVLREKVSRGRIASRLANLPPCLIGIEAGMATHYVARELAALGHDVKQVPPAYAKPFRQGHKNDFRDALAVAEAVQRPTTRFVPPKSNEQLDLQALHRVRSRLVSQRTAVINQIRGFLLERGIIVRQGLRFLRQLLPDILAKRTDVLSPRMVRIVSDLAGDWRQLDDRIEIVTDEIETLAKADDSCRRVMTVPGIGPIISSAMVAAIGNGSAFSKGRDYSAWLGLVPKQMSTGDRTILGRISKRGNSYLRMLFIQAARVILLRPANWPKHGFGAWLVRAIQRLHPNVLAAALANKLARIAWTVLAQERSYEARVTKAEA

SEQ ID NO: 457230 - protein, 387 aa, unidentified
MRKPNDMSKCLAAFDQDSTLVAVIELGLKNWLVAGIVPGIERHPLKKMEINERALIELLYRWRDQARKAGHPIKRICVAFEAGRDGFWLARWLRSQGIECYVIHPTSVCVSREHRRAKTDRLDAEVLKRAFIGWLRGETNHCSMAAIPTLEEEDAKRPSRERETLIGERTRIINRVKACFVRLGIRGLKLNWRKAADVLAKLRTPEGKSIPPNTLDELKRDLARLLFVSDQIKEIEKTRLARLRTAPKSGPGAMVRILANVLGNGVETADMLVHEVFSRKLRDHRAVARYAGLTGSPDESGRKRREKGLAKSGNARVRRGMIQLAWRFLWFQPTSDLAKWYEARTSDGRKDTRKRMIVALARKLLISLWRLATLGEIPAGVVMRPAA

SEQ ID NO: 457231 - protein, 377 aa, unidentified
MKRILKIGMDVHSTNYTLCAMEPVIGAEDRIFANIKVTADYKNILMFIENLKLKLGLNDEYDIECGYEAGCLGYSLYNQLTAAGVKCVILAPTTMLTPQGVRIKTDARDAVMIAQCLSYGGYHAVYIPTEEDDSVKEYLRMRDDHKLALKKVKQQINAFCLRHGYHYEKTKWTTAHLKWLKGLDVSGLYKEALDEYMASYDEQTAKIERFDQRIEELASQERYQEKVKRLGCFLGIKTHTALSLIVETGDFERFAKGNIYAAYLGLAPGENSSNEKIRRLGITKAGNGHLRQLLIEAAGGICKGAVGHKSKELRRRQNGNTAEVIAYADKANTRLRSRYYKFIRRGKKRNVAVAAIARELACFVWGMMTENISIKAS

SEQ ID NO: 457232 - protein, 368 aa, unidentified
MSHKSSKLYVGMDVHKESIDLAVAEEGGEVRHHGRIGGDMNALWRAVRKLESSGRELVFIYEAGPCGFGIYRGLAARGHGCWVVAPSNTPRRVRDRIKTDRRDSLKLAGLARAGELTPIYVPDVCDEAMRDLVRTREDAVVMQRQARQRLAALLLRNDVRYAGKTAWTAAHRRWIADVKLPQSAQRLAFEEYVQAVEEASARVQRLSQCIEQELATWRWRPVVGALQACRGIQLIHAVRMVAELGDLSRFRHPRQLMGYLGLIPSEDSSGEHRYQGAITKAGNSSARRALVEAAWAYQYAAKVSALIARRQADVPKVVLDIAWRAQVRLCARFRRLAARGVNRNKIVVAIARELAGFVWAIAQHVKPV

SEQ ID NO: 457233 - protein, 408 aa, unidentified
MIRATLRRISSTKCVSHHPQPLLDATTAGLLNLLEWLGEQGCTHVAMEATGVYWKPVWNILSDGNFELVLANAAHIKNVPGRKTDVSDAAWISDLLAHGLIRSSFVPQQDQQQLRELLRTRKQLIRQQSSHIQRLQKTLQSANIKLDSFITDIVGKSGRAIISALIAGEANPTKLAALADWRIKASQQKLREALRGRTTHHHRFLLHLHLEHIKFADEAIADIDRRVDALIAEMDKEVKVDQAPFQSLIALLTTIPGIAPVAARAILSEIGLDMTRFRTAGHLLSWAGLCPSNNESAGKRGSTRLRKGNNWLKALLVQCAWAAKRKKDSYFRAQFYRLSGRRGPKKAACAVAASILTTVYHMLKNGTEFIDLGCSHFDQRSRDVKAKRLLAQLVNLGFSAKLTPVSVS

SEQ ID NO: 457234 - protein, 412 aa, unidentified
MKRIRDRVAGLDVHRDTVVACCRIVEPDGSVDVSKQGFVTIRKGLTELAKFLSDHAVQTVVMEATGVYWKSPYYVLEALFPELWLCNAQHVKNVPGRKSDLADAEWLADVAAHGMVRPSFVPPPEIRELRELTRYRATQVDARAKEIQRLEKVLQDAGVKLTSVASAVWSMSSREMIEALIAGERDPAVLAQMAKGRMRAKIAQLEEALPGHFGAHHAIVCRQVIDHIDFLDQAIATLTLAITERLVPFEAAVAVVVSLPGISRRTAEVIVAETGADMSRFRTPGQLCAWAGVAPASYESAGKRRPAGTRHGSRRLRHALIEAARAAVHTKNSYYGAQYARIARRRGPNKAVVAVANSMLSTIWHLLSNGTFFEDPGGDYFERRHDPAVEAKRLARRIEALGFDVSLTQKAA

SEQ ID NO: 457235 - protein, 335 aa, unidentified
MMYVGLDVHKRVCYGTLTDQDGNVLKRGRFSSSPEGLRAFMEDIDEASIAMEAGYCWQPLYDALKEEGYDVRLAHPQRVKAIAEAKVKTDKVDSETLAHLLRANLLPESYVPPMDIRELREMVRRRSFLVGMRTKLKNRIHAELAKRGIDLETPLFTRRGRELLRSLSLEAVDQLLPVMDALDVQIICISGSLRRMSGEDERARLLTTIPGVGYYVAMLIISEIGDVNRFPSAERLCGYSGLVPRVRNSGDSVRHGGITRDGSRWLRWALTQAVLVHVRWAEESELSGFYRRLAARKTKQEAVIATARKMLKVVFWMLRDGEPYHSGGLEPALGR

SEQ ID NO: 457236 - protein, 363 aa, unidentified
MQYNRSSTLFVGVDVHKDTHTAVGVSPFGEKLFELTVGNYEKDFKVLVDRAQTVAHSSGLSPYFGLEDCQGFGERLAQFLAHDGQLVVHVPAIMVDRDRKRMIHPEKNDSLDAKGVAQVMIQRIDTLPSYIVSKESELAKNIRELSQDREYLVKERIRVKNQLHGVLHRIFNTEYTKLFKDPFSLKALKHWKSARPKSVNPFLLRTMKRKVKRLLDIREEISELEEELKNLIAESGHTLQTASGCGTVLAGELIGEIGDIARFKNPAQLAKYAGCAPREHSSGKTVRWRKTRAGNRRLNRAFHRMALSQISRMGNVKAREYFKKKVSEGKSKSQALVCLRRHMVTLVWNLMKHKDAYRFPQEI

SEQ ID NO: 457237 - protein, 446 aa, unidentified
MTSIPPLPDAKAQITGPIAAWIGLDWADQQHVISLYDVASGQTETAQLRHSAEALQQWVANLRTRYGGARVAVVLEQARGSVWYALMSHDSLVLYPVNPESLANYRKTFFPSRAKNDPSDAALLQEMVRKNPERFRAWWPEDADTRALQLLTQHRRRLVDQKTALTNQLTSLLKGYYPQALDWAGALDKEMACTFFQHWPALKILQRAKPARLRQFWKKHTRLTSQQMDQRLEAIEQARSLTEDPAVVEASALMVQALVTQLVPLLKAIEQFEHHIAERFQRHPDRGLFESFPGAGAAVAPRLLVALGADRQRWQAAEEIQRLSGIAPVTEQSGQSRWVHWRSACPKFLRQTFQEFANWSVKWCRWAKAYYLKQRGRGNQHQAAIRALAYKWIRIIFRCWKEHTPYNDSLYIDSLRRRGSPLVEDIEKLILRASNVPACGKAVRIP

SEQ ID NO: 457238 - protein, 369 aa, unidentified
MTDLTLFIGLDVHKKTISVAMVEGSAGAAVRFYGTIANTPDSLRTFCRKLSRSGQQLHFCYEAGPCGYGVQRQLTRLGHHCDVVAPALIPRKAGDKVKTDRRDAMMLAQTLRAGQLTAVWVPDEAHEAMRDLVRLRVQAVRDLRKTRQQLLSFLLRHGLISPYGHWTKMHRRWLGELVFAHPAQHLAHEEMLQRIERAEALCDRLKAAILELVPQWSLAPVVEAIQALRGVSLIVASVIVAEVGNFGRFDSPRQLMAYLGLNPSEHSSGATIRRGAITKTGNTLARTCLVEAAWTYRFPARVTQIIRNRLQGLPEPIRNVAWKAQVRLSARYRRLAAAGKPAAKVVVAIARELVGFIWAIARMVEPKFA

SEQ ID NO: 457239 - protein, 317 aa, unidentified
MIPLGIDIAKLKFDVALLTQGKFKTKVFANDSAGISACLKWLGTHAIEPVHACLEATGSYGEALACALHDAGHTVSVINPARTRAYAQSLGLRQKTDAVDAKMLARFVQTQQPLAWTPAPPELRALQALLRRLDALVEMRTQEKNRLGVAEPTVSASIAQHLDYLEAQIDALKTQIESHIDQHPGLKQQQDLLDSIPGIGPATSAWLIAELNLTRFDSARQAAAFVGLTPRKDTSGTSVRGKPRLCKQGNSLLRKLLYFPALTAMTHNPLVRALCLRLKAKGKHNMAIIAAAMRKLIHIAFGVLKSGKPFNPTLADT

SEQ ID NO: 457240 - protein, 421 aa, unidentified
MTQPSHDTFAAFIGIDWADAKHDLCLQAAGTAQRECLQLEHTPEAIDAWVTALRTRFNGQPVAVCLDLDKGPIVSALRKYDFLVLFPINPLMLARYREAFTPSRAKDDPTDAEFQLELLLTHRDKLHPLTPQSSTMRALAQLVEHRRRVLGDKVRITNRLTSMLKNYFPHVLQWFPDKDTPLFCDFLTRWPTLKAVQLARRSTLEIFFRDHHVRSHEVIAHRIQAIRAALPLTTDEGVIAPNALLVQALVAQLRVTLQAITDFDTAIAQRAQSHPDFALFQALPGAGPVFASRLLVAFGEQRERYPSAAALQKYAGIAPVTERSGKKSWVHWRLQCPKFLRQSFVEWAAASIRHSFWAQIYYQQQREKGKTHQAAVRTLAFKWIRILYRCWQERTPYDEAIYLQGLTRRGSSLIHNLAQAS

SEQ ID NO: 457241 - protein, 320 aa, unidentified
MDVTSPAPTYVGIDVARDTLAVALAPGGETWAGTNDEAGRVALVARLRDAAPALVVLEATGGLEAALVAELAEAGLPVVVANPRQVRDFARALGRLAKTDAIDAAVLALFAERVRPAARPLPDAGTRALGALLARRRQLVEMLAAEQQRLSRAAPEVAPGVRAHVAWLKKRLAGLDAELRRAVEASPAWRARDDLLRGVPGVGPVLSLTLLAELPELGALSRKQIAALVGVAPLNRDSGTLRGRRLIWGGRARVRTTLYLAAMCAARFNPTIRAFYQRLRAAGKPPKVAQVACARKLLTILNAMARSHAPWQLDFQLSGR

SEQ ID NO: 457242 - protein, 345 aa, unidentified
MDIIGLDLHKRESQLCIGHADGRITERRIVTSRERFTAELGDRPRARILLEAATESEWVAQHLEALGHEVIVADPNFAPMYATRSRRVKTDKRDARTLYEAAQQGTYRPAHRLSSARRHVRAELAVRDTLVRARTRCLALAKALVRRDGLRVPSSTSRLVMRRIQDLTLSDVLGAELAPLVAVVAPLTEQIQAADARLAGVVETDVEMQRLLTMPMIGPVTACAVVATADDITRFASAHAFEAYFGLVPSERSSGEKRRLGAITKTGNARVRWLLIEAAWRILHSKRADTVALRTWALRIAARRGKAVAVVALARRTAGILYAMWRDRVPYDGTKLPLPRARRGA

SEQ ID NO: 457243 - protein, 405 aa, unidentified
MGGDAMSGLKGSFDGFVGIDVSKDKFDTCGITGEETRLFQFSATMDRKGFEKLKGHLAAVSLSSVLIGMESTASYHVNLFSCLVSEGHKVLLINPLLISNYVKMQLRKTKTDKKDAVVIAQFLLANGDTLIQRATPSLISELRDLSRQRESLVDEMTSLKSEIKRLLNITFPELEHMAGIFTKAILKLLLSYPSARTLRGADRDQLTKMLIESSQGHKRDVFAESLLKASQSSIGTDSPAKEMILKQKIALLLHLEEALQEITDMLIEMSRKLMEEDMNILTSIKGIGNKTASNFLIEMGGDINRYECSGKITAMAGLDPAIYRSGKHEGKGRITKRGNRHLRRIIWMMATRVIHYSDIFKLYYLKRRKEGLPYKMAVLATAHKLIRVIYAMLTQRTTFCPQVNS

SEQ ID NO: 457244 - protein, 325 aa, unidentified
MDVLGIDVAKASLVVVLLIGERQQRAEFANTPAGHAKLLSWLAKRSSAPVHACLEATGTYGDDLAQALYDAQHTVSVVNPARIAAYAKVQAARHKTDQADAALIARYCQREQPAAWIPPPAELRELRALVRHLDTLQQQRQAEQNRLGAGGHPAAVTQAIQAHLTFLTDQIGVVEQQIEAHFDQHPDLKRQRELLDSIKGIAVRTATRLLAELGDVQRFANARAVVAYVGLNPREYRSGSSVHRRTRLSKSGNAAVRAALYFPAIVAKQHNPLVQALCARLTARGLCPKAVIGAAMRKLLQIAYGVLKSGQPFDPNYGQAASGQA

SEQ ID NO: 457245 - protein, 392 aa, unidentified
MVVSVGIDVSKNKHDCFIVSSEGEVLADVFTIPNNMDGFYALLEKIRACTTPQDKIKVGLEATGHYSYNILGFLLDNGLATYVLNPLRTNLYRKSLSLRKTKTDRVDARTIAAMLLSDVGLKPYTDTAYHNEELKSLTRYRFDKVKERAKLKSSIARLVCILFPELEKFVPSLHIASVYALLEEFPGAKQIAAAHLTRLKTLLETTSKGHYKRDMALEIRDASRNSIGSWMPAKSLELQHTIRLIRELDHEIAEIEEQIQSIMDELHSPITTIPGLGFRMAAMILAEVGDFTRFDSPDKLLAYAGMSPSTYQSGQLKNCYPHMEKRGSRYLRYALYNATKYVCHWDPTFAAYLAKKRAEGKHYNIAISHAAKKLVRLIFAMEKSGSVYRLTT

SEQ ID NO: 457246 - protein, 405 aa, unidentified
MFCGIDWASERHAVCVLDDAGHQATAFEIAHTAEGFDQLLARLRRYRDPATLPVAIERPDGRLVDRLLEAGHPVVAVQPNAIKAWRDAEVLSGAKNDPGCGPLIADYLRLRQHRLRVLQPFSAETRALRAVVRTRDDLVDQRTTASNQLGACLDAFWPGAKGVFADLASPITLDFLARYPTPESAASLSERRMAAFLTKHGYCGRRPAAELLARLRAAPPGLCGTVEVEARRDAVLAMVRVLRALVAAIKDLDRAVVAHLGEHPDAEIFTSLPRSGRINAAQVLAEWGDCRPAYVDAEAVACLAGATPVTKQSGKHTAVQFRWACNKRFRQAICTFADNSRHGSPWAAKVYAEALARGHDHPHAIRVLARAWIRVIWRCWIDQVPYDPAKHGAAHKLTEMATSAA

SEQ ID NO: 457247 - protein, 358 aa, unidentified
MAKSKQTTPVVGGVDTHKDLNVAAVVDDNDQVLRTQSFATTRQGYKLMLTWIRSFGDLQRIGVECTGSYGAGLLRYMQAAGIDTLEVTAPDKLDRRRRGKNDDFDAQSAAHAAFAKRRTVTPRSRNGMVESLRVLKVCRKTAVQARRVALQIIQTTIVCAPDRLRDLLRNMTRMQLIRTLAAWRPDLSGYRDVEEAYRIALKSLARRYLELHEEVADLHDMIEAIVTELAPDLVACSGVGFNSAAQLLLTAGDNPERLRSEASFAALCGVSPVPACSGKTTRHRLNRGGDRAANSALHIIAIGRLRLDPTTKEYVARRIAQGHSKLESIRCLKRYIAREVFNIIARRHKQINRAQIAA

SEQ ID NO: 457248 - protein, 468 aa, unidentified
MSKPSQNPKRRKSRRKKELLQDIPKVDPLDQINMNAAGLDIGDEEIYVAVPEGRDEESVRVFGTFTAHLYTLADWLEACEVTTVAMESTGVYWISIYEILEERGFEVYLVNAKHVKNVTGKKTDILDCQWIQQLHTYGLLQASFRPPEDIAALRSLVRHRGNLIRSATAEIQHMQKSLQLMNLKLTNVVSDITGLTGMCIIRDIVSGVHDPEALAKHRDPRCTKSQDEIALSLQGNYKAEHLFELKQALEAYDFYQGQIQGCDEQIQGIYNAFEPQVDINEKPLPPSRKRRRKPKDNEPDFDLRLYLYQMAGVDLTEIDGVNTLTIQVVLSEIGTDMSKWPTVKHFTSWLGLCPHNDKTGGKVIRTRTRKTQNRAAAALRMAASSLSHSHSALGGYYRRMRAKLGAPEAVTATAHKLARIIYAMLKNQTEYQDPGKGYYEEQARQRAVKSLERKAKQLGFQIIEETAA

SEQ ID NO: 457249 - protein, 401 aa, unidentified
MQQRLWAGIDAGKTAHHCMVVDADGQRVLSRRIDNDESALLELIRAVTSLAEGGHLTWAIDLNAGGAALLITLLLAHDQELLYIPGRTVHHAAGSYRGDGKTDAKDATIIADQARMRRDLHPLRRGDELVAELRILTSRRSDLSADRTRTINRLRERLGEYFPALERAFDYSNNQAALILLTGYQTPAALRRIGTARLETWLQNRHARKVSSVAASAVAAAHTQYTVVPGEQLGADLVARLTQEVIDLDAALKEIDVMIEDRFRRHRYAEIIVSLPGFGPRLGAEFLAALGGDIALYDSADRLAGVAGLAPVPRDSGRVSGNLHRPRRFNRRLLRASCLAAQLSIRHDPASKHYYDRKRAEGKRHTQAVLALARRRNNVLWAMLRDRTHYQQPTGDPATAA

SEQ ID NO: 457250 - protein, 347 aa, unidentified
MEKASQAEGQVFAGIDVSARELSVAVQCGIKEGIAITTFCNKAAGHKALLAYLLRAKGRARVCLEASGNYSLDLALTLQAHPQVEISVVNPRRARRFAESLGERSKTDPVDARVLCEYALRMPWVPWVPPSLAALRLRSITRAIEDLVAMQAQEKNRQHALLASDALPALLIRELEQHLRYLKLRITRLRREALRLIARNPELNRRFHLMLTTPGLGETSSLQILGELVVLPETLDARQWVAFSGLDPKQFSSGTSVEKKPRISRGGNRHLRRALYMPALVATRHEPFMRDFYQRLLSRGKAPLQGVVAVMRKLLHALFAMFRRDEAYDGSKLCPAEFARPTAVVCV

SEQ ID NO: 457251 - protein, 416 aa, unidentified
MAVMIGVDPHKASHTAVAIDRAENVLGELRVRSSADQVAQLCSWAARWPERTWAVEGAGGLGYLLAQQLVSAGETVLDVQPKLGARVRLLATGNVNKNDPNDARSVAIAALRSNAVRPVAAEDHAAVLKLWSKRRRDLGSLRTQVVCRLHSVLCELVPGGHPKKEMSAAQAARALAAVEPSGAVAAARYQLAADFLEDLRRIDGQMREAKKRLELAVKASGTTLTQVFGVGPYVAGTVLGYVGDVARFADRDRFASYNGTAPVEASSSVHNVFRLSRRGNRRLNHAIHMAAVTQVSHRESEGRAYYDRKIKEHKNHKAALRCLKRRISDAIFDHLVADAKRKADVMAKHETAIPAVDAGPGGQMGNGSIACAAGSHPERQLFGQATPGPTPTIEPRAAAGRPKRTRTVEKKTRRAS

SEQ ID NO: 457252 - protein, 382 aa, unidentified
MREFAREVDPLEPERHRCARVEVSSNHSRDRGSTMNITTYGLDLAKRIFQVHWVEAETGEVKRKVLPRGDVGAFFARRANGVVAMEACASAHHWGRVFTGLGHQVKLIAPQFVRPYVKTNKTDAADAQAIWEAAQRPEMRFVALKSEEQQAVLSLHRMRAHFVKIRTMQANQVRGLLYEFGLVVPKGWRALLAQAAPLLADHTRCVVPELVRSELSEQLEGLGTLTSRIRQLERRIESWQRRESECQRIAAIPGVGKLTATAVVATIADACCFRSGREFAAFLGLVPRQSGSGGRVKLLGISKRGDPYLRTLLIHGARTVLFQQSRIGRTPDPWLKGLLSRRPKNVAIVALANKMARTIWALMAYGRVFDRGWRRIPAMAPS

SEQ ID NO: 457253 - protein, 356 aa, unidentified
MAIVAHARPFVIGVDTHARNHAVSILACPTGEIVDEAQFPATAAGLSRAVSWAGRRTGGDVTVLWVIEGTGTYGARLRAVAADTGYTVVEAPRINARANRTIGKSDPLDARRIAAAALPLHETQLREPRADDGVRAAVKVLLASRDHMSTERTATINALTALLRVVDPGIDARRPLTQAQIDATAAWRARDEALATATARGEATRLAKRVAALDKELKDITKRITDLVRQSPAGGLLDQPGIGPVTAAVALTSWSHLGRIRSEAAFASLAGASPIPASSGNTVRHRINRGGDRRLNRALHMAIVTRMRMDPRTRAYVERRTAEGRTLREIRRCLKRYLAREIYRHLTTAARAQLTA

SEQ ID NO: 457254 - protein, 343 aa, unidentified
MEYYVGLDVSLKRTSICVVNQTGSIVQEGVVDSDPEAIASFVRSRAPGTVRIGIETGPTTTWLWTELNRLSLPVICIDARHAKAVLKMQVNKNDRNDAAGIARIMQTGWFKEVRVKDLDSHAVKALLASRALLVKIKRDLENQVRGLLKNLGLVIGRAKFNVFAVRAEGLIENRPELVAAVRPLLAARRAIEQQVEDLDRKVHKLARRDVQVRRFMTVPGVGPITALCFKATIDDPTRFKRSRSVGAYIGLTTRRHASGEIDWSGRISKCGDAMLRMYLFEAAGVLLTRVPKWSRLKAWGTKLTKRNGLRKAKVAVARKLAVILHRMWIDGTEFNWSTKKAAA

SEQ ID NO: 457255 - protein, 420 aa, unidentified
MTSANIIPADAVLVAIDIAKVRNEVLIEDPSHKRRRRLQVLNNRAEHDRLIEVLQTYGRSVVCGFEATGNYHRPIAWRLAEAGFEVRLVSSLALARTREALHNSWDKNDPKDAQVMLHMLKIQATQFYHDPLRAGINDAQELSKTHEAIARAKTEIQHRILTHYLPLYFPEIERFRGNSRSDWFFAFLGAFPTPASIVVLSKEEFVKAAWGVVGRKVSKTQILMDIYETASTSIGLPLPLEAPAVRMFRMVVAEARSLIRQRNEIEAQADELLRHSQDYQLLRQIPGVGPIIALTIIAEAGDLRRFHHHRQFLKFCGLDLSTQQSGQYRGQTRLSKFGNARLRRALWIAGQVAIRQRENGFRHKFERYIAKDRDNPDLRRKALTAITAKMARVVHAVIKSGSDYRPFVEGRVPGGRTSLS

SEQ ID NO: 457256 - protein, 429 aa, unidentified
MNCTQNKKIEQVKETTMIVGIDVGSEKHYFRAFNWRGIELTRKPVAFSNSMEGFNSFYNTIVELMQKSELEEALVGIEPTGHYWFDLGQFMGEKNIKFVMVNPHHVHKTKELDDNSPSKNDRKDPRVIAGLVRDGRYFYSYMPTGAYAELRNASNRRFVLVEEQTRAKNRLQKWIAVYFPEYKGIYTHIDAKGGMLVLKKAPTPEEIVRLGVEGIIKIWKDAKLRGNGHKKAMLILAAAMRSIGLKAGLTEARMEIQDLIEDYELQTKRLERVNDLIKGLCQQVRYADKLLEIKGIGITTVAGFIAEVGDITRFDSTKELQKLAGLELVADSSGKHNGKTKISKRGRKRLRYLLFEAAISVVGKNEEFKEIHRYYTTREKNPLKKMQSLIAVACKLIRVFHAILTKGIRYDASKMLKDIRHPGEQLKAA

SEQ ID NO: 457257 - protein, 354 aa, unidentified
MELHTIGIDLGKTVFHLVGLNPCGEVVVRKKFSRKQLLHFTANLQVKVIGMEACGGSHFLGRALREQGHEVRLMPAQYVKPYVKTNKSDYIDAEAIAEAVGRPKMRFVPIKSDDQLDLQSLHRVRERWVMRRTAVINQIRGLLLERGITLRQGRCHVDAALPGILEDASAKLSGAVRLLLAQLRLELDHLQMRIDEADAVIQKIAGENEACRRLVAIPGIGPVTATAIIAAIGNGAAFKKGRGFSAWLGIVPGEYTTGGKQKLLGISKRGNSYLRRLFVQGARAVLQQSAKQSSGLSAWLAQLTSRTHRNVAAVALANKLARMAWAVLAKNEPYRPPDVGRCGDNVTGLQMTPG

SEQ ID NO: 457258 - protein, 470 aa, unidentified
MVVRKPSPPPIPQTPARLDSLPVTHPHAAGIDVGDRTHWVCVAATPDGSPTTREFPAHTPGLREIVAWLRQCGVTTVALEASGAYGHVLYLTLIEADFDTVMTSASFTRQIKGRPKTDRLDCQWIFRLHTHGLLPPVFQPDEATQTLRSYVRQRANLVRLSGQYVQRMQKSLELMNLKLTTVVGDVTGVTGLKIIHAILAGERDPLTLAELRDRRCQSTVSEIATALDGRYRPEHLSELRSSLVMWEKHLEVIGELDAEIQSHLVTMRRHSEMPRLSAKPRVRGRKPHDPKFDVRQALYYATGVDLTEIEGIDEIHALTLISELGTDMTKWPTVKQFASWLGLCPQFKKTGGKVKSSQTRRGKNRAATALRLAAWGLMRSKSYLGAYLRRQRARLGAPKAITATAHKLARIIYHVLRFGLAYMKRDEEAYAEQVRERLEKQLRRRAKELGFEVTRKVDPPSEPSPSPTAA

SEQ ID NO: 457259 - protein, 427 aa, unidentified
MPYRIAGIDVHKTMVAVAVADVEVEGDWQFERRRFGASPSQLLLLTAWLVERQVEEVVMESTAQYWRPVWDALERDWQPTQRTRVDAKPTSGALHLAQAQSNSGRHGRKRDFPDAERLVKRLSAHELTLSFVPDVTQHLWRTATRRKYQLTRNRVQLQNRLECLLEEAHIKLSSLVSDLLGSSARRMLRALASGETDPATIAALGSTPLHATAAQLCDALGAATDLHPLYRRLLAMTLAELEVIETHMQQLDEELAALLRAHQDALQRLAAVPGLGVDSAQQIIAEVGPTAGTFSTAKRLASWVGACPGHDESAGINHSHRSPNGNRQMRRLLNQAAHAAVKTKGSIFELLYRRFVVRLGHAQAIGAIAHRLCRLVWKILHDGVTYEERGPFVTKARAQRRAAKMIRELRSLGYRVEPVLAPSSNRA

SEQ ID NO: 457260 - protein, 411 aa, unidentified
MNPVIGLDVAKGESQIQAFLDKGEPYRKSFSILHNVKELNKFLDFLKEIESLAGGKPSVILESTGHYHTPIIQFLEEQQYMYIIVNPLIAHRAKSSSLREVKTDAIDAYNLCELYYKEELEPSKKRGIRLLNLRNLTRQHETISSVAAQTKLQLQSILDQVFPEYRGVFGNLYSKVSLQVLLIFTTSKSVLSVTGPVLADKIASLCKSRSDKWAKEKAKKLRDAAIRNPFQNNLYQSHIINLEIMINIVLQYQEHLSKLAAEIDALAKEVEEYELIQSIPGIGEKIAATIISEIGEIERFNHPKKLVAFTGVDPSVYSSGKFTASVNRITKRGSSRLRQALFMAVQCGIRDARKKKTSVEIIPRNKRLREFYDKKRDEGKPFRVAIIACVNKLLHWIFAMLKSNTTFLDIA

SEQ ID NO: 457261 - protein, 343 aa, unidentified
MQAITTIGLDIAKSVFQVHGIDADGKVIIRRQLKRRYVLAFFEKLSPCLVGIEACATSHHWSRQLKALGHDVRLMPPAYVKPYVKRQKNDAADAEAICEAVTRKNMRFVETKTPEQQSCLMLHRTRHLFIRQQTAVINAIRAHLAEFGVVAPVGRKGVADLLDIVADPSDRRLPEVARACLAALGVQLRMLKVQILEFDRRIMAWHRSNETSKRLDEIPGVGPALATALVASVADPKAFGSARNFSAWIGLVPKQHSSGGKDRLGSISKQGDRYLRSLFTAGALAVIRYAKIRGTKHRPWLTALLARRPAKVAAIALANKIARMAWAMMAKGERYREPAALAA

SEQ ID NO: 457262 - protein, 353 aa, unidentified
MRIVCALDVHRRQITYAIVDVRSGEMSRGRITPATRESVREWLARFDGVDEVGFALEGTTGWRFVVEEVERAGHRAHLADPAETAAKRGRKRRAKTDRADCDLLLRLLSARELPESWIPPAQILELRTRVRLRKTLIDERTAWQQRLQAQLFHQGVPRGLRPRTRAGREALAKVELSPAGLELVALALRMIETIDDELAPLDRALSLYARHQPGCRALIARLYGVGPVTATAIVAELGDARRFGCSDDAVRHCGLDVTVHQSDRKRAPGHLSHEGPELLRWALFEAAQQACRSASPDYEYYRQVARRIDHNRACLSVARKLCRRAYHILRELGDEALAPIETPDREEVIAAAA

SEQ ID NO: 457263 - protein, 384 aa, unidentified
MGDYTEAFVAFDTSKLRNAVAIAEAGRSGEVRFLGEIENTTSATGKLVRKLAGKYGRLAFCYEAGPTGYGLYRQITGLGHECVVAAPALIPKKAGDRVKTNRRDALGMVKQFRAGELTAVWVPDPRHEAMRDLTRTRGAAVEDLRAKRQQVLSFLLRLGLHYPGAKTGTKKTWTRAHMDWLAGQKLAHAEQRIAFEEMLLAVRQAQERIARLEAAIRDAVPDWSLAAVVDGVMAMRGIDLVTATAFLAEIGDLSRFRTPRELMAYLGLVPSEASTGDKVKRGPITKAGNRRARRLVVESAWSYRHPPRVGKKKQDRVAAAPQAVREIAWKAQHRLYRRYRALIRKGKHKTVVVTAIARELCGFIWAVHREITTTDPVARQHGMR

SEQ ID NO: 457264 - protein, 346 aa, unidentified
MSYYVGLDVSLEKTAICVVDRDGKVVREGVADTEPEELIAWLRAASPAFERIGLEAGQCSSWLHKQLSLAGLPAVCIETRHAKGVMQAQNVKTDRNDARAIAQMMRTGWFKAVHVKAEDCQKIRAMMGSRRCLLEKRLDLDNHVRGTLRTFGLKIGTVTMAKFEGRVRELIAGDGDLETCIEPLLEVRRRLHEQVRLLTNIILRYVRRDAICQRLMTVPGVGPLTALAFKTAIDDPRRFQKSRQVAVHLGLTPRKYASGEVDYNGRITRCGDAFAREHLFEAAHSLLVRNKKWCALKAWGMRIAKRSSMMNARVAVARKLAVILHRMWLDGTEFRWGKEEALPATV

SEQ ID NO: 457265 - protein, 455 aa, unidentified
MIAIGIDVSKGKSTVCAVGESKKVLQKPFEVAHNKTELSGLIKFAEKFGGEVRVVMEHTGVYYQVVAETLCASGIAVSVVNPVLIKQFGNNTLRNVSTDKKDSMKIARYTLENREELRDYTTADTIRDNLKSFARQFNFEDKTLSAHKNRLYALLERSFPGIDGLFTSPAKPNGHQKLIDFVIEFWHNDCVSLLSSAKFTEKYRKFCKKNHYNFDEKTVAEIHAISRENITTMLKNDATQMLVADAAKHVLSISTRVEKLRSEIIRLAKQLPEFPAVAALYGVGETVAAKLIGEIGDVRRFESKRALVAYAGVDPGKDDSGKKVSVSGKISRSGDALLRKAVYQAVECYLLNSPEDEPVYQFLDKKRSEGKNFYVYMTAACNKFLCIYYGRVKQFMDSLDSPKATIPNNSNGIIPTVIVKDNTAFTCEQDSAIPEGNTSGSQDFVKQARIAGNSS

SEQ ID NO: 457266 - protein, 399 aa, unidentified
MVDEPGAPAFAGVDTHKETNMLGLKDGLGRTIGTWEFPADPRGYEALADAIGDTSIVVGVEGTRSYGAGLAAYLSGRGFEVREVIRPRRDQRRRGKSDAIDALAACDNVAAGRSLPVKELAVAALRPLMIAREQAVSYMARLACCLDSLLVTAPSDVRERWRGLSGPALMKAVAASRPRDAQGRAMRALARQWSGAGAQADELEREIASLLSREYPSLVGAPCIGAVTAARIVLAAGTNPERMRGEAAFSMLCGTSPIPASSGKSSGRHRLNRGGDRQANRAIHEIARARMAHDPRTRAYIERKISEGKSKKEAIRCLCRYIAREVYGLLTGPQEAACDQQQLAPRRKAAGLTQAQAAKGSGMTRSKIGRLERMQEFDAESLAKYNSFLVTAEKAPIGS

SEQ ID NO: 457267 - protein, 393 aa, unidentified
MEGRMENTPSAGVNYDPVHCFVAIELSKSSWIVGFQTPLSKQTSQYQLKPCDAKPLLELIERVRIRISRELGRPVEVMSCYEAGYDGFWLHRVLEAHGIHNHVLDPASLQVNRRARRPKTDRIDADRLVRALIRHLRGEPEACSVVRVPSPEQEDARRLHRERGRLIAERVAHVNRIKGLCASQGIYDYEPMRKDRLQRLEKLRTGDGRPLGPRLKAEIVREIKRLQCLLGMIATVETERDAILESENARHLNADKIKMLAKLKAIGPEFSTTIVGEVLYREFANRRQLGSYVGLASSPFRSGSLGRDQGISKAGNPKARAMMIELAWSWLRYQPDSALSRWFRERVGNLKGRPRRIAIVAMARKLLVALWRYLQTGVIPTGANLKTNRLKQA

SEQ ID NO: 457268 - protein, 390 aa, unidentified
MKKNLTCRQKIGGEQVAVGVDPSRNALHLAMLAPHGTTIRRPPLVPDPLHSIDAFLRDAQEVRLGVENAASCGALVLLHWLSQGYDVREVNPQVSKRLRECLTEAHTDASDAQGLAWSVRFHPDLPKVRLTVTTAAWKRLARARARLVKTQTGLYNRLHAMLAESYGAAYKMLFPSLRSKKALAFFRDFPTLDDAVGDLTRVRTLLGEEKVALLEEVGQWGESLYLEVLRIEVRLTIHLLLTYRAAIKELERKMAELSRADPEVERLKTIPGMGTTLALTILGHCGHLSRFPKRDAFIAYCALAPTIWQSGQSPVYTRRRRRYSRALKQAFLQLALTQLRVNPESRAYYKRKRQEGKAHWTALIALARQLAKVVYKMMVEVPPPHLFLSP

SEQ ID NO: 457269 - protein, 409 aa, unidentified
MEIVHRSCAGIDIGKRSVTVCVITSGPRGEPHKETRTFGTLTRDLLALVDWLDDAGVEALAMEATGSYWKPLWNLLEERFELLLANAAHLKAVPGRKTDVRDAEWIAELFRHGLLRASFIPPRPERELRELVRYRTSLIRERAAEINRIAKVLEGANVKLGSVSTNIGGVSGRAILTALVEGMVDPEALADLARGRLRAKHDALVAALTGGVGPHQRFIIAAQLRHLADLDTLIGGLDAEIKVRLCAADELIERLVTIPGVGRRTAEVVLAEIGTDMTRFHSARQLASWAGMCPGNHESAGTHHGGATRRGSPWLRGALVSCARSAARTKTYLGAQYHRLAARRGARRALVAVGHTILGIVYQLLTSGQPFRDLGANYVDRHDADRISRRLTRRLETLGYTVTLAPPAA

SEQ ID NO: 457270 - protein, 326 aa, unidentified
MDVLGIDLAKHTFDVTLLTSAGLSHYHQFPNTMTGFKQLQQWLARAGVTRLHACMEATNVYWEALAQFLYDQGYTVSVVNPARIKGYAMSQMQRNKTDKQDSATIAAFCATHTLQAWTPPTAAQRKLRALVRHRDDLIATRIQQTNRLQDTTDPDVRASLEAVLLTIKAQLKSTQQQITAHLKANAELRDVHCLMDSVPGIGAVTAQKLLAEFYDLAAYPSAKAAGADAGLTPANYESGTSVRKRPRLSKMGKASIRAALYWPAITVMTHSPEFREFAARLAERGKSYGVILGAVMRKLIHIIYGVVKHKTPYAPEKVLRKSVPAT

SEQ ID NO: 457271 - protein, 424 aa, unidentified
MKILYRRCAALDIHEKRISVCARMVRGNKVEVEESVFDTFTEDLEQLHAWLSQRRIRRVAMESTGVYWRPVWNILEATGSYELLLLNPQHVKALPGHKTDRVDAARIAELLQYGLVRPSFVPPRPVRELRDLVRQRVHVVRDRNRVSNRIHRILETANIKVSCVLGKVTTATFRSILEGLATTQCTRPEALALLATNKRVRSKQEQLRKALRGCRLTEHFQFLLRDMLADLDRLTAKLKMLETRISEQMRPHEELVARLCEIPGVSLITAWTLIAEIGVDMSRFPSAGHLASWCGLCPGNNESAGKRHSGRTGKGNCYLRTILVEAAWSAARITRRRTFFTTLFFRISQRAGMKKAAVAVAHRILRVIYVMIRDGTRYIEQGADYFDRLHPEKTTRRLLARLENLGQTLGFDISISRRVRPQPT

SEQ ID NO: 457272 - protein, 504 aa, unidentified
MSEDDGSTQHRKRRAKRFLTPSQKYEIWLRLVRQEVTIAEAAATEQVDRSTIIRIRTVAKDGALAALAASKPGVGARQRDYELEQSRAEVARLSEACKELAVRLTLVEGKDDMRRRLVRAGHTRGRGVRVGPPRLRRQMMLLSVMLRRHAVSLEVVEVPMSIVGGFDIHRAQITFDYVDTATGEVERGQVASADRRRLAVWLERFSGRDDVTFAAEACTGWRYVIEELRRAGVGAHLAEPADTAAARGRKRHAKTDRTDAQLIRELLEQDRLPECYIPPPQILEYRALLGLYHDLRGEHTAWMQRIHAVLFHQGAERLGGDGLSTAAGRRELAEVAAGQLTAAGQLQVATAERMLEAYEAQLDQVYRQLGGIARHLRGARALTDTIYGVGPITGLALTCWLGGADRFTSARKAVRFAGLDVTVYSSAGKRSAGHLSRQGPQVLRWCVYEAGKTHARHTAPDHSYYTNVKDRLDGKRAALSEARKIVRRACHILTDLGDDAFATV

SEQ ID NO: 457273 - protein, 366 aa, unidentified
MKQITTVVGIDAHKKDLFVAMLVGAATTPVTWQVANEPAAVRRLVRKFEREAPGPVRVFYEAGPCGYALQRQITTKRVTCDVIAPALMPRKPGERVKTNRRDARKLAELGRAGLLTVVQPPTPADEAVRDLARARDDAREDLQRCRHRLGKLLLRRGLHYAGRNWTRAHRRWVDSLSWSHAAERAVVEDYQLAIDHTEARLLELDSRLAAIATEAPYREPVGWLRCFRGIDTLTAMLILAELHDFRRFASARALMAFLGLVPGEDSSGDRHRRGRITKMGNAMVRRVLVEASWHYQHRPGVGRALAARRVGQPARVIGIADKAQQRLCRRFRRMTAEHKPAPKIAVAVARELAGFLWAALQSPAIA

SEQ ID NO: 457274 - protein, 411 aa, unidentified
MNAGVITVVGIDVSKYKSTVAARRPGGEVALLPFDISHDVTGIKNLIEKLHSLDDESGEIRVVMEHTGMYWRPVALALQQAGFFVSVVNAILIHNFSDNSLRKVKTDKADALKIANYGLTFWMDLREYSSEDETRQMLKIQNRLYERTTTTGTMLRNGLISLLDQTFPGANKLFLNEGRNSKGHVKWVDFVIRFWHKECVAALSLHTFADTFQKWCKRTGYRFSTSDAERIHTAARNAVATLPKNDSTKLLITQAAISLNTVYDSLHALRVEMNRLASLLPEYKLVMAMEGVGKITGPQLMAEVGDVRRFSHKGALVAYAGVDAPPYQSGTFDAKNRHVSKRGSPHLRKVLFEIASMILVHGNPDNSVFCFMDKKRAEGKHFYVYTVAGAAKFLRIYYARVKEYLNTKEIA

SEQ ID NO: 457275 - protein, 365 aa, unidentified
MADVFTIANNRIGFETLLSRIQSCSQGESKIKVGLEATGHYSYNLLGFLLDSGLATYVINPLHTNLYRKSLSLRRTKTDRIDARTIAMMLMSDVDLKSYSNTAYHNEELKSLTRYRFDKVKERAKLKSSVARLVNILFPELEKLVSSLHIAVVYALLSNYPGASYIANANTEELAETLCTASKGRYTKSKTAEIQVAAGVSIGSKMPAKSMELKHTIALIRELDKEISEVESAIDKITSQMDSPIFTIPGIGRHMGAMILAEVGDFSNFASADKLLAYAGLSPSTYQSGQLQNCYAHMEKRGSRYLRYALFNAAKYVCLWCPTFSAYLEKKRSEGKHYNVAISHAAKKLVRLIFAMSAFWKSLLS

SEQ ID NO: 457276 - protein, 424 aa, unidentified
MRGGAGRVPSAFAPRRWVVSVVAAPVSSSTVVVAVDVGKNCVALSVTDVGRHRLFGPVEFAMTRPALERVLSRVGEVLPADGVVKVGVEAAGHYHLPMITGSAWPAGWEVLELNPAHVGEQRRVAGRRRVKTDAIDLEAITDLVLAGRGIPVTAREEVLSELTAWAAHRTRRVGTRTATKNQLLGQLDRSFPGLTLALPDVLGTKVGRLVAAEFADPARLGALGVTRFIRFAAHRELRVTRPVAERLVTAARDALPTRDAVIARRVLAADLALLADLDQQINQAEAELAALIPASAFRTLTSVPGWGVVRTATYGAAVGDPTRWPGPRQLYRASGLSPMQYESAGHRRDGAISREGSVELRRALIDLGIGLWHSDQPARAYAAGLKARGKHGGIIACALAHRANRIAYALTRDRATYDPTRWAR

SEQ ID NO: 457277 - protein, 398 aa, unidentified
MKGQDIMIYVGIDAASQKHDFFIQRDTGEVFSKKAITIKNDIEGLKKLHNSIRDFVESSKDSNVRIGLESTGHYCKNILLYLIKEGYQVSLINPILTSMDIKASSIRKTKNDKLDAEAICRFLDKNRFDFKPYTLLSYHIDALKSLTRQRFTIVKQQTQQKLIFQRLVNVIFPEFLSLFSSDYTESVLNILYAYPTPKKMARAHESSIDKLLHHACKTTASKIIETAKSSIGQSEDYLGFELQHTIDMIRFYQKQVEIYNNQIEIELNETEYGKIITSIPGVGTITGAMIISEIGDINNFTSPDQLLAFAGLDPSVYQSGEFEASHTKISKRGSKYLRWAIHQVSSGIWKWDKTFKDYYLKKINEGKHHYVAIGHIDKKLVRVIFSLLKNKQSFIPQK

SEQ ID NO: 457278 - protein, 346 aa, unidentified
MKKIFIGIDFSKEKFDATLIKAEGLKECGPSVHEVFDNKTSGYRRLVKWVKLQSDDAPASSLLYCGENTGGYSIGLSNYLYASGYDIWLECAYSIKQSSGIQRMKNDKYDSRFIAEYAMRNHDKMILYKPQSASLNSLREVFLYRHSLVRQRVALTNRRGEKRLTQERSDVKAFMSFTSKHLITEINKAIAKCDEKISDIISSDEELREVFDIITSMPGIGVQNATCLMVYTDNFTKFDGNSRKIACYYGIAPFERQSGSSVYSRPHVSPFANRMIKSLLSQAALAAVKSDSNMSCYYQHLIERGKHPLLIHNNVKNKMLHTLVAMVRNKQKYNPEYLYKPVSGVA

SEQ ID NO: 457279 - protein, 361 aa, unidentified
MFTERTSVGLDVHARSVVACGLDTVTGQVVRRRLVPSAEAVLDWLRELPGPVAVAYEAGPTGFDLARQLAAADVRCVVAAPSKLQRPAADRIKTDARDALLLARLLRMDEIVEVRVPSVEQEAARDLVRAREDVRGDLMRCRHRVSKLLLRHGIVYCGGHPWNGVHETWLRHQRFGQRGIQLAFDAEFEAMLLTLDRRNRLDTAITEMADDCEYTALVRRLGCLRGVSTLTAFGLAVEIGDWHRFTGATIGAYLGLVPAESSSGQQRSQGSITKAGNAHARRLLVEAAWHHRRDYRNPGTAMRARWNLASPAAKARGHAGNHRLHQRWQNFIARKKKTVVANVAVARELAGWCWSLAVLDD

SEQ ID NO: 457280 - protein, 466 aa, unidentified
MKSPSRRRRLPKPRTSPSALDRTLPNAAGIDCGSAEHFVAVPPERDPMPVQAFPTFTGDLHRLADWLTACGVTSVAMEATGVYWIPVFEILEARGFTVLLVNARHVKNVPGRKSDVADCEWLRDLHMMGLLRGSFRPDDAIVALRAYLRHRATLIESAGTHVQRLQKALIQMNIQLPLVVTDITGVTGQRILRDIVAGERDPQRLARHRDHRCHATETAIVAALTGNYRPEHVFVLQQNLALFDIYQQQITACDAAVEAHLATLASRAAPSTTPLPETRVRRTRNRNEPSIEIRTPLHQLTGVDLSQIDGIGPYTALRLIAEIGTDMRRWPTAQHFTSWLTLAPQNHVSGGRLLSSRTQPSANRAAALLRVVAMSLGRTQTALGAFYRRLGYRVGKAKAITATARKLAILVYRMLKGELVYADPGASAYDAQHQRRTLRALRAHAARMGFGLLDLATGEVLEGAVS

SEQ ID NO: 457281 - protein, 461 aa, unidentified
MTKRKKKSPIDIPPLETLQQLNLNAAGLDIGTEEIYACVPADQDEQPVRAFPTFTVDLYALANWLAACGIDTVAMESTGVYWIPIYEILEARGFKVYLVNARHLKNVPGRKTDVLDCQWIQQLHTYGLLRASFRPPEEICALRALARHRDNLIRYRAAHIQHMQKALQLMNVKLTQVVSDITGVTGMSIIRAIVAGERRPGELARLRNPKCAKSEAEIAKALQGNYKPEHLFVLKQSLDQYDFYHQQIQACDAEMEAMYTALPPSEADDQACPPPKPRRGKPRKSQAHFDLTTSLYQMVGVDLTAIDGLDALTVQAIITEIGVDVSPWPTVKHFTSWLCLAPYNDISGGKVLRRRSKKTQNRATTAFRLAAQSVSRSQSALGGFYRRMRAKHGPAKANKATAHKLARIVYHMLKNRTAYVDPGQTYYEEQYRERTLRNLKRKAANLGMDLVPKAAQTLVVS

SEQ ID NO: 457282 - protein, 457 aa, unidentified
MARNRRKQSKIGFHEGLEQIREDAAGIDVGSEELWVDVGRKKDSEPVRRFETFTADLNAMADWLVAKGIKTVAMESTGVYWIPACQILEGRGIEVFLVNAAHAKNVSGRKTDMVDCQWLRTLHSYGLLPASFRPAAEIGVLRAYLRHRQMLIEYAAGHIQHMQKALAQMNLQLAHVVSDITGVTALRIIRAILNGERDREKLAELRDPRTQASPETIAKSLEGNYRVEHLFALRQSVGLLDYYQTQIQDCDREISAQLKTMESRVDPVEHPIKKARSRKKKTRNQPAYDCREQAYRISGVDLTQIDGISESAALTLIAEIGVDMSRWETEKHFASWLTLCPNNKVSGGKILQRSTRKSESRAKDTLRLCGQSLLGSSSALGAYCRRMCGRLGQPKGITAAAHKLALLVYRLLKFGRAYVDIGQEQYEQKFKDRALKQLARRAKGFGFQLVPSPQEVP

SEQ ID NO: 457283 - protein, 310 aa, unidentified
MIIHPDVIGIDVSKHHLDIFDAGLERSERTANTAQAVQSLAASWAGQGRFVVFEATGHYDAILRAGLEAAKVAYARVNPAQARDFARAAGFLAKTDALDARMLASLGAALRPRPSTPLDPARERLARLHKRRDQLVAMRQQERTRRAEIQDPDLIEDLDAHLAWLDQAVADFDRRLAELIAAEPDLRQTKALVQSVPGIGPVTAATLIALVPELGQRSPKTIAALAGLAPLNHDSGKSRGQRAIRGGRKRVRDALYMAAVAASRSNSRFKADYQRLRAAGKPSKLAFVAIARKLLVTANAIMRQQQPFNA

SEQ ID NO: 457284 - protein, 403 aa, unidentified
MNAVGIDVSKGKSMVTILRPFGEIVSSPFEIKHTSSDIHSLIKLIHSIEGESRVVMEHTGRYYEALAHQLSAADLFVSAVNPKLVKDFNNDSLRKIKSDKADSVKIARYALDKWQSLEPYSITDELRAQLKVMNRQFHFYVKQKTAMKNNLIGLIDQTYPNANTYFNSPTRSDGSQKWVDFVSTYWHVDCIRKMSLNAFVEHYQNWCKRKKYAFNKSKAEEIYTKTKELVPVFPKNEITKHIIRQAIDQLNSTSVTVETIRTLMNETASKLPEYSIVMQFKGIGPSLGPQLMAEIGDVTRFTHKGALTAFAGVDPGGNESGSYAQKSVPTSKRGSSNLRKTLFQVMDVLIKTMPQDDPVYQFMDRKRTQGKPYYVYMTAGANKFLRIYYGRVKEYLSVLPDPS

SEQ ID NO: 457285 - protein, 324 aa, unidentified
MDAHVKNCVLAIKDGNQLVERLKIESCAEELLEIHKRYPGAVWIVEASLVHEWIYDTLTEAGANVFPAHPVNILRAGDKKNDEFDAAFLVDAYLLGRLRPAYVPPKPIRALRQLGRDRAALVQDRTRLKNRVRSRLHRLGHKPPREETGSAWSKKHHAYLRRLNDETITRLVKLILILDEEIGLLDEQVKTSVDNDEQMKRLYTVPGIGYTTSLVLYSEIGDITRFDSPQKLNSYFGLVPHVEQSGETTKRGHLTRKGSGLTRWVLTEAAWQHARRAPRSSLARKFKKLEKRIGKKRAIISLARNLTSVCYHILKEKRDFTMNG

SEQ ID NO: 457286 - protein, 370 aa, unidentified
MTHPNILFVGMDVHKESIEIALAEGANQEVRRYGKIGGTRDAMRKTLAKLASLGKTLHFCYEAGPCGYELYRYLVSEGHDCWVVAPSLIPKKPGDKVKTDKRDARQLARLFRAGELTPVYVPDREDEAIRDLSRAREDAMLVQKAARQRLKSFLLRHDIRYQGKTAWTEAHLRWLADDVHCPSPAQQIVFQEYVNTVTEGQQRLIRLNEQIEVFVKQWRLYPVVEALMSLRGVRMVVAVTVVSELGDLSRFDNPKQLMSFLGLTPSEYSSGSRQRRGRITKTGNGHVRRILIEAAWCYRYPAKVSPQIQKRQQDLPLAIRDIAWRAQLRLSQRYLHMQRKGKPHNVTVVALARELSGFMWAIANEVKCPR

SEQ ID NO: 457287 - protein, 341 aa, unidentified
MGQVSTIGLDLAKSIFQVHGADASGAVVFRKRLRRNQVLAFFAAQPPCTIAMEACSSSHHWAREIGTLGHAVRLIPPAYVKPFVKRHKNDAADAEAICEAAQRPTMRFVAPKSAQAQAAALVFRARDLLVRQRTQVINALRGHLAEFGLIVAQGPAHVPQLVQAVENPDEPLPEIARPVLQILIDTLHRLDEQIALLDREVIQRVQADETAHRLMTIPGIGPVTAVALTALAPPAQTFTRGRDFAAWVGLTPLQHSTGGKQKLGATSKMGERTLRRLLIIGASTVLRWAARHGAPAGSWMARMLACKPPILVRVALANKMARIVWALMAKGGTYQAPAASA

SEQ ID NO: 457288 - protein, 487 aa, unidentified
MRPRATNKSTQTFDVCGFSFESAGALAFVDEYSGFAVQPAHYIAFAERELARPGSPIYHYRRCRVKPLSDRPFTAHVGIDWADAKHDVCLQAADREQREFARFAHQVGSIDQWAKSLHQRFGGPIAVALELAKGPIVYALQKYDFFVLFPINPATLAKYREAFKPSGAKDDPTDAELALDLLLRHPERFAPLKPQSVAMRTLLSLIEQRRELVDDKTRVTNRLGNALKQYYPQALDWFEQRDTILFCDFLSRWPTLSAVKRARKAGLKAFFYAHNGRRPKLIDDRIDSIRAATPLTDDMGVIAPYRLQVLVLVEQLRVTLQAIDRFDRQIAAVATTLPDYALFSPLPGAGPHLAPRLLAAFGEQRERFMSADELQKYSGIAPVTERSGKKRWVHWRWQCPTFVRQTFVEWAGQTINKSFWAGVYYRQQRDKGSSHQAAVRALAFKWIRILYRCWQAGTPYDESTYLNALRQRGSPLLKQLHPTAQNT

SEQ ID NO: 457289 - protein, 400 aa, unidentified
MPIVVGIDVAKEVHWTAIKIRETGKVLASHKVDNTPTDLAELIDEIRAVEIEHGPAVVGIDILGGIAALLEAMLLDAQLAVVHVPGLAVNRARRGTTGGEHKSDPKDASVIADQVRMRDDLRPVTTQRELDVELRLFVGRRSDVVADQTRRAARIRDLLVSIHPGLERVVDVTTKTGLHLLTRYATPHQIRAAGRRRLLTHMRKVSHVKESSIEKLVDAALTAAQAQHVAVPGEAVTAEIIHALAHEALTGRDQLKTIDTRIQEILDRHPDAALIRSLPGMGATLTAEFLAITGGLDRYPTGDHLAAAAGVAPVLKQSGKVRYLQRPTAGDKALKRVFYQSAFIATSCDPTSKTYYQRKRSEGKAHHQAVLALARRRVNVLHAILRTRQPYEPRHSTNAA

SEQ ID NO: 457290 - protein, 421 aa, unidentified
MQVLYERCAAVDVGKDVIAVAVRLPGDGPDGRATVKRTFKTFYGVLGAAARWLTGQGVTHVAMEATGIYSMPVYHALIEHGDFERVLVCNAGHVKNVPGRKTDLSDAEWLVRLLECGLLRGSFIPPADVKAARDVIRYRTKLTESRTSELQRLGNVLQDAGIKIDSVASKLATQSARAMVEALIDGERRPAVLADLAKGRMRAKIPDLARALEGRFGDHHALMCRLHLEHLDHLQDMIAELDAQVEEMMAPFRPQRDLLISIPGIGPRASAAIVSEIGADPGSWFPTPEQLASWTGLCPGNHESAGKRHHGKRRKGNQHLQPWLVECAWAAVRTDGYLRSFYRRQVRKFGGFGSPLAKKKAIIAVAHKLITIVWHVLTTGRPYQDLGADYFTSRLDPEIETRRLVAKLQAQGYTVTLEPAA

SEQ ID NO: 457291 - protein, 342 aa, unidentified
MEHTTIAVDLAKSVFQIAVSHSVGQVTSEHRLRRSQMMPFFAQQPAATVLLEACGSAHYWARELQRLGHRPRLLPAHDVHRYVRRNKTDRADAKALLEADRNDDIHPVPIKSIDQQAIVALHVCRATWQSTRTARLNALRGVCREFGISIPVGATRVIPMVRAQLTSDGPLPIIVHPALEMLCAEIVSLETKIVAIERQLAVLAEQMPDVIRLQTIPGIGLLTASALIARIGNAARFPDGRHFASALGLTAKETSSGLQRRLGGISKRGDVYLRQLLINGARAVLCHAKRHPADPLRVWALRTQERRGHNVAAVALANKLARIVWAVWTRRCDYAGARPRAM

SEQ ID NO: 457292 - protein, 341 aa, unidentified
MSIVGAFDVHRRQLTFDYLDTVTGEVKRGRVAPADREHLRAWLARFTDQDEVQFAVEGCTGWRYVVEELTAAGIEPHLAEPADTAALRGKKRHAKTDKADARHLRVHLMAGDLPESWIPPGHVLETRAVVRLYKDLLDERGGWQQRIAATLFHQGAPLSASVAVAEGRAPAGQAGLSAAGRQAVETGLRQVERLSGELDPLRRQLGMISRRQPGCRALAATHYGIGPVTAVVVWAELGDARRFSSSDDVIRHTGLDITVYSSDAKRSAGHLSRQGPGLLRWALYESAKCAARPASPDYDYYTAFRARRGAGLATLSVARKLARRCYHTLRELGEEALAPAA

SEQ ID NO: 457293 - protein, 431 aa, unidentified
MSSSDDELEVIIERCAGLDVHKDLVVACVRVPRADGGVAKAFAEFGTFTEDLLGLRDWLVAYGVTRVGMEATGVYWKPIFYALEDSLDPWLLNARHMHNVPGRKTDMADADWICRLVRFGLVRASFVPPKPIRELRNLTRYRRTRIEERTRETQRLDKVLQDAGIKLSSVASDILGKSGRDMLDALVAGSHDPEVLAELARGRLRSKIGLLQSALAGRFGPNHALVVGEILAHLDYIDESLGRIQAGIDELIAPFADARDRLMTAPGIDKITAEAVIAEVGVDMSVFPTAGHLASWAGICPGQHESAGKSKHGTARHGNTWLQRSLTVAAMAAARSKGTYLAAQYARLAGRRGTRRARKAVAHSILIGVWHILADSDTTWNELGADYFERRKDPQRIVRRKIAELESLGFTATQSTNGTITLAPPPPAVAA

SEQ ID NO: 457294 - protein, 358 aa, unidentified
MEATKTRVVGIDLAKRSYVAHAIDPAKDRAVIWEGRTDEKGIDGLCAKLRPSDRVAIECCSYAFYLVKVLTAKVGCRVLVLNAGDLAVIFKSVKKTDLEDAGKLAWLLSKASDDELPVVTPPSEKEEHRRALVSELSSKKKARTALINRLHSLFVRQGIVTVGKEDLRTADHREAQLASLGGYTGSEAKRVQQELILLESHIDEIEAEIKLELRGEPKVSHLMSIPGVGPTTAIAFLAYVGVGNRFSSARQVSHYVGITPRVDSSGDTTRIGGITKRGCTAIRALIVQSAWAAVHTSKDHSLKRKYQELATRRGKGRAIVAVARRLLELMWVLLRTETFYWETTNEELKLKMARAKVA

SEQ ID NO: 457295 - protein, 352 aa, unidentified
MPKPTRVVIGGVDTHGRTHYATVIDQQGRLLADREFAADSRGYQQLHSWLRRHGRLDLVGVEGSGSYGAGLTRYLLDHGVKVVEVDRPDRRLRRQRGKSDPIDAEAAARAVLAGTATAPAKARHGIVETIRALRAARSGAIKARTAAVNQLKGLLVTAPPRLREALDGQATAGLVAACARLRPDETALADPVHGLRAALRAVAQRIQQLDQEISLADHRLATLVGRAAPRLLKLHAIGVDHAGQLLTTAGDNPERLRGEAAFAHLCGTAPIPASSGTTHRHRLHRGGDRAANRALHLAVVVRMRWCPRTRAYAKRRTTEGLSKPEILRCIKRYLAREVYHALVADFEALHAT

SEQ ID NO: 457296 - protein, 344 aa, unidentified
MVALTQTTELVVGVDPHKHTHTAAIIVASTGGLLTDLTVSADPDGFESLMTTVQRYSGTRCWVIEGCGQWGRGLAAWLMARDETVREIDSPRRAARRMGKKDDTIDALRAAREAIGRNNLAEPRGLGDRQALAMLMSARRSAVQMTGDTERQLHAAAATCPEPLARRLRGLKTHRLVTLCAQWRPTGDNVTQSIAQTMRRMARRILELRAEAFAYKQRIEAWVRVCRPDLLDLVGVGPITAAQLLMTWSHRGRFRNEAAFAMLAGVAPLPASSGLITRHRLNRRGDRQLNAALHVVAIQRQRHDARTQAYFEKRRAEGKSDREIRRCLKRYIARDLFRVLEKTA

SEQ ID NO: 457297 - protein, 317 aa, unidentified
MQSFLNIGVDVAKESVVVACAEQSFPVHSIANQRAALLTWLKSLPGGSRIGLESTGGYHELLADLAHVQGHTVFLLNPLDTRHYAKAMGNRAKTDRVDAELIARLIAQEHARLRPYTPPTADQRRLDRLLKRRAKLTSIKGALKLTMRNLDGFAAELGAVICKLEALIAKIDDAVSAISARSPQYTETQQRLQTIVGVGPLVGTALTNTLERISFRNADALVAFIGYDPRANDSGRKAGRRRLSKRGPGELRRLLFNAAMSAAKTKTWQPIYEHYRALGWSTTASLVIIARKIARAAWSIHHYRTTFSPERITKCLT

SEQ ID NO: 457298 - protein, 387 aa, unidentified
MEIQFASHNPATAFDHDSTLVVALELSGKSWEVGAVVPGLARRPRRRLDPRDMAGLQRVLARWQSEAGAAGRTIERVVLTYEAGRDGFWIARYLQARGIEVHVMHPASIPVPRRRRRAKTDRIDLDMLLRTLLAWLRGEPRVCSMVRIPSEAEEEMRRPGRERERLVTERLELENRIDSLLCLHGIAGFKPRLKKAMEHLEALRDFAGAPLPAKTMAELKRLMARHRLASAQLREIEAERDRVLTVARPDREERMIQLLTQIVGLGTETATLLVREMFCRPFRDRRAIAGYAGLTGTPFRSGGMEREQGLDRSGNARVRRILVQLAWRWLRFQPASALSRWFAERTGGAKGRIRKIMIVALARKLLVILWRYVETGQMPDGVRFAAS

SEQ ID NO: 457299 - protein, 313 aa, unidentified
MQQPKYVGIDVSKHHLDVAFPGVAKVWRTPNDASGIAALVRRVRRLGSPHVVCEATGGYTRLLTCDLATETVPLSRVNPRQVRDFARATGRLAKTDEIDAAAILRFADAMQPLASPAPSPEQVRLTDLVRRRRQLVDAAAQEKQREPIPGQPLVTGSVERHLAFLAKEIAAIDEAIADAIEADATLARRAALLRTIPGVGAVTAATLVAELPELGLTGNKQIAALTGVAPMNRDSGMSRGQAHIAGGRMSARCCLYMATIVAIRCNSAIRPFYKRLREQGKPPKVAIVAAMRKLITVANSMLTYDRPWHADPA

SEQ ID NO: 457300 - protein, 342 aa, unidentified
MKQYVGLDVSQRETAVCVVSETGQLIFEGKAKSDPGALTNLLRKHAPLAERIGFETGAMASWLWHELRRVGLPVVCIDARHAHAALSVRMNKSDQNDARGLAELVRVGWYREVKVKSEESQNIRAILVARSRLVSMRRDIENQVRSLIKECGLLFPRAIGQQFRKKVSELLGQDHQLLGVIAPLLSIHEHICQQQSKFDDEVRRLAKSDETTRRLMTVPGVGVVTALTFRHTIDDPSRFRSASTVGAYLGLTPRRNQSGETDTNGKISRWGDRLLRTYLFEAATVLLYRTKKWCSLKAWGMKLAKRIGMKKAKVAIARKIAVILHCIWVDGTSFDWSQAKPT

SEQ ID NO: 457301 - protein, 316 aa, unidentified
MDIASRSLEARVGQQGATGSFANSPEGIAALGAFCHEHPVELVAMEATGGYEQQAFAQLSEQGLPVAILNPRAVRQFAQSMGSLEKTDLIDAGMIAWYAEVKKSRPVCVAPESQQHLRALVTRLRQLTEMRTAQLNQQRLVTDRAVQAWFKKLLAVLGRQIRDLEKRIAALLDQDPLWRELDQAFRTIKGVADRTVARLMAEMPEIGTLSNKTISKLAGVAPLANDSGQHQGKRVVRGGRATVREILFIVASVVGRYEPDFIDFQRRLRAAGKPPRVVRIALAHKLLVRLNAKARETRLRMAAVQPDRMTLGVATV

SEQ ID NO: 457302 - protein, 345 aa, unidentified
MMVTLGTDAHKRSHTIVAVDTAGAEIGSVTVAATQEGHLRAVQWAAQFAHRQWAIEDCRALSRRLEGDLLGVGERVVRVPPKMMARDRATARQSGKSDPIDAAAVGRAALREPDLPVAQLDGPSREVRLLVDYRETLVHQRTRLQNQLRWRLHELEPGYDPPPGSLNRYCTLDAIDELVTTHESMVADLARRETARIRELTREINQLERDITRRVTDLAPSLIAMPGCGALTAGKLVGEAADITRFKTRDTYAMWAGVAPIPVWSANNTRYRLNRGGNRQTNAALHRIAITQARIHPDAQAFLKRRIETGSTKREALRLLKRKLANVVYRNLLADTQTTPLAQAA

SEQ ID NO: 457303 - protein, 410 aa, unidentified
MKQIRDRVAGLDVHRDTVVACVRYPANGQIVTEKATFGTTGTQVRVLAGWLADLGVTTVAMEATGVYWKPVFYPLEGLFKELWVVNAQHVKNVPGRKTDMADAEWLADVVAHGMVRPSLIPSPQARELRELTRYRKTQIDMRGGEIQRLEKVLQDAGIKLSSVASKVLGVSTRRMIEALIAGERDPEVLADMAMTRMRAKTDQLREVLPGWFGAHHAVLARRILDHIDFLDATIAALDQEVLERLGPFADAVELLKTIPGIDQRVAEVFMAETGGDMTKFATANQLAAWAGVAPASHESAGKRRHGGTRHGGRWLRRTLIEAARAAARSKGTYLSAQYARIARRRGPNKAAVAVAHSMIVSAFHMLSTGQPYRELGGDYFNQRRDPDTETKRLIARLKDLGVNVTIDQAA

SEQ ID NO: 457304 - protein, 343 aa, unidentified
MEHSAGLDVSVKETNVCIVDDAGKIVREVKVASEPEALLAVLTNPAYRFKRIGLEAGPLSQWLFSALAEAGLPAICVETRHMRAALKAQINKTDRNDARGIAQMMRAGLYRPVHVKTLRSQKLRMLLTHRKLLQSKAIAIENDLRATLRNFGLKVGVVGTIKFEARIKELVEGLPDLIVLVEPMLVVRRTLREQIGVLHRRLLTVVRDDEVCRRLMTVPGVGPVVALTYRATVDVPARFRNSKAVGAVFGLTPSKHQSGEVEHSGAISRCGDDMMRTMLYEAAHIMLVRSTKWSWLKAWAMQIARRRGLKKAVVALARRLAVIMHRIWVDGTEFQWTRKAAAA

SEQ ID NO: 457305 - protein, 427 aa, unidentified
MDYTQNAKISQVSEQTLILGVDVGSEVHFTRAFNWRGIELSKKPLHFTNDAVGFQGFFRWADAYAKTIKAEKILVGCEPTGHYWFNLAKYVTEQGMTLVLVNPYHVKQTKELDDNSPSKNDRKDPKTIAQLVKDGRYVIPYLPDGVYAELRSAVATRDRIIKELNALTNRIKRMLKMYFPEYLKVYKKFSAESGMLLLEAAPFPADILRLGAEGINQIWRAHKLRAVGMKRATTLVKAAQSSVGLDAGPCVRLELQLLLEDFRTKQAQLEAITTVLEAETLKVPHVEKLLAIKGVGLITVAGFLAEVGEIGRFDSPKQIQKLAGLELKENSSGKHKGRTSISKRGRKRLRKVLFQAVLPLIRSNAEFSEVYHYYTTRQSNPLKGKQAVVAIGCKLIRVFFAILTKGIDYDANRLRSDILRPGQRRAA

SEQ ID NO: 457306 - protein, 282 aa, unidentified
MEQVITIGLDLAKNVFQVHGIDAAGKVLVRRQLRRGDVLRFFGGLPRCLVGMEACATAHYWARELTKLGHTVRLMPPAYVKPYVKRGKTDVADAEAIAEAVTRPTMRFVAVKTADQQAALMLHKVRDLLVRQRTMLINALRGHLAEFGIIAARGPGGVTAAIISLHEAQDSLPELARVALRGLIDQLRIVRDEIARVEKRIVAWHRASNASRRLATIPGIGPITASAIAAAVPDATLFQSGRQFAAWLGLTPRLVTVALANKTARIAWAVLARNQSYVAPAM

SEQ ID NO: 457307 - protein, 408 aa, unidentified
MNPLYVGIDVSSKSNVVYFMLPDGSKHCNFSVANSHTGSSQLVKRILSAMTSCSLDTVLIGLEATSVYGDNLVYFLREDAALARFNSKIHVLNPKQVSKFKEAYNDLPKNDLIDSFVIADCLRFGRINKEVYIGDYRYKALQNLTRARYFAVSNLIKEKQRFMNILFKKYSTMTQEKVFSDTFSTTALAVYDEFESAEALADMDLHELTAFIMEKGKNRFPNPNAVAKAIQKAARSSYRLPKTVNDSVNQVLSISITSIKALEAQIKEFDKAIAAQMELLPNVLISIPGIGPVFSAGIMAEIGDINRFHNQAQLAKYAGLAWKQHQSGDFEAQTTRLINSGNRFLKYYLCEAAFSLVRCDKEYSDFYHLKYKEVNRYQHKRALALTARKFVRLVFRLLKDNRLYTSAE

SEQ ID NO: 457308 - protein, 368 aa, unidentified
MSEIIRIGMDTSKSVFQLHGVDAAEQPVLRKKLRRRDLLVFFERLPATKVGMEACGGTHYWARELTALGHEVKLLPPQHVKPYVRRGKNDRNDADAICEAMSRPRMSFVAIKTADQQAAQMLMTTRERLVAYRTQLINTIRGHAAEFGLTAAKGPAHVEPLLARVAEDARVPEFAKELFAMHGQELNQLKIELRQIEAKLKAWHRQNEMSRRLAEVDAIGPIGGCLLAIKAPDPKAFRCGRDFAAWMGVTPKDHSTAGKMRLGVITRAGDEALRRTLVVGATSVIKQVRNGKGNASPWLRDLVARKPPKLAAVALANKVARIAWKLMVSGERYDAARAGIVSPIARIAPCSRRQGRCAPPAAVASGQP

SEQ ID NO: 457309 - protein, 470 aa, unidentified
MTPRKDNFPHPDPPVRSTSFQVVNPHAAAVDIGAAEHWVAVPPDRDTQPVRRFGTCTIDLEAIADWLLACDITTVAMESTGVYWIPLFEVLEARGFQAILIDPRQAQRAPGRPKSDPRDCQWLQRLHTYGLLAGAFRPADQVCVLRAYLRQRRMLITYASQHIQHMQKALEQMNLKLPEVVSDITGVTGMAIIQAILTGERDPVRLARLRDRRCHHSEEQIAKALQGTWRAEHLFALGQAVELYDFYHRQLVACDAQIAAQLAMFPDQSGGQPLPPKPRKSKRKANAPRFEVRTPLYRMAGVDLTALEGIEEESALVILSEIGTDMSRWPSVKHFCSWLGLAPCHKVSGGKVLSRRVRPGAHRVAVALRLAAGSLHHSQSALGAFFRRLRARLGAPKAITATAHKLARLVYSLLKHGTAYVQQGMEEYEAQYRDRKVKGMARQAKALGYTLVPLAMSDGQVIPAVAGSPS

SEQ ID NO: 457310 - protein, 357 aa, unidentified
MGKSIQKLSSVTRVGLDLAKRVFQVHAVDANGEIVVARKLDRGRLVSFFSELPRCVVAMEACPSAHHWGRQLLALGFEVRLIPPAHVKPYVRRNKNDAVDAAAICEAAGRPGQRFVPVRSVENQAELMRHRVRELLAGQRTAALNALRGHLTEIGVVAPQGARHAYDLKRLAVDGFDEYGEVVVPDCVRVALRPLVSQIDALDEAIGAIDKEIAMAVKADETAKRLMTIPGVGPVTASAIIATIQDMGDFASGREFAAFLGLTPRQSSTGGKARLGRITKMGDRCLRKLLVVGACATLRHRQGHNDALRLWASGMLERKTVKYKFKLTAVALANKVARIVFVLMTRGGQYDDRPVAA

SEQ ID NO: 457311 - protein, 363 aa, unidentified
MFTERTSIGLDVHARSVAAAAIDGVTGELFQHKLTPDPEDIQSWIDHLPGPVAVAYEAGPTGFGLYRHLTNVGIRCEVAAPSKLQKPPGERVKTDAKDALHLAKLVRLGEITPVVVPTEDQEAARDLVRAREACRGDLMRVRHRLSKLLLRHGIIYSGGGAWTGKHDLWLRREALPQLTTTPTRLAFDACYEAVAMVTARRDRLDTAIEAMATDSEYTPVVRRLGCLRGISTLTGLALAVEVGDWHRLTGASIGSYLGLVPCEHSSGTSRSQGPITKTGNTHARRLLVEAAWHHRPAYRVGARMRARWDLAPAAARARGDQGNRRLHHRWVRYLERGKRATIADVAIARELAGWCWSLAIMED

SEQ ID NO: 457312 - protein, 339 aa, unidentified
MKLYSGIDLHSTNSYLAIIDETGKRIFKEKLPNAIETITERLSLYSGTLEGVVVESTYNWYWLVDGLMAEGFTVHLANPAAIQKYSGLKHADDKHDAFWLAEMLRLNILPEGYIYPKEERPIRDLLRKRSHLVRLRSSLLISLQNIITRNCGAKMKTNDIRLLRENRVQPLLAYNEDLALAGQISKDSIDFLTRQIRAIEAFIGKKLELRGAYKNLVTIPGVGKILGLTIMLETGPVQRFEKVGNYASYCRAVSSQWTSNGKAKGKGNKKNGNKYLCWAFSEAAEFARRYDDKARAFYNRKLRKSNFMVAHSALAHKLARAAYHVMKDQVPFMPERAFT

SEQ ID NO: 457313 - protein, 321 aa, unidentified
MYKYTEIYGIDISKVVFDVYGSETGHVVFKNTEKGFVSFFKSLPKGCLVVMEATGYYHYRLAQFLYKKGISVSVVNPLSVKRFIQMKLAKVKTDKSDAKAICDYGTTQEVPLYTALTETQSECLQLFSLLDAYLKKQTATKNKKHGEEVLGIPSKFVYKSLNRDLKHLEKEIKGIELRLLEFVKQDQQEQLTLLKSIPGIGIKTALFLIVITDGFSKFENASQLCSYVGITPTIRVSGSSVRGRSRISKVGNRKLRNVLFLCAFSACKHNKACRELYERITSKGKSKKLALIAVSNKLLKQAFAIAKSGLPYDENFVSKLN

SEQ ID NO: 457314 - protein, 347 aa, unidentified
MNFYNNMHPYYCGIDLHARLLYVCIIDNTGLILVHKKIKDDPHALLNLIKPYIGDIVVGVECMHCWYWVADFCKQHAIDFILGHALYMKAIHGGKAKNDKIDSYKIAKLIRGGNFPLAYVYDKEMRATRDLLRRRTKIVRHGADLKAHVANTASQYNLPAHNVNLKNVCDREKMRYYFPDPVVQRSINLDMAILDCYQKELKPLEHYIEQMAKQHNPVHLNILQTINGIGRILALTIIYEIGDINRFSSVQKFASYSRLVKCKAESAGKVYGSQGNKIGNAHLKWAFSEAAVLLLRHSDNANKYIEKLQKRMSKAKALSALAHKLGRCVYYMLKKETVFDEVRFLKS

SEQ ID NO: 457315 - protein, 343 aa, unidentified
MKRVYYIGLDIHKRIIFYCIKTNTGRIYSQGKIEASRPSLLEWVKGLPGPWIGAMEATIFTGWVYDFLKPYAVDLKVAHPEMLKAITAAKKKNDRADAERIVDLLRVDLLPECYMLPEAIRELRQILRYRNHIVRTAVKMQNKMTGLLMEVGVTYSKKRIHGKKYFREFLERVEEIPPSVKELLKLSRSSYEIFSSCQKRLVEGLRTNDLIRDRVQGLMAIPGVGELTALTWVLEIGDPGRFGSIRQAVSYCGLCSAQRESAGKEQRGPISKKRNKHLQTVLIEAAKLAPRWNRPLAVLHERELQKGNRNRATLAVSRKLVAYMLAVDKQQTSIKLLGENQAA

SEQ ID NO: 457316 - protein, 392 aa, unidentified
MLFGSPNQSDGAAAMQPNDINSPTILLAIELSASTWLVAARVPGSEKPRLHRIDGGDTVALLTLISSLQARVARRPGATINVVCCFEAGRDGFWLQRFLTAQGVDTHVLEPTSILINRRARRAKTDRLDAVGMLRVLAAFLRGDRQSCSMVRVPTPDEEDAKRTHRERESLVQERVRIENRIEALLFTQGIRKRPSLRSWDRDLAVLRTGDGRRLPIHLRSELDRLRRRLVMTLELIGEVESERDEAAEATPQDQTCLKIAALGRIRGVGDNFAAVLTREVFYRSFDNRRQIASYVGITPMPYQSGSMDRDRRISRAGNPRARTTMIQLAWLWLRYQPGSELAKWFRNRVGTLAGRTRRIAIVAMARKLLIALWRYVETGVVPAGAEIRAEA

SEQ ID NO: 457317 - protein, 408 aa, unidentified
MNTGKDIVLVVDYHAENIEYRWFNEATGEERTGGYATGRAGILRQVQQAAGELEPGGRVVWVMESTTGWARVKDLVGDRVRFVLANVLQMPLPPKARRRKTDKIDTARLLREYLNGHLPQSFQPSAWWRQVRRVVDHRQDLVERQTAIKNWIGSLLHHETWEERANLWSGSGRSRLDAMKLADSDRRMLELKLAQLDQLGEQIRQVEGVMKGIYDRWPEAQWVDAIRGIGMVTGVSVLAHIGPMERFRTAEQLISYAGLAPGVQESDSTCRHGKIGGGGTDSHLRYLLIEASTWLSQIPRYRPTYERVVKKRGMKIARIVVARLVLRSIHKMLTQRVRFNPVRGRASADDAFIASGLPAERSDRNHRRRAGSKEKARRSRRALSAVQPPPGARVARQRCPILPAAIEW

SEQ ID NO: 457318 - protein, 385 aa, unidentified
MANQNDLSRSVVAFEQHNTIIAVIEMSLNSWLVAGIVPGIERHPLKKLTINEEVLLKLLHRWRDEAVKAGHTISRIVVAFEAGRDGFWLARWLRARGIEAYVIHPTSVAVSREHRRAKTDRLDTELLKRAFLGWLRGEPDHCSMVAIPSLQEEDAKRPTRERENLVGERTRIINRMKACLVRFGIRNFNPTLRTAPERLNALCTPEGVSLPPNTLAELRRDLARLRFVMDQINEIEVARLQRLERAPTAEPHAMVRLLARVIGVGIETADMLVHEILSRKLRDRRAVARYAGLTGAPDESGSKRREKGLAKAGNARVRRGMIQLAWRFLLFQKDSALSQWYRTRTESAGKKRKTMIVALARKLLIALWRLVTTGEVPAGVVLRAA

SEQ ID NO: 457319 - protein, 328 aa, unidentified
MFFIGIDVSKAKLDCCLLLDVASNKRRAKVVANSKTGIADLLAWCIKQQAPVHELHAIMEGTGVYHEQAALALSDAGAAVSIVNPAQVKDFGRSLGVRTKTDGVDSFVLARYGALLKPKPWTPPAQEARTLQALLSRREAIAQDLQRERNRLEKADATDTPLLIRQSIEDSIDFLEKQLAKLQQDIDDHINKHPNLKDDRDLLISIPAVGPQVGNHLLSAMHNHEFQSAEQLAAYLGLVPVERQSGTSLLGRPRLSKAGPARIRAVLYMAAIVATQHNPHLKALYHSLQERGKTKMSALGAVMRKLVHLCFGVLKTRQPYQPDYGSPA

SEQ ID NO: 457320 - protein, 436 aa, unidentified
MKNPLHLPIINPHAAGIDVGSEKFFVSVGGKEPKVFLTVTGQMKELCEYLKAEGVRTVAMEATGVYWINLYGALEEAGFEVVVVNGAHCRNFPGRKTDMKDCQWLAVLHAHGLLTSGFVPPADIRRLRDYLRLRADLVSMAAQHVQHMQKAMDRLNVKIHVVISDITGWSGLRIIKAILAGERDAEKLVELCDKQILKTKRTPMLEALRGLWRKEHLFALELAVDSYESYQKQIARCDGLIAEVVKEISAGKPTPDLGKPKELRHNAIILTDLQKQMAQIFGKDLTKLPCLNESTAALLLAEIGQDMSRWKDWRHFGSWMALAPSYAQSGRRRRREKRYLTRAGQILCRAVQCMAVGKHTWLASFYRRIRAKRGAKVAIKATAYKVAKLIYLVLTRGWEYVEEGIAKYEQRVRQMQLSVLKKLARTLKYDLIPKAA

SEQ ID NO: 457321 - protein, 360 aa, unidentified
MRYCTSIGIDTHAKKNQVFALVRETGEIASAKLSDDPKELVSWIRKQNFPQPIRCCYESGPTGFILARALNEAGIYCIVAATSKLPYRTDRQKNDKIDAEWLCRMLDSGAVRAAMIPSVEEESLRHLSRLRGEVALDLRKAKQRVSSFLLLTKTSYTLTKKRWTKTFNKWAAGYEFECIADTFVFRMKISAVLRLEERLEEIEAEIMRTIALYPELQKKMKRFTALYGVGKVTAFSLVCEVYDFDRFKNGAAFASFIGLVPSENSTGDKTAMGKIAKQGNSHLRRIIIEAASCYSRPIGYVRPEDITIPEAVRAKAEKCKHRLRNRNLALRKRGVMANKAKVAVARELSEWIYHIAVMPA

SEQ ID NO: 457322 - protein, 447 aa, unidentified
MRFIGLDVHRDFCEVAICEEGRVRSGPRIPTSPETLARFAQTLGPGDEVALECTGNALAIARMLEPHVARVVIAHAKAVRAISWAKVKNDRIDARTLATLLATGFLPGVWTPDERTRLLRRLVGRRAQLLKHRTSAKNAILATLQRNLVGRAPATDVFGRRGRTWLSSVELPRDEQDTVEACLRQIDFLDAEISRLDQALASEVVDSPEERRLMTIPGVNVTTAATFLSAIGDIDRFPTPRHLASYLGLTPRVRQSGIAEPRLGHISKEGSARARHVLVEAAWAALKTPGPMRAFGERVAARRGRNVAAVAVARKLAVLCWHLLSTENDYAFARPSLTAAKLRRMELVAGAESRRGRRGPGATFASKDQHARERAIVIQAETAYRRLVADRTGRRRGAGAITGARISSALQGQAARQDQAPGPALQLEAARTLFHPAKEVAAGPDNT

SEQ ID NO: 457323 - protein, 343 aa, unidentified
MGEVSTIGLDIAKSVFQIHGVDVDGAVVIRRRVSRAKVSEFFAALPPCLIGIEACPTAHHWSRKLQALGHTVRLMPPNYVKAYLKRSKNDANDAAAICEAVTRPSMRFVPTKSEQQQSGLMLHRGRQLLVRQRTMLSNAIRGHLAELGIISAKGRNGTVELLEVIANQEDDRIPAVARFSLEVLARQYAAIAAEIGVIEKRIHAWHRSCEESRRLEEIPGVGPIVATALVAEVGDWRAFASGRSLAAWIGLVPRQHSTGGKERLGGISKQGNRHLRWLLVAGAMAVIRYARQHGTKRPWLARLMATRPIKVAAVALANKIARMAWAMMVRGERYKEPTLMIAT

SEQ ID NO: 457324 - protein, 345 aa, unidentified
MREASVSEISIIGLDIAKHVFQAHGADASGRAVLRKKISRAKLLPFFASQPRCRVVLEACGGAHHWARELARLGHDVQLIAPAYVRPFVKRQKNDAADAEAICEAAQRPSMRFVPIKSEAQQAAAMVFRGRDLLVRQRTQISNALRGHMAEYGWVAPKGLAHLDKLATLLADPTAVPEGVRSVCTALLENLALLDRQIAALDKEIVRRSREDEIARRLMTIPGIGPITATAITALAPPPGTFAKGRDFAAWVGLTPRQHSTGGKQKLGAISKMGERTLRRLLIIGSSAVVLQASRRGAPRGSWLEQMLARKPRMLVTVALANKTARIVWALLMKNEDYRAPVVAA

SEQ ID NO: 457325 - protein, 341 aa, unidentified
MTVIIGVDPHKATHTAVAIDSDERPLARLDVVAERSQTQRLLAWAAPLGKDRRWAVESADGLGKLLAQQLVAAGEDVVDVPPTLAARVRLLGSTKASKNDPNDALATAVAGLRHCGLRAVRVDDHSAVIRMLVDRYDDLTGLRTQAACRLHVALRELIAGGAPKRLSADRAARMLRSVRPVGVAEIERKRLASELLGDVRRLDREIVTARARVAHAVAKSATTLLELHGVGPIVAGFILGHVGDPRRFPSPERFASYNGTAPIEASSGPTKRHRLNPRGNRKLNHAIHMAAVTQVRHDTPGRAYYQRKLTEGKSKKEALRALKRRISDAVWRQLQVDLSRR

SEQ ID NO: 457326 - protein, 422 aa, unidentified
MEAFNVSDFAALIGIDWADRKHDICEINRDTNTQHLSVISSEPKSINAWALELKQRYNGRSVAVACELKKGPLIYALSKFKHIVLFVINPSSVAKYRAAFTHSGAKDDPTDAIIQVEILQLHMDKLTVIRPDSEDVRCLAQLVEYRRKLVQDRVDLTNKIATTLKNYYPHVIDWFKEKDTQIFCDFLLRWPSLARAKKARKQTLLDFFNQHNSRYPLVNEKRIKEIKDAEILTEDMAVITPNLLLIECLVPQLKQLMLAITRFDDEIKTFYKQHADRAIFDSLPGAGPQLAPRLLAAMGSNRDRYKCAADIQKYAGIAPVTERSDKKEWIHWRYSCTKFLRQTFVEWAGLSVRYSFWAKAYYRQQEGKGKPHNTIIRSLAFKWIRILFRCWKTHTPYDESTYLTALKSKGSPLLKFAVESEL

SEQ ID NO: 457327 - protein, 374 aa, unidentified
MGESTKDLSGLTIGLDLGDVDTHCCVLDENGSKIEESRVKTTQGALKNRFESMKPSRIALEAGTHSGWVSRLLKTFGHEVLVANPRKLRLIYENNQKNDAADAEYLARVGRMDPKLLAPIEHRDAKTQADLAVLRSRDELVQTRTKLINHVRGLVKAMGGRIPSMSSATFGSKAESSVPNELRAAVSPVIEVIRGLTQQIRRYDQWVKETAEQRYPETGWLNQVSGVGPLTSLAYILTLEKPERFSNSRKVGAFLGLRPKQAQSGNQDPQLRISKAGDGYLRRLLVGSAHYILGPFGSECDLRTWGQKLAARGGKTAKKRAVVAVARKLAVLLHRLWVSRAVYEPKRIKRPPSRAPSAAAGSRSSLEVTAAAGA

SEQ ID NO: 457328 - protein, 341 aa, unidentified
MDHYAGIDVSLEYSSICVVDANGKIIREGKVESAPAALISWFAGLGHGLARIGLEAGPLSQWLYAGMKEASLAVELLETRHVRDAFKAMPVKSDRNDARGIAQLMRLGWFRSVHCKSISAQETRAVLTARKLLQSKLGDVERSLRGILRGFGLKVGRTTERSFAARIRTLVAGQAELERIAAALLEAHAVLLREFQKLERRVIEIARLDVRARLLMSVPGVGPIIAVSFAAAIDDPARFKSSKNVGAHFGLTPKKYQSGEIDRDGRISKIGDKPVRTSLYQAAHVILTKPLKGCTQLKSWAMRIARRAGMNKAKVALARKLAVIMHRMLADGACFNAAAAA

SEQ ID NO: 457329 - protein, 408 aa, unidentified
MTVVGIDVSKGKSMVAAMKPGGELVAAPYEVRHSDIELSHLALDVLCMEPDTRFVMEATGRYHEPVAALLHSEGIFVSILNPLLIKQSGAGSLRKVKSDPKDALKIAKYGLDNWSTLREYTPMEAIRQQLKLCARQCDLYNKSIIMLTNNLISLSDKTFSGVNELFSSPEKADGHLKWVDFYRSFWHCDCINRMSPDAFEDRYKKWCKRKGYHFSADAADALYAASCGLYTTLPRDNNARLLVTVAADQLIALRENQSKLEAEMLNLCKQLPEYETVMAMYGVGKSTGPHLMAELGDVRRFLHRSSIVAFAGVDPGVVGSGKMQLSSVATSKRGSPQLRKVLFQVVSTYVKCKPENEAVYQFYAKKRDEGKPFFVCTTAAANKFLRIYYARVKECLNAAESATQVEEG

SEQ ID NO: 457330 - protein, 358 aa, unidentified
MEKDTTYVAMDDSKRKIVVGILRPTANEPELREIANDPRQIRRLFERLKSEGPLAACYEAGVSGYDLHRQITALGVPCSVIAPALTPRRPGQRIKTDRRDAAKLVRLFRAGELTAIHVLDEREEALRDLVRCRDDLRRDVLRWRHRVLKLLARHGRTYLAGRNWSRAHWRWIREQRFELPPLQRAFEATLFPLEQALARQAELDTELQIVATTAPYREPVATLRCFRGIDTLSAIILLAEIVDFQRFPRPRQLMAYLGLVPSEHSSGETQRRGALTKAGNSHARRVLVEAAWHYRHRPAIGPALATRSHGQPDEIIGHAWRAQQRLHRRYRHLVGRGSAPRWPWPRWPANSWALSGPQ

SEQ ID NO: 457331 - protein, 447 aa, unidentified
MTDERDGFPVLRRDVAGIDVGSEEHWVCAPSRTGDGRDVERFPATTPGLERLIAWLQDRRVRAVALESTGVYWIVPHEMLEQAEFEVRLVDTRELRRVPGRPKSDRRDCEWLQRLFSCGLLRGAFRPPETVCLLRTLVRDRATLIAERADWLRRMQKALDQMNVRVHRAVADLDGVTGMAIVRAIVGGERDPHRLAALRDYRCQKTEAAIAEQLTGHWRADHLFSLQQGLKMYDAITDRLADYEREILQQLAAMAQTDDTPPPPTNVNKARMIQKRGEEPLRQALYRISGVDLTTIDALGVETVNVILSEYGPDLSRFPTEKQFIAHLRLAPHQAISGGKPVRTPKKPQRRSARVTMALRMAATSLRRSRSALGAYYRRIAQRLGADVAVFATARKLAQWVYRVLRWGQPYVDEGAAVYEHRYRQARITRLAATAKDFGYPLVSVEA

SEQ ID NO: 457332 - protein, 341 aa, unidentified
MNQEKYIGMDVHQATISVAVRDSSGKLIMECILETKAATILEFIDGLRGTLSVTFEEGTSAAWLHDLLKPHVSHLVVCDPRRNALLKDGSKSDRIDARKLAELLHGNQLHAVYHGEHGVRTLKELGRSYLTITKDLTRVMSRIKALYRSWAIPCSGTTVYAVRHRAEWLAKIPESGVRLRAERLYQQLDLLQPVRQGARRDLMVESHKHHAVKLLRQIPAIGPIRAALLVALLQTPHRFRTKRQLWAYSGFAVETHDSGEYRFVRGKLRRNRERITVRGLNHNHNHDLKNLFKGAAISASTRPGPLCDFYVALVEKGMRPTMARLTLARKMAAITLTIWKK

SEQ ID NO: 457333 - protein, 369 aa, unidentified
MDVSIEKVINQTPNFMNYKLQTLAGENLFIGIDSHLKSWKISIYSDMLELKTFTQPAVSSKLMDYLHKHYPGANYHCVYEAGFSGFSVHRELTQMGANCIVTHPADVPTSDKERKSKSDKVDSRKLARGLKNGELKAIFIPDKLQEQDRALLRTRDRVIRNRTRVKNRIKSFLMYWGITLPEGFQGKTWSKDFLLWLKKVPLSSSCRSALNTYLAEVNHLSQSLGLLDQDIKQLSNSSRYASKVKLLMGIPSIGLTSAMILLTEIGDINRFKTFKALCCYFGLIPNTKSSGETERTGRMTKRGNRHLKYILIECAWTAMRKDPALLMSFKAAAVKTTPNKAIIKVARKLLNRIRFVLKSEEQYVIGVVQ

SEQ ID NO: 457334 - protein, 356 aa, unidentified
MKQFIGCDAHKKYSVFVAINEQGQSGKAIRVEHGRGLYRDFLEQLPAESLIALEAGGHYYWLVDEIERAGHQAILANPLEAKKRMGRAGKKTDQGDAEGLAILLRNGTLPTVWIPPAKLRDQRELLRLRMFLVGQRTQWKNRIHGALARYNIVLAAKDTFTQAGRLELSSRLKALPTHTRDSVESELATLDFLQLQIEQTEDRLTAVFKTSAEVDLLKTIPYVGRILSMVLALEIGDVNRFPSSAHLASYSGLVPRVHSSGGRTRLGQVRGNVNRYLKWAFVEAANLVVMHQRQLPGTHVVALYRRIKRKKNHQKAAVAVARHLAEAAYWILKKQQPYREPCKAPQTARTSSSTHG

SEQ ID NO: 457335 - protein, 361 aa, unidentified
MKKPAHHLIAEVPRKRAKVELTIGIDLGDVWSHYCTLNQQGEVIDRGRFRTTPKAIDKWFTDVPHARVAMEAGVHSIWISEQLEQLGHEVIVANVRELRAISHSDRKSDDVDAEKLARYARLDPEILRPISHRTVQQQEALTLIRARELLVRLRTAAVNAVRGLTKACGHRMPASSTACFAQRGQAAMPPGLKLALGPILTQIAEMTLKIKQYDREIQRMTQTEYAETQPMMTIHGVGHITALTFVLTLGDKTRFARSRDVGCYLGLRPKRSQSGERDPQLGITKAGNAYLRSLLIECANHILRPHGRDSALRQWGLHLAARGGKQAKNKSVVAVARKLAVLLHHLWTTQQPYMPFYQQAA

SEQ ID NO: 457336 - protein, 408 aa, unidentified
MKLFVGIDVSSQKLDVCFMDSEDQIIHEATMLNDITGASEIKEIILKLNKKLEYDVIKIGMESTSVYSFHPATFLAEDAELKKLGIEVIVQNPKAIARFKGLFEEDKTDTIDARRIADFLRLGLHSTTVIKEEKYIALQRLTRSRLQLIEQMTECKQHFLENLYYKCNTLTRDVETSVFGATMMDLLTESLSFGEIAEMEVQDLAAILQQRGRGRFGNPDKLAKAINKAIRDSYRLGKVLEGSVDVVLGTYAMMIKTLKQQIKELDKAIESLLEAIPESQCLLSIPGIGPVFTAGILAEIGQIERFADQAKLAKYGGLYWKKKQSGSWESERTSLTRTGNHYLRYYLVEAANSVKNNEPVYKEYYYKKYDEVPKHKHKRALVLTARKLVRLVDVLLRNHQLYTPERSV

SEQ ID NO: 457337 - protein, 420 aa, unidentified
MAPLSDQQFTAYVGIDWADTKHDICLQAAGDIRREFDCIPHQVARIDEWAKSLQRRFGGPIAVALELAKGPIVAALQKYDFFTLFPINPSTLAKYREAFKPSRAKDDPTDAELALDLLLRHPERFAPLRPQSAAMRSLVSLVERRRDLVGDQNRLTNRLCDTLKQYYPQALEWFDDRGTVLFCDFLTRWPTLLAARRARRTTLEAFFHAHNGRRANLIEARLESIRAATPLTEDPGIVTPCRLYVLALVAQLRTVLTAIDRFDREIATVAGTLPDYTLFQGLPGAGPQLAPRLLAAFGEQRERFHGADELQKYSGIAPVTERSGKKSWVHWRWQCPKFLRQTFVEWAAQTINKSFWAGAYYRQQRAKGSSHQAAVRALAFKWIRILYRCWQTRTSYDETTYLNALRKRGSPLIRNLGLAG

SEQ ID NO: 457338 - protein, 405 aa, unidentified
MNAVGIDVSKGKSTVTIRRPGDVVLMPPCDIPHTQSAINALIEQIKNLDGETKACMEHTGRYYEPVANWLSDAGIFVSAVNPILIRDFGDDSLRAPKTDKADSKKIARYALDRWAKLKQYGSMDKIRNQLKTMNRQFGFYMDQKTAMKNNLISLLDQTYPGANDFFDSPARSDGSQKWVDFVYTYWHVDCVRSKSLQAFTEHYRKWCKRNGYNFSASKAEKIYQSSSDLIAVFPKDDSTKTLIRQAVTMLNTASQTVEALRIKMDQTAATLPEYPVVMAMNGVGPSLGPQLMAEIGDVTRFTHREALTAFAGVDPGKNDSGKRNQKSVRTSKKGSPSLRKTLFQIMDGLIKRSPVDDPVYTFMDKKRSEGKPYYVYMTAGANKFLRIYYGRVREYLASLEEAKES

SEQ ID NO: 457339 - protein, 388 aa, unidentified
MQTVADRPEAPTAIRTDLGAIFVSLELSRSTWLITSLSPGGGEKMSKQVVRGGNVAGLLECFARLREKARARTGKVFPFVVIQEAGLDGFWIDRALQNEGIESHVVDPASIATSRRRRRAKTDGIDGEVLVRALLAYKRGEPRVCAMVKALTPEEEDRRRLCRERKVLIVERVRHVNRVKGLLFSQGISGYEPLRRDRRERLDTLQTGDGRLLPDHLKAQVCRELDRLELLLEQIKAVEAERDVLLAAQQVAAPAPAAMLLDIKGIGPEFAAILWSEGLFRHFDNRRQVASYAGLAPTPWQSGSVDREQGVSKTGNPRLRTTLIQLAWLWLRHQPQSALTLWFEERVRRNGGRLKKTTIVALARKLLVALWKYVTAGVVIEGAVMKRT

SEQ ID NO: 457340 - protein, 316 aa, unidentified
MYLGIDVSKLTIDCCLIADGQNHQKKFQNNKGGFEQLTKWLQIHKVSDKLHCVCEATGTYYEALAEYLYLRYTITVENPRKIKGYAIAELQRSKTDTQDAKLIAQYCQDRKHKLKAWQPPAKEQKQLQEISRYLDYLKQQRATEKAKQHEAPDYIKSHIQTTISNLTAQIQTVKKQLLQFYKDNPSYNNLRKRLKTITGIGEQATAVLLSTYKRHEFKNAKQFTAYLGLDPRKYQSGTSVNGKSRISKIGSSEIRKSLYMPAVVAYRCNAFPEFVGRLKNKGKHNKLILIAIMRKLAVIAFTLLKNGQDFQVERYK

SEQ ID NO: 457341 - protein, 417 aa, unidentified
MAVMIGVDPHKGSHTAVAIGPAEEPLGRLRVGACGAQAGKLVAWAAGWPERTWAVEGAGGLGHLLAQQLVAAGERVVDVPPKLAARVRLLEAGDTNKNDPNDALSVAVAALRSRAARPVAAEDHTAVLKVWAKRHRDLARARNQVACRLHAVLCELVPGGFGKEITAGQAARVLDAITPSGVIARARRELAGQFLGDLRNLDAQLRQTKKKLAAAVRANRTTLTEIFGVGPVIAGTIIGGIGGISRFPSRDHFAAYNGTAPVEVSSGGRITYRLSLRGNRRVNHAIHMAAITQISHRHSGGCAYYDRKITDGKTHKEALRCLKRRISNAIYARLLADARQGGDSQRDGPGRATGERLCLQRGQLTPQAPALRTSHSRAQSQPTARHPAQARPDIKTPAKENPAKPLTAKRTLIETAL

SEQ ID NO: 457342 - protein, 365 aa, unidentified
MHGLTHCNNVARILALDLGKFNSVLCVYDPLSNDHRFESVQTTPQRVHDLLVEHQTPDPSQTLLVIETCDVAGWVHDLATAIGISVAVANPANEAWRWTRVKRKTDKDDALKLARLTVMGQLPTAHMPAPAQRQRRRLVHYRRVLVERRTAVKNHVRSIFSQQGMQLPPRGKAWTKLGVQQIALHARPLPQCESIEDLWRGRLHLELQQLASLSGQIDQVDAKLDALGAQDGRVQLLQSVPGVGPRLAETVVAHLDDPRRFKTAGQVASYAGLVPKQIESGTMKRSWRITRRGPALLRSMLVEVAWMVYIRNDWAKHFVQRISRGVKGRKNIAIVALARKLLVTLWAMLRDGTRWREPRPIPCAA

SEQ ID NO: 457343 - protein, 414 aa, unidentified
MELLHERCAALDIGKKDLKACVRTPSVRRKHSRSQQIRTFATTTNALLELRDWLVAERVSLVVLEATGDYWRGAFYLLEDDLNVILVNAAHAKGLPGRKTDVCDASWLCQMGECGLLRASFVPPEPIRQLRDLTRYRTTLATERTREAQRLEKELEDAGIKLSSVATDILGVSGRAMLAALIDGERDAQVLAEMAKARMRPKIPQLVAALTGNFGEHHAVLCRLHLERIDQLSAAIGELSARIEEQMRPFARQLEHLMTIPGVGQTVAEVIVAETGADMSRFRTAENLASWAGVCPGHHESAGKRKSGRTRHGDRWLCGALGTAAMAAARTRDSTYLGARYRRLAPRLGKKKAIVAVEHSILTAAWHMLTDDVDYHDLGGDYFARLDPERAMRRIVRQANALGFTVRFDPIQAA

SEQ ID NO: 457344 - protein, 378 aa, unidentified
MKTALQTKDSVSGDVLYMALELSNKKWKLGFSNGEKTRIKTIDAGNWTNLRAEIEQARGKLDCSADCAIASCYEAGRDGFWIHRALLEEGIENYVLDSASIEVSRRRKKVKTDRVDVVALLRLLMRYVGGEKEALHAIRVPTVEEEDQRRLNRERDYLLKERGAHSARVKSLLKLHGISLGKMNDLPGLLPAAKALVVGYELPADLKRELEREYERYKLVDQQVKGLEKLQIQRAEDLDKPAMQQITQLMGLKGVGWQSSWILTMEFFLWRDFKNTKQLGSCAGLTPTPYDSGDSTREQGISKAGNKRIRKLMVELSWLWLRYQPDSALSQWFERRFGQGGKRMRRIGIVALARKLLIALWRYLEHGVLPEGAVLKAA

SEQ ID NO: 457345 - protein, 354 aa, unidentified
MFNQTNSTVATMGIDIGKNSFHVVGLDQRGAIVLRQKWSRGQVEARLANMPPCLIGMEACVGAHHLSRKLQSLGHDARLMPAKYVRPYAKGQKNDFRDGETIAEAVQRPTMKFVATKTAEQLDLQALHRVRERLVGQRTGIINQIRAFLLDRGVAVRQGPRFLRTELPNILAKRSDVLSPRMMRIIEELAGDWHRLDERIEGLSTDIKALADQDPACERLMSVPGIGPIISSAMVAAIGNGSGFSKGRDFGAWLGLVPRQMSTGDRTILGRISKSGNRYLRVLFVQAAWVVLVRPKTWERHGLKPWIEAAKKRMHHNVLAIALANKLARIAWAVLNKERKFECVRTSAMASQSA

SEQ ID NO: 457346 - protein, 344 aa, unidentified
MYFIGIDHHKQASVMTIVDKDGQELKNGRVLNLREKVKRFLEGYHPFTAVLEAGRSSYVMADLLRELGGEVKMANALQVKAIAHARIKTDKRDSRTLAHLLRADLIPEVYQRGERNRQAQRVMRLRAYWVAKQTEKKNKIRALLAQQKEKIQLEVGKREEGLFSGKGIEFLTKLPLEDPDKMVLDDLIQGYQEDQAHIQKTDGLVRLLYGEIEEASRIDTVPGFATTLSVLVAVEIADIKRFPTVGDLHSYAGVIPSTYASGERTHHGRITKQGSAWLRWAALEAAYPAIKKDLGLRVLYNRLAKRKGANVAKIAVARRLLTIIYRVLTEKREYFPDKMKISAA

SEQ ID NO: 457347 - protein, 450 aa, unidentified
MSKKNQRKSSTKSVFDLINPDCVGIDIGSKVHYVCVPEDRSPEPVQRFESFTEDLERMIIWLKECKIKSVAMESTSVYWIPVYQMLEAAGFEVHLVNAKHIKNVPGRKKTDVEDARWIQKLHSCGLINGSFRPDDQVCAMRSLVRQRKRLTECASTHVLRMQKALTEMNIQLRNVITEITGFSGTAIIKAIIDGERDPIVLAKFAHPHLTNRRDMIAKSLHGDYRKEHLYVLKQEFELYEIFQQKIIELDEEINDHYQKFDKKNHNDKKLEAKKKTTNSPKIDIRQNVYDISGVDLTKIPGLGETTIQTIISEVGFDMSKWKTEQNFSSWLGLSPMNKITGEKVFKSRTNKVKNRASEAFRMAAQSVSRTQTALGAFFRRIKSRAGAPKAITATARKISCLFYRLLKFGENYVEQGIELYEQKYKENVIKTLEKLAKQVGYEVSPIQENA

SEQ ID NO: 457348 - protein, 387 aa, unidentified
MPQPNDLSRSLVVLDQNSTIIAVLEMSQSSWLVAGMLPGIERQPRKKLEPSPERLVAVLHGWRDEAVRAGRTITRIALAFEAGRDGFWLARWLEARGVEAHVIHASSVAVSREHRRAKTDRLDTELLKRGFLGWLRGERGHCTMARVPTIAEEDAKRPNRERECLVGERTRIVNRIKSTLARLGIRDFKPTLRNAAERLVTVHTPEGMRLPPNTLAELQRDMARLGFVVSQIREIEDARQKRLDQQPETGPHAMVRLLARIVGVGVETADLLVHEVLSRPMRDRRAVARYAGLTGSPNESGAQRREQGLARAGNARVRRGMIQLAWRFLMFQKDSALALWYRARTADSRSGTRKTMIVALARKLVIALWRFVTTGETLEGVVLRPAS

SEQ ID NO: 457349 - protein, 337 aa, unidentified
MSYLGVDLHTNSFTVCYRTAQGKQRIGTFDIRRIEQFRTTLRKADKVAVEATGNTAWFVERICDRVSKVIVVDPHQFEVIRRSVKKTDKHDARTLAFFLSKDMLPEARMKSKENAQLHSLAGTRDKLVKQRTALVNKIYNVLNRYGLTWKKETLTTEKGLKSIMAFDWEPIVRVELEVLVKQIRSLTESIKTLDEQISQQGKKLDGHKNLTSIKGIGERSAAVLLSIIGDVNDFADENKLAAYFGIVPRVSDSNEKVYHGRITKNGSKIGRTTLVQCTLVAKRYNPYLQGYYERIKRHRGSGKAIIATARKFLGIIYQTLKKDWIFEDFPNFVIANT

SEQ ID NO: 457350 - protein, 362 aa, unidentified
MFRPHTLYIRIRIVRKVFEPAFAMKDQDVSDVVRTKKRTAMRYIGIDVSKATFVVAYSSDKGGEIRTFNNTTAGIRQFIGTLPKDGSIHCVMEATGNYSALLLYMLNVAGITVSMENPLKVKNFAKAMLSTIKTDKSDARLITLYGEKMNPRPFKVQGEAILRLRQKRTVIRQLTKQITAMSNLRGSLACLPVPDKGATHTVDETIKFLEKKRDRLQSELTDLVEVEFSRQLALLTTIKGIGITLATALIITTGGFTYFQNAKQVSRYLGICPTYEQSGTSVNIKGHINRNGDAYTRGLLYIAAWPASRFNAQCKETYTRLRQNGKSGKLAMIAVANKLVRQAFAVVAHDKEYVDGFVSNRP

SEQ ID NO: 457351 - protein, 331 aa, unidentified
MTNATRDAAADARPLYYIGIDMAKARFEWGVHGARSTQGAANDASGFETLLADLRGRRVGLIVIEATGGLEHALASLLLQLGLPVAVVNPRAAREFARSMGHLAKTDAIDALALAHYAHTLAHKANQAGVLLSPMPVHLEALQAMVLRRRQLMDMRTAETNRRGGAMRVLRKSIDAVIKTLNEQIGALDTDIGAHLDEHFKELDARFERIKGVGPNTCAAVMAFMPELGRISGARAAKLAGLAPLNNDSGNSRGKRRTWGGRSIVRCALYMATLSAVRFNPVIRPFYLRLLAAGKPKKIALTACSHKLLRILNAMARTGQPWNQEIHGLTA

SEQ ID NO: 457352 - protein, 413 aa, unidentified
MEVIHTHCAGLDVHKKTVVASIIVPQEGGGLYRETRTFETMTSGLLALSDWLLEQGVSHAAMESTGEYWKPIFNILEHGFEILLVNAQHIKAVPGRKTDVKDAEWIAELLRFGLLKASFIPPEGQRELRELTRFRSTFIRERATLVNRLQKVLESANIKLASVASDVNGVSGKAILQALVEGTSKPEEMADLAKGRLKQKRELLARSLEGRVKPHHRFILSELLCQLDALDESISHFDEKIEEYCRPFEEAVTLVDTIPGVARKVAEVIVSEIGTDMSCFPTANHLASWAGVAPGNNESAGKRLSGKTTKGNRALVSALTQAAHAASRTKNTYLNAQFHRLAARRGKKRAIMAVAHSILVIAYHLIKSKEPYHDLGFGYFDKRNAQSTAKRLVRRLQELGYNINSDLLTTTAA

SEQ ID NO: 457353 - protein, 422 aa, unidentified
MLTETQDDEEIIQRVAALDIGKAELVCCVRVPGQGPSGRRMQEVTTYSTMTRSLLGLAERLANLGVTRVVMEATSDYWKPVFYLLETHGFDTWLVNAKDVKHLPGRPKTDKLDAVWLCKVAERQMIRPSFVPPPPIRILRDLTRYRAALVGVRTAEKQRVEKLLEDAQIKLSVVASDIFGLSGRDMMAALVAGERDPKVLAQMARRTMRAKIALLEEAFTGHFTDHHAFLLQRMLARVDAINIDIAAIENKIEAEVAPFATAVAKLDEIPGINAAAAHVILAELGTDMSRFPTAGHLVSWAKFAPGVKESAGKKKGKNSTGHGNTYLARVLGNAAAAAGKTDTFLGERYRRIARRRGKKKAIVAIGRSLLVIIWHLLSQNEAHFQDLGADFYTARIDPERRKRGHVRQLEALGYTVTLQPAA

SEQ ID NO: 457354 - protein, 322 aa, unidentified
MTKAILGIDVSKQKFDVTLLFSDNKVRKKVFSNDPKGFHMLREWILKLHEGGFHACMEFTGIYDERVAEFLHQQGFTVSRVNAMAIKAFAKSMLTRTKTDKKDSMVIAQFCKVHQPKAWEPDPLHIRTLRDLSRTLDALKDDNQLINNRLEKYQERESPAKKIWQDRLLEVQKTIKNVEKQINIHIKNHPDLEKKVKLLQTISGIGETSARTLIAEIPDIRHFKNARQLAAFAGLTPCQRQSGSSVNGRTRLSKMGSSRLRKALFMPVLVAKKYNPIIIAFSNNLIKKGKCKMAVVGAAMRKLLHIVFGVLKHETPFVEKYA

SEQ ID NO: 457355 - protein, 360 aa, unidentified
MKYNERFTSNLNQVDFSGKHLFIGIDMHKRNWVVTVRTRDLQLKTFSMDPFPEVLEILLDREYGGGIFHLVYEAGCFGYGTYDYFQEKGLDIIVTPPNRLYRENSGVKTDKRDSRGLALFLSKGLLKKVVVPSKSVRELRQILRIRDKQKKRKRQIQQEIRGMLLFLNYSIRSKNWSKSMLCELKGLRFCEEGLNIAFKSLLEEYEFYSEKLIQSNCLIRQTSQQLGRSYPCIDKITAIRGIGDLSGFRLAMHLFDRRDRFIDSDKLVHYLGLTPREHSSGEKRRKGKTGHCGNPELRASIIQIAWQSVRWDPVLLDKFDRVYSNSGIKQKAIVAVARKLMVKLYTVIQKNKGYQVGLAA

SEQ ID NO: 457356 - protein, 340 aa, unidentified
MHATTYGLDIAKRVFQMHWVDSESGEIVNRRFGRDDLIQYLSRQSPARVALEACGSAHWWARKIKTLGHDVVLLHAKFIRPFVQTNKTDASDARAIWTAVQQPGMRTVAAKSEDQQTMLSLHRVRSLLVKFRTMQVNQLRGLLYEFGASFRAGRVAGLAEIRARMTELEEVLPGAMMSCLQDQLRRIDGLQAEIHQLEQGLGVWQKQDAACRAIAEVPGIGKLTATALVATMGDARTFKSGREFAAFLGLVPRQSGTGGKVRLGAMSKRGDPYLRTLLIHGARSVLCHIKVPTPWQKAIQGRRPTNVAAVAVASKMARTAWAILAHGQAYRRDHVSVRPA

SEQ ID NO: 457357 - protein, 377 aa, unidentified
MEKHSRFVGLDVHAETIAVAVAEPGGEVHSLGTIPNTPEAVRRLAKKLGPPETLRVCYEAGPTGYVLYRQLTALGVPCAVIAPTLVPVKAGDRVKTDRRDAEKLARSYRSGDLTPVWVPDPGHEALRDLVRAREAAKKDQLRARHRLGKFLLRQGRRAPAGSKAWGVKHRAWLQTIRFAHAAQDATLLDYLTEIDHAADRIVRLEHAIATAADVAPAPVRAVIAGLQALRGIAKLSAVSIVTEVGALSRFAKPRQLMGYSGAVASEHSSGSHLRRGGITKTGNAHLRRIVIEAAWAYRHRPAIGGTLRTRQQGLSEEVKALAWKAQHRLHGRYARLLAKGKAPTQVVTAIARELLGFIWAIGVHIEHHTAGGAPAAA

SEQ ID NO: 457358 - protein, 400 aa, unidentified
MLSIGIDVSKGKSTVCGMKPGGEIVYAPFEVQHTREGMSELVSLLRSSGEEVRAVLESTGSYHCPVVAALLENGIFVSVVNSLRMKRFCSQSIRKVKTDRIDAMQIALYGLAYWQELQPARLPEDTYRELQLLARQYYQMTSLLIKAKVDFNAICDQVLPGMQELMSDHAGRHKLSDFVLRYRHTTHILEMGETRFRKDYCKWAEKKGYRNCERMAALIFATAQNGIPVLPNAPSTQIVITEAIRVLHTVEASRDAILTQMQALAKTLPEYSLVREMPCIGDTLAPRLIAEIGDVRRFHSKRALIAYAGIDAPPYQSGKFCANNRHISKRGNRYLRKTGYEVMQSYVMHKPANDPIFTFIEKKRGEGKSGKLAMVAGLNKFLRVYYGKVTELYRSLPAIE

SEQ ID NO: 457359 - protein, 397 aa, unidentified
MSNVITVGCDLHDRSMLLKTACGKNKAEQKSFLNDAENRLKMVNYLRQFAEKQQSKRIVFVYEASGLGYGLYDLLLDHDIECYVLSPTHLPKTPKSKRNKTDAKDAQMLFEQARGFVLAGNELPVVWTPPQRLRNDRELVRARLETGEASTQVKLKIFSMLKRFNQPLPDFFIKSRGWSKKFIAWLKHFAETTDATVSPVLLALITRFETLRAETTNLERHIRHLARTDRYKTAYQKLIKLRGVGLLTAMTFLTEIGDALRFSNRRQIAAYLGVIPSAHESGEANDRKGRITRQGPGRVRKVLCQASWTAVRLDPNVHQQWERIKGNGKKGGKKAIVAIMRKLAIRMWHIMLQCGTPEELVGSDRPHRGTATSAQAPQKGPPLSSSPSLQPQEACAG

SEQ ID NO: 457360 - protein, 364 aa, unidentified
MQESTHIGLDVHKETIAVAVLRPGTGECDERVIANTPAALRKLFARYPDRAALHACYEAGPTGYDTWRLLDSLGVPCEVIAPSLIPRRSGAHVKTDRTDARNLARLHRAGELTAVRVPSPSEEALRDLVRAREDLKDDRRVARQRVKSFLLRYGKRPPTGSGRWGVRYELWLQTLAFEEPAAQAAFDHLMGAASVRAAQLAAIEREIEAATLSGPLEGPVARLRAFRGIDTLTAVTVVTETCDFRRFPTASAYMAFTGLVPREHSSGATRRQGSITKAGNAHVRRVLIEAAWAYRHRPAVRGKLAVRQEGLPPELLAYSWKAQTRLHGTYRKLAARRGANKAAVAVARELSGFVWGAMTGRTGA

SEQ ID NO: 457361 - protein, 415 aa, unidentified
MESSSNTEFAAFVGIDWADRKHDVCLQAAGSGKRERSVLPHRPESIAQWAQGLAQRFGGRLIAVCLEIAKGPLVYALQRYPFLVLFPVNPTTLAKYRETFCVSGAKDDPTDAEFALELLLTHPERLTRLHPQSAPMRVLQQLVEQRRALVDDVRRTTNRITDALKQYFPQALEWFADKDTVVFCDFLTRWPTLKHAQRARQARLRAFFEEHNVRYPHIIEQRIQAILAASALTSDLAVIEPNRLLVEALVQQLRVLLSAVQRFDREIAELAPTLPDYALFNSFPGAGPVFAPRLLAAFGEQRERYPTPAEVQKYTGIAPVTERSGNKCWVHWRLQCPKFLRQTFVEWAALSIPHCFWAKAFYEQQRARGSSHQAALRALAFKWIRILHCCWQDRTPYDEAKYLNALKRRGSPLLN

SEQ ID NO: 457362 - protein, 350 aa, unidentified
MYPFYLGIDLHLKRSYVVLMDNRGQVIDERRLGNEEVKEYLSRKVPKATYAVVEATRNWAFMYDLLAEHVERVELAHPKELKAISAAAVKTDKVDARTLANLARSNYLPTAYAAPQGVRDLRTEVRYRDRLVRQCTQAKNRIHAVLAGYNLITPTADLFGVRGRQYLAEMMDQHLRPAAVRVIRKDLALIDYLSQQITEVEASTHLSAEQEQQIKLLCTMPGIGRVGAITLLAEIGDIQRFHSPKALCNWAGLTPKVRSSDLQIRHGRISKQGPALVRAAMTRAATIASRCSKRWYRVHENLAPRCGRQAAKVAVARRLLTIIYYMLKFQEPYREDHPSKTGEPAAMQGA

SEQ ID NO: 457363 - protein, 342 aa, unidentified
MGEVVTIGLDIAKSVFKVHGVGAGGEVLIRRRLTRARMLPFFAKLPRCLVGIEACNNSHYWARELTALGHDVKLMPAQHVKPYVKRGKNDAADAEAICEAVTRPTMRFVAVKSPEQQSLMMLHRVRLMLNRQRTQISNAIRAHISEFGVVAPVGRLGVERLLEVVADAGDDRVPEDARLCLQMLAAQLDVVKRQILENDRRVLASARRTELGRRLMEIPGVGPLLASAFVASVADLSVFRTGRDLAAWIGLVPKQNSSGGKDRLGSITRAGNRYLRQMLVVGAMAVIRYAQRHGTKRPWLVQLLARRPAKVAAVALANKNGRMVWALMTSGEHYREPLPMAA

SEQ ID NO: 457364 - protein, 405 aa, unidentified
MPAEPPNGSSGEWAQTQRLLELGSNAWKLELMHVAVGQPTQEVKETPMNSVGLDVHKTRCVACVKTPEGRILEEFAFQNSPDGHEELITHLKAYPETQVAIESTGNLWIPIYNRLEDEQIHTILTNPKKTRMIAEAKIKTDKLDARILADLLRANLLSASYVPPPEIRMQRSIIRERARLTQLRTIIKNRIHTLLDKHSYKSPYTDLFGKHGLEWLSKLELPAGDRILLEVNLEQLSSLNHSIHRLNETIATSAVENPEVKLLMGFTGIDYYSAMFLINEIGPVARFSSPKKLVSYAGLAPSTHQSGNHTTHGPITKEGNNHIRWILVEAAQHASRHDPRLSQFYMRIMKRRGHNRALVAVARKMLVTIYHVLNHHSQYRGLRPELFENKIRRLERITNSSLQTA

SEQ ID NO: 457365 - protein, 368 aa, unidentified
MNSITYVGLDVHKATVAVAEGGRGGEVRQLGVFENRPEVLSKLVRRLSNGDRRLSFCYEAGPCGYGLHRLLTGCGHDCVVVAPSLIPMKAGDRVKTDRRDALMLAKLHRAGELTPIWIPDAGHEAMRDLVRARATAGRVLSKARQHLQSFLLRHDRIYRGLRAWTSAYRRWLTTVRFDHPAQQIVLQDYIHAVQDAEARRDRLTRQINDLLPSWSMAPVAMALQAMRGVALVVAVTVVAEVGDFRRFANPRQLMAYLGLVPSEHSSGGSIRRGAITKAGNALARRVLIEGAWTYRMPARVSRKLHDRLEPLPAAIRDIAWKAQIRLCARYRRLAAAGKPKVVVTTAIAREMTGFIWAIAQIAQPPLAA

SEQ ID NO: 457366 - protein, 377 aa, unidentified
MSNLLFVGLDVHAETIAVAVAEAGGEVRSLGVIPNRLESVRRMVHKLGPVQHLRACYEAGPTGYVLYWQLTQLGVTCEVIAPSLVPTKAGDRVKTDRRDAAKLARCHRAGELTAVWVPDAAHEALRDLVRAREAAKKDQLKARHRLGKFLLRHGRRPDGIKAWTKSYLEWIKSKVHFDQAALEATLADYLEEVDHVAARIVRLDGAIDEAVRQAPPGIRAVIEALQSLRGVAQTTAATIVSELGSLVRFERPQQLMGYSGLVPREHSSGNRVRRGGITKTGNGHLRRVLVEAAWAYQHRPNVSGVILQRQKNLALDDEVKKMAWKAQQRLHKRYTALAARGKNKNQIVTAVGRELLGFIWAIAVHTERQRKQVTQAA

SEQ ID NO: 457367 - protein, 399 aa, unidentified
MPEIWAGIDGGKTHHHCAAIDTSATQLLSRRVANDEPPLLELIAEVVELADGEPVTWAVDLNGGGAALLIALLVGHGQRVVYLPGRTVHHASATYRGNGKTDAKDATVIADQARMRRDLQPLVVADELSTELKILTARRADLVADRTRQINRLRAQLLEYFPSLERSFDFSASKAALVLLTGYQTPSALRRAGTTRLEAWLKKRKVRNAATVATTALAAAESQHTTVPGKALAASMVARLAKGVMTLDQEIAETDTLIEDRFHRHHHAEVITSLPGMGTLLGAEFLAATGGNMTAFGSPDRLAGVAGLAPAPRDSGRISGNLHRPQRYSRRLLRVFYLSALVSIRCCPASRAYYDRKRAEGKRHVQAILALARRRLNVLWAMLRDGSTYQPTPAASAAA

SEQ ID NO: 457368 - protein, 390 aa, unidentified
MYIVGIDIGKSNHEATIIDETGTVIGKSIKFSNSHIGANKLIDYITKNIGQSDVTFGLEATGHYWLSLYSFLLDKGYTINVINPIQLDSFRNLYIRQTKNDTKDSFIIAEVIRFGRFTTTKLADDKLLSLRQLCRYRLSLVDSVSELKCRIITVLDQVFPEYEKLFSDTWGISSKKLLERYQTPEEILEIDTSELAGFLSESSRGQLGYSKAEKIKVAAQNTFGIKVAQSAFKFQLKQLIDQVLFIEAQIKSLDNEIEFYYNQFDCHLTSIPGIGAVTAAIILSEIGDIKRFTNSASLVAYAGIDPTIKQSGKFSSNNNRMSKRGSPYLRRALFLAASTCTLHESSLNDYYNKKRSEGKHHLTAVGAVAHKLTHIVFAIMRDNKDYEPMS

SEQ ID NO: 457369 - protein, 423 aa, unidentified
MKYALVRVLPEVPPGGVCAGIDWASADHAVCVVDLAGRVRDRFTAVHDRAGIAGLIARLRGSGAAEVAIERGDGVLADALLAAGLTVVVIGSRQVKNLRSRYGSSGAKDDRFDAFVLADTLRTDRARLRPLVPDSPATLALRAAVRARRDLVAHRVSACNQLRAHLAVAFPGATGLFSELDSPLSLAFLAAFPGQQAAARLDEQALAAWLATVPRRGNTAPAGVLAARLAAAPRGAAGADAAQAAVTAQLAAATAGLAGRVRALEAEIAAQLAAHPDQHIFTSLPRAGTLRAARLLAETGDCRARYPDPWSLAGLAGVAPVTRRSGTYISHEFRWNVNRQLRDAICDFADGSRHASPWAATVYAAARDRGKDHPHAVRITARAWVLIIWRCWQDGTSYDPAKHRALQDVLTRQAAAGTPQPHR

SEQ ID NO: 457370 - protein, 404 aa, unidentified
MIFVGVDWAEDHHDICVMNQDGAVLGKRRVPDSVAGIGELHELVAEHAEDDEAVAVGIEIDRGLVVTSLVAAGYQVFAINPMASSRYRDRHGTSGAKSDPGDAKVLADLVRTDRHNHRPLAGDTELIEGVKLLARVHQSAIWGRQRQLNALRSALREYYPAALVAFGTDLSHGDATQVLALASTPELGRTLSRSKIASALRRGGRIRNLERRTDEIQGALRAEYLQAPPTIAGAYGTITRSALRLIETYTAEIASLETALSEHFEQHPNAKVVHSLPGMGTVLGARVLGEFGDDRTRFATAKCRKNYAGTSPITKASGHSRVVLARFARNRRLSDACDQWAFCSLTRSPGARHYYDELRARGKTHRQALRQLANRLVGILHACLEEGVLYDETIAWQAAEQSAA

SEQ ID NO: 457371 - protein, 364 aa, unidentified
MHYVDNTELSSHEETRSQFNGGRGAIKLGIDVHQDFYVVVEQVGGSNPKPPQRFQKEAFLHWAGRLKRKSGAEVHAVYEACGFGFSLQRKLSALSIQCHVICPQRLDEHNRRVKTDGLDAKALCLRLDRFVQGNRAALAIVRVPTEEEEQLRAIHRQREQLVKARKQLEAQGRSLLVNHGLEPVQNWWKPRTFAALPAPQWMKELLENSQPMLVALQQKIAALSVQLQSAASPEQPRGLGKMTSVIIDREIGDWKRFNNRRQIASYTGLCPGEYSSGNTRLQSCVTKHGNPRLRAALVELAWRLVRFQPNYKPIRKWNATLRKGALATGAARKKAIVAVARQLAVDLWRIKTGRLSAEELGLIN

SEQ ID NO: 457372 - protein, 392 aa, unidentified
MNIRTTTFSPAAGDCDAARIVVAIELSKKSWLVGMVTPLADKISLHTVPAGDGAALMDLLTRWSRKVETALGRPVEIVSCYEAGYDGFWLHRLLEGHGVRSHVFDPASLQVNRRARRAKTDRIDVEGLVRALLAHLRGEPRVVSVVRVPSVAEEDARRLHRERDRLIRDRVRHVNRIKGLLATQGIYDYQPLRRDRHKRLAALGTGDGRALPTRLGAEIARELQRLELALEMIAALEAERDAIAEANSAAHPGAAHPGAAKIQALAKLKAIGPEFATVLVGEAFHRSFDNRRQVAAYGGLDPSPFSSGGMSRDQGIAKAGNAKLRATMIELAWMWLRYQPDSALSHWFRERVGDLKGRPRRIAIVALARKLLVALWRYVETGLVPEGAVFKA

SEQ ID NO: 457373 - protein, 357 aa, unidentified
MSKQIFKQSVGIDVSKDHLSVCFSQEETGKKFRILSSRSFGATAGGFRQLHEWISRRRQAGAPLQLLMEATGVYYEEAAYFLQAKGYHLTVLLPNKAKAFAKSLGYKSKTDRIDAKILAQMSLERDLAAWQPADEQWLKIKRLCRERIELLGEKTAVDNRLHAKKHSHQPDAQSLKRAKNLLRFLQKQIQEVEMDIEKTVRANAEIQQKINHVCSIKGVGIITAATVIAETNGFALFKNKAQLVSYAGYDVVQNQSGSSINGKTRISKKGNHHLRRSLHFPALVAIKHIAEFKNLYDRVFQTTKIKMKGAVAIQRKLLVLIYTLYRKNQPFDPNFKDKQNPHPLKQSRQEPGPAYAA

SEQ ID NO: 457374 - protein, 313 aa, unidentified
MQQTFVGIDISKNSLDVHVLPEETNYSFSNEPQKVKALIRKLKKLKPSLIVMEATGGYEISLAVQLSEAKLNCAVVNPRQVRDYARAIGKLAKTDAVDAYVIARFAQDVKPAAREQLTIKELQLKELVMRRQQLIDMRSAEKNRLARAYTAQVQEELRQHIAELTSRIKAIDEQLHNEIKNDPNWNQKLEIISSVPGIGAHTAHSLLMCLPELGTLNRKQIAALVGVAPMNRDSGLMRGKRTITGGRAVVRKMLHMPTLSAVTRWNKRLQTFYYHLRDQGKKHRVALTACMRKLIIMLNAMLKNNQPYRENYC

SEQ ID NO: 457375 - protein, 344 aa, unidentified
MNKIKVIGIDLAKSVFQVCVWMSDGSIASNRKVSRAKLLDTIRQFPAGSMIAMEACATSHYWGRTFQSIGFQIQLIPTQHVKALTHHQKNDANDALAICETALRLGIHFVAIKTVEQQDIKALRAARQLIVEQRTALANQARSLAAEQGVEIPVGIHILQQRLPDIIEDAEQLISPVLRQLLFSLLENIHSLNERILFVEHSLAALCQQQPKYKVLMTIPGISPLIAAAFLSEVNTGQFTNARQLSAWCGLVPRQHSSGGKSSLSSMTKNGNRDLRTLIIHGARSVVHWAHKRDDALGVWLKRLTERRGKMKATVALANKMTRIVWRLLTEPTSFNINRAFAMN

SEQ ID NO: 457376 - protein, 346 aa, unidentified
MLHVGLDLSRKRIDVCLISDQGELIDRFTAVPDRDGLYGLARRVVVYGEPVRGVVESMNGARFVHDELTAHGWEVLVADAQKVKGLAPLACKTDKIDSRVLAELSFRDLVPAIWLPTVELRREREISRWRLHLVKHRSTLKNRVHSTLITFGHQRHMSDLFGAAGRRLLRELDVPEPWRSHVDASLVLIDDLEARITAIAKELRRSGADHRYIPVLMTAPGFGWITSFTVACEIGDINRFSSPVKLTGYTGLCPRVKQSGQMDQRGPLSKHGPRYLRWGLMEAAIAASSHPLYRERYQRTRRRLGRQRGPKVAQIDLARQLTEAIWYMLTRNQPFAPAGAIFRLAA

SEQ ID NO: 457377 - protein, 421 aa, unidentified
MRGLKAKRVNTVNEGTLIATVDIGVVNNTGYCTTLDGRSTQPFRFDNTKEGFEKFWCMTIASKTRFGCDEVLVGYESTGPYAEPLVHYLANKQVKIVQVNPMHTKKMKEVNDNSPLKTDDKDPRVIADIIRLGRALTLVVPEGDAAYLRRLNNARERHVGEQTAFLNQLQQLVFLIFPEFKTVLKNMKGKTAQHILKIYSTAERIGTLSKEVLGEEMRKWSMGKFGVKDAESLIGLARETVGIKEGIAGISMDIRHILMQLEAEVRFISEIEAEMGATLERIPCAVRLLSIKGLGIVSVAGLIGEVGDFSKFSTQSEIMKLAGLDLYEISSGKRKGQRRISKRGRSLLRKILFYAAIQMIRKNGIMYDYYARLTGRGMERMRALIAVSRKLLRIIHALVRDNRDYAGQYQAPERRVMKKAA

SEQ ID NO: 457378 - protein, 450 aa, unidentified
MGNGNGVSRGDRNRNARLDRLRTLVSMSNAIVGIDLADRKQMVVVTDHDSKVLARKTFRCRAWDLGRALDWAAGRAAAKGFAGVTVSCEPTGHRWRVLGQLAADRSMPFVCVQPMVTSWARRAEDLTHDKTDEKDAVLIARLTAQLRCYEPEPVDETWARLRHLGARREQLITETSSQVQQMRDLLECVWPAALGTAQQPFRSRTWIAALMVIVDRDSGEFDRTRRLGAARFEHAVRREIVKHGGQKPCRRITRNLFAALADPAGVIAHRAGALERVQLLLEDWRNAHDRLADAETRMTGVLDQLELTGLATSITEISAVGAAAILAQTGDPRRFATARALVKHAGLAPREKLSGAFTGKTRLTGQGRPGLRLAAWRAVWGAQRANPVYGARYRHLTTREHNKLKPTQAQTVIAAAILRHLHAVITTGQAWNPAIATHGTRPRLRPAAAA

SEQ ID NO: 457379 - protein, 338 aa, unidentified
MTVVTVGIDLAKNVFAVHGVNAAGKAVLVKPLVRRAKLLELIATLPACLIGIEACTGAHYWAREFQKMGHTVRIMAPQLVSPYRMGGRHGKNDAADAAAICEAVTRPNMRFVPIKSVEQQGQLFVHRAHQGYVSERTALINRIRGLLSELGIVLPQAFKAFLSGVAQVLEDLPGYCNQFIGDLLNELYHIEEKIKNSEKLIQQLARDNSAAQLLMQFRGIGPMTATAIVASIGNGHDFKNGRQFSAWLGLTPRQQSSGGKARLGRITKAGDSYLRILLVLGARSVLLGAAKNDDPVSRWALQLKERRGYGRALVAIAAKNARMCWAMLHLRDEFIFPA

SEQ ID NO: 457380 - protein, 482 aa, unidentified
MKKKNIYTNQSQELLTLFEEAGNGAKVMCVPIDYAKKDHVAMLCNGHGHILRKPFSVKNSLEGIEYLTKQVTRSCSHRQIDLKHVFFGGEDVGSYAENFVNTLRSGGWIVAGVNAHDAKEQRANMQASTDRLDLMGIASMLLNRRGNCSPAQSGIYRNLRTVVRHRRKLVAMSTEVKNRMHTVVDRLFPGFLDEKKSGICSFSKSSLYLMENRFSPHQIRRRKRKKLIEILDRCGTAKPESTAAKLQEYATRVLNTPNEYINTLQFSLAQHVKHLRCLQDSINQLEHEVAVWLAQTQGAFLTTFRGIGIVLAAGVSAEIGNPHEQKPLNNLVSYTGIIPKVKQTGGSEGKTYTGKVAKRCNHILKDYVVQSGNHMGLHGPGDLMADYKRREAAGQHADFGIGRRYLRTAMCLMRTSQIYMPERLRNTEVKAEERATYYLAIWPYLRGKWNKAGALEAAFKKDRPLGQWRCMVQELYGIKLKL

SEQ ID NO: 457381 - protein, 460 aa, unidentified
MRKQASTKKRGPRKVKQDWESLPTLNRNAAGIDVGNAEHHVAVPMGRDAEPVQRFGSFTADLHRMAQWLKACGVDTVVMQATGVYWVALYQILEDYGLQVNVVNAQHTKTLPGRKTDVLESQWLQKLHTFGLLNNSFRPTEEIRVLRSYMRQRERLVTAASTAIQQMQQALTEMNVQLANVISDISGKTGLAILRALGNGERDPQVLSQFRHPSIHASRQEIAQSLEGNWRDELLFALEQNLALYDIYQLKIAECDKRIARQLKTMEPKNPPAPQQDDASRPSRRKHAPEFDLSEQLGRIAGVDLTQIDGIQARTAQTVISEVGVDMSRWRTEKQFASWLGLCPDNRISGGKVLKRGTRQVTNRAATALRMAAWSLLRSQSALGANFRRLRRKLGAPKAITAMAHKLARIVYRMLKFGKEYVDQGAEHYESKFRQQQMKWLMKQAAALNLQVTPLSEVPD

SEQ ID NO: 457382 - protein, 388 aa, unidentified
MEAQTVDTMPPVAADHDPVRCLLAIELSKKSWIVAITTALSDKISRYTLDGCDWKGLLELMERIRTRVAREVGRPVEMISCYEAGYDGFWLHRLLERHGVRSHVIDPASVQVDRRARRAKTDHIDAKRLLRSLMAYLRGEPKVWSVLRVPSVAEEDDRRLHRERDRLIAERGQHVNRIKGLCAIHGIYDYEPMRRDRMLRLEQLHTGDGRELPPRLKAEIARELQRLELILGMLKEIEAGRDAIALTEKVSAHTNAKKIQNLVKLKAIGAEIATVLTGEVFYRPFNNRLQVASYVGLTPSPFQSGSKCRDQGISKAGNPKARSTMIELAWLWLRHQPDSPLSIWFRERVGTRKGRIRRITIVAVARKLLIALWRYLETGVVPTGAVLN

SEQ ID NO: 457383 - protein, 389 aa, unidentified
MKIFVGIDIAKLNHFAAAISSDGEILIEPFKFTNDADGFQLLVSKLESFDKNSIIIGLESTAHYGDNLVRYLVAEFYQVCVLNPIKTCQMRKNNVRKTKTDKVDTFVIAKTLMMQDDLRFITFFDLDMMDLKALGRFRQKTIKQRTRLKIQLTTYVDQVFPEIQYFFKSGLHQNAVYALLKEAPSPKEIASMHMTHLANLLKVNSHGHFTKEQAKELRVLAQKSVGANDSAISIQITQTIQQIELLDSQLEKIEVEMTDIMKFNDSVIMTIPGIGYINVGMILGEIGDIHRFSNPNKLLAFAGLDPSVYQSGNFQAKTTRMSKRGSRVLRYALVNAAWNVVRNNATFKAYYDAKRAEGRSHYNALGHCAGKLVRVIWKMLTDEVEFNLE

SEQ ID NO: 457384 - protein, 335 aa, unidentified
MKKNDFKNFAGIDVSKQTFDVCFILNQEVSSAAHQQYSNDAAGIRKMLGDLKKQKVSAANTMFCMEHTGIYGKELVYTLFEKQWFVWVENPVAILRSIGLQRGKNDKADAKRIAIYAMKNNEKAKLWEAPRKEVAALRQMLNVRDSLIKGLKALTQPINEYEDTGNKKLSAQVKALTRNSVRGMEKDIEKVEQAIDELIKSDAQLSRSFGLLTSIPAIGKITSAELICATNEFKNYTEARQLACYCGVAPFEHSSGISIRGKTRVSNMANKKLKTKLHLCAIVAIQHDPELKNYYERKVKEGKNKMSVINAVRNKLVHRIAAVVKRQTPFVKIAA

SEQ ID NO: 457385 - protein, 341 aa, unidentified
MEKFIRTAIDLGKNYFQVHGLESEGGRSISRKVKRSKMHEFYSQIEPCRVGMEACGSAHYWARQLTAMGHEVVLIPPAYIKPYVKRGKNDAVDAAAICEAMSRPDMRFVPIKSADQQAVLMLHKTRELLVKQRTMAVNALRGHLAEFGIVAAKGIGRVDELLALAKADATLPHIAGAAVACLAQHLEGLDLSIETVDEEIAKAHRQNPTSRLLDEIPGVGTLIASVIAASVPDPGVFKSGRDFAAWLGLTPRQNSSGGKEKLGAITKQGNRYIRKMLVTGATSVLRVAGKRKGALADWINALRARKPERLVAVALANKLARICWAIMTTGEGFRTDTYVKA

SEQ ID NO: 457386 - protein, 378 aa, unidentified
MDVIYPRCAGLDVHTETIVACALWEEEGEIQKEIQTFSTFSKGLGDLLEWLEDHGVTHVAMESTGVYWKPVFAFLEGYVDLTLANPQRIKNVPGRKTDVSDAEWIAKLLRHGLIEKSFVPPAPIRELRDFTRLRKKWVGQLSSEKNRIQKVLESSNVKLGSVLSDLFGVSGRNILARLLEKGYVDKDELDQCLRGRLKTKKQAVYDSLLGTLTEHELCLLRLLWKHVEECERLIEEVDQHIDRLLEPYREEVDLLMTMPGIKKQTAAVIIAEMGTDMSVFETPERAASWTGLSPGNHESAGKRKSTRTTKGNPHLRSALCEAAWSAARSKTHPLSRKFWSLAARCGKKKALIATARRMLVIIFCMISRKESFRQPQLI

SEQ ID NO: 457387 - protein, 340 aa, unidentified
MNSTQVAVDLAKSVFEVAVSRSPGKVHESHRLSRGRFQKYFAVREPVEVLMEACGTAHHWGRTLEAMGHRVRLLPPGDVSRYRDGNKTDRADAKALLEAARNDAIDAVPVKSLDQQAIAALHRIRSGYQQTRTARINAVRGHLREFGIMIPMGASRVVPMARVALEGDGVPAYLREVLEEVLDEIETLSLKAKAVHRRLERLSKQMPEAQALMTVPGIGVLTATALVSFVGDPRRFRSGRQLAAYLGLTPREFSSGTKRRLGRITKRGNTYVRMLLIHGARSALQAGKRSHEPDDLRTWALDVERRRGHNVATVALANKLARVAWRVWRDQRPFEQRRPA

SEQ ID NO: 457388 - protein, 318 aa, unidentified
MNVIGLDVSKDTIDATLITTKGSKDYIKISNNIQGFENLINWIKTKRIRKIAISMEATGIYYEQVAEYLSALYTVYVINPLKIKEYAKSQFSNTKTDKADSKLIAEFANRHLDKLTPFRPSENPILYKLVNLLQQLKEQQKETQNRLHTAKDIYIKSTHEAIIELLEEKIDQTSKRIEGMIKQKESLNIEYQNLQTIPAIGKETAVILLRHLTDKNFETANKFVAFAGLSPKIEQSGTSVKKNGRLSQYGHRQLKRALFMPALVAYRMNAFPQLVSNLEAAKKPKMIIIVALMRKLAKMAFYIHKTKKPFDKARHQAV

SEQ ID NO: 457389 - protein, 340 aa, unidentified
MVHVGVDLDKRSSQIAVLSEDGEIVQHRLANDAARLEKFFADLPPHTPIAIEASGTWWWLVDLLEELGHQPVLSNPKQTKAIAAARLKNDRVDAERLALLLRGDLLPRVWIPPTALREARELIRHRIQLVWLRGVIRNRLQAMLARRNLQPTSGKSWLTQRGQRELQRLPLGETPSRIREDCGALLPTLDAQIRRLDADLVTRWGADARVRRLTTIPGIGPFIAIVLVLELGDIARFASAKRVASYVGLTPRVRGSAGRVRAGHITKEGNRLLRWVLVLAATQAVRRPGPLRAWFHAVKKRRGKKVARVALARRLAEIVFHVWKQECDYFTVVRHGVVRG

SEQ ID NO: 457390 - protein, 361 aa, unidentified
MNATTVAVDLAKSVFQIAVADDKWKVIETARLTRSQFERWFANRAVSRVIMEACGSAHHWGRWFNGQGIEVVLLPAAYVRAYVRRNKTDAADAQALLEAARASDIAPVRIKSVEQQALQGLHRIRSAWMAARTARINTLRGFCREFGLGIPAGARTGLEAIGRTLADPHSAIPALLVGPMKLLLEEIRLLEQRIAQLEKELTELARHSEACTRLLSVPGVGLLTATAMVAATSGEVSHFRDARHFASWFGLTPKEYSSGSTRRLGRLSKRGDKYLRMLLTHGARAILRAATLALQAGRRLDELRTWALQVQARTNHNKAACALANKLARICFAVLRDHFPYGNPQPRQQKNLERTAYAVAA

SEQ ID NO: 457391 - protein, 361 aa, unidentified
MLQQSNNISFEGQNIFAGFDVHLKSWQVTLLSDTVPLKTFVMKPNPDELSNYLHRNYPGASYHSAYEAGFCGLWAHHRLRSLGIDNMVVNAADIPGTQKDKMQKEDKRDSRKIAIALRAGTLTPIYTPLESTLNDRSLVRFRKTLTQDMGRFKTRIKSFLYFFGIELPDEFKDPSKHWSKRFMSWLEEIEMMELSGKQALMALVQEAHAQRELLKSVTKNLKSLADSDKYNELVRLLRTIPGIGLINAMFILTEVEDINRFPNADKFASFIGLIPMSHSSGEKDKIGSITFRSHDYLRSAFIESAWVTLRMDPAMLLSYQNLVKRMEPNNAIVRIARKMANRTFHVLKQKEDYQLSITGNP

SEQ ID NO: 457392 - protein, 410 aa, unidentified
MHPLIDRCAGLDVHQATVMATVRIPDEHGGRQVITETFGTTTEALVTLRDWLQAYGVTHVAMESTGVYWKPVYYLLEDACTLLLVNVQQLKQVPGRKSDVRDSAWIAQLLEWGLLRGSLVPPAPIRDLRELTRYRKHQTRDRAREVNRLHRVLEDAGIKLSSVATDVMGASGRAMLTALLHGTTDPAVLADLAKGKLRKKLPALRHALAGRFRGHHGFLIGQILAKVDFLDETIATLTEEIDHLVAPFEPMVAKLDTIPGVDRKGAITVIVETGGDMSRFPTAGHLCSWGAMCPGQNESAGKRHSGKTRKGNRYLRTALIEGGLATTRATGTALQARYYRVKRNRGHKKAVVAVGHQILEIAYYIMRDGVSYQELGPDYFDRRHRNRAVRRHVRQLEALGYRVTLDIESA

SEQ ID NO: 457393 - protein, 341 aa, unidentified
MVTKYIGADVHVATTDLAVERNGKILQWYHVPTSVPALREVLAGVASPKVLVMEEGAMAGWLKRNLDADVGRVIVCDPRRNALIAKDGDKSDPIDAAKLATLAAGGYVREVYHSDDEARVELKEWVALYHDRRQEAVRQINKIHAVARGRGVLVPSRARSEPGRSEWVRGIPAVLWRQLSLVFPAYDLAQDLADRALRRVRQLSRDYEVIARWQEVPGIGPVRSATLLAYLDTPWRFRTAAKLCKYCGVGLERRSSGTDRRGRPKPPALHLAWRVNKRLKDAVMGATVTALGGDNPFREKYRRLLCDGLTPGNARHTVARRLLAVLWGMWKTNTSYRPEWV

SEQ ID NO: 457394 - protein, 422 aa, unidentified
MEDERNWFVGVDWASETHHVRVSDARGRKLGARAFAHSGEGLAAMAAWILELTGAAPEAVFVAIEVPHGPVVESLMERGFRVHAINPKQLDRFRDRFSPAGAKDDSRDAEVLGDALRTDPRCFRALQPLDAVVVELREGSRMAEDLKQERNRLGNRVRELLWRFYPQMLALTDDVAAPWFLDLWRLIPTPEKAARVREATVDRLLKRHRIRRLSAADVLERLRTPAIPLAPGTVSAATAHLEAIAKRLDLVNRQMLAVDERLDSLTESLAGAQEGAEGQGPEPRDVTILRSLPGVGRIVLATLVAEAFEALQRRDYQALRCLSGVAPVTKRSGKSRIVLMRQAAHVRLRNAVYHWARVAVQRDPRSQAKYAALRARGHGHGRALRSVADRLIGVACAMLEAKTIFDPNLASERALNLGKSTC

SEQ ID NO: 457395 - protein, 318 aa, unidentified
MKDYIGIDVSKATLDVYDGKKSYKFSNDEEGFNSIVSIVEDISNAVFIFEPTGVYSYALTQFCALNSIAVVIVPPKVSKDFAKSLNVRSKTDKIDAQILYKYQKHIEPNMIKIPQFNEKAIELQEMLNSYEELLDATKRLKNQLESISNDNTLLRTTINNSIDYLMDQANTLFEKIEQILLNDEETKERYNALLTIPSIGKKSAIYLIIFFQKYSGANAKEITALVGLDPVYRESGKYKGRQKISKHGGERLRTLLFLPTLCATQHNDRIKAFYTRLVSNAKAKKLAVGAAMRKLILLAFSIYNSKQSYRALEVEYAN

SEQ ID NO: 457396 - protein, 433 aa, unidentified
MGLIVPTTIHPEREDQPLPYEWFVGMDWGSQQHQVSVLDRDRRRVGERVVDHDGASLARLADWLWTLSAGQPQRVAVAIEVPRGAMVEGLLERGFHLFALHPKQRDRFRDRHSVAGAKDDRRDAFVLADAVRTDQPSFRRLHLEEPQLFVLRELSRAEETLLEDLGRSANRLRDQLHRLYPQMLQLCSAADEPWLWDLIDLVPTPAHAALLSEEQVQRVLKAHRIRRVTGKAVLTCLQMQALPVAPGAAEAAQAHCQLILPCLRVLAEQLQACSQQVSALLSTLAEEPGEGESPSDVAIVLSLPGVGRKITAWLFAEAAQSLTERDYQMLRTHSGVAPVTKQSGKRRLVVMRRGCNPRLRHALYHMARVAMQRDAHFSSVYAALRAKGQRHGQALRNIGDRLLRILMAMLRHRTYYDASWIRCEPVVQMGQKM

SEQ ID NO: 457397 - protein, 416 aa, unidentified
MTQPVLPTLERHLAVDLHKHYLVIGGVNAQQEVVLSPRRIPLDEWLAWAKTNLRASDVLVVEATTNTWWFYDQTYQSVGQVLVADPRKIAWIAQTKVKTDAHDVMKLARLSAANLIPLVWVPPLAVRELRALLAHRRRLVRTQTVLKNRLHSLLHRLQIAPPDGDPFCAKHRAWWARLSVSPTERLHVKHDLATLDQVVEQLGEIDDELRRLSCAEPWSDVAPYLLHLPGVGLIVAMTILAAIGDVTRFPTSKKLVGYSGLAAGVHDSGQTHRTGHITKEGRKELRYVLVEAAWHAVETNDFWKAEFERLCRRMQKNKAIVAIARQLLVVIWHVLTEHATDQHADPDMVAFKLMTWSWKLTMEQRGGLTTRQFVRYQLLRLGLGHDLTHVIRGGGKYLIAPPGEVLKLKPDLPHVA

SEQ ID NO: 457398 - protein, 357 aa, unidentified
MSYIGVDLHSDKFTAAFRDKMNNDTLKSYYLDKYEIDNFKKSLKKDDYIFIEASTPTFAFTDLLKDTVKKTIVIDPFKFRAIADSRKKTDKIDARQLARMGKYHVEGDKKFLPEVYVVEKRIRKLRSLFTTYRLLNKEITMIKNRIHSLFKQNLKPYSKTHIFNDIMTGFKPIDLDEEYKIQVEVLFDVLSKIEEKKSKIKEKILLTGEPFIKDIDILVSISGISVFVALGLISDYATVDRFQNAKQFSKYLRSTPKSEESNKKVRTGKTQKNGRKLSIELMLQSINHFRRESLFIDRFYRKLKKGKGGCKARIAVVRKMFVAIYFMLKEREYYRYMNKKLHDKKMREYKRFLVKNK

SEQ ID NO: 457399 - protein, 401 aa, unidentified
MKYVLALDVAKGKSMFMLSSDVGEILLEPTEYTHNKSDFEKIDSNINKLNIKDNLTIIMEATSIYHKAPERFFKENNYHVIVFNPLIGKEITNTIRKTKTDKQDCIKLTNLFWKGSIPDRKYTEDKIYTKLNELSRQYYHLDEGLTRHKNRYKELLHLCFPEFELCFKDGKIYDLTALNFIKEFPHAYIIKGKRVNALAYNMANTNNRHLNYYKRKANVIKEYAINSYPGVSQNSKDVDNLKQLADVVVDLTKRKDEVKNQVIQLAKETKNYECINSLFGIGELSASLIIAELKDITRFNNIKQINASCGLDPTIIQSGKSINYHGPISKRGNRYARKLLFNCSRNIITLSAKCNKENSIYVYYLKKKQEGKHFYACLTACSTKLIRIIYALCMNNSTKQN

SEQ ID NO: 457400 - protein, 411 aa, unidentified
MVKENFIYVGIDLHKETHTAVMIDCYNQKLGEITFPNRPADFPKLVTKVKKCNTDAKEVVYGLENAYGYGRPLAVWLIDKGYFVKDVNTAISHRQAKHRGAMYRKSDSDDAEAIALATLNMLDKLPDACPNDAYWSLGQLVHRRDNIMKQRTRLVNQLHEQLCIAYPSYKQFFNDISRPTALYFWEHYPSRKYLKGKSVEDLRAELVPVSHNKCSTKTCEKILDAVASDKVKNNAYQDARDMVTLSIVSDLQHYDSQLAEVDKMLEQMYKMLGCTLTTIPGVNVITAVKILAEIGDIKRFSNANKLAQFAGIAPLHLSSSGKGKDVATKQGNRRLQATIYFLAIQMVQVSSKGTPRNPVVRAYYEKRKAEGKTSQQALICISRRLISIIYGMLKNGTEYRMPVVENAGENR

SEQ ID NO: 457401 - protein, 348 aa, unidentified
MVRYVGVDVGKAKCRAALMNQNGAVESEFFFENSSKGILKLVSALTSEDKVVMESTGNLWLNIYDTLDAKSIRVVLANPLKTKAIASAKVKTDKLDARILAHLLRADLIAESYVPPGNVREMRALVRHRLSLVKMRTMVKNKVHALTDKYGYRCEFSDMFGKAGTQWLRAQELSELDRLLLENHLSLIESINMQICRVDVAIRERASEDEDVHLLLSLTGIDVYTALLLRSEIGPIERFPDYKRLVSWAGLAPSVHQSGNVEYHGRITKRGSSILRWALVEAARIAVQHDDRMRAFYERVAARRGDQKAAVAVACKMLKIAWFMLSRRETYGNVNVKRYGEKLKKIGT

SEQ ID NO: 457402 - protein, 331 aa, unidentified
MKIYETIGIDISKLTMDVSIHSNKAYLKVENSIKGFKKMIKWVYKTSSFTKEEILFIFEHTGMYSYQLSVYLTQQEIPFAMVSGLAIKRSLGIVRGKDDKVDSKNIALYGYRMREELSPTIIPIAKLQSIKFLLQMRERLVKQRAGYKASYKEYKRILVRKENLVLLETQEKMIHYLTKQIKIVNDKIKKEIKQDEQLYEMYLRIISIKGVGTQTALIMIVTTNGFTKFVSWRKYASYCGIAPFPNQSGSSLRGKTKISNLANKKIKSLLDLCAKSAIQFNPEMKAYYNRRVSEGKNKKSVINIIRNKLLARIFAVVKRNTDYVDIFKFAA

SEQ ID NO: 457403 - protein, 440 aa, unidentified
MRRRAPVSDRPGAGLVAAGSLLPPLGVALSVALPPAQLFAGLDWAAEVHAVCVMDHTGTIVDRFTVKHSADGIAMLIRRLAKLADPADVQIAIERPNGRLVDLLLEAGHPVVPVSPNAIKAWRDGEVLSGAKSDAGDAAVIAEYLRLRQHRLRVATPYSDDTRALRTVVRTRTDLVDMRVAATNQLAALLEDHWPGAKAVFADVESPISLEFLTRYPTPNSAAHLGEKRMAAFMVKHGYSGRRPAAVLLERLRSAPAGATGQALTEALRDAVLALAGVLKALNTAVRDLDRSSAAHLGEHPDGEIFTSLPRSGQINAAQILAEWGDCRQAYETPDSIAALAGCTPVTKESGKHRAVHFRWACNKRFRVALTTFADNSRHSSPWAANIYNQARKAGKDHPHAVRILARAWIRVIWRCWHDAQPYDPAKHSAAAALNEPVAA

SEQ ID NO: 457404 - protein, 382 aa, unidentified
MRYFGLDVHKSYCEGAELLSDNTVRRFRFSNEKKEWKRFAKELDGNCKVALEATGNASMIYDILTARGAQVVVVNPIRTRAIAEARIKTDKVDAEILVRLLAADFVCASWVASKEERELRTLLHHRAALKKEVVGVKNRIHAVLARHAIKVPVSDLFGVKGRQFLRELEELPGVEKIVLTSNLKILEALEEEIAAIEKELNLRAIDLPGVETFLGIPGIDVLAALTILAEIGDIKRFASAKKLASFSGLVPSVHQSGKTRYTGHITKAGRSMLRWILIQVAQVAVRQPGALRDFYLRLKKRKGHKIAIVAAARKLLTIIWAMLTKNTEYRYIKEDLQQKKIRRMHKRALPYKVDNDLPQKITSLIGEEQTMTEIPSPAAQII

SEQ ID NO: 457405 - protein, 410 aa, unidentified
MEVLHPRCCGLDVHKETVVACLRHVSGGKVNTEVRTFETTTASLIALSEWLAQNGCTHIAMEATGIYWKPVWHILADGEFQLVLANSAHVKNVPGRKTDVNDATWLAELLAHGLIRASFVPDTQTQELRTLLRTRKQLVREKASHILRVQKTLEDANIKLESVITDVMGMSGRAMIEALIAGESDPAKLASLANYRLKTSQEKLREALRGRVTKHHRFLLRLHLNQIDALDAAIATIDLQVEAGIAPFRAAVEQVSSVPGIRDIGAQVIVSEIGTDMSRFPSDGHLISWAGLCPRNDESAGKRRSNRLRKGAPWLKTTLVQCAWAAVRKKDSYLRAQFLRIKSRRGPKKAIMAVAASILTAIYHMLKDGTLYQDLGSNHFQTRSKGQQTQRLVKRLADLGYEVALKPLAS

SEQ ID NO: 457406 - protein, 419 aa, unidentified
MTTSSDLSFTAFVGIDWADAKHDVCVQEAGSKRREFACIPHQVDRIEEWACSLQERFGGRIAVALELAKGPIVYALQKYDFLVLFPINPSMLAKYREAIHPSGAKDDPSDAQIALELLVEHRDKLSVLNPQGVEMRTLLFLVEERRLLVNDRVRFTNRLGNALKQYFPQAVEWFDRRDTILFCDFITRWPTLPQVKRARTASLERFFHEHNMHFPSVIEERIKGIRVALPLTEDPAVIGAHQLQVQVIAEQLRATLHAIDRFDEEIAEIAPKLDDFKLFSALPGAGKHLTPRLMVAFGEQRERFKSAAEFQQYAGVAPVTIRSGKKNWVHWRWACPIFLRQTIVEWAAQTINKSYWAGAYYRQQRAKGNSHQTAVRSLAYKWVRILYRCWQARTPYNETTYLNALQKRGSPLLQLAQMA

SEQ ID NO: 457407 - protein, 392 aa, unidentified
MQKAKNNKQPKELSIQIINQNAAGIDVGDRLLSVAVPPGRDEVSVKEFGAFTEDLHALAHWLKKCNIETVAMECTGVYWKNIYTVLIQYGFEVYLVNARHTRNVSGKKTDAKDAQWIQRLHTCGLLNSCFLPDDRTQTVRTLVCWRRSLTQDSTRYLLRLQKAVEMMNSKLHAVISNLTGKTGTAIIEAIIAGERKPENFLPLVRKGIKADKDTLLKSLQAHWRTEQLFLMEQSYRIYQFIQQEIKHCESKIEEALQSFIAASNEGIIEQNDPSPGRTTKNKLSFDAPIYLEKIHGIDVTAIYGISEIAALEILAETGTNLSKWPTENHFVSWLNLCPNNKISGGKLISSQMLKKKPNIASQAFRYAANTLQRSDHWLGDYFRRMKAKGGNK

SEQ ID NO: 457408 - protein, 424 aa, unidentified
MNLTQNDRLKQVTADTLIVGVDIGSKTHFCRAFDWRGFELSRKVFRFSNTGVGFLTFLRWTEEVMNKTGMKNVIVGCEPTGCYWLTFQKFLQDHEVQLVTVNPFTVNRSKELDDNSPEKSDLKDPKTIALLVKDGRYSTSYLPRGVYAEIREASVCRDQIMKQHVRLSNQIQGWLQKFFPEYLECYADWDSTSGLLLLKEAPLPQDILKIGAGGINQIWRNAKVRAAGIKRAQTLIEAAQDSVGLEAGEAARLEIWVLVNDYLLKAEQLKRLDEYLEEKVKEVPNVEKLLAIKGVGMSTVIGFVAEVGDIGRFTDPKQIQKLAGLEIVKKSSGKKKGQPRISKRGRRKLRRTMYESARALMNWNPAFQDVFLYYRNRKKNPLGGMQAKIAVACKAIRIFYVVLETGCDFDEEKFRKDIIRQEAA

SEQ ID NO: 457409 - protein, 328 aa, unidentified
MNKERFCVGIDVGKDEVMVAVVGRRPMAFGTSLPEMKRLMKWVKSHAGSRTIHVGMEATGVYSGRIALPLCEYSGVTVSVINPAQIKAYGRATMIRTKTDGVDAQLICDFVRSQSPVAWTPPSDAQRQLMALVTHADAIRNQIRQWTNRRHAHQHMIQLPTVIAESTTQLIEALTTELATTEAAITQVCQSDTTLAEDVAIAVSIPGIGKHSAAQLLAHGGRALTQRTRRQLDAHAGLAPAQRQSGTSVRGKSHIAKAGNARLRRALYMPTLVAIRYNPLLKRYYDRLVERGKPKKLALTACMRKLLNILRAMLITRIPFNPTYQPLT

SEQ ID NO: 457410 - protein, 343 aa, unidentified
MAIFVGLDVSLKMTSICIIDADGTLVWQGKVLSEPPALIMALWPYRDRIKLVGIEACPLSEWLYAALVESGIPTVCIETRHAQRFLSSRPNKTDKSDAHGIGEMMRLGHFRPVHVKSKASLMLRTILGARQNFVGHMIAVEQTIRGLLKVHGLKVGAVHRCAFAARIECLLADAPELRIAIAPLLETRNMMRKQQALLDRQMSQLARKDDVCKRLMTISGVGPIVSLAFKAAIDDPARFRSSKAVAAHLGLTPRIYQSGEIDRSGNISKCGDTAMRHALYEAANSHLRVSKKWSPLRAWGVKLAKRIGAKKACVAVARKLAIIMHRMRVDGTEFHFSKAPTTA

SEQ ID NO: 457411 - protein, 355 aa, unidentified
MTGTKYIGMDVHKESISLAVRNAAGKIMMECVIETKASVILQFIDGLRGDLQVTFEEGTSAAWLYDLLKPHVTKLVVCDPRKNASMREGNQSDKIDARRLAELLRLNHLHPVYHGEHGLRSLKELVRSYLTITKDLVRVMTRVKAVYRSWAIPCSGKQVYAPRYRAAWLGKITEPGVRRRAEFYYQQLDALRTVRQQVRRELLAEGQKHQAWKRLCQIPSIGPIRSAVLLGILQTPHRFRTKRQLWAYSGFGIETQSSADHRSVNGQLQRAKKQSSIRGLNRNCNHDLKNLFKGAAIVASSKPGPLQEFYTTLLTKGSRPEMARLTLARKIATIVLMVWKRGVRFDAQYLKPQTA

SEQ ID NO: 457412 - protein, 320 aa, unidentified
MNPQYDPELYVGIDVSKANLDVAIGQEGETWQAANTAGGIQATVKRLQTYQPQMLVVESTGGLEKPLVKALQAIELPVAVVHPGRVRKFAAGVGWLAKTDRLDARLLAWFAFAAHPHPKPQPNPADVALSELVRRRNQIIEMLTAERNRRSTCPDSMQDALEEHIAWLTAERDRLTTQIETTLSNQPEFHEKDAVLQSAKGVGPILSATLLAELPELGIYSHKQIASLVGVAPFSKDSGRHHGKRQIKGGRSGVRCVLYLGTLSAIRYNPLIRAHYQQLVDRGKLAKVAIVACMRKLLVILNAMLRDMRHWQLPSTPIHP

SEQ ID NO: 457413 - protein, 340 aa, unidentified
MMKKRYLGVDLHRNCFTVYTRQEDGSGESRQWSIHSLKAFAKTVKVRDEVAVEATGNVRLFCEALTERGCRIVVVNPHQFEVISRSVKKTDEHDAKVLAEFLAKGLLPEVRMKDEIHARVASLAQTRDKLVKLRTTLKNKVNNLLAARGILIRKESLSSEKGLAEVLSAPVSELERMELEILVGEIRHLNESIKKLEGLLRDQGPKLPGWENLTSIKGIGDTGASILLSTIGRIEDFADEGKLAAYFGIVPRVSNSNEKERSGRITKRGCKLGRTALVQCALIAARYSPYLQNYYRRIAATRGTGKAIIALARKFLSIIYKTLKNNWIFEDFPQFVLVNE

SEQ ID NO: 457414 - protein, 425 aa, unidentified
MNYKQNEKINQVKESTLVVGIDIGNTKQYARAFDWRGIELGKVFTFSNSREGFEAFKAWMQHLQDKYRKSDVIVGIEPTGHYWFDLGAYLEDEGILLVMVNPYAVKQTKELDDNSQSKNDRKDPKVIAKLVTEGRYSAPYTPDGVYADLRIMVTNRKRLIREMTQIKNRFARWFAIYFPEYTDVFGDYEAQSSMLLLKKVCTPEAIVELGAEKINQIWRDAKLRAVGMKRATTLCETAKRSIGLKKGSSAARYEMKLLLEDYEYKKAQLDAVMEEIEKLCRKIPESEQMLAIKGIGVITVAGFLAEVGDVRRFESPRQIQKLAGLSLRENSSGKHKGQTTISKRGRSKLRAVLFNAAIPLIAKNPEFKSLHEYYTTRANNPLKKKQSVIAISCKLIRVFYAILANGVTYDAQKMLSDIHRQPQAA

SEQ ID NO: 457415 - protein, 342 aa, unidentified
MQTITTIGLDIAKSVFQVHGVDAAGQVVRRQLKRRYVLAFFQKLPPCLIGIEACASSHHWSRELQALGHTVRLMPPAYVKPYVKRQKNDATDAEAICEAVTRANMRFVPTKTPEQQSCLMLHRTRHLFIRQQTAVINAIRAHLAEFGIVAPVGRKGVTELLHVVADPSDGRVPEVARACLAALGTQLLGLKEQIVEFDRLIMAWHRSNETSKRLHYIPGVGPLLATALAASVADPQTFRSGRNFSAWIGLVPKQHSSGGKDRLGSISKQGDRYLRSLFVAGALSVIRYAKIHGTKHRPWLTALLGRRPTKVAAIALANKIARMVWAMMVKGERYKEPVALAA

SEQ ID NO: 457416 - protein, 388 aa, unidentified
MPQWPRPKPLAKDGGCPPYDDETGFWLAPAPGIMERRTAMQHYAGIDVSLELLSVCIVDTKGKIVKEAKVGSDPDTLVAFLRGLDLAIERIGLEAGPLSQWLHAGLTSAGFEAVLLETRHVKAALSAMTVKTDRKDARGIAQLIRMGWFRAVHCKSAGSQEVRALLVARKLLLSKLLDVEFSIRGILRGFGLKMGMVTRKRFEARVRELYAGHAMLEQICSAMLTARSTLQTEYAKLHKALLVIVRKDEVCRRLMTTPGVGPLVAITFKTGVDDPSRIHKSKAVGALFGLTPKKYQSGETDVTGGITRAGDEMVRTALYEAASVLLSRVTRFSALKRWGMDVAKRRGTKRAKVALARKIGVILHRMWVDMTSFRWTKGAPTTMRLARV

SEQ ID NO: 457417 - protein, 322 aa, unidentified
MTSASQTPTSYVGIDVSKDKLDMAVEGSADIHTFANDAAGITQLIGRLRQLHLSLIVVEATGGYERAVLNAALDAALPIARVQPSRVRHFAKAQGLLAKSDGIDAHLLALYARCLQPAVSEKRSKNEVELDALLVLRRQLIDARTAHTSQMQMAESDFVRDQLKQLLRQIHDRIKKVDKHIARLIDSDDDLAGRRDLLLSVPGVGQTTAATLAAQLPELGKIDRCQISALVGVAPYDRDSGHFKGKRSIFAGRATVRSVLYMATITAIRCNPVIQRFAERLQKAGKMPKVVITACMRKLLTILNAMARDGLTWSPQCHLQTT

SEQ ID NO: 457418 - protein, 349 aa, unidentified
MSQSLNSAIAVIGIDIGKNSFHVVGLDDRGAIVLRQKWSRGQIEVRLANMPPCLIGMEACVGAHHLSRKLQAFGHDARLMPAKYVRPYSKGQKNDFRDAEAIAEAVQRPTMKFVATKTAEQLDLQAMHRVRERLVSQRTGIINQIRAFLLERGMPVRQGLRFLRAELPRILATPPDVLSARMVQVISDLAEDWRRLDHRIDHLSNEITVLARQDTGCERLMSVPGIGSIISSAMVAAIGTGDAFSKGRDFAAWLGLVPKQISTGDRTILGKISKRGNRYLRVLFVQAAWVVLIKPMSWERHGLKHWIEAAKKRLHRNVLAIALANKLARIAWAVLAGSRTFEANKFQAA

SEQ ID NO: 457419 - protein, 406 aa, unidentified
MRVVHERCAGLDVHKSSVVACALLGSNRELHTFGTMTGQLEELAVWLQELGVQAVAMESSGVYWKPVFNILEAAGFDLVVANARHIKAVPGRKTDVKDAEWIADLLRHGLLKPSFIPQREERELRELTRYRRTLIEERAHEVQRLQKVLEGANIKLEDVISNVVGLNGRRFLAALTAGDYDPEAVAATANYGLQRKKDLLAQSLRGSIGPHQRFLLDQLLAHIDFLEQRISALDLEVAQRTRPFEAAMARLDQIPGIGSRAAQEILAEIGTDMSRFPTHRHLASWAKVCPGNNQSGGKRRSGYAGEGNRWLRSVLVECAWCASRTKNSYFKAQYHRLAARRGKRRALLAVGHSLLTVIYHLLRDGLVYQDLGATYFDHRDRQLIAHHAVRRLEGLGFQVTLTEGVA

SEQ ID NO: 457420 - protein, 407 aa, unidentified
MRLFVGDDWAEDHHDVELMNEQGRVLARKRLPEGVAGMARLHELIGEQLGEGADDAEVVIGTETDRGPWVAALVAAGYTVYGVNPLQASRYRERHGVSGAKSDTGDAHMLTDMVRTDSHQLRAVAGDSPGAGAVKVVARTHKTLIWERTRQVQRLRHQLREYFPAALEAFDDLDAPDALELLARAPDPARAARLTRAQISAALKRARRRDIPGKATAILTALRGAQLGQPPAITAAYAATVRSLIAVIITLNEQVKILQGQVGTDFGQHPDAEIYLSQPGLGPVVGARVLGEFGDDPHRYASGKARKNYAGTSPITRASGKKKMVMARFIRNDRLIDALMAQALSALGSSPGARAFYDAQRAAGVEHNAALRKLASRLVGILHGCLKTRTPYDESTAWSHRENKLAA

SEQ ID NO: 457421 - protein, 310 aa, unidentified
MTDTIGIDISKTTLDIYRISDGKRARFGNDASGLKAMRKWLGAAPLRVVYEATGRYHRDLEAALAAFGHHNVKVNPARARRFAQATGQGAKTDRVDAEMLARMGTVLGLEATPVKTDELHEIKELHVARVALIKDRTACRNRIGMARNKIVLAQLRARLRQIDTQIAQIDRELRSRIKADPGLARRYEILTSIPGVGPVAAIALIIEMPELGAMSSKEAASLAGLAPITRQSGTWKGKARIGGGRTALRCMLFMPAVIATRFNAPLQQVHRTLIAAGKPWKVAITAEMRKLIDLANAMIRDDRKRAEINP

SEQ ID NO: 457422 - protein, 381 aa, unidentified
MRSLCLWLAVQIERYLKPLVARDEFASKDDRQTACRLFSPAVFYHTFEGGSPLITVFPTWTAYVGIDVAKTKLDVVLRLGERAIHQVFANTTDGFAALDGWLSSFALFPAQVRVCLEATGSYSDAIALDLFARGSTLSVLNPAVLVDYRRSQNIRSKTDKLDAHLVARSAQEKQPRAYKPLPAEILTLRALLPHRDDVQHMLRQERHRLEAGRMTDGIEQRVRTPIQDLQADFKASEGEIKAHPHLKAIWRRLQTIPGIGWLTAARLLAHLGEIGRFDKVGSLVSLAGLAVKEHRSGSSVRGKAQIDRQGRKDLRRSMSMSAVVALRVSPHIQQWAKRLQAAGKPKMSILVAIMRKLLHIVYGVWKTEQDSQPALAFPVAA

SEQ ID NO: 457423 - protein, 350 aa, unidentified
MKVAQIGLDLAKDVFQVHGISTDEAVVVRKRLTRANLLKYFATLDRTEHCIIGMESCCGSDHWARELIKLGYDVKIMNPIFVKPYVKSNKNDMRDAEAICEAVGRPTMRFIPIKTLEQQDLILLHKQRYQMIRRRTAQANQMRGLLMNYGIVIAKRISCLRQKMPLILDNEQGLLTTAAIAAFQEMYTELIALDAKIAQMDKRLESYAKSRTDCQRLMTIPGIGVLTATGLVAWLGNGSQFKRARECSAYLGLIPKQYSSGNSERLGGISKRGNRYLRMLLIHGARSDLLFAHVRQNKEIIRVRDEWSIAIEKRRHANIAAVALANKNLRVAFALLRDGTEYQAEARIAA

SEQ ID NO: 457424 - protein, 342 aa, unidentified
MNIPVRIGMDTSKSVFQLHGVDENEVVVVRRQFRRAEMIRYFERLPPVLVAIESCGSSHHWARLLQSFGHEVKLIPPQYVKAYVKRGKNDAADAEALCEAVTRPSMRFVPVKSKERQAACMLMTVRERLVSVKSQLSNAFRSYAAEFGIVAPAGRQNVTALIKRVLEDNRLPEMARDLFRLQADEYAGVEARLAKIEAKLMKWHREDDISRRIATIPGVGPIGSSMLSMKAPPPETFRSGRDFAAWLGLTPKDHSTGGRQRHGGITKAGDSVLRSTLIVGATALLRHIRKGRHKPTPWLASLLERKPPKLVAVALANKFARIAWRLMISGGVYNRPVVAMPI

SEQ ID NO: 457425 - protein, 329 aa, unidentified
MQNFIFIGTDVSKLTLDHGIHQGMVHQKTANNNAGFKSWLQWALGFGRKEQLWVVMEHTGYYSYQFEMFLHQHQVPYTKVAALEIKRSVGLVRGKSDKVDALLISRYAWMNHDRLEPQQLSAAVMTELKDLVNLRDKLVRDRSGYKARMKEQAATRKYAKSHIQNKVQLRMIKELTTDIQEVEAAIKGLIKEDDALFNNYKLLLSIKAVGFVTAVYMLAYTDNFRKFLNSRKFACYAGLAPFEHTSGTALRGKNRVSPYANKKAKCLLNLAASVAIQHNQELKIYYRQRVSEGKSKMGTLNIIRHKLVDRMFAVIKRGTPYMETLTTAA

SEQ ID NO: 457426 - protein, 363 aa, unidentified
MKIMVGIDLHSNNALCGLMDESGRRIIHKQLPCDLAAILQLLKPYRKRIATIAVESTYNWYWVADGLEDHGCHVVLANPARMQPYSGKKHTDDVSDAYFLAELLRLNVLPTGHLYDRKTRPVRDLLRRRLLLVRQRTTLILSFKSLNERTLGQRVPLARVKTLSAEDAQARFSEPADQLLAGEQITLMDHHTDSITKMEQHILGVAGKWSTYQRLQELPGIGKILGLTIALETGDAKRFADAGNFASYCRCVKSLRQSNHKKKGENNRKCGNKYLAWAFVEAAHFACRHDDPCRRFYDRKKQQTNPVIATKALACKLAKAAWHVMAQDAPYDAARVFGPGKKKDFGETGREPAKGSGHPSQQD

SEQ ID NO: 457427 - protein, 408 aa, unidentified
MSIVFGIDVSSRDSSVCVLQSGVTREYKITNDTIGFKTLLIDLKEYAEHPQIILEATGIYSRRITRFLDEYDYDYVLLNPLKAKKEINQGLRRNKTDRNDAYHLALAQDRNQHQPNRKEPEAYHQLQSLSRAYEELTHDIVSSKNRLHKYLQLTFPELETIFNNSRGVNYWYLVELFPHCQDVRNLDVSTIAKQIKDFKGYGINRAQKLAIKLKHLADLAYPAVDQDDPERDEVVYYANRLLRLTADRERRSEAMIKLAKTLPNRDLEILMSIPGIAEITAVRILAELGDIRRFSNPNKINAFVGIDPGRYQSGEKDSSLRISKHGNAVARKILYRAIGQIDLAAKTSPCHIADYYERKKQFSQTKGFKKIAIASIHKLLRTIYILIITDQMYDYNVANNNQKDFCRN

SEQ ID NO: 457428 - protein, 454 aa, unidentified
MGQSKTNKRGGKKRFSTINPNAAGIDVGSQFHVVAVPGDRDDEPVRSFQSFTGELHRLADWLIACRIDTVAMESTGVYWVALHEILEARGIAVIVANARDVKHVPGRKTDVNDAQWLQQLHEYGLLRGSFHPPADIAALRAYLRQRERLLDYAAAHIQHMQKALTQMNVQLHHVVSDITGKTGMSIIRAIIDGVHDPVELAGYRDVRCKASVETITQALEGHYRAEHLLALSQAVALYDTYQGHVGECDRHIETLLVRLQAPQLPETPLPAPRHKTRQSNALSFDVRAALYAVIGVDLTQIHGFGPYLALKLVSECGTDMSRWPSAKHFVSWLCLAPGNKISGGKVLSAHTRRSNNRATALLRLAAVNVGKTDSALGAFYRRLAARVGKAKAVTATARKLAILFYNTLRYGMDYSDPGASYYEQRHRARVLHNLERRAKQLGYTLEPASEAEVS

SEQ ID NO: 457429 - protein, 342 aa, unidentified
MSHYAGIDVSLKESSVCVVDEKGKIVREAKVLSEPDALVQFFSELGLSLTQIGLEAGPLSQWLHAGMVKAGLPVVLLETRDVKAALSAMIVKTDRKDARGIAQLLRMGWYRPVHCKSLPAQEVRALLAGRKLLQTKLLDIELSIRGLLRGFGLKMGEVSKGRFAARVEELIAGHAMLGQVIGTMLTAREALRAEFNRLHRAVLAITRRDAVCQRLMTAQGVGAVTAITYKAGVDDPTRFAKSKSVGAHFGMTQKRYQSGETDVSGSISKVGDVTVRTALFEAANALLTRSQRFSSLKHWGLNVAKHRGMKRAKVAVARKLAVILHRMWVDETDFRWGQEQAA

SEQ ID NO: 457430 - protein, 356 aa, unidentified
MAVYVGIDVHKHYCQAALMNQQGRITHELRFDNNAQGTTSLIKLAKNVDPCIRAVVEPSANFWIRIYDQLEDEGIDVKLSNPLRTKAIAEARIKTDRIDAKTLAYLLRGDLVAESYVPTRKNRERRALIRHRVSLIQMRVDIKNRIHALLDKHELQHDYTDLFGKQSLEWLRSLQLPTTDQQILQSSLHVAETLTEQIRSMDIQIAKDATSEEKAKLLMTMPGVDYYAAMILLSEIGDVHRFSSDEKLVSWVGLAPQVHQSGETNWTGHISRKGSKRARWILGQCAQSARQHDPRMREFYERIERKHGSQKAIVAVARKMLAIMYVMLIRNEPYHGENRELTERKHKRLDTLANSA

SEQ ID NO: 457431 - protein, 370 aa, unidentified
MEKRITYIGMDVHKRDISVAVANGGLRGEARYLGVIANTPGALSKLSSKLSDKGGTLRFCYEAGPCGYGVHRHLRGLGHSCVVVAPSLIPRKPGERIKTDRRDAMKLAQLHRSGELTPVWVPGLDHEAMRDLVRARSAAMRSVRRARQQLTGFLLRHGRIHGGKHWTVAHRRWLSTLRFEHPAQQVVLQDYIHAVEDGEARHDALLAQIEALVPHWSMAPVVGALQAMRGVALIVAVTLVAEVGDLTRFDNPRQLMAYLGLVPSERSSGETVRRGAITRAGNGEARRVMIEAAWSYRMQARVSRAHLARLEGLPKEVRDIAWKAQVRLCARFRRMTAGGKPPPLVVAATAREMLGFAWAIAHHVTPRKSS

SEQ ID NO: 457432 - protein, 382 aa, unidentified
MKKTHTKQSKSIAKSGNKTGIDFTSFIGVDLHKTTVTLRAVDPEENIISSLTIDTKCVNKIEDWLNSLPKPRWMAVETVSFVEWFIDRYRNCVERIDIADATELANRRGKRRKNDRNDSLDIAVRLVRGNCPLGYIADEPLMQLRKLGRHWRQLSKTLSRAKHSMKSIFHAANIRGPKLDAASAQKWLLARGDMLKNVQRQAFADFIDIISLIERQRESLRRNIIAANRRDEFSAVITMLKSIPGIADIWACIIAAEVGPFDRFPNADALEFWAGLTPDNKESAGRTQSGKITKAGSATLRWALCKAAVTLCKSDAGQEAARQRLIKRTGKAKANVAMGRRLLRIIYAMMRDGCLYECKEPTNHLKNANKAKAKKRKQKEAA

SEQ ID NO: 457433 - protein, 322 aa, unidentified
MCKIIGIDISKQTFDVGFKKETTWHHFVFENTIKGFNQLLSKVEVDDWILMEASGPYYLQLALFFNKKNINVCVLNPLIIRRYSQTRLYRAKTDKKDAQTIAEYGAQYDLKKWQPETEEIIEIKQLYTALELINKEIHQSKRQLESFVSSGVLTKELASTLKSIIKFLKAKSNKLEQQIASKAEKNYKSTLKRLKSIPGIGTKTAIMLTVITNDFDKFENHKQLIAYVGFSPRLYQSGTSVKGKGHICKMGKSQIRKLMYLCSWSAKRCNPDCVKMYNRLKEKGKPERVIKVALANKLLKQAFSIIKNKTYYTENFVVKACF

SEQ ID NO: 457434 - protein, 342 aa, unidentified
MQITTIGLDIAKNVFQVHGIDANEKVVVRKQLRRGKLMAFFEALSPCLIGIEACATAHHWARELTKLGHEVRLMPAKDVKAYVKRNKNDAADAAAICEAVRRPTMRFVRIKSPEQQGQLMQHRTRDLLMRQRTQVINALRAHLAELGIVAAKGDSGVKELLAIVADEEDTRLPIDARASVIVLAAQLGALQTLIGSIEKRIKMQHRANEASRRLETIPGIGVIGATAIAATVPDPTVFRSGRDFAAWIGLVPRQDSTGGKPKLGAISKQGDRYLRRILIVGAIAVLRRAQENPGKYPWLTQLLARRPFKVVAVALANKMARMAWALLAHGGTYRAPELAQAA

SEQ ID NO: 457435 - protein, 355 aa, unidentified
MGLRFNDLYSKICSVSNDLTKVKVGLEATGHYSCNLLGYLLDKGLPTFLINPLHTNLYRKSLSFRQTKTDKVDAMTIASMLMSDVNLKSYSDTSYHNEELKSLTRYHFDKVKEHAKLKTSVSRLVTILFPELEKLIPTLHMKSVYSLLYEMPSAKAVSNSHLTHLTKLLESTSKGHYSKETALLFRNAARNSIGQDMPAKSLELKHTIKLINELTNEIENEIKIIMDSIHSPILSIPGINYRMGTMIIAEIGDFSRFDSPDKILAYAGLSPSTYQSEQLDSSYSHMKKRGSRYLRYALFNATIYVCRWNPEFNSYLAKKRAEGKHYYVAVSHAAKKLVRLIYHLEKTEQTFIKAS

SEQ ID NO: 457436 - protein, 344 aa, unidentified
MLKFNVIGIDLAKNVLQICVISKHGELVSNKIVGRQKLKEILAKSSPSTVGIEGCGSSHYWGRLAESFGHDVRIISPKKVKAFLTGHKTDANDALAIANAAMQIGLKYSKPKNEEQQTLQSLEASRVFLSRNITSLGNHIRAMLYEYGIVSAKGAAGLRKVVQETFDEKNSLPTCLISTLQQLWAQYLNLKDEFTKLEKAKNSIVRQVKPCKQLMALEGVAEVCAGMLYSSIGNGKQFKNGREAAAFVGLTPKQYSSGGKVFMMGIDKKGGIKELRAALYQGAMSIVTHLPDEPKTVKQSWLIQLVKRVGIKRTCIALANKTVRTAWAMLRHESKYEQQQLITA

SEQ ID NO: 457437 - protein, 313 aa, unidentified
MTLSSDYVGVDVSKQHLDLAMAGARVFRMPNNPAGMSRLVARLAGLQRPHLVCEATGSYTRLMAREMARQGIAFSAINPRRVRDLARADGQLAKTDAIDAAVILRFACLMQPEPSPAPDPHTLEMADLVRRRRQMVDMLASEKQRREHPETARVRTSIDAHIDFLSTQIAEMDQAIATQIRSDGALQHKVELLITIPGIGQTTAAVLVAEMPELGTIGNKQAAALAGVAPFNRDSGETRGQAHIAGGRLSVRCALYMATLSAIRANPPIKAFYQRLRDQGKPAKLAIVAAMRKLIITANAVLASNTLWKTNMD

SEQ ID NO: 457438 - protein, 319 aa, unidentified
MFIGIDVAKAELVVGVRPTGTGWTAVNDDQGVRDLVTRIQALGPTLIVLEATGGYELLCVAALAAAHLPVVVVNPRQVRDFARATGQLAKTDRIDAEILARFADTVRPEIPTLPTVEAQALDALLTRRRQLLEMLGAERNRLGQVFGSGKKPVTKSLTAHIAFLEKALARADAELDAAIAQSAIWKAQDALLRSVPGVGPILSRTLLADLPELGRLSRREIAKLAGVAPLSRDSGTMRGRRFVQGGRAPVRAVLYMAAMVAARRNPVIKAFYARLVAAGKPKKLALVACMRKLLTVLNVMVRTTTPWNPGFATMSVVTA

SEQ ID NO: 457439 - protein, 362 aa, unidentified
MEYFAGLDVSIEETAICVVGDDGKVVLETEVPTEPELIAEALERFAGRLRRVGHEAGSVSPWLHAGLIELGLPAVCLETRHVRAALSAQRNKTDAADALGIAHIMRTGWFRQAHIKTEECYRIRLLLIQRRNLKRKFLDIENAIRHSLKVFGIRLGKVGRGSMAKAVREAVAGDAMTAGLMDCMLRARAALWEEYLILHKLVTQLAMRDELCRRFMAIPGVGPVTALSFKSAIDDPTRFRRSRNVAAYFGLTSRRWQSGSSIDVKGRISKAGDPDVRRALYEAASAMLTRFKGRDTIKTWGLKLAKTKCHAKARVAVARKLAIVMHAMWRDGTFYVGDPDAEAHEFDSAYAAKMQRLSYARS

SEQ ID NO: 457440 - protein, 316 aa, unidentified
MIPPPLFVGIDVAKATLDVAVRPTAETWSAPNEATGIDALVARLVPLAPTLIVLEATGGYQGPLVAALVAAALPVVVVNPRHIRAFAQAVGILAKTDRIDARVIAHFAEAVKPAPRPLPDAQTQELRALLVRRRQLVEMVSAERARLDTAPSGIQETIHAHIAWLTTQVAGLDATLTQASQTHPAWQAKDDVLQSIPGVGPVLARTMLGHVPELGTLSPKPLAALIGVAPFNRDSGTLRGRRTVYGGRAQVRAVLYMGALLATRHNPVLKAFYERLLAAGKAKKVALTACMHKLLTIMNAMVRDLKPWQPQEAPIA

SEQ ID NO: 457441 - protein, 352 aa, unidentified
MAATAQSAIAVIGIDIGKNSFHVVGLDGRGAIVLRQKWSRGQVETRFANMSACLIGMEACVGAHHLSRKLKALGHDARLMPARYVRPYSKGQKNDFRDAEAIAEAVQRPTMKFVVTKTADQLDLQALHRVRERLVSQRTGIINQIRAFLLERGIAVRQGQRFLRVELPRILATPPDVLSPRMVRVIEGLASDWHRLDERIEGLSSEIEELAKRDAGCERLMSVPGIGPIISSAMVAAIGTGDSFSKGRDFAAWLGLVPRQISTGDRTILGKISKRGNRYLRVLFVQAAWVVLVKVKPTRWEGHGLRPWIEAAKKRLHHNVLAIALANKLARIAWSVLAHGRAFETNKLQAAA

SEQ ID NO: 457442 - protein, 406 aa, unidentified
MDFYKNKYINSSFANNQPGAEELALKILECLKEHPDITTIVAALESTSVYSIHIANYLSSCEELMRFKPYVFVLNPKCTANYKKSYIGLGKSDPIDAFVIADYARAGNIESEPWRGSQFLALKRLTRHRLHLVECMTREKTYLVSNLYLKFSELQMLEGDDQPFCDIYGATSSSVLMEYLSPEEILVSSEEDLIAFLAEKSRNRIKDISKTADLLKKAARDSYRLDKALYEPLNVSIASSFNCIETFKREIKVIDNAIEKEIKGLNPNAFIILQSIDGIGPVFAGGIIAEIGDITAFHSSDALAKYAGLTWKSNQSGDFDGEDTPMIKAGNRYLRYYLGEAANSMRKHNVEYGAYYRKKYNEVPKHQHKRALALTSRKFVRLVYGLLARNQLYSGVSLDTSIKDSN

SEQ ID NO: 457443 - protein, 274 aa, unidentified
MPLYGGIDLHANNSVIVLLNEQDEVIYRKRLPNELPTILGQLAPYHTEMQGLVVESTYNWYWLVDGLMEADYRVHLANPAAIQQYNGLKYTDDHSDARWLAHLLRLGVLPEGYIYPKAERAVRDLLRKRAHLVRQHTANVLSVQNIMARNTGGRFSVKRIQELTKQELTTLLTEETQVLAVTSSLVVLDCLQQQIKTLEKTVHKRLQHTPSCEQLRTVQGIGTILAQTITLETGAISRFPTVGNSASYCRGVDSTKISNGKRKGTGNVKNGDPY

SEQ ID NO: 457444 - protein, 334 aa, unidentified
MENIALIGIDLGKNSFHIHCQDHRGKAVYRKKFTRPKLIEFLATCPATTIAMEACGGSHFMARKLEELGHFPKLISPQFVRPFVKSNKNDFVDAEAICEAASRPSMRFVQPRTESQQAMRALHRVRESLVQDKVKTTNQMHAFLLEFGISVPRGAAVISRLSTLLEDSSLPLYLSQLLLKLQQHYHYLVEQIKDLESQLKRKLDEDEVGQRLLSIPCVGTLTASTISTEIGDGKQYASSRDFAAATGLVPRQYSTGGRTTLLGISKRGNKKIRTLLVQCARVFVQKLEHQSGKLADWVRELLCRKSNFVVTCALANKLARIAWALTARQQTYEA

SEQ ID NO: 457445 - protein, 357 aa, unidentified
MLSSNVKYIGLDVHKEAIAIAVLNGAGKLVMESIVESNASTLLDFLHGLRGELHVTLEEGTWAAWLYDVLKPHVQKIVVCNPRRNALLKEGSKSDKVDARKLAELLRTGMLRAVYHGENGLRTLRELARSYLTISKDQRRVMSRLKALYRSWGIPCAGRQVYAPRHREQWLSKIAHAGVRRRAELLYQQLDGLLVLRHTVRGELLAESRKHQAVKILRQVPSIGPLRATLLLALMQTPHRFRSKRQLWTYSGLGVETHDSAQHRYVDGQLQRSKKPQQIRGLNQNHNHEMKEIFKSTALSASRCAGPLQDFYAGLLAKGMKPDMARLTLARKIAAITLTLWKKGEHFDAEHLKSQAA

SEQ ID NO: 457446 - protein, 424 aa, unidentified
MGKFTKTLCISERKEYSIMEGPIITVDVSKGSCHYQPFIENGHPMRKPKQLSATIDGFQKLGQTIKDLEAKTEREDIPVIFEATGVYHRPLQKYLEDHKIRYYIISPLLSATYRKTDLHSNKTDALDCAHIAKAYYCEKELRQYQAQPQEYKRLYQLSRIYESELVHLRKRKVSLRSMLDIIYPRIDKTFKGNQNLYDPIPMEILKRYPHPLLLLSHREDTIVKNVGHRTGHLKGYTERIVHKIYEKAKECYSGCEINDIEVLKLPNLIENVQEQKKKCDSLLKEMIEIARTCPYFASVVSIVGIGENLAARIIAELGDVSRFDNRAAIVAYAGLNPKIQQSGDIDGLHLKISKKGNKHLRCLLYLGAQCNYRLRKEDPLYEFTKKKRQQTQCPLSSKAAYTASAHKLLVIIYSLCKNGTLYHS

SEQ ID NO: 457447 - protein, 343 aa, unidentified
MNITTIGLDLAKHWFQVHGVDDAGKPVVKKRLRRGQVVEFFRSLEPCLVGMEACATAHHWARELIALGHEVKLMPPAYVKAYVKRNKNDAADAEAICEAVTRPSMRFVPVKDVDQQAILMLHRARGLLVRQRTMQVNALRAHLAEFGVIAAQGLRHVEELVTAIEEGKLAIPALAKSILRLLVEQFKDTEVRIKELEARLAEWHRNSKVSKLLASVPGVGIMTASAIAATVSDPNLFRSGREFAAWLGMTPKQNSSGGKERLGRTSKRGDKYIRCLLISGAVAILRHARNRTTKDAQWVRDMLARKPAKVVAVALANRTARIVWAVMKRGDGYIAKEIVGQAA

SEQ ID NO: 457448 - protein, 331 aa, unidentified
MIKKTAHFAGIDVGAKELVLVVRKNATSMKAQKFANTPAERARLVAKLVKLPGVSVCLEATGAYHLELAVALHDAGVRLNVVNPKAAHNFAKALMKHSKTDAIDADTLAQYAERMPFTVWVRPSPQALTVRSFARRINALTRQKAMTKNHLHALSFGPDLPPAVLNDAKLAIAQLEKRLACLSTKAQAFIGKHEDLKRIFTLLLGIKGIAETSAIALMGELLLLPKALTHKQWVKYAGLDPRAFDSGKSVHKAPRLSKAGNRHIRQALYMPALSAKQHDPYVKAFFQHLIEKGKKPLQALCAVMRKLLHAIHGMLRDNQPFDNTRFYATAA

SEQ ID NO: 457449 - protein, 441 aa, unidentified
MERFGLLFPRSAGIDVGSMLMVVSYTDRNDMINVREFNSFTQSLVELSELLQGEGVEQVVMEATGEYWKTLYCILESHGIQVLMANPSHYRNVSAQKTDINDAQWLHQLLAHGLIRSSHIATELYRQLRRYVHERKTCQDLKSDTLNRIQKTLTLMNIKFQHLISDIEGISGMKILRAIISGVSEPETLLNLVSLNRLKASPEDLMSSLEGDYQEHHIHILASMMKAYDFHKSQMLEYETYIEATLEKLVPVSDSGETLAVIGKKKIKARKNEYHFNLSDYLESIFGVDLTAVDGLDEIGLLAILSVTGTDMRKWPTASHFASWLNLSPRPKISGGKKIGNEKRSTNNPATQAFRLAANSLWQNKGPIGQQYRKLAATKGSAKAIKAIARKLATIFYNMVLKKEAFDPKKIQQNVEIREAKRIARLLKDAANMGYTIQKVA

SEQ ID NO: 457450 - protein, 327 aa, unidentified
MIQPVLGIDIAKETFDAALTSSDKTWNEHFENTAEGFKRLSRWIGKHTHEPVHACMEATGQYGDALAEYLYQQGNQVSVVNPARIKAYAKSKMRRNKTDKADAQLIAEYCLLHNPALWSPPPASFKGLQALVRRLEDLQANYYQENNRLQSGGSNSVVNKDIQDHLQYLQEKIEQIKQAMQDHIQAYPELQCSQKLLVSIPGIGALTAAKILGEVRDVCEFDSARQLSAYAGVTPSNFLSGTSVHKKARLSKMGNSQLRKALYMPAIVSQTHNPIIKTFCQRLLKSGLRPMEIIGAAMHKLLHLIYGILKSGKPFDPDFLQKQGVTP

SEQ ID NO: 457451 - protein, 353 aa, unidentified
MQATHILGIDIAKRKFDVCLRAAAAGGPRHAHTFPNHAKGFKALNRWLAKHPVTQLHACLEATSRYGDALALHLQQHGHTVSLVNPRRTRHYADSRLVRTQNDTIDAALIADFCASQNPRPWQPVAESKRQLQDLVRTRGFFLNQKQQCRNRLETADPVSAKLLRQHVRQLDVTLDQLKTQITALLKTQPDLARQVDLADSISGVGWLTAAVAVAELPPIERLEHAGQAVALAGLDPRKKDSGTSVHTAPRLSKMGSRLLRQTLYMAALAALRHNPIIRALGERLKAKSKGGKRAVVAAMRKLVRLIYGVLKQGQPFDPNWENRDRAVGLGGRASDGDERPSHPLASPAVAAA

SEQ ID NO: 457452 - protein, 387 aa, unidentified
MKLYIGMDVDKDKCIITSLDKNGEQIDQYRIENNSTEIERFIQKTPRNAEIALESSTCSKPIYQQLKKHGMKVHMAAPGKISLISKSKKKTDPNDSRLLADLLRLGYLPESYVPNDEIENLRKLVRYRRSLGEKRTVVKNQVHAILMRNGIKHGFSDLFGRDGTRFLKNQSLPLTEQTILGGGLREIGFLYEESHVMDLRLAEIAMEYKDVRLLMSIPGVGYYSALVIISEIGDISRFPCAKKLVGYAGLAPRVYQSGNIKRYGRISKDGPSILRWVLTIAAEGAIKKSGKLKRFHARLNKHIGYSKAVVATARKLLIIIFHMLTNGVKYEERDDDLTHRKIRMMETKSKRMKRLKDKKTPISEKHKKLMNKGMKMLINSDSDANLG

SEQ ID NO: 457453 - protein, 405 aa, unidentified
MKEFTADHTSITTHSAVDALSVSEHQNRVKHYGAFIGLDVHKESIAVAVAKPGRAPAEYDKEIANKPKSVAKLVHSLSEQFAGEVLLFCYEAGPCGYPLYHQLSALGHDCQVVAPSQIPQKPGDHIKTDRRDAIKLAQFLRSGDLTTVWIPDEEQEAMRDLTRARCDMKAQETKARQQLNAFVLRHGHHWPGNRTRWTQTHFNWLEDLRFSHDWQQVVLQEYIDAVKAATQRVADMSGQIERALPHWSMAPVVTSLVALRGIDKLSAVILLSELGDISRFEHPKQLMAFLGLVPSEHSSGSRRRQGGITRAGNGHARRVLVESAWCYRFTARQTKHLKRKAAGASDHARSVAWRAQKRLCGRYRHLIESGKNQKVVCIAVARELVAFIWDLVCYEVKQLPAKLSV

SEQ ID NO: 457454 - protein, 444 aa, unidentified
MAGSGMILIREVADAPVIMGISKPAGLKSPCGEVKIMNPLFVGIDVSSRNNVAYLMKPDGSKHSSFSVQNNLGGAKILSERIVSALESVPLSDLVIGLEATSIYGDSLVYALREDGSLGRFQRKIHVLNPKQVRKFKEAYPDLPKNDWVDAFVIADHLRFGRIAKEVYMDDYRYQALRTLTRSRFDIIQNLTREKQRFANYLFLKCSGIAQAKDIQNTSATTIALMERFETVDDLANADLDELTAFIAETGRGRFADPDAAAKAVQAAARGSYRLPKTVNDTVNQAMAVSIASMRALKEQVKVLDKAIEQQFEIIPNTLTSIPGIGKVYSAGIIAEIGDIHRFDSQASVAKFAGLVWHRNQSGVFEAEHSQMIKSGNRYLRYYLLEAANSVRRCDSEFRRYYDLKFKEVNKYQHKRALALTARKLVRLVFRLLKDNRLYIPPED

SEQ ID NO: 457455 - protein, 347 aa, unidentified
MTLYIGVDFHPHQQTVSYCNTEHGEVEQISLAHNVELVRRFYEQFPKAVVGIEASCTAAWFEHLMNELGHELQVGNPTLIRARARSRHKSDKRDADLILELLLKGEFPSLWRRSTKSQSVLEQLRFRHQLVKHRTQVCNRLQALAHSAGLPKRGIQTKRARLALMAANFTETQSFERSQLFELLDDLSGRIKVIEKWLEEKAAGDAQVGLLLSHKGIGTLSALVVVHTLGDITRFPSSKEAVAYTGLDPLERSSAGKVRTGSISKAGSAVLRHLLGQAMHVAARYDGELKAFYKRLANRRTKSVAKVATTRKLLIRLFIMLRDGIDYQEFKRRGSAVGMPVLSHGLQ

SEQ ID NO: 457456 - protein, 365 aa, unidentified
MLHRLNPAATLIQRTTTVAPRGHMYYIGLDVHKKTISYCVKDLSGRIQQEGKVGSTRRELDCWMKTLPQPWAVAMEATIFSGWIYDHLLPHATQIKVAHPLMLRAIAAAKKKNDQIDASKIADCLRCDFLPECHMMPAEIRDRRRTLRYRHLLVRQMVQMKDRVSGLLMETGVEYNKQRLHKVSYFRELLSGNEEVDPSIRPLLKLSRETIERCQRTEYALVNSLQRDPMLADRIKRLRMVPGVGPITALTWALEIGDVSRFRTIKQAISYCGLCGDERNSADKAMRMPLSKQRNKHIQRTLVEAAKLAPRQSHELALIYDREKKKGNRNRATLAVARKMVAYLLAVDRQQRDFVPAEERKAAAA

SEQ ID NO: 457457 - protein, 413 aa, unidentified
MAGIHFDQVVSRGCGMDIHKKVVVATVQGEGICKETKSFDTFTSSLTQLREWLVSLGITHVAMESTGVYWKPIYNVFEDYIRNIWIVNARHIKNVPGHKTDKNDSEWICQLLMAGLLKPSFIPPREQRELRDLTRYRRKLIETVSANKNRIIRTLEDGNVKLSSVLSDTSGSTATKLIEMLCDGRIPTLADIESVRHKRCLHSAEEMLEACTGYMNSHKIYMLQKIRSCNRRLTEEITEMDRHIKEILSPYEDVIARLSEIPGVQNRTCEELIAEIGLDMGNFPTAAHLCSWAGMCPGNNESAGKKKSGRTSHGDKHVRATLVEAAWAASRTKGTFFMERFNRLAPRKSNKKALIAVGHSLLKCIHYVLSTGGRYKELGDSYVPEKKEKQRKEYLKGELKKLGYHVVLTKKKD

SEQ ID NO: 457458 - protein, 383 aa, unidentified
MRKIQETLQAQSTTTQDIMYIAFELSNSTWRLAFSDSNKKRHVTIKARDLKQLEIEITKAKRRFGLKDNVQIKSCYEAGRDGFWLHRYLLSKGIDNLVVDSSSIEVNRRKRRVKSDRLDAGNLLRLLMRYHGNERQVWKVVTAPTVKEEDARHLHREIETLLRERTRYRNRIKALLVQHGLDVKNPSRKNFLKVLNALRTWDGQVLPESMKARVVREHERLRMIEDHIKLLKKEREQRVKSKETASFQQVAQLRELCGIGVNSSWVFVMEFFGWRKFRNRREVAALAGLTPTPYDSGGSQREQGISKAGNKRIRTMAVEIAWCWLRFQPHSKFSRWFNERFASGGSRMRRIGIVALARKLLISLWRYLEHGVIPEGAIIKSAS

SEQ ID NO: 457459 - protein, 430 aa, unidentified
MTKLSSTPADAVLVAIDMSKHRQEVLIERPEGGRRRRMTVMATKTDYDRLASDLADIGRPIVVGFEATGNYHRTLAHRMLTAGFELRLISSVALARTREALHNGWDKNDSKDAQVILHMLRIGATQRYVDPLAAGINDLQEMSKTHEAISKAKTQTWHRILTHYLPLYFPEIERFAGNSRSDWFLALLERFPTPGSMTALGQEAFTREAWSLVGRKVSKARLINDIYETACASVALPVDEDSVAIAMFRMVIAQARSLIRQRDEIERTAHAMLSENRDYQLLRMIPGIGPINALTILAEAGDLRRFAHHRQFLKFCGLDLATCQSGTFRGRTKLSKYGNARLRRTFWMAAQVAARQRDNSFRDKLGRYMEGHASDPDRRRKAMTALTAKMARVAHAVIKTGTEYRPFLERADTRWKDPSLLCREGATATL

SEQ ID NO: 457460 - protein, 345 aa, unidentified
MIYIGMDISSKSFVVHGIDEKKRVLVNGEIEPTRAGLKGMIKGLGVQKKLVIFEAGNQLKWIAKTLKDMEGVEIHVVHPNEIKWISQSSGKTDKIDARKLAHLGRGDMLPRKVHIVEGKIRELRELLSARQRLQSKRVALINSIRGQMKQEGHSLPAKFFQSRHWREKLQGMKIIGEVQKLIIESYMDSIAGLLIAEKKLTEKIGTIKDKGIELLESIPSVGILSSRVIISALDDVGRFDSKKCVAKYGALTPRIYQSGGITHLGRINRDGRQEVRRVLLQCAHVIVRMRSYGARPLREFFERIMKRRGKKIAIVAVARKLLTIAYGVLKSKTAYDPSRLTGVTA

SEQ ID NO: 457461 - protein, 481 aa, unidentified
MKPRPAEKDKEVIADLSCGHWNQMNRQQRRHMMRKMQSDDLSLEVVHPDAAGVDIGNESHYVAVPPTRDSQPVRRFGCTTAELKAMADWLKQCGIQTVAMQSTGVYWIAVYDILEAAGLDVYLVNARDTKNLPGRKSDVQESQWLMKHTYGLLRNSFRPSQEIRTMRTYWRQRNDLVQSASRHIHRIQKALTQMNLQLANVLSDVSGLTGQAIINAILAGERNPYKLAAFRDPRVQASEEQIARSLEGNWQEDLLFVLKQEQDGYEFCQKQMAECDRQLEQYFQRREDRSQGASLPEEKRKTRLKKKNGNKPQFGLRADLFRMTGTDLTQIDSIDVVTASTIVSEVGWDMSKWETEDHFVSWLRLCPDNRISGNKIIGKGRLPTNNRVSIALRMAASTLRVSNTYLGAQFRRFRAKLDARVAVKAMAAKLARLVYRMMRYGMKYVDQGAKFYETQHRNLQLKHLKWRAAKLGYQLVQAPST

SEQ ID NO: 457462 - protein, 418 aa, unidentified
MTATDTTASTLMVAIDISKHRHEVLIGAPGKKRRRRLTITNALDDFQRLATALSSYDLPVRIGFEATGNYHRPLAHHLGQAGFDLKLVSSVGLARTREALHNSWDKNDPKDAQVILHMLEIGAVQFFHDPLVTGTADIQELSKTHEIVSRSKTELWHRILTHYLPLYFPEAERFHRSSRTDWFLAFLEKYPSPHMISAMSCEAFIADAWQVVGRKVSKERLLSDIYATAVGSVGLPVHPDSDAVRMFRLVLAEGRSLVRQRDEIEARAVELLSDHPDYQLLTTVPGIGPINALTILAEAGDLRRFRHHRQFLKFCGMDLATVQSGMFRGQSRISKYGNARLRRTFWMAGQVAVLKRTNSFRDKFERYIARDRHNAHLRRKAYTAIAAKMARTVHAVVKHGEPYRPFFEGVSPGGRTLV

SEQ ID NO: 457463 - protein, 370 aa, unidentified
MKKSIMYVGLDVHKNSIEVAFADAGRDGEVRSYGKIDGNLTALDKVIRKLGAKGSELHFAYEAGPCGYEIYRHLSSNGYDCIVVAPSMIPRQSGNRIKTDRRDAQMLARLHRAGELTSIYVPALEDEAMRDLTRAREDARAVERKAKQRILAFLLRHGYRYGGKTPWSRAHFRWIAILKMPHPAQQIVLQESLDALSECTERVNRLTEQIQRLLPQWRMFPVAQALQTLRGVSLIVATTTIAELGDLTRFASPVELMSYLGLVPSEHSSGEQTKRGSITKTGNGHVRRVLVEAAWAYRLPARISTALHLRQEGMPQNICAISWKAQLRLCNRYKRLLTRGKANQLIITAIARELCGFMWAIANEVETPTA

SEQ ID NO: 457464 - protein, 591 aa, unidentified
MNQSTSSQACIGVGIDTARYGHRVTFLRDDKQPAAKPLNVLETREGYSLLKQSLERLYAKHPDAQFHVRIDAAGQYAQNLQTYLESLDLPLSISVGEPKRNKDYHKAVSPKRSTDDTESYAMARYAIVERPSPMLRIPEEFYVLREIISRLEGLVKDTTRSINRLHNMLARVFPELATIVDDISAASILKMLQKYPTAKRVAAARLESVKQIPWLRPDKAEAIHQAAKQSVGSLHGDLAESLVRQSVERVEQCLQAQKKLEDMLVQAYKALPPSGHLQIETILGIGQATAAVLVSKMISIDRFQTPEDLVGYFGVFPEENTSGFDRRGQPVKPGTMKMSRKGSDIVRRYLWNAAKSAIQSNPAVRSLFKRLVGKGKRGDVALGHCMRKLLHLVFAVWSTDTPFDPKHYNWEPALENETSAEPSSLQPQEGEPSHRDDSSEPKKEKAAGHKREKLPVRKVVTATNSKVEAEEATVNEPSKKASQSIDYAFLRQQVTMEQLLTHLGHRDKMQRKGSELRGPCPIHRSEKSNDRSFSVNINKNVFRCFSPSCKAKGNVLDFWAAIQRQPLHAASLHLAETFNLPLTPATEKRSP

SEQ ID NO: 457465 - protein, 488 aa, unidentified
MSAAGQQEGKKDPTLNARAPKRKARGSRCPQGKGHRRRSKLTITNPDAAGIDVGSRVHYVAVPEDRAPVSVRSFGAYTAQLDELVQWLKECAIKTVAMESTGVYWIPLYQKLEEAGFEVLLVDARQAKHVPGRKSDVQDCQWLQQLHSYGLLRAAFRPEDAICRLRTLQRHRKSLAEFAAMWVQHMQKALNEMNLHLHHVLSDISGLSGMAILDAILAGERDPRKLASLAHYRVQKSKAQIEAALTGDYRPELLFVLSQSLQNYRQIQQQITQCDLSIEKQLAKMTDCATPRQAAEPMPSSQDLGGGKPGKRKSTVALETSLAGHLKRILGVDLTTIPGLNVLAILTLISEIGTNMTKWRNEKAFVSWMGLSPNNKISGQRVLSSRTRKVVNRAATILRLAAMIVGKTNTPLGSFYRRKRAQLGGPKAVTATARKLGCLIYRLIKNGQGYNEPDMHTYELKYKDQILNSLRKRAISFGFDLVELPKAA

SEQ ID NO: 457466 - protein, 349 aa, unidentified
MLADELDYVIGVDTHLDEHVLAVVALPSGAVVAKRSVRASGRGYASALAFALEAGSGARVWAIEGTGSYGAGLARYLVGRGETVLETGRVPQTERRLRGKDDALDAVRTARAALAGDTLALPRVGERREALRLLLVARRSAVDVRREALGQLRAVIVTAPDGLREQLRTLPVGKLLERCSRLRRSSAMSTDEVATRLVLRSLARRIEAATVEAAELERELLGHVHALAPRLLDEPGIGPIVAAQLLVAWSHRGRLRSEACFARLAGVAPVPASSGKTTRHRLSRGRDRQLNRALHTTVLHRRQHDRATRDNIERRIAEGKTRRDATRLLKRHLARHLYRLLQQTEPLMT

SEQ ID NO: 457467 - protein, 349 aa, unidentified
MVTELVDYVVGVDTHRDEHTLALVQAATGAVLAQRTVTSNGRGYAEALRFASQQVDAARLWAIEGAGHYGAGLARYLGERGETVLEVGRSPRGERRLRGKDDQLDAVRAARAALRSEPLPRPRSGECREALRLLLVARRSAVDVRREALVQLRSVIVTAPDRLRQELRGLPVQRLLERCSRLRRSTAATPDEVAARLVLRTLARRIEAATVEADELEGEILVRVRALAPQLLDEPGVGPIVAAQLLVAWSHRGRVRSEAAFARLAGVAPVPASSGKTTRHRLSRGGDRQLNRALHTVVLHRRHHDPATREYIARRTAEGKSRREATRLLKRYLARHLYRLLQNQEPLLV

SEQ ID NO: 457468 - protein, 314 aa, unidentified
MNDEVKYVGIDVSKERLDVEVLPGGEAQSFASEEGGVDALVSWLVSVKPALIVLEATGGYHVHVASALGVAGLPVAIVNPRQVRDFARSLGLLAKTDKLDAHVIARFAHDIRPEARPLASEAEAALKALASRRSQLVSMRAAEKNRLQQAREKRIKKSIKSVLKHLDKQIEDLENDLNDNIRSSPMWREKDDLLRSAPGIGPATSFKLISSLPELGNLNRRQIASLVGVAPFNCDSGKMKGRRVIWSGRADVRTALYMAALVAIKHNPAIKRFYDRLRLAGKPGKVALTACIRKLLIILNAMLKNKQPFRFKPT

SEQ ID NO: 457469 - protein, 401 aa, unidentified
MISVGIDVSKEKSTVCILKEYGEVISEPHEINHTEADLKALVESISELNEETRVVMEATGAYHLPLLTYLKNHGIFVAVINPLIMKKYSAIGLRKGKTDKLDSIKIANYGIDNWFKLTDYEATDEVYSELKLLGRQYSHYIAMRIESKLVLSNLLDRTMPGIKNLLKNRSDKPEKDKLNDFVKEYWHYDNITQKNEKQFINSYLKWAKNKGYHQSETKAKQIYALAQEGIPTLSSSTPSTKMLVLEAVRVLSEIDRTLSMILSQMQELASSLKEYNIVRNMPGVGDTLAPRLIAEIGDLRRFYNKKALIAYTGIDSPPFESGQFVANKRHISKRGSALLRKTGYEIMKCIKSTKPKDDPIFLYMLKKEAEGKSKKVAKIAALNKFLRIYYARVKEVYNTQV

SEQ ID NO: 457470 - protein, 321 aa, unidentified
MTKEAVYVGVDVAKSSLDIAVSNSEEVRQFTNDHEGITNAVQYIAGLKPSGVIIEATGHLEMPLAAALQADSLPVAVINPRQVRDFARATGTLAKTDTIDARMLALFGIRVQPEIRPLPDEKTREMRNLLTRRRQLIEMLTAEHNRLFHSSDDVRPGIETHIKWLEKALSDINDDLDRRIRLSPSWFEKDNLLKSVPGVGKVVSSSLLIELPELGMLNRRKIAALVGVAPFNRDSGTMRGRRTVWGGRAKLRAVLYMAALVASRRNPIIAAFYQRLLDAGKAKKVALVACMRKLLTILNAMMRTMTAWQPETILERIPVEV

SEQ ID NO: 457471 - protein, 346 aa, unidentified
MSYSTTVGVDLAKNVIQISVVSGRGKELSNRSLTRKKFAEFLGKQKPALVAFESCASAHHWARAAKRHGHEARIIPAKAVAPFRQGHKTDSNDALAVAEAARRPNIKEAPMKTAEQQGLQAIQRSRELLIGECTALSNHLRGILLEFGVAIPQGFASLLRALPEVLEDGENELPDLYRPTLHRMHARLLELGEDIEAMTKEVDGLVKQHPVCKRLTAIEGIGPIGALSLYAVMGSGKAFTKSREFSAYLGLTPRQFSSGGKTNIVGISRKVGNRRLRSILIQGARAYVYRMKEPRTLKDRWLKDLIERAGPNRAAVALANKNVRTAWAMVTQGTEYQRRLQLEMAA

SEQ ID NO: 457472 - protein, 390 aa, unidentified
MEESRSLLIQNVGIDVSKDTLDVVLSTMDIRRQVKVKGSRKFANNGKGFREFVKWLESKRSKSCELRVLMEATGIYYEQFAWYLHEREYTVSVILPTKAKRYLQAIGNKSKNDKIDAKGLAKMGLEQNLPQWQPLSKNIYRLRLLTRQLEDFNNQRTVFLNQLHALEHSAYPVKEVERNLNKLIKELEKGIEKIDSAIKKLIKEDEKLSSRVDKIKQIKGVGIKTIAVLLAETNGFETFENQGQLVSYSGYDIVENQSGKHNGRTKMSKKGNAHIRRAMHLPAFGVVRYQEGPFKALYERLIAKGKTKMQAYVAVQRKLLILIWALWKKDQEYNPLYHINHLEYSGNDESKSFFSLGSEGSTKKVGPEKTSPTVDELPCKESPEALFSLL

SEQ ID NO: 457473 - protein, 355 aa, unidentified
MGSTEATVRTHHEKEGVHMTHITQMGIDLAKHVFQLHGVDERGHIVLRRQVSRTRLRHVFAQLQPCLVGMEACGSAHYWARELRTLGHDVRLIAPQFVAPYRKNDKNDGNDAEAICEAVGRPHMRFVPVKEVEQQAVLTVHRARQLLVAERTALVNQTRGLLAEYGLIVSTGVGVLRRALPELLEAPALPVLAREVFADLADRLRALDERIATYDRRVAQVARQTESAQRLMQAPGVGPVTATALVATVGNAHAFKNGRQFAAWLGLVPRQHSSGGTRRLGRITKRGDVYLRTLLIHGARAVMRQLAHRTDATSRWVLALKARRGFNKAVVALAAKQARVLWALLATGRPYAACP

SEQ ID NO: 457474 - protein, 364 aa, unidentified
MKKIFIGVDLHKHQITVCYLTKDGKERIEVYYFSNKGIDSFIEQLKLLKEYGYYTELAVETTGNSEYFYNQVKSYVDKVIILNTLKLKPIMKSYKKTDKNDCRIIAFFLSKDMLEGYTVNMPSDEAKTLRRLLKSRHILMRARIGIKNQIHGILLGYGEETKKRFLTSKKGREKLRNMNYPEQDVLNMLVDNIDNLDNQINNIEIEIEDKIKSRTREDEIIQSIPGFGKIISASIIAGIDNIDRFEEPKSLTAYVGLVPYVNNSGNEIKYGKITKTGPAYMRTALVQAVLAMLRSKEMRNHQLVLNYYKMKENKCSGKAIIATARKLLSIIWTLLKRNETFNINYYYNSKVQIENKNKYLATNC

SEQ ID NO: 457475 - protein, 312 aa, unidentified
MERIFVGLDVSKDRLDVHVRPTDERFEATYDEAGVATLVSRLAALRPTLIVLEATGGYESAVAAALAHAGLPVAVVNPRQVRQFALATGQLAKTDRLDARANARFAEMVQPAARPLATEQAQALGDLVARRRQLVEMLGAEQNRHRQARGRGLQQRIRAHVTWLTRALAELDDEIARLVRSSPVWREAEDLLTSAPGIGEITAHALIAELPELGQLNRRRIAALVGLAPWNRDSGRWRGRRMIGGGRPAVRRALFMPTMVAIRHNPMIQELYRRLTAAGRPKKVAVIAAMRKLLTILNAMLRDRRPWNPEIA

SEQ ID NO: 457476 - protein, 343 aa, unidentified
MNEVITIGVDIAKNVFQIHAVDAAGEPVIRRQLRRRQVLPFFKKLPPCLIGIEACATSHYWAREIAAFGHEVRLMPPRYVKPYVKRNKNDAADAEAICEAVTRPNMRFVPIKTPEQQSVLMLHRSRQLFVRQRTSLINAIRAHMAEFGIVAGIGRNGVEVLLKRIAEGNDDRLPAPARECLMALAMQLELAKRQILEADRRVLAWHRSSKISKRLEAIPGVGPLIASALVASIPDPSAFRSGRDLSAWIGLVPKQHSTGGKERLGGISKAGNRYLRTLLVIGALSVIRRAKQVGYTRHPWLVRLLERRSVKIAAIALANKIARIAWAMMARNEKFEPSRLIPV

SEQ ID NO: 457477 - protein, 411 aa, unidentified
MGQVIFAGIDISALKCDLVCLDEQGRQLAPTKSFANNREGASGLVEVLDDLTHKFNAQQLHIGLEATSVYGVHLRDFLLDALSLKKYSVEAYEINPVMVAGFKKAFGARRPKTDAMDAYVIAERVRFGHLIPYRREVMVTEPLRQLTRLRLHLVELLTAEQNRALNLLFLKFSNYHQDKPFSQTFGKTSLAVLQEFSPDELIEMPLEDLVNFIQSHGNNRLAEPDKIAKTLKQAASRAYRLNPKMLEACEAALSLTLQNIDHLKRQLKQLDKVINRELEAIPQTLTTVKGLGPVSAAGIIAEIGDIKRFKDQAALAQYAGLTWTRYQSGDFDAEERRLTKSGNRYLRYFLVQAANSLRVHNEEYRAYYQAKYCEVTKHQHKRALVLTARKLVRLVFALLSKGQIYKGTVMS

SEQ ID NO: 457478 - protein, 327 aa, unidentified
MTDVVGIDVSKAKLDCLWLRDRATLKVKTKVMANDNKGHQALCQWLPKTLKLEPAQILVVMEATGIYHEKVALTLHDAGFRVAVVNPAHIKAYAQSLGNTHKTDKQDSLIIARFGAERDPALWQPEPLEIRELKALIARLEALEVDYQRESNRLEKAELRPSSQTVLDSIHTMLNELEKAKRRIEEDIDDHIDRHPGLKHDKALLESIPGVGKVVSRLMLSVIHSRDFTGAKQVAAYLGLIPTQVESGVFRGRSALSKRGPASVRAKLYMAAVCASQCNPDVSAMKERLLQNGKNHMQAIGAAMRKLVHICFGVIKNQTEYRPQTVS

SEQ ID NO: 457479 - protein, 326 aa, unidentified
MNASESTFVGIDVSKDTLEIALDDQSKTQCIANADADIAALVKELVPRSEEIGAIVLEATGGFERQVAAALCAAGLPVMVVNPRQARDFAKSMGYLSKTDAIDARVLSHFARTLHQSAQRERLLMKLPDANQEALEALLVRHNQLIGMRVAEGNRLALSHGSQHKSIKAVLKILDRQIVAVDKSMAGMLKEHFAEKLALFKGFKGVGPCTQASLMGALPELGQLTHAQIGKLVGVAPLNADSGRHKGKRITWGGRATVRTTLYMAALSAIRYNPVIKTFYERLLANGKLKKVALVACMHKMLTIMNAIVKSGIPWNPEHQNVSKNA

SEQ ID NO: 457480 - protein, 337 aa, unidentified
MSKSSPKYIGIDVSKSDLAIALPVVVPSTPLTKLQSKKKNPQWEHCVLKNETVAIESWLSKQDLKNSHFILEATGTYSSKVIAVLTRLDAVFSVLNPRQSKAWAVATGHKNKTDRQDAQILSDFGAKNQPKPYKPISPEAQKRQQAVTALRAFKKQLQAIRNQIHALEQLPEPDPVILKGYEIIVETLQKQIQAFQELIQPTPDEPQLQKVVQLIVSIPCIGKDTAHKITALLGDLSQFKSAKALAAFIGVSPCIRQSGTSLDKATTSTQGIPEIKLALYNCARPAIQHNPICKKFYRNLVDHKFKKKMVALVAVMHKLVRMIWGIVHSEVPFKIAV

SEQ ID NO: 457481 - protein, 393 aa, unidentified
MFYIGIDIAKHNHEASIIDSDGSLLCESISFSNSQKGCEKLIALLERFSVDPDNCIVGMEATGHYWLSIYSYLFELGFDLKVINPIQSDAFRKMYIRQTNNDSKDSFVIAQIMRFGQFSSSSLSDENIMALRQLSRYRFCLVDDCSDLKRKVICLLDQVFPEYSSLFSDIFGVTSKELLLKYPTPEDMLSVSATKLSNFISKCSRGRYGRSKAEEIQSAAKSSFGIKFASNAFSFQIKQMIEQIKFIENHLKELEKEITELLVQTNQVITTIPGIGNVLGGVIIGEIGDISRFESAPKLVAYAGLDVRVSQSGQFTGTQMKISKRGSSYLRRAIWMAATVAAFSDPVLSEYYQSLRARGKHHLTAIGAVSRKLCNIIFAVLRDDKPYEPMPKR

SEQ ID NO: 457482 - protein, 354 aa, unidentified
MSQTLNAAIAVVGIDIGKNSFHIVCHDERGAIVLRQKWSRGQVEARFANMPPCLIGMEACVGAHHLSRKLNSLGHDARLMPAKYVRPYSKGQKNDFRDAEAIAEAVQRPTMKFVATKTADQLDLQALHRVRERLVSQRTGIINQIRAFLLERGIAVRQGQRFLRAELPRILTTPPDVLSPRMVRVIEGLAGDWRRLDERIEGLSSEIEAIARQDSGCERLMSVPGIGPIISSAMVAAIGTGDAFTKGRDFAAWLGLVPRQMSTGGRTILGRISKRGNRYLRVLFVQAAWVVLIKPKSWERHGLKPWIEAAKKRLHHNVLAIALANKLARIAWSVLARGRAFEVRKMDEAVTQSA

SEQ ID NO: 457483 - protein, 354 aa, unidentified
MAKTREAAVAVVGIDIGKYSFHVVGLDRRGAIVLRQKWSRGQVEARLANMPCCLIGMEACVGAHHLSRRLNALGHNARLMPARYVRPYSKGQKNDFRDAEAIAEAVQRPTMKFVATKTAEQLDLQALHRVRERLVSQRTGIINQIRAFLLERGIAVRQGRLSLRAALPQLLAAPSEIVSPRMLHLIEDLAGDWHRLDERIRALSDEIEAIARQDAGCERLMSVPGVGPIVSSAMVAAIGAGDTFAKGRDFAAWLGLVPKQISTGDRTILGSISKRGNRYLRVLFVQAAWVVLVKRKSRERLGLDRWLEAAKKRLHRNVLAIALANKLARIAWSVLAQGRSFQVGRLAEAHGQTA

SEQ ID NO: 457484 - protein, 340 aa, unidentified
MNITTVGIDLAKNSFSLHVVDERGKACWSKTVSRKKLLVTLANLPPCLVGMEACSGAHYWAREIGKLGHEARIMAPKFVIPYRKGGKNDNNDAAAICEAVARPDMRFVPVKTPEQQAVLALHRVRQGLIEHRTTLINQLRGLLTEFGLIIPKGRYQTHEHIPAILEDAENGLPDLAREIIHDVWQRYQVTREQVLAADRKLSALVRESVEASRLMTIPGVGEQVATAMVASVNPAQFDNARQLASWLGLTPRQYTTGGHIRLGRITKRGDKYLRMCLIHGARAVIANLRDKQDRTSCWIRELVARRGYKRAIVALAARNARLIWTLLVKQEDYRVTPAAA

SEQ ID NO: 457485 - protein, 342 aa, unidentified
MTEVMIGVDLAKSVIQIHGASMSGRLLFRKKLSRGQFLRFMESQSGAVVVMEACSSAHYWAQELATLGHEVKLIAPQYVRPFVKRQKNDAADAEAIVVAAQRPEMRFVEPKSEDQQAKAVLFRARKRIVRQRTELVNALRAVLYEYGHVVPLGLGHIKRMEALVDDADSALPKLVREECSDLLAQISEKTARIEDKTKKIAGLAQQSNVARRLKTMPGVGPMVALAVEAFAPAMDSFKCGRYFAAWLGLVPRQFSSGGKERLGRVSKAGQADIRRLLIIGAMARVSWVSRRSPVQGSWLARMLARKPRMLVAIALANKMARRMWAMLTKQEDFCDPTLAVAA

SEQ ID NO: 457486 - protein, 338 aa, unidentified
MQTGQTAQTYTLFVGVDIAATTAAVVTQRPGAKASQSFIIDQTPEGYTSLLHTLQRTGHAPCQVLVVMEATGSYWMSLAARLVHEGFGVSVINPAQAHHFAKALLKRAKTDVIDAQTLAQLAMVLQPEPWTPPPQIYYALQQRLAQRDDLLNLRQQVRNQLHALVQHPEVIPEVRARMDRLLATFEAQLTEVEREIAAALTQDSAWAAAATRLQSIKGVGWVTAAWTLVTTLNLTSCDTVDSLTAYAGLAPMPRQSGSSVWHRPSIGHTGNGRLRTAFYMATLSAAQHNPVIKAFYTRLREVGKPEKVARCAAARKLLHIAWAVVKKDQQFDPYYARG

SEQ ID NO: 457487 - protein, 420 aa, unidentified
MKSPSDMEFTAFVGLDWADKKHDICLQAAGCEDREFDCFAHRVTAIEQWALSLHQRFGGRIAVALELAKGPIVYALQKYDFLVLFPINPSMLAKYREAFTPSRAKDDPTDAELALDLLVRHRERFQPLQPQSEPMRTLQYLVEQRRRLADDKVRYTNRLGNALKQYYPQALDWFTDRDTVLFCDFIARWPTLLQVKRARKASLVAFFRAHNMRFPKLIEKRIYAIKAATPLTQDGAVITAYKLQAQMLVEQLRVTLQSVRRFDQEIADITSKLPDYGLFRALPGAGSTLAPRLLVAFGEQRDRFAGADECQKYFAVAPVTERSGKKTWVHWRWQCSTFLRQTLVEWAGQTINKSFWAGAYYRQQRAKGSSHQAAVRALAFKWVRILYRCWQTRTPYDESKYLEALRRRGSPLLKQLSETM

SEQ ID NO: 457488 - protein, 361 aa, unidentified
MRIIGCDLHARQQTLAMLETTTGEVVNLTLMHEGNEVRDFYSQLPRPVRVGIEATGSMQWFLNLMEELGIECRVGHPATIRAAEPRKQKHDRRDADLILKLLAENRFPAIWLPTKELLDLRALVLHRHQWVRMRVRMQNALQAIALANGLRRGPGLWSYDGQAKIAFLPLLPHASYRRSALQTMYKHMEEEIENLTKQVAEQAGHRSGARLLMTHPGVGPVTALATDVFLGDPKRFVDGKALASYVGIIPREYSSGERQRLGGVTKQGRPLLRFLWCEAGAHAVRRDPELQRFYRRKLVQKGLGKARVAVARKLGIRLWIMLRDEIDYQEFCRRGQKQQSGAACAGMPETGYGANSHRPID

SEQ ID NO: 457489 - protein, 409 aa, unidentified
MLSVGIDAALAEHQGEMRSDNGKVYWNSRFENNKEGLAKLVKQIEEVKKDTGESVIGIYAEAMGTYFAPFQYRLTQMGYRVVLVNPIEVKNARTIKNLNKNKNDRIDATTLASLPWMDEKYRNQESHQRYPISELTRLYQKVQRMETQQKNRLNSDITRVFPELIQFVKDLDSKTVLKLLDKYPTPVKMLRVSEDKLLKLVKSTSRGGFGSEFVKKVRELSKDSIGVPDTEGVLEYRIKYFIKSIREIKESLKKIEKEITRRTEGIEEVQMIDDMRGIQRIKAASLYGEVGSAEQFKTARKLQGYGGITAKRNQSGSKEWIGRPTKIANHYLRSTVSVCARSLAHHSEEFREIYYREKMKGKTDTQAYIIIGNRLLYHVFTILKNKKPYRKRLPMSAKQPPSPSISYKG

SEQ ID NO: 457490 - protein, 368 aa, unidentified
MGNEAKRFVGIDLSKRTYEAVAITVNPQTITRWNGKLDLRGRKCLLDKLHSGDTIALEAGTASFKIAKEIQSKQGVMVVVLNAANVAIIHASLKKTDKEDALKLARLIEKYSPEELPVVPIPTDQEMERRALVAHETRFRQDRVRLINRLHAVFLRAGFPDHTKRQLGIAASREKLIVSELDGFNLVEAMNLDHMIVEYEKILEDLDKQINDTVVACGEDAEILLSIRGFGIKTTMAVLAYAGDMRRFENPSQLVNYIGFSPRLYASGDIERSGSITKRGNPHVRWLLIQSAWCMVQSKAANPLKDRFEAMLKRGKAKSVAIVALARKLLELVFILLTRREKYRFIDPSLYAIKLRRAGFNLVGAGIG

SEQ ID NO: 457491 - protein, 368 aa, unidentified
MHPDAAGIDIGNESHYVAVPPSRDSQPVRRFGCTTAELKAMADWLKQCGIRTVAMQSTGVYWIAVYDILEQAGLEVYLVNARETKNLPGRKSDVQESQWLMKLHTYGLLRNSFRPSQEIRRMRTYWRQRNDLVRAAGRHIQRMQKALTQMNLQLANVLSDVSGVTGQAIIKAILAGERHAHKLAAFRDCRVKASEEEIARSLEGNWQEDLLFVLKQEQAGYEFCQKQMTECDRQIEQYLQQREDRSRGASLPEEKRKERLKKKKGNAPQFDLRAELFRISGTDLTRIDGIDVMTAMTILSEEGWDRSKWKTEHHFVSWLRLCPDNKVSGDKVIGKGRLPTNNRVTIALKMAASTLWASNTYLERSSAD

SEQ ID NO: 457492 - protein, 351 aa, unidentified
MIYVGLDLHKCYVTACALDALGQGLAEERRLPPDLAVVLLWLGRLTGPVTVVLEATLYWAWLERHLTAHGYTVRVAHPYQVKLIWQARTKTDPIDARKLAELARVHLLPAIWIPDASTRAQRQLLRGRAFLVRQRTVLKNRIHAYLTAENLRSPAADLYGRAGRAWLATVTLPPVVRRSVDLLLANLDVLTTQIGALDKYLQRHVRQDAVAQRLQTIPGVGAFGALLLQAEIGPIARFRSAQELAAYAGLVPSTHSSGGKTHHGSVGHGSPWLKWILVEILQSLKLAPSPVGAHYQKLLRAKGKPKATIAAARKFCTYLYWMLKEEWAYSEWLRQHDRPEVRPVQPLGSVA

SEQ ID NO: 457493 - protein, 424 aa, unidentified
MKPHSDIEFTAFVGIDWSDTKHDICLQAAHSDEREFTVLPHRPDAIAAWAGALRQRFGGQPVAVCLELAKGPLVYALQKYDFLVLFPVHPATLAKYREAFVPSHAKADPSDAQFALELLLRYRARLRPLTPQSVPMRTLLRLVEQRRRLVGDQSRISNRLTDALKQYFPDVLAWFPDKDTILFCDFLTRWPTLKQLKRARRATLLSFFHDHHVRSQARIDERLHAIKSATPLTDDPAVIRPNQLLVLALIEQLRVTLQAIERFDAEIDAVSETLPDYALFRALPGAGGTLAPRLLAAFGEQRERYHSAAELQRYSGIAPVTESSGKQHWIHWRLQCPTFLRQTFVEWAGATIPHSFWAAAYYRQQRDKGCSHHAAVRALAFKWIRILYRCWQTRTAYDESTYLNALQRRGSPLLASMTGLAKNS

SEQ ID NO: 457494 - protein, 358 aa, unidentified
MASIASTSRVVIGGIDTHKDLHVAAVLDTAGVLLGTEAFSTTRAGYRALVRWLRGFGDVRLVGIEGTGSYGAGITRHLGEAGIQELEVDRPDRSDRRRRGKNDTLDAENAARAALAGRRTSIPKTKDGTVEALRVLRLTRTTAVKSRRAALQLLGNHIVAAPEELRDQVRNLTRMQLIRTCAAWRPDTSGFRDPVVATRIALKSLARRTLELNDEIADLDQLITTLVGELAPQLVAATGIGVETAGQLLVTAGDNPQRLRSEPAFAMLCAAAPLPSSSGKTQRHRLNRGGDRQANSALHLIVITRMRVDQRTKDYVTRRIAQGHSKPEIIRCLKRYVAREIYYLLKPPTQANMKSRAA

SEQ ID NO: 457495 - protein, 459 aa, unidentified
MKQRQRKGKGLPAQLAAVNLHAAGIDIGATEHWVAVPADSDSQPVHRFGACTADLEALAAWLATCGVTTVAMESTGVYWIALFELLEARGFTVVLVDAREVQRAPGRPKSDMQDCQWLQRLHTYGLLAAAFRPPEQVCVLRSYLRQRAMLITYASQHIQHMQKALTQMNIKLQHVVSDVTGVTGMAILKAILSGERDPQKLARFRDRHCQHSEQEIARALQGNWRAEHLFALQQAVELYEFYHRQLAACDRQIEAHLQTFADKSAGKVLPYRPRKRKRRATEPRFDARPPLFRVAGVDLTAIEGLDENTALVLLSEIGTDMSRWPTEKHFASWLGLCPHHKISGGKVLSRKVRPSANRAATALRLAAQCLHHSHSALGAFFRRLKTRLGAPKAITATAHKLARLVYRLLKYGEDYVAQGMAEYEQAYRERTVQHLLRKAKALGYKLLPITEGAAQTPAV

SEQ ID NO: 457496 - protein, 350 aa, unidentified
MIIIGCDYHPSFQQIAFVDTETGELQERRLQHREEAEKFYRELAAQGTKVRVGMEASGHARWLERLLAELQCELWMGDAAEISARRVRKQKTDRQDAQLILQLLLEDRFPQIWVASWENRDLRQLLWHRHRMVQARTRIMNQLQAVALNEGLRSKKRLWREAGREQLEGFRLAPWASHRRRDLLELLDRMNPTIAKLTQAIDVEVEKCPAARRLKTHPGVGSLTALAFVLIIGKADRFQCGKQIASYLGLVPLEKSSGNLRRLGHITKQGNSLLRFLLVEAAQVTARSLPEWRSKYVHLTMRRGRKIAKVAMARKLAVRLYWMMRKEWDYEQLRKFGSHAGKPGTGDGVK

SEQ ID NO: 457497 - protein, 417 aa, unidentified
MSYKIAGIDVHKRVLMVVVINASTPEEKPERRRFTTMPSDLHRLSIWLREQRVEEAVMESTAQYWRTVWLELEPYLRLQLAQAFSNRAPRGRKHDFKDAERLVRRLIADELILSFVPGEEQRTWRNLTRMKTQLNRDRVRLQNQMECLLEEMRIKLSMVVSDLLGASGVRILRALAQGESDSKKLALLGDNQLKCSEEQLVDALTGRPQPMHREMLRLQLERLQLIDRQIKELNGLIAQAMKPHQEAVIRLAEVPGLGVDSAQLVIAEVGVQASTFPSAAELTSWVGTCPGKDESAEDNHSSRSAKGNKYLRRVLNQSAHAAVKKKGSHFQAVFRRLLPRLGYKSAIWAIAHRLCRLIWKILHEGVRYIERGSESDPKLREHRARTLARALRKLGYDVAITPINPSTAQKAMQTYGV

SEQ ID NO: 457498 - protein, 384 aa, unidentified
MQKDNTLFIGLDTHKEQTQVSYTLDHRTAEVNDLGRIQTTKTGFVKLARQLQSKYPHATLHFVYEAGPCGYWIYRLLTSLGHCCFLVAPSLIPKKPGDRVKTDKRDAQNLTRLLKNNDLDPIYVPEPEDEAVRDLSRAREVAMRDLNDAKHQLKSMFLRNNIRYTGSDSWSLKHLRWLTEIVLPHPCQQIVLQEMIQTISERMTRLKRLDNELTHQVKQWRYYPVVKAIQAMRGIRLLIATGMIAELGDLSRFDSPRKLMKYVGLTPSEHSSGNTRRLGAITKCGNGRARRLLIEGAHSYRHTAKISKEMQLRQEGLPKAIIDKAWEAQLRLCRRYQRLMMRGKPRNVVITAIAREMIAFVWSISREVVLPRIDPRTRLSRVPA

SEQ ID NO: 457499 - protein, 318 aa, unidentified
MDKQSVGIDVSKDALDVAAFTTNKKWHFSNEETGINQLIEELKVLSPVLVVMESTGGYETPLAYALYNAGIPCAVVNPREVRDFARATKKLAKTDSIDAQVLAHFAAVIKPEPRPLSDNQSQELEAILTRRRQITGMLTAEKNRMHTARKQVRDSIQAHIDYLEKELNQLNSNLKGRIEESPIQREKYELLQSVPGVGPNLSSTLLIELPELGNLNRRQIAALVGVAPINHDSGSKRGKRRIWGGRPQVRTALYMSTLVASRFNPVISEFYARLCATGKAKKIALVACMRKLLSILNSMLKHRVPWHFSQPVLISSTF

SEQ ID NO: 457500 - protein, 415 aa, unidentified
MSDSFRFFVGIDLGSASHQVCVLDASGQTLGERAVAHNGADVAALLDWLTTLTQAADPPSIAAAAEIPHGAMVEAFLERGYAVFAINPKQLDRFRDRFSVAGAKDDRRDALVLAHALRTDRYAFRPLALGDPRLLRLRELGRAEESLQQDLRRAANQLWQLLQRYFPGLLTLVPAADEAWLWDLLENAPLPEKAARLRPSTLHGILKKHRIRRVSAQQLAELLAQPTLPLAPGAAPAIAEQVLLLLPRLRLLRKQHAQLGRNIETLLEQLAGDESFQEHRDVQILRSVPGVGRIFTATVLAEAAEPLAQRDYRVFRTVSGVAPVTQQSGKTKLVSIRRACHPRLRHAIYHSAARYAQDDPRGQQHYARLRARGCSHARAVRGVADRFLALIFALLTHNQLYDPCRRALLDPAPTC

SEQ ID NO: 457501 - protein, 320 aa, unidentified
MMYIGIDVSKDSFVAAYPGKNGYTTKSFKNDTKGVRCFITSLPEECHCVMEATGNYSMLLLYLLQQAGIPTSMENPQKIKHFSRAMMTVTKTDEIDAKLIAMYGEKMTPEPYKIPVESILLLKQKRTVLRQLKKHLVATKNLQQSLAVLPKQDLASKHAVEKTIKFLSRQIAELEDEITNLSNKEYKRQMDLLTSIKGIGKTLASALIVATGGFTYFSNAKQISRYLGLCPTYQQSGTSVNVKGHINRNGDTHLRSQLYLVACKCTQCNAACKETYDRLRANGKSGKAAVVAVANKLIRQAFAVVTKNQPYVDGFVSSIA

SEQ ID NO: 457502 - protein, 364 aa, unidentified
MLGNPSEKGKVMGKITRIGVDLAKNIIQVHGVDSMERVVVRKAISRQKFLEWFANLEPCLVAMEACSAAHYWARKLRALGHEVRLIAPQFAAPYRKGGKHVKNDRLDAEAICEAAGRPHMRFVAVKTADQQNVLVMHRMRDGFVEERTALVNRLRGELVEFGVFLPQGIDAFRAHFVEALEDGATELNGAARTALLRGWEHLQALDQQIAWCDAQVAAHVKHDSNAQRVMAVIGIGPLTASAAVATVGDARLFKNGRQFAAWIGTVPKQKSSGGKTRLGRITKQGNTYLRTLLFQGARSAVTSAHRRTDRLSRWIVQLQARVGWYRTLVAIANKHARILWAILAKGERFDPSHVTTPSTAGQPR

SEQ ID NO: 457503 - protein, 340 aa, unidentified
MPLYGGIDLHANNSVVVLLNEQDQVVYQKRLPNDLPTILEVLAPHHAEIKGLVVESTYNWYWLVDGLMEAGYRVHLANPAAMQQYSGLKYSDDHSDARWLAHMLRLGVLPEGYIYPKAARAVRDLLRKRAHWVRQHTANVLSVQNIMVRNTGARLSVKRIRELPKKELEGLLPEADQVLAITSSLAILDCLSQQIKALEKIVHQRLLHTPSYEQLLTVNGIGTILAQTITLETGDIHRFPTVGNSASYCRCVDSNKISNGKRKGQGNVKNGNPYLGWAYMEAAQFALRFNPSAQRFYQRKLAKSNNNTTLARKAVAHKLSRACYYVMRDLVPFEATKAFG

SEQ ID NO: 457504 - protein, 325 aa, unidentified
MKLPVLGIDIAKKTCSVHFFVDPESSGQRGLFANSPRGWQQLHTWLRRWHAGSVHACLEATGVYGEGLARFLYGTGHTVSIVNPLRVHAYARSELQRNKTDSLDAAVIARFCHAQRPPRWEPLASERQQFQDLVRHLHGLQQRRLEERNRLENAPRHTPLVSTSLRKLCRQLDREISAFHQKITDHLRRFPDLLREQQLLVSIPGIGEWTALRLLAEIPNLRSFPGVRQVAAYAGLNPALRVSGTSLHGPTRLSKLGNAEVRAILYLPALVALRYNPRIAALRQRLREKQKHHRLILGAAMRKLLHLAYGVLRSGKPFDPNYSAA

SEQ ID NO: 457505 - protein, 411 aa, unidentified
MKDLLEKCCGLDVHKDIIVACILSGPIGRSTVSEIREFSTLASGLAELRDWITSSGCSHVAMESTGIYWTALYEVLEAAPEELTLLVVNARHMKNVPGKKTDMRDAEWIATLLRAGLLNASFIPEKTIRELRHLTRYRKSIVRDITSQKNRIEKFLQSSGFRLSSFISDIFGVTGRGIILHLIRYGSIDRDSLNRCLKTKTRERLDEILAALNGTLSEHQRAFLNLMLEHYDTLRFHLAEVETAILNEASPKAAQVEQLTTIPGISATASLSIIAEIGTDMGSFKTADHICSWAGLSPGNNESAGKRKSTSVTKGNPYVKSMLCEVAWVIAGKRNSYLSVWYWKIKQKKGAKKAIIALARKLLVIIYTMLKYGTRFDESCFETRRKMHEQSRTSHYIRELEKRGFHVGLPA

SEQ ID NO: 457506 - protein, 338 aa, unidentified
MNFCGIDVSAKSLSVGLYRGERVPPLREFDNTPAGHKQLIGYLLGPRREAVRVCLEASGNYSLDVSLALAARAEIDLEVINPKVARRFGQALDERSKSDAIDTYGLAEYARRMPFVRWQPPRTQDLQLRAITRQMSALTRDRAGLRCRLHAATVAQGGPACVVRELQLAIAQLERSLTRLRRAALKLVAQDPGLQRRLELLGSPKGVGPVTALAVLGELAILGDRSARELTKHAGLDVVEFSSGASVRKKPHISRAGNAYLRRALYMSALSAAHHEPYLRAFYQRLVGAGKHKMQALTAVMRKLLHAMVGMLKHDRPYEGALLCPPATGKAAQAQAAA

SEQ ID NO: 457507 - protein, 422 aa, unidentified
MPNVQSTQSPVVLVAIDIAKLRHDVLIEAPGWKRRKRLVLLNTAVEFRRLADYLHSLHMPVHIVFEATGNYHRPLAHFLLSQGFQLDLIPSLAVARTREAMHNSWDKNDPKDAQVLLHLLRTGVTQRYHDPLVNHTHDFQELSLTYAQVSMEKTRMQHRLLTHYLPLYFPEIERHYHASRSLWLLDFLQAFPTPATITALDRDQFVQSAWPIIGRKVAKRRLLEDIYHRAQSSIGLPVEAESEAVAMFRVLLKEMSRLCKLRQELEQRADGYLGDNDDFRRLKQIPGIGPILALTILAEAGDLRRFRHHRQFLKFCGLDLATQQSGQFRGATKLSKYGNGRLRCALWMAATIAVKQRENSFRDKFERYIRKDPLSADRKRMAYVAVAGKMARVVYGIIKSGTEYRCFHEVAAPSGRAVSVGP

SEQ ID NO: 457508 - protein, 328 aa, unidentified
MDQISVGIDVSKTFFVVGLAPTGERWTSETTPVAIDALVTRLRGLAPAIIVVEATGGYERALVAACGVAGLPVAVVNPRQVRAFAQALGLTAKTDDIDAGVLATFGDRVQPAPRPLADAATQALAALVARRRQLIEMIGMERQRLEQAPPTGRITRDLRNHIRWLERRVSDVDDEIGTAIQASPIWRVQDNLLRSVPGVGPITARTLLADLPELGTLDRRAIAALVGVAPFNCDSGQHRGQRHIWGGRASVRTTLYMAAVSAARHNPVLATFYRRLRDAGKPAKVALVATMRKLITILNAMLKHHTPWTGDGASTPAAIARRAPAATV

SEQ ID NO: 457509 - protein, 343 aa, unidentified
MQTITTIGLDIAKSVFQVHGVDAAGQVVVRRQLKRRYVLAFFQKLPPCLIGIEACASSHYWSRELRALGHTVRLMPPAYVKPYVKRQKNDATDAEAICEAVTRANMRFVPTKTPEQQSCLMLHRTRHLFIRQQTAVINAIRAHLAEFGIVAPVGRKGVTELLHVVADPSDGRVPEVARACLAALGTQLLGLKEQIVEFDRLIMAWHRSNETSKRLHYIPGVGPLLATALAASVADPQTFRSGRNFSAWIGLVPKQHSSGGKDRLGSISKQGDRYLRSLFVAGALSVIRYAKIHGTKHRPWLTALLARRPTKVAAIALANKLARMAWAMMARGERYRNPVALAA

SEQ ID NO: 457510 - protein, 433 aa, unidentified
MHEIEDEPLFAERAAGIDIAKAGIEVTIRVPSEARAGRRQQETRSFATTHRDLLALADWLRSWGVTRTGMEATGDYWKPVYFILESRGLDCELYHAAAVKALPGRPKTDRADSVWLARITERGSLPSSFVPPAPIRALRTHTRYRRHLTQARTAEKQRVEKLLEDAHLKLSSVISDIHGVSGRAMLEAIIAGQRNPTALAQLARGTMRSKIAQLEQALDCSFLTEAHVTILAMMLAAIDSCTAQIEDLTARIEVLAEPYLHQIGQLDAVHGTGTISAQDVIAEIGVDMTVFPTAAHLVSWAKWCPQVAQSGGKRKGANAAGRGNPYLSAALGEITISAGRTQSFLGAKYRRLVKRMPKKKALVATGNSVLTIFHALLSDPAATYHDLGPDYYQHRLNIRRQARNHLQSLKRLGYHVTIQPINPDTGELLTATP

SEQ ID NO: 457511 - protein, 462 aa, unidentified
MPERNDRESGESNRRQLQGLPVIRRNVAGVDLGSERHWVCAPTQDGSGREIASFGATTRELLRLGEWLKARQVESVAMESTGVYWIAPHEVLEGQGLQVLLVDTRQLARVPGRDKKTDPSDCEWMQRLHSCGLLRGSFRPEEAVCMLRTLVRDKANLVAESADWVRRMQKSLDQMNVRVHRAVSDIDGVTGMAILRAIALGERDAQKLAQLRDRRCSKTQQEIAEQLTGHWREDHLFSLQQALKMYDAVQERIAAYEQEILRQLEEMEEPGQRGETPPPLNNANKAKAIKRRGQEAKRQALYRMSGVDITQIDALGVETVEVVLSEYGPDLSRFPTEKEFVAHVTLAPRVPRSGGKPLKKKKRNSASTRVAAALRMAALSLRHSQTALGAYYRKLAQRLGGDVAVFATARKLATLIYRLLRWGQPYVDEGAAAYEHRYLQQRIKSLTAKAKELGYELTAVNA

SEQ ID NO: 457512 - protein, 487 aa, unidentified
MACGRLSTPSNTVVPCEAVYRAGRRMSLYGPLTVAALTSTRIRFVVPVAISAGDHSHVVRVKEESMLAESHDEEQIIARVAALDIAKAELVCCVRVPSPAGGKRRLQEVTTHSTMTQALTELANRLVEMGVQRVVMEATSSYWKPVFYLLEAHGLDPWLVNARDVKHLPGRPKTDVLDAVWLCKVAERQMLRPSFVPPWPIRRLRDLTRYRTDLVAARTAEKNRVEKLLEDACIKLSVVASDIFGVSGRAMLAALVAGERDPKVLAQLARARMRGKIDRLEQAFDGHFADHHRFLLSRMLSRIEGLDADIAAIDAQIEAQLAPFAEAAAHLDEIPGIGSVAAAAIIAEIGVDMSRFPTAGHLCSWAKFAPGINSSAGKTKRSASSGHGDPYLARVLGEAAVGTTKTDTFLAARYRRIARRRGQPRAVVAVGRSILVIIWHLLQDPDARYQDLGAEHYNRHVDPSAKKRSHIRQLEALGYTVTLTPAA

SEQ ID NO: 457513 - protein, 420 aa, unidentified
MKSASTIACHQLPERPLNDVTAGLDWARDDHAVSIVDSRGREVARFSVEHTSAGLGDLVAVLNRHSCNEVGIERSDGPVVEALLEAGITVVVISPNQVKNLRGRYGSAGNKDDRFDAFVLADTLRTDRTRLRPLTPDSDATLALRRACRARKDLVSHRVGVANQLREHLKRVFPGAVGLFAEIDSPISLTFLTRFDCQDRADWLSPKRLTAWLASVGYCGRVDPGVLHARLSAAPYGATGDHGATEAHVTRALLAVLITLTEQIKTLSTQISEQLAVHADAHVFTSLPRSGRVRAARLLAEIGDCRTRFPTPEALTCLAGVAPSTRQSGKIRAVGFRWACDKQLRDAVTDFAGDSRRANPWAADLYNRARDRGHDHPHAVRILARAWLHIIWHCWQHNTAYDPTQHGALQRLLHDRQHTA

SEQ ID NO: 457514 - protein, 425 aa, unidentified
MNFTQNAKINQVTDKTLVIGMDIAKRTHYACMVDERGMILKKSFPVHQTNQGFEYFYECILSAKKQFGKTDVIIGIEPTGHYWLNLAYFLDDRGISLVVCNPMHVKKSKELDDNLQTKNDAKDALVIARLVKDGRYSYPRILRKTEAELRVGSTLKGNLTEELNAIKNKMIRWTDRYFPEFQGIFPAFGKMALAVLECTPFPSEIVNQEPSELLATYRTVEGMKSPQLPKTKKLIENARTSIGVTEGQQMARIEIATLVQRYRQLEKELASLQEQLTEFIRATVEYEYLQTVPGLGDATIIDLLSEIGSFAHYDHPRQLLKLAGLTLRENSSGQHKGQKRISKRGRSQLRALLFRVMMPMVRHNKAFRQLHAYYTTRQVNPLRKKQSIVVLCGKLLKVLHAICTKHMVFDAKQMMRDIPTLERAA

SEQ ID NO: 457515 - protein, 413 aa, unidentified
MQVVYERCCGIDVHKQTVVACAIVPGADGQAGKDTRTFATMSEDLEGLAGWLQGLGVTHVAMESTGVYWKPVYNLLDGRFSILVVNAEHIKALAGRKTDVQDAEWIADLLRHGMLKGSFIPSQVLRELRDLTRYRSKLGDERKSEVNRVQKVLEDANIKLASVASDVMGVSGRAMLDQIVGGQSDPAILAELAKGRLRDKQELLLKALSGRVRAHHRFMLAQHLSHIDFLDEAIAQLDQQIQEQMRPFAAALATWDSLQGINQRIAEIIVAEIGADLVPFEDAEHLASWAGMCLGNNESAGKRKSGKTRKGSPWLRRALVEAAHGAAHTKGKYFQGLYRRLAARRGTQRAAVAVGHSLLVTGYYLITRQTKYEDLGGNYFDERDREGVKRRAVKRLEKLGYRVDLEPIAAPAG

SEQ ID NO: 457516 - protein, 349 aa, unidentified
MRFYQQEHRFYCGVDLHARCMYLCILDHTGQPLLHRNYPADARAFLDAVAPFRDGLVVAVECMFTWCWLADLCAEQGIPFVLGHALYMKAIHQGKSKNDRLDAAKIAGLLRGKLLPQAYVYPKAMRATRDLLRRRSFLVRRRAELLAHLVNTNSQYNLPPLNKKLVYPANRGELNLAERFTEPSARKLVECDLALIDALDGQIHELELHLVRTAKVDDVQAYARLQSIPGVGKILGLVLLYEIHDVGRFPEAGHFLSYARLVRPGHESAGKAKGFGNKKIGNAHLRWALGEAACLYLRSSDRAKRWQARMHAKHAPGKTLGILAAKLGRTVYHLLRTRQVFDEARFFAS

SEQ ID NO: 457517 - protein, 364 aa, unidentified
MKRKVYVGMDVHKETIQIAILPSNTKALVKEQQIKHEEGQIKKFIQKLKSEGTEIHCCYEAGVTGYPLYRYLKTLGVNCIIAAPGKIPRQSSDKIKTDKRDAIKLARLLRSGELESIHVPSEEDEAVRDYLRSRDSLRLDLGRNRQRLMKFLLRKGITYSTTKYWTASHYKWLNNLHFENEILQATFNDYYSRVRVQEENLKAMDQKIREIAESEPYREKVGILRCFRGVDYLTAMFLLSEVNDFKRFKTAGSFMSFLGLVPGEYSSGPKRKQTSITKTGSPRLRRILVEAAWQHRFPGTGSKVVAARRVGQSALVVSLAEKASLRLHKKFKSMQLRGKTPQVMITAVSRELSGFLWAAMNLVA

SEQ ID NO: 457518 - protein, 415 aa, unidentified
MERILERCCALDVHKNQVTACVHVPDREGQRSELRAEFSTMTAELLALRDWLQGLGVTHVAMEATGVYWKPVYYLLEDDFELLLVNAQHVKNVPGRKTDVQDAQWLCQLLEHGLVRSSFVPPKPIRELRDLTRYRKTLTWERSREANRLQKQLEDANIKLASVATRVLGASGRAMLEELCRGNNDPQALAELAKGKLRAKLPALRQALEGRFSAHHALLVSHLLAHVDYLDETIASLSSEIEQRLRPFERELELLETIPGVGRITAEVMLAELGPDMSRFPSDRHAASWAAICPGHDESAGKRRSGKTRKGDRWLRTALIEAANSAAGRTRGTYLNAQYLRLKSRRGHSKAIVAVAHSILISAYHVLERDQSYEDLGGDYFTSRVDTEHLTRRLVRQLERLGQSVTLTPSTAEAG

SEQ ID NO: 457519 - protein, 316 aa, unidentified
MKVAGIDTGKAELHVCLLPDGTRFKVGNDAGGIAELVTKCVEAGIRRAGIEATSIYHRAAAKALRQAGIEVAELQPRQARGYAQALLQWSKSDTIDAAVIARLTRALDEVRPAPDPKIEAFAEVLTYVEQLEERIAWLKTSRERYANARFKARIAADIKALEKRRRTELKRLEAAMRKDQILATRLDLLLSIPGVAERTAIGLLIRMPELGTLTREAAARLAGLAPCDDDSGQHKGERHIHGGRSRLRRTAFMAAFAAALNWNHDLNIFYKRLRQRGKAHTAAVVACARKLIILANAIIARGTPWEKQRGMPCPAS

SEQ ID NO: 457520 - protein, 394 aa, unidentified
MKRPCVAVDVSKSKSHYQGWINIDKKCGNAKCIEHSKIGFKEISDKLKELEGITNEKPVVVFEATGVYHRSLQQYLEDNEIDFIIMSPLASAKVRKSNIRSTKNDKRDCKTIARTYFEKEFPLHEKSDEIYDNLREMSRYYHYLTEQLRKCKVQFKLLLDIVFPKFDLYVTDYSEIPMALFSKYHHPDEIKNKHPESLAKYLEAKTCHHYNYCLKEAISIIKYCNECQSGCSKESIDCRLFGEVIEQIKRKVEEQELYLQKIIDLAKELPNYELLLTIPGISNNLAARILAEIGDISRFPRAKSLVAYAGIDPTVYQSGENDGLHLRITKKGNKELRCLLYLAIHNTIQGNNVISNYYHKKIATGLASKVAKVACMNKLLRIIYSMCKTGVIFQ

SEQ ID NO: 457521 - protein, 317 aa, unidentified
MKQMKASTKCAGVDVGKPWLDASVHGETPLIRVANDQAGWAKLIAWLQSFEVTRVGLEATGGYERGVRAALEAAQFEVVVHQPQEVRLFARWQRIRAKNDRKDAQVIAAATAQVDTVRAAQDPRLRDLAERMTAYEMITDKLAELKTFMEHVTLTDVRCAIEVHIRALERTKQAMARQIIRRIRAEPDLKRRFDLLQSLKGVGPIVAAALVIRMPELGAMARGQASALIGVAPYDDDSSKRNGPRHIAGGRFRPRRMLYLAALAAKRFDPELRILAERLLAQGKKPKVAIVAVMRKLIEAANIILARGQPWVQKQPA

SEQ ID NO: 457522 - protein, 391 aa, unidentified
MVCVGIDVAKDKHDCCILDSEGTPLVDCFTIPNNMDGFKSLLQTIQDCSQKSDKIKVGLEATGHYSYNILGFLLDNDLPVYVMNPLHTNLYRKSLSLRKTKTDRVDAKTIATMLLSDVDLKSYTDTAYHNEELKSLTRYRFDKVQERAKLKQSVSRLVTILFPELEQLVSSIHGTSIYALLSEYPGAKQISEAHLTRLANILVKTSRGHYRKDKATHIRDAARISIGSVMPAKSLELKHTIKLIQELTSEINEIEDAIRKIMDELKPPILSIPGMGFHSAAMILAEVGDFSNFNSPDKVLAYAGCSPSTYQSGKLTNCYAHMEKRGSRYLRYALYTATKYVCYWNPVFTEYLTKKQAEGKHYNVALSHATKKLVRLIYALQKSGKAYLAVT

SEQ ID NO: 457523 - protein, 399 aa, unidentified
MRTVFGIDVSKHTINLAIVVNKVKVDELKLTLNRPGLDDLLKLLKSFHQPEVVFEATGIYSRTLQHFLDCNKFEYTMLNPLAAKKQLDSLCPYKTDRADALNLAQTSFIVHRSLSYKQDPIYEQLHDLSRFYQEVSRDVINHKNRLHRALQLTFPQIESLFSNTNSELYWAIVLRFARPSRVLKVTHAELTSVILHSTNKIISSDRASRIAQKLSVLAKKAYPVVNDNSYVYEQIQYLANRIVEEVHEKDKIITKMQHEAENLPEHKLPLSIPGFGVRTVTSLIGELGDIRRFHSSNALNAYIGIDLRHYESGNFVATDHISKRGDAVARKILFKSIQNIAVTSHFHPNHINDFYQKRKRQSPQSGTKKIAIAAIHRLLRTIYHLVKYNQSYNYQIAKA

SEQ ID NO: 457524 - protein, 310 aa, unidentified
MPLIKYLGVDLCKLELVVDLAAEAKPRAFPNDVHGHAALIAVLPEGAHLVCESTGGYQRALVAALHAAQIPVSVVSPSRVRHFALAKGLRAKTDPIDARLLSVFGQAMSCVALPPPCAGALELQALVRARQVLHTQLNEESSHDEHCTVALLQEQALARRALFHEQIRAIERRLRALIAANPVWRARSQRVQEVSGIGEVSAWIVLAELPELGQLARGQTGALLGVAPDPDDSGPRHGPRHISGGRSHARKVLYMAALTASQHNPVLAPYYRHLTEHRHKPHRVALTAIMRKLVELLNRLLADPNFILAS

SEQ ID NO: 457525 - protein, 418 aa, unidentified
MNGERKARGKRRYVALDIHKHYCVIAAVDKDGQVVLHAVRVEHQDLEAWAKKNLQDSDHVVIESTTNAWHVYDLISPLVERMVVANSFKVKQIANARVKTDVRDTLILARLLAANLVPTVWVPPQQVRELRQLLAQRREMVETHTQVVNRMHSVAHRHHLKHERGKRFNEKNTGWQQDKRLSGMEQFQLKLEMENRAYLEKQIERIGKEVAKLSHQKPWAESMTYLMQLPGFGVITAMTVLAAIGEIERFETAQQLASYSGLVPGLEQSGTKKRGKGITKEGRKELRWALVEVAQRAVKSDPYWKKRFETMQKRMHRNQAIVAIARQILEVVWNVLTQRQPYRHFSEERIAYKYLTWGWQMDEEARDGLTRQQFIRYYLMRLGIGQDLTRIALDPKHPRRIASEAEVLALRPELHRIE

SEQ ID NO: 457526 - protein, 376 aa, unidentified
MKNVRFIGLDVHAETIAVAVAEADGEVRSVGVIPNRAESIRKLVKKLGPAEQLRVCYEAGPTGYVVYWQLAALGVSCDVVAPTLVPVRPGDRVKTDRRDALKLARSYRAGDLTPVWVPDAAHEALRDLVRAREAAKKDQLRARHRLGKFLLRQGRRPPTAMKAWTQGHLTWVKSAVHFAHAAQEATLLDYVHEVDHVAGRLERLERAIDAAVQAAPGHIRAVIEALQALRGIALVSAVTIVAEVGRLSRFVKPRQLMGYSGAVASEDSTGERTRRGGITKTGNAHIRRIVIEAAWAYRHRPAVGATLRKRQASLDDEVKAIAWKAQHRLHGRYRTLTAKGKNPQRAVTAIGRELLGFIWAIGITVEARGHHAPAMA

SEQ ID NO: 457527 - protein, 359 aa, unidentified
MKIVGCDFHPSWQQVAVFDPETGEVEERKLLHGDGEAERFYRDLEAPALVGIEACGNSQWFIELANGLGHVVWVGDATQIRASYVRRQKTDRRDAGHILKLLMENRFPRLWTPTSEQRDMRQLLIHRHKLVEIRTRVKNGLQHLALNKGLQKKNALWGVRGRAELEKLPLAGWTARRREDLFGLLKELNRTLDELDQAVERTAQDHPQARLLMTQPGVGPITSLAFVLTIGDVSRFRHSKQVSSYLGLIPREHSSGGKQRLGSISKQGNSFMRQLLVEAAQTANRLDEGFRRQYQARCHHKPKGVAKVATARKLAVRLYWMLRQNVGFPEIALIESSPRVALIGASQVVTLNERSRTQQ

SEQ ID NO: 457528 - protein, 418 aa, unidentified
MGRLKIVYPICCGLDVHRDFVIACIASTNSQGVTSYASRRFSTFSGGLRDLRDWLGEHGCKDVCMESTGKYWFPVHNILEATCNVVVSHPKFVKAIKGKKTDKKDAQWIADLFKHDLVRGSFIPPEDIRQLRDLCRYWQKLTWCATGEKNRAQNCLTVSNFKLDSVFSNVFGKSASAIVSHLLEHPGEAFDVAPFVDRRCKSPVEEIQQAVDGAFSPWQADKLKVIREHMSDLDKCKALIEDLILRLAEPYMHQLELLLTVPGVSEPMTAIRILAEIGADMNQFESSKHLCSWAGLTPQNNESAGKKKTTRIGKAGQYIKPLLIQSAMAASNPRSKLHPEILQKYQQLKKRRGTKKARVAIARRLLTAIHQMLLKDEPYAPYFAPAKESIPESRVLTPDQALSMLRAKGYIIEDSVTA

SEQ ID NO: 457529 - protein, 366 aa, unidentified
MLQKAELSCEADSENYLGGSSETMYFIGLDVHKRTISYCVKDAAGKVHQEGKIGSTRRELDAWVKTVPQPRTIAMEATIFTGWIYDHLLPHAEKVKVAHPLMLRAITAAKRKNDKIDASKIADCLRCDFLPECHMASTEIRDRRRTLRYRGLLVKQMVQMKNRVSGLLLEKGVTHTRQRLHKVGYFAELMSSSEEIDQSIRPLLKLSREHIVRAQKLDYALVSSLERDPMLAERLKRLRTVPGVGPITALTWALEIGDVSRFRSIKQAISYCGLCGAERSSADKVARMPISKQRNKHIQHVLVEAAKLAPRQCHELALLYEKEMQRGNRNRATLAVARKLVCWILAVERRKQDFVPAEKFGGTAAA

SEQ ID NO: 457530 - protein, 354 aa, unidentified
MERYIGLDVHAQSCTLVVLSPTGKQLKQEVVETNGAALKQVLRAIPGEKRICLEEGTQSAWLYELLRGEAKDVVVVMPGKRPGAKDDARDAAALAETLRAGHSLRRVYKGVGPYSELRAAVRSYEMLRSDVARTKNRLKALFRSRGLLPPGGEAFREQEHAAWTAHLPRQHQRSAEVLLAELKVLETLWSQAEERLHEASKQHRIVKLLATAPAIGPIRSAQIVATVVTPHRFRTKRQFWAYCGLSIVTRSSADWVKDRNGKWVRAQTQQSRGLNRNRCGTLKEVFKGAAHLVAYRMTSHPLNADYQRLLERGLKPNLAMVTMARRISAAVLAMWKHEEAYDTKKHQSMTSAQA

SEQ ID NO: 457531 - protein, 416 aa, unidentified
MKIVRPICCGMDVHKNIIVATIGITNKKTRITEYIQETFSTLNPDLLNLKQWLINHKCFDACMESTGKYWIPIFNILEDEINIYLTHPKYVKAIKGKKTDKKDSKWICDLFKHDLIKFSFIPPKEIRALREISRYRYKLVGMRSSERNRYQNCMTVSNIGIGSVFSDPFGKSAQAIMKEVLESDIIEDEKILKCIHGSCKNKDKILDSIKHCNIETDQRFKMNESMTHMEELQVHINNCEIEIMKRAAPMFDQFMHITQLPGISTLSAILIISEIGVDMKQFESDKQLTCWAGLAPANNESANKKKSVRISKAGQYLKPLLVQCALGAIKDKEGYFGIKYSRIKKRRGHKKAIIAIARMMLVSIYHMILTGETFNPSDYESFRNPKPPIKQQVLTEESAIEFLKKSGFDVSKLTKP

SEQ ID NO: 457532 - protein, 424 aa, unidentified
MNLTQNDRLKQVTSDTLIVGVDVGSQTHFCRAFDWRGFELSRRVFKFSNTGMGFLTFLRWTEEIMNKTEMKKVIVGCEPTGCYWLTFQKFLQDHDVQLVTVNPFTVNRSMELDDNSPEKSDLKDPKTIALLVKDGRFSTSYLPSGVYAEIREASVCRDQIMKQHVRLSNQIQGWLQKFFPEYFECYADWDSTSGLMLLREAPLPQDILKIGAGGINQIWRDAKVRAAGIKRAQTLVEAAQNSVGLEAGEAARLEIWVLVNDYILKAEQLKRLDEYLEEKVKEVPNVEKLLAIKGVGMSTVIGFIAEVGDIGRFTDPKQIQKLAGLEIVKKSSGKKKGQPRISKRGRRKLRRTMYESAKALMLWNPAFQDVFLYYRNRAKNPLGGMQAKIAVACKAIRVFYVVLQTGCDFDEEKFRKDIIRPEAA

SEQ ID NO: 457533 - protein, 348 aa, unidentified
MSQTPNTAIAVIGIDIGKNSFHIVGLDGRGAIVLRQKWSRGQVEARLVNMPPCLIGMEACVGAHHLSRKLKAFGHDARLMPAKYVRPYSKGQKNDFRDAEAIAEAVQRPTMKFVATKTADQLDLQALHRVRERLVSQRTGIINQIRAFLLERGVAVRQGLRFLRAELPRILAAPPDVLSPRMVRVIEGLAEDWHRLDERVDHLSGEITALARQDVGCERLMSVPGIGPIISSAMVAAIGTGDAFSKGRDFAAWLGLVPKQISTGDRTILGKISKRGNRYLRVLFVQAAWVVLIKPKSWERHGLKHWIEAAKKRLHRNVLAIALANKLARIAWSVLANGRIFEARLQAA

SEQ ID NO: 457534 - protein, 412 aa, unidentified
MEGETVIAGVDTHKDVHVLCLLDGLGRKIWSGSFGADPEGYDRLAEAIGDPGSCMVVGVEGTASYGAGLTRRLVELGYNVVEVLRPKRDKVRPGEGKSDPLDAERAARKAASGRGCSVPKSQDGWVEAVRQLYVARRLAVATSTSCVACAKSMLTTAPSALRERFRGRERPKDLMPLLARGRKAGDALEESVLASLRSVAAVWKEARSQVESLDERIRALLEANAPALLGVEGCGTTTAAALVVAAGDNPGRLKGEAAFSMMCGASPIPASSGKTDRHRLNRGGNRQANWALYEIAIKRMAYDERTRRYVARRTSEGKSRREAVRCLKRYIAREVYHVLMDPNPDGAAPEGPELAKMRKAMRVTQKQAAAGLGMSAASLGHLEHGRRRSTKLERRYYELLCELKGALPQTAY

SEQ ID NO: 457535 - protein, 391 aa, unidentified
MVCVGIDVAKDKHDCCILDSDGTIRADCITIPNNMDGFKQLLQTIRDCTKKSDKIKVGLEATGHYSYNILGFLLDNDLAVYVMNPLHTNLYRKSLSLRKTKTDRVDARTIATMLLSDVDLKSYTDTAYHNEELKSLTRYRFDKVRERAKLKQSVSRLVTILFPELEKLVPSLHIASVYALLSEYPGAKQISEIHLTKLTNLLATASKGRYGKDKAIQIRDAASTSIGSVMPAKSLELKHTIKLIRELTSEIDEIEVSIQKIMDELNPPILSIPGVGIQSAAMILAEIGDFSNFESPDKILAYAGCSPSTYQSGKLTNCYAHMEKRGSRYLRYALYNATKYVCHWNPVFAEYLAKKRAEGKHYNVALSHATKKLVRLIYALQKSGKAYLVAA

SEQ ID NO: 457536 - protein, 362 aa, unidentified
MFYLGMDVAKAKLDCCLLLDEASGKRKTKVVSNSRSGIVDLLAWVAKQNASPEVLHVVMEGTGVYHEQAALALADTGVTVSIVNPAQVKDFGRGLAVRTKTDGVDSFVLARYGALLKPKAWLPPAPEARILQALLARRAAIAQDLQRERNRQEKADATDTPERILQALLARRAAIAQDLQRERNRQEKADATDTPERIQQSLTDSIEFLVKQLDQLQQVIDQHIDKHSSLQKDMALLQSIPAVGPQVGGNMLSVMHSHNFNSAEQLAAYLGLVPVERQSGSSVLGRAKLSKAGPARIRAVLYMAAIVATRCNPHVKAVYERLLARGKSKMSALGAAMRKLVHLCFGVLKTQQPYKHDHTKNA

SEQ ID NO: 457537 - protein, 413 aa, unidentified
MTEHNFAWFAGVDWGSEGHQACLVDAQGRIVGERRFLHGGTGLADLCDWLLSIGGAADTVAVGIEVPHGPVVDTLIDRGFVLHAINPKQLDRLRDRISVAGAKDDRRDAYVLGDGVRTDRRLFRRLHVTDPRLVELRAWSRLAEELTEERVRLGNRVHHELWRYYPQMLKISPEDVAAPWVLDLWNLVPTPAKARRLRAAPVEKLLKQHRIRRIDADTVLRILQEPAIKVADGVAAAASVHLRSLFTRLGVVNRELRQAEAKLDALCAAIGETDADSGEGLQRQDVMILRSMPGIGRINLATLLCEGSGPLSRRDYPALRTLCGAAPVTKSSGKSHIVIMRYAAHVRLRNVVYHWARVATQHDPKCRARYAALRGRGHSHGRALRGVADRLLALACVLLQRQTPFDPNFAQAK

SEQ ID NO: 457538 - protein, 323 aa, unidentified
MKPRIFIGIDVSKDKLDIAVKVTETGDTVSPAKRAVESWTTSNTEAGCDDLVGRLQAMNPDRIALEATGGYEQRAFRALRAAGLPAVIVQPLSVREFARAMGKRAKTDPIDAWMIAYFVEVRLPDVVPLPTVNQERIADLRSLRTDLLKTRGQYTNRLEHCRAEAREHIEKLLASVAVHIAELDAKLREALRATPEDALKAALVRTVPGVGPVTAATLVGELPELGKLDRRRLSALIGVAPMNRDSGRMHGKRVTQGGRSEIRRVLYMAAFAARRFNPVIRAFAARLEAAGKPFKVVMTACMRKLLVILNSMVRAGTAWSLSP

SEQ ID NO: 457539 - protein, 399 aa, unidentified
MRHFIGCDAHKKYSLFVAVDEAGQTKPAVRVNHDRESYRTFLRGLPASSSIAVETVGNWYWIVDEMQQAGHQPRLAHARKAKLMMGQLDKTDKLDARGLATLLRNGTLPEVWIPSRETRDQRELLRLRMTLVGMETRLKNRVHAILAKYALRLEVTDVFSQKGRRLVLEHLENLPEETRQVVRQHLELLESTERQKRTTEQRLQIIVQQRDDVDLLRTLPGVGWILATVIALEIGDIQRFNQAPELASYAGTVPRVHSSGGKTRYGPVHPDVNRISQVGFDRSRQSHRHAATTSGRYSCCPIVQKIASTQRPCEGRDRRRPTFSRSSLLGFETTGALQRTAGLSRFVHAPVSAKSSHESFETRSLMATPVSGISSCCLTANRWIRRNGMQSIRTKKQIR

SEQ ID NO: 457540 - protein, 324 aa, unidentified
MPDGRGRRVIGERWIEHSGDSLAELVDWLRQQTGDFPPSLAAAIEVPRGAVVETLLEHGFAVFSINPKQLDRFRDRYSPAGAKDDRRDAFVLADALRTDMHCFRAVRIDEPAMIRLRELSRLEDELSQEQNRAINRLREQFHRFFPQLLQLSGCADEPWLWALFEAAPSPAKAARLSEAKIARILREHRISRLDAAQVRAMLKTKPLTLAPGAADAAAEHALLLLPRLRLLHRQRTDLARRISALLEELACAEEGQSEHRDAAILLSLPGLGRKVAATMLSEASQAIAERDYHALRCYSGTAPVTQQSCQGRSKTRPLGRSHHR

SEQ ID NO: 457541 - protein, 412 aa, unidentified
MLFIGDDWAEDHHDIELADDEGRLLTRRRLPEGIVGIAGLHALVAEHLGEDVDELEPEQLQGLVKVGIETDRGPWVAALVAAGYEVFAINPMSVARYRERHSTSGAKSDAADAHLLAEIVRLDRTHHRPLAGDSEEAEAIKLVARTHQSLVWERSRHVLRLRAALRDFFPAALRAFPDLDAPDALELLGAAADPDRAAGLTKARIVAALRRANRRNVEARASEIRRVLRAEELRRSPAVQAAYAAIVASQASVVQALNAQIAQIGAVVDSHFGQHPDAEIYASQPGLGVVLAARVLGEFGDDPHRYADAKARKSYAGTAPITKASGKKKIVLARYARNRRLGDALQQWAFCSLRGSPGATAYYRQLRARKIGHQAALRQVANRLVGILHGCLKTHTRYDEATAWSHHMTGAA

SEQ ID NO: 457542 - protein, 370 aa, unidentified
MTHITSIGLDVHARSVSACAFDPFTGEVAQRRFGTDAGEIAEWIPGFESPKAVYESGPTGFALCRELRALGVDCVVGAVSRMQKPSAEKRRKNDRRDAAFLARLLATRNITEVWVPPVEAEAARDLSRALDDAREDLQRARQRLSKFLLRRGLVFDETDALGRRRGAWTRAFWRWAESCRPSDPAAAAAFDHYVACVRCAESDKRALEKRVLAEARADRWRGAVEALSCIKGIDAVTAFCLATEAGCFSRFPTAGAYASWLGLAPSEHSSGEKEAKGGITKTGNSASRRALVEAAWHFKSCSPKPKAPPAGSAVPAAVKRRCDDATARLRRRHESLGAAGKRPCVANVAVARELACWVWEVGRRAEGTLA

SEQ ID NO: 457543 - protein, 345 aa, unidentified
MNVFIGLDVSLESTAICVVTENGKISQATSVASEPEALVKALQETKSNVLCVGMEAGPLSQWLHKHLTDAGFETVLMETRHVKSVLKAMPIKTDRRDAEGIARLLQTGWYRSVHCKSASAQETRALLTARRSLQRGILNLELSIRGVLRNFGLKVGKVSKGEYEARIRELAIGNPMLELAVVATLNARATMKDQFAELDRQLLALAKRDPVSRLMMTMPGVGAIVALTVKSAIDDPGRFKSSKDVGPWAGLTPKRNQSGETDIVGRITKAGDTSLRAALYQAATVMLNNAKHNWLTAWALRVASRRGKKRATVALARRICVVLHNMWQHRTKFELTRAGAMSTQV

SEQ ID NO: 457544 - protein, 477 aa, unidentified
MEKIGYLGMDVSKGSCDFLLLDSGKEPLEEGFALDDCKHGRKTLSALIDRWFSGGLTHLYCGLESTGGYENNWFSLLCSLAAGSAVKGKTLKVARVNPKAIKATGQAALLRTQTDQTSAFSIASYLMNWPKKITYSPQDGRSADGQWMVARQQVGYITMLHKQKTQLSNQLEKLIYQHIGELLVYCRHGVPSWMLRLLNRYPSREKIRRAGCDKLASIKGISAEKAATILGKLDTEQPVSSPMSCHTIKATARQILHLQAQIQAEDAYLISRYNDHPDAKLLESIKGVGIASAVRLVVQIEDVTRFTDAKKLCAYFGVHPTWKQSGDGRWKSRMSKQGRSSVRATLFMCSLSAIRCNREFKALYHSFRKKEMNHFQAMGVVMHKLLRIVYGILTHQRPYDPGIDRENRKNAEKVRQEIKKKTKQASDKNQSGRQRFMQQNLDGVDQPPISRRAWKKRKQEASQSSTKEECAGSPPAD

SEQ ID NO: 457545 - protein, 339 aa, unidentified
MNPVPVGVDIGKNVFQIHYIAPGSGEIVNKPLKRANFLEYFANLEPCLIGMEACGGSQHWARSLSKLGHKVRLMAPRFAKAFNIGNKNDAADARAIWLAVQQPGNKVAVKSEAQQAVLALHRLRQQLVKFRTSQINCIRGLLGEYGEVMPASRRAFDANIAAVLDRVSQHVAAPLIDTLREQWSALRHLDEQIARIEQRLKQWMSTDSSAQAISAIPGVGLLTATAAVATIGDASAYKSGREFAASIGLVPRQVGSGGRTTLLGISKRGDAYLRTLLVHCARVISVQLRSKHPWIEQLLKRRPYNVAIVALANKLARVIWAVLARGRPYQQDFVSTKPA

SEQ ID NO: 457546 - protein, 344 aa, unidentified
MTNIQLKETVNESKPSLFAGIDVGAEELVLVIRKNGKPFDPQKFANSPADRARLVKKLVKLPGIIVCLEATGVYHFDLSIALHDAGVLLMVVNPKASHNFAKVLMKNGKTDAVDADTLAEYAARMDFVAWTRPSDETIALRSFARRINALTGQKADAKNYLHALIATQETPKSVLRDARLAITQLEKRIDRLTAEALILIGKHPELERILTLLIGIKGIAETSAIALMGELLLLPPGLSHREWVKFAGLDPQAFDSGKSVHKKTRISKAGNRHIRSALYMPALSAKQHDPHVKAYFQHLVANGKTPLQAVCAVMRKLLHAIHGMLKHDKPFDNSRFYAIPTIAG

SEQ ID NO: 457547 - protein, 352 aa, unidentified
MMVLGADMHKRSHTIAAIAATTGELIEDATIWVSDEGFLELLGWARALDDERVWALEDCRHVSGSFERFLIGHGERVVRVATKLMSDARRAGRERGKSDRIDALAVARAALREGVENLPCAQLAGIELDLRLLIDHRERLIRTRVALNNDVLWHLHDLWPELKLPVSALFSKKWSTKISRRLATAEQTARVRIARDELRRVRELTAATNGLETEIAELVGQAAPQLLDEPGFGPLTAATLLGEVAGIERFATEAKLARAAGVAPVPVSSGKTNRHRLDRGGNRQLNTTIHRITLTRARCHPETRDYIAHTRAEGKTGLVAMRCLNLHLTRRIWHLLQPPHPSQATPPSPSIS

SEQ ID NO: 457548 - protein, 326 aa, unidentified
MSNILGIDVSKDKLDLVLLSEEGKYHKVIRNDLSGFKELDQWLISRHIDRVHVCLEATGQYGDEVSEYLYERGHDVSVVNPTRIKRYGESKLHRNKTDKADADLIAEFCLKEKPALWEPLNPDLKHLRALVRRLTDLQANYRQEGNRLTSGEKDDWVIRDISVHLEYLKASIEATEAEIQNFTNQTPGLKAKQELLVSIPGVGKKTSARLLAEIGEINRFENAPQLAAYAGLNPKGFSSGSSVHKKTRISKQGRSELRACLYMPAIVAMTHNPVVRALKELLQKKQLPTMAIIAACMRKLLHIVYGVLKSQMPFDPDYDRQFNFSS

SEQ ID NO: 457549 - protein, 364 aa, unidentified
MRLLLPSGRESLSAFGFGKRRRAAKGYYVGLDVSLKSTHICVLDGERRVVWRGVSDTQIAMIAEHLARWGEQIVLVGLETGSLTPWLYHGLSDLGLPMVCMDARRASDALKARAEKTDKADARALAEMLASGWYSAVHVKSLESHQLKALLGARDQLVRVKRQLYGQVRGLLRPFGIKISQRVGAKSFDEAVRMACNKEDVLYIAVGALLDTLANVASQIAVLDKQVRTLAQKRKACWHLMSAPGVGPITALAFTAAIEDRHRFGSNRDVGAYLGLTPKRYQSGERDVSLSISRQGDEMVRHYLYEAANCLLTTVTGASALKSWGLKMVKRCGAKRARTAVARKLAVLLLRLWKQESHFEAQSA

SEQ ID NO: 457550 - protein, 350 aa, unidentified
MKYVGLDLHKRNIFATVLDGDGRILSRGNIRSKKEDINYYLKRQGNSNDLSVAMEASYNWLYYYRVLETITDNITIAHPLKTRIIGEAKIKTDKIDSKVLAYMLRANMLPKVYISTKTSMENKLLLRSRISLVRIRTGIKNKIHTIIDRNRDSYSDLENLTDIFGKTGIGILKCTKIPEPDYMILTNYLGLIDDINKKIKELETEIDKRLVLDKDIELLKTIPGVGNFSAFILKSKIDNIDRFISKEKFTSYAELTPSIHQSGSKAYTGKITKQGNNFIRWALTEAAQVAIVHSSYFRYYYSKVRAKQDATKATIAVVRRMDEIAYVLLKEKRGYIEKPIIYFTLKNHLL

SEQ ID NO: 457551 - protein, 396 aa, unidentified
MLQENEGTISTQDQPTGSDIFVSVEMSRSKWMVGIHTPLADKIGLHTMACGDVEALLALIDRARVKLVASGSNSPAAMICYEAGYEGFWLYRRLIALGIRVVVIDPASLLVDRRAKRAKTDRIDARAMVRALMAWARGERQVLREVRVPTVEQDDARRGLRERQRLVKERTGHGNRIKGLLKTQGIMDFDPRAADAAARLDAIVTGDGRPLAPCLKREIVRELERLALAMRQIDQVETERDAVVQACDAGAGTDALAAEPEREAAMIGELNRLKGIGMNDATILVREAFWRDFRNRREVGGWSGLAPSPWASGSVLRDQGITKAGPPMLRAHMIQMSWRWLLWQPDSDLAQWFRKRTEGATGRMRRIMVVALARKLLIALWRYATTGMVPHGAIVT

SEQ ID NO: 457552 - protein, 309 aa, unidentified
MGTYVGIDVSKDRLDVHVLPQDEAFFVERNGKGLTDLVERLRSFAPSLIAVEATGGFESTTAAALAGAGLPLAVVNPAQIRHYARALGKRAKTDAIDAHVIARFAADVRPEARALPDEMTQFLADLVARRRQIIEMLQAERQREMRTTVRRLKKSIARLVAALEKELNALDSDIDDTVRGSPVWREKEDLLASVPGVGAQTARTLLAELPELGTLDRKRIASLAGLAPFTRQSGQWRGKSMIGGGRKSVRSALFMAAMVAGRHNPHLKAFRDRLVGAGKPKMVAIIAVARKLLTILNAILRDKTPWQTA

SEQ ID NO: 457553 - protein, 387 aa, unidentified
MTHGSHEAFAAFVGIAWADIKHDVCLQAAGAEKRESFMLEHPPETIDAWGSTLRTRCNGYPIAICLARNKGPLVSALRTYDFLVLFPINPIPLARYREAFTPSRAKDDPTDAELPLALLLTHRDKLQPLQPQSPAMRALAQLVAHRRRVGGDPGRLTNRLTSTLKNSLPHVLHWFQEKDTLVFCDFLRRWPPLKAAQRARRSTLETFFRDHHVRSTDVIDTRIRAIKAATPLTTDEGVIAPHALLVQTLVRQLRVTLHAIEDFDTAIAQRAQSHPAFSLFQALPGAGPVFAARLLVAFGEQRERYASATARQQYAGIAPVTERSGKKCWVPWRLQGPTCLRQTFGEWAAESIRHSFWARVYYQPQRDKGKAHQAAVRTRAFKWLRIL

SEQ ID NO: 457554 - protein, 358 aa, unidentified
MAITEGTHHIVGGVDTHKDLHVAAIVDEQDRVIGTRCFATTRQGYRQMLAWMRAFGDLQRIGVESTGSYGAGLLRFMQQAKVPVLEVTTPDKQDRRRRGKNDDLDAQNAAHAAFAGQRTVTPRSRDGMIESLRVLMACRKTAVSARRVALQVIHNTIVCAPDGLRDQLRSLTRMQLVRTLASWRPDLTAYRDLESAYRIGLKSLARRYLELHDEIADLDVMIAAIVDELAPNLVARNSIGHIGAAQLLLTAGDNPERLRSEASFASLCGVSPVPASSGKTVRHRLNRGGDRAANSALHIIAIGRLRTDQRTKDYVARRIAEGHSKLDAIRALKRYLAREVFTLITQRRREINATRIAA

SEQ ID NO: 457555 - protein, 415 aa, unidentified
MNSFCGIDWAEGHHDIAIVDGEGKLVAKKRISDDSAGFTVLTEMLAAAGDSFDDAIPIAIETPRGLLVAALRATGRPVFAINPLAVARYRERHSVAGAKSDHADAMTLANILRVDSHLHRRMPADSELVQAIAVLARAQQDAVWRRSKASNELRSMLREYYPAFLDTFAGKSATNLAKPEARAVLAIAPTPAHAAKLIKTRVAAALRRAGRKRGIDGLAVNILEHLQAPQLRQPELVEKAMGRQALALLAMLDAACTGADELAQTAAEEFRKHPDYVVITSFPGLADLTGARVLAEIGDDRDRFADDRALKAYAGSAPITRASGKVTSITHRRIKNDRLAAVGWVWATYAYINPGPAQDHYRRRRDHGDRHAAALRHLFNKMLGQLHHCLQTRQTFDPIKAFGQPRTAPREPAAA

SEQ ID NO: 457556 - protein, 340 aa, unidentified
MKSYLFIGIDISKATLDVCVLCPSDIADVHHHSFCNGTKGFSQLMRWLKQKSEGVSIDDWSVCMENTGIYSLELNCFLNEKGIWQSMENALQIKRSMGVVRGKTDKADSKIIALYAYRFIDKLKPYVLPTGTLLRLRALFSQRERLVSMHSQLLVASQSIKGYPNDLVKDIQAQNEMLLENLGVQIKGIDKSIKECLQQDKDLQRKSKLIQSVPGIGQQTAAYLLIVSRGMKSFATPRQFAYYSGCAPFAHQSGVSIRGKTKVHFIANRKMKMLLHMAAMNAITFNDELKGYYQRKLAEGKNPMSVLNAVRFKLICRIFSVIKRNEEYQKEYKKKCSLKT

SEQ ID NO: 457557 - protein, 401 aa, unidentified
MSCVGIDVSKGKSMIAVMRPFGEMVIPPFEVGHTDVELSELSRRLGQLGGETRVVMEATGNYHLPIANFLCNSGFYVSVVNAMLVHGYGNNSLRRAKTDKKDAIKLANYGLDRWLALPKYIPEDNARLMLKTTYRQYQQCAKVQTMLKNNLISLLDTAFPGANRLFASPAKADGSEKWVDFVAAFPHCECICGLSEKAFAAKYQKWCKKHGYNFSQDKALDIYASACGHFSVMPKTDTAKLLVEQAVSQLRAVSTALAALRNEMQSLAASMPEYPVVMGMFGVGPALGPQLMAEIGDVRRFHSKKALVAFAGIDAPPYQSGQMEIRSRSISKRGSSALRRTLFLVMSVILQRSPADEPVYQFMDRKRAEGKPYRVYMMASANKFLRIYYATVKQYLNSLEV

SEQ ID NO: 457558 - protein, 395 aa, unidentified
MQTLFVGIDVSKDSFSVAGLDAQGDTSFTLAAGMHKAGFSELFKAISSHSVTLSDVVVAMESSGCYHLNLFAFLSSKGLQTLVINPLVVANFSRLSLRKTKTDRKDAFTIAKFILSHRDSIEQFSILQANQDLKDLAREREFTLKMISSIKNEIKRLLQSTFPELEHLGNVFSDTMLQFLSVFPSARLIRMAEPLDVRQAFEQQDKRKRISVSPGEDPAGGPGLHRCCQPRKGDDPAGKDRNAAAPERAPFQLTKMLVKLCETTMQEDLRIITSIDGINTITAAPFLAEMGDWRSFKSYKQLIAFSGLDPSIHQSGTFMGVSRLSKRGNRHLRRLIWLMTFCAIRVEGPFKTYFTRRKMEGLPFKKALFATAHKLVRVIFSMLNHRTCFVAQQTA

SEQ ID NO: 457559 - protein, 416 aa, unidentified
MSGKREIACGVDVHNKFIVATILSSDGLKLQDRFDTNLEELLKFKYWLKENGCHKVALESTGNYWLPIYHVLEGSVNFILANAYQIKHVPGRKTDTLDSEWIAEICLKNLISPSRIFCKNHRELRSLTRARESLIKVRTKIKNRVTHELEAACIKLSSVLSDVFGKSGRHIVDGLINGMDLEEILESIPSRKVKAIKEEIRGTIQSNLSSLQIFLIQSHLDMIDAITKQIVEIDSKISDQLSTRNEDMRIALSMPGMGFVSASTILAEIGDFRDFSSPDKLAAYCGLVPSVYQSAGKLINGHITKHGSPHIRSMIIEVAHAIIRTRRDTKLKKFFLRIKARRGTKIGVVALARKVLCILYHLLIHQEIYHDDLLGKPRKIKHLSAYSATSMSLDEMIKTIIKAGYEVRKNEYSEGG

SEQ ID NO: 457560 - protein, 368 aa, unidentified
MNKSLRFVGLDVHKDSITIAVAEEGREPAHVYGEILNDWEILKRALRRLGAKSSLRCCYEAGPCGYGLHRKMKEAKIECVVVAPSLVPVQSGNRVKTDRRDATKLAHFLRSGDLTEIFVPDEEAEALRDLERAREDAKNAERAARHQLGKFLLRHGRGWNRTNWTRNHLDWIRRQKFEHRAQQRVLTDYLKTVEDATERERQLTKDLAELVKDTKLYPLIRALQAFRGIQLITAVTIAAELVDLQRFSSPRQLMAFLGLVPSEHSSGENRRRGRITRAGNGHVRRILIEAAWSYHYQPNMSKAIRKRNEGVAPGVQRLAWKAQKRLHKRLYHLLRKGKSGQKAITAVARELAGFIWAVGQQPAWLAEE

SEQ ID NO: 457561 - protein, 346 aa, unidentified
MAYYVGLDVSVKETSICILDDKGCVVARTDVSTDPDLIARFIFKHAPDVERVVHESGILAIWLTRELEKRSLPIICIDARLAHKALSGRINKSDQGDAEGLAQLARTGWFTQVHIRSEASERVRVLIGARERLIRMRKDLEGHVRGVLKVFGVCMKSVGTGKLRKDFRDQLAAAADTDPAIELMAEMFIPLHKTLCIARDALDDEVRIMARDSDLARRLMTVPGVGPIVALAYIATLDDEKRFRKSIDVGAFLGLTPKRHQSGEVDWSGKISKCGDCDMRRLLYTAASTLISCTRKPSRLKEWATRLAERKGHKKAAVAASRKMAVIMHSVWRNGTVFEPGMEGAS

SEQ ID NO: 457562 - protein, 386 aa, unidentified
MPQPKDDLSKSLIAFDQHKTLIAVVELSLSSWLVGSIVPGIQRDPLKKLVPDEEALHHLLNRWRDEAVKAGHTITRIAVAFEAGRDGFWLARWLRARGIEAYVIHPTSIPVSREHRRAKTDRLDIGLLKRAFLGWLRGEQKHCSMAAIPTLEEEDAKRPNREHEHLVGRRTSIINRMKAAFVRLGIRGFNPKLRKAPERLAALRTAEGSPIPPNTLAELQREMAHLRFINEQIKQIEKTRLEQLKQSPQQGANAMVLGLQRANGIGIETADMLAREVFSRDLRDQRAVARYVGLTGAPDESGSRRQEKGLAKAGNARVRRGMIQLAWRFLVHQRDSALVQWYQTRVAAGKKRKTMIVALARKLLIALWRFVKTGEVPLGVVLRPTS

SEQ ID NO: 457563 - protein, 375 aa, unidentified
MTADLQVKAYENASVLYMATELSNKKWRLAFGDGRRTRQVSIEAGDTVALKAQVHRAKEKLGLAADTPVVSCYEAGRDGFWIHRQLAELGIENHVVDAASIEVSRRARRAKTDRLDAQALLEKLIRYARGERRVWRVVRVPPPEWEDLRQLSREREQLLSERTRHRNRLSSKLVAQGLRVPIGKAFLQRLEEVRLFNGRPLPAHLKAGLVREWERLQLVQEQVKALEGHMRGLIEASGALKAVRALMLLTGVGWVGAWTLVVEILGWREIANRGELGGLSGLAPSPYNSGQSVREQGISKAGNRRVRKLNIQLAWLWLRYQPNSKHTLWFKERFGGGSKRQRRIGIVGLARRLLIDLWRFAESGVVPQGAQLKVG

SEQ ID NO: 457564 - protein, 350 aa, unidentified
MQIIGCDFHTRYQQIAMLDEATGELTERRLEHENGQARAFYANLPKPARVGMEATGHAQWFERLLAELGHELWIGHASAIRAGVVRKQKTDTRDAAHLLDLLLQKRFPRIWIPSLAERDTRQLLRHRHKLVCFRTSVKNQLHALAMSQGICRKKRLFTAKGRAELQHVSLGPWASRRREELLRMLDHLDPSIEELDRAVQQQAQSHPQAARLMTHPGVGPLTALAFVLTVGPVERFRRSKQVVSYLGLNPCEHSSGGHQRMGSISKQGNTMMRWLLVEASQTAVRFDPELLRMYRRLKFRRGGSVAKVAIARKLAVKLYWMLRATASGAQMAPMQGSPRGTLVSSPSPIC

SEQ ID NO: 457565 - protein, 338 aa, unidentified
MRLYAAMDLHSNNSVLAILDEQDRVVHERRLPNEIERVLTALAPYRDDVQAIAVESTFNWYWLVDGLMDAGYTVKLVNTAAVKVYEGLKYTADEHDARHLAHLLRLGILPTGYIYPKEERAVRDLLRKRAQLVRCRTAQILSVENLVSRNSGNGISTKEVRQLDEEAIGQVCGGDKMRMLAIQSNLAVLRCLDEQIQELERVVLKQAKLKPEFKKLLTVDGIWNILAMTIMYEAGNMERFAKVGQFASYARCVGSSRWSNGKKKGEGNRKNGNKYLGWAFVEAAHFAMRKERIRRFYERKKAKTNGIVAVKAVAHKLARACYHVLKDQVSFDLARAFA

SEQ ID NO: 457566 - protein, 420 aa, unidentified
MPATFSIPRTNDLERAMTAVMIGVDPHKGSHTAVVISPAEEPLGEIRVRASAAQAGKLAEWASAWPERTWAVEGAAGLGRLLAQQLVAAGERVLDVQPKLASRVRLLQAGDTNKNDPNDALSVAIAALRSRTCREVAAEDHPAVLKVWSKRHRDLARLRNQVACRLHAVLCDLVPGGIAKEISAAQAARILGQATPSGAVEVARAELAAEFLEDMRRLDAQLRGTRKKLAAAVKVSGTTLTQVFGVGPVIAGTIIGDIADVSRFPGRDHFASYNGTAPVEVSSGNRKTHRLSLRGNRRINHAIHMAAITQLRHKHSEGRAYYEKKLAEGKTHKEALRSLKRKISDAIFARLQADARQAAAAAPKGPGGHPGNDSASSAAGSHPARQLFGQATPGPGTSLRPATPAGTPSKPVPRKTQATT

SEQ ID NO: 457567 - protein, 345 aa, unidentified
MLYVGVDVHQQSFQVCMLDENGKVVKELKIRGGLTALLEALRHAGHPLAVCFEASCGYGHLHDHLAGIAQRVVVAHPGQLRLIFQSKHKNDRVDARKLALLLMLDQIPPVHVPTLDTREWRGLIEFRTRQVNDRTQAKNRLRALFRHNGIALPSGKRLWTKKALADLSARELPTSMGNLRRDLALDQVRRLSEQIHRVEKELTAIAERHPGVVLLQSIPGVGPRTAEAVVAYIDQPRRFRRNKCVGRYFGLVPTQDQSAERNRLGHITKEGPRTVRRLLTEAAWQGVRRSEHLKAFFERICGDDPQRKRIALIATAHYLVRIMLSMLKSQELWRHDAKTATTVAA

SEQ ID NO: 457568 - protein, 423 aa, unidentified
MMKLKYPICCGLDVHKNVIVATIVITNRDGVSEYRQKSFSTINSDIQKFHNWLIENNCYHVCMESTGKYWIPIFNYLEKDIEVCLTHPKYVKAIKGKKTDKKDSKWIADLYKFDLVRCSFIPPKDFRQLRELARYRFKLVCMKSSEKNRIQNCMTVSNVGIASVLSDPFGKTATEIMSYLLEHTADSIDEKAVRKLIKKEAKAKSDEIIEAIRGCNIETDQAKKLELALGHLEYLDGMITQTEVELYVRIKPYYEFVEFVSTMPGMTELSSTIVLAETGVDMNIFDDAKHLCSWCGLSPSNNESAGKKKSVRIAKAGAYLKPMMVQCALAAIKNKKQPYFAIKYGRIKKRRGHKKAIIAIARMMMVCIYHMVSEKKPFTPADYEELMKPQNHVERVVLNENNVFAYLESLGYDSSKLVKRNDN

SEQ ID NO: 457569 - protein, 275 aa, unidentified
MKYVGIDLHKKTISACVVVKEYERRQVAARKRLECKDESAIAAWFRELGPFEVVVEATSSYEWFVKLVEPLAHRVLLAHPKKLRVIAESKRKSDKLDAQVLAEFLASDEIPLAYRPSPRVREHRALVRYREYLQRRITSVKNKLRHILAKYNADVPHLFTDAGQEHLAAVSLSPCDRLVADALSVELNQHGLRLTKINRELRRFATKAPLPEKEARAVLDSIPNVGPVTADIVLAELGDWRRFRSQTDVVSYAGLAPGYRESAGKAKQLGITKEG

SEQ ID NO: 457570 - protein, 278 aa, unidentified
MNDATTVAIDLAKDVFELAFGNGAGQIVERKRLSRRAFARCLENRPRLEVVMEACGSAHYWARRFQAQGHRVRLLPARDVRPYVRRNKTDRADAAGLLEAARCSQIDPVPVKSPRQQGLQALHRARELLKGQRTAGLNLVRGLLREYGIAIPAGAAKVPAAVRDALEDGENDLPMCLRATVAEQMDRIQALGAGMAAIERRLEEEALADVAVQRYQTVPGVGLLTATALRAGAGDLARFRSGRHLAAWLGLVPREHSSGQQRRLGKITKRGDSYLRPC

SEQ ID NO: 457571 - protein, 350 aa, unidentified
MEYIAFDAHKHYTVASVERPTGEVLRETRLAHHRGVIRDFLQQWTPGSPVAVETVGNWYWLVDEIEEAGMVPRLVHARKAKLMSGMINKTDKLDVRGLNRLQRTGTLPTVWIPHAEIRDQRDLPRTRMVLVRARTRLKNRIHATLAKYALTVTDVSDLFGKQGRIILSDKLTQLPPHSRFSTEHLLEQLKALDAHIAEFEVRIRKVFKKTPALEWVISLPGVGLILGIVILLEVGDIHRFPDAEHLAAYAGTTPRVSGTGGKIRFGRLRPDVNHYLKWAYTEAAEVICQHRADWSHRHVSQLYTRVRHRKNHQKAIGAVARHLAEATYWILTKRESYQEPKRRSDASMKA

SEQ ID NO: 457572 - protein, 342 aa, unidentified
MERVYVGLDLGSSSFQQVGLNEAGVLRGQREFRTSEANLIKAFADLEGELHVHLEAGELAPWAVSIITPLVHRVVCSHPQANAWIAKDADKCDRLDAYKLADLLRLNRFKEVHYPPQQSRRDFKTLVQHYDELTQQQARLKTKIKARLRMQGVIVRGEQPFSATGRKAVLTAVKSVAVRTAISQLYAVLDQSLESQTEARLLMRRAAQAFPEIRIFETAPGVGPIGACRFSAYIHTPQRFSTTRKLWKYCRLSVSHRSSNGKPLRRPRLDHNGCGRLKDVSRKAFEAALRTKSDNAFKRAYQRALATTHDATHARLTVQRKIVSTLRAMWINQTPYREELMR

SEQ ID NO: 457573 - protein, 345 aa, unidentified
MKKSDYFIGIDVSSQTFSVSVGMHPWRILGGACSSYENSAQGFEEFLTWLGKQGYTPDKSIVCMEATGVYGQALAYFLVAHNYPLAVEPPLRVKRAFPTHGHKNDITDSQHLAEYAYRFFDELHMWQPPDNVLKQSRTLLKTREQLTKNFSSYQRTLKILKREVVRTPMAEQMYEDLIKELKSLVKEIDKQIIGLMEEHPFFRHKINLLLSIPGVGLQLAAYILVITQGGRRELRPRELAAYLGICPYEHTSGTSVYRRPHSRKNGPGSIRKLIYLAALSLRTHQDSFHEYFMRKVARGKPKKLVINNISNKLLRIICAVMRSGKPYIPGYVSLHPESLRIKKCA

SEQ ID NO: 457574 - protein, 407 aa, unidentified
MNAVGIDVSKGKSMVAALRPMGEVALLPQEFLHTALGLDQMAHAILALGEDTRVVMEATGHYHEPVVAALSAYGIYVCVLNPLYIKQSGAGSIRKVKTDKADSLKIAKYGLDNWVDLREHTAMDTIRQQLKLCSRQYNIYMKTVVSLQNNLISLTDKTFPSVNELFSSPDRADGHLKWIDFVMTFWHCNCVCHISEKAFTTRYEKWCKRKGYHFRAEKAAEIYARSCELFTTLPKDDNTKLLITTAAQQLLAGKMTLAALHAEMTRLAQQLPEYDTVRAMYGVGETTAAQLMAEIGDVRRFPRRSSIVAFAGVDPAIAQSGKHEVQSTATTKRGSPHLRKTLYQIVCTYLRKSPEDEPVYQFLDKKRGEGKPYFVYMTAAQNKFLRIYYARVKECLEAFDTQNTVQD

SEQ ID NO: 457575 - protein, 301 aa, unidentified
MLACSEGSFPVRKIANQRAAVTTFLKGLPAGSRIGLESTGTYHELLAEMAYRLNFVVFVLNPKDARHYAKGVGMRGKTDRVDAELIARMIANEHTRLHAWVPPTPEQREMDRLLKRRAKLSSLRQALAMSLKGLDGFAADFKALKERFDKVIARIDQRVKVLVDATPDRKQHFKQLRTIDGVGPVIGATLVNTLERVPLKNADAFVAFTGLDPRPDESGKHRGKRRLSKRGPADLRRLLYLAAMSAKKKQAWKPLYEPYRAKGLSSTATLVILARRIARTAWSMYTHKTAFDPNRLKTALT

SEQ ID NO: 457576 - protein, 354 aa, unidentified
MSKDIMLTVDYHDRACVVRRLDRATGREQVLTEIPTTAASLRRVVDQAWCDVRRQGRVLWIQESTTGWARVQELLADRVDFHLANVLQMPLPPKARRRKTDKVDTARMQREYLAGTLPLAYQPPAAWRQLRRLVAYREGLVSRRTAVRNWIDRFLAHETWFDRTGLWSPKGQKRLRTLLKGLPRTDRVILEQKIEELARLEGQLEVALKELLSAYHDSPDAQRLDAILGIDVVSAVSIVARIGPVARFANAEVLIAFAGLAPGIQESDRTRRDGRIGGGGTDRHLRHYLIEATVWARKLPRYRATYERIKKRRGSKVGRLVVARMLVRSIYKILKDGVAFDPGGTPRATPAVAG

SEQ ID NO: 457577 - protein, 335 aa, unidentified
MQIYGIDLAKEKFDVSFFDLTSKKVSNQPSHKVVTNNLKGIGKFFKGLPSDAVLVAEHTGVYGDTLLKCCMDSNVKIAFVGGYVIHRYRTTPDRAKTDVLDCALLRDFGERYPDKLKYKTFPEEALYELRQLARHREMLVEQRKQLITADRSEDCRPIRSLAVKRSMDRIKEMLDTEITETEKEMLKVINGHESIHHNYELVKSVDGVGLITAVELLVKTENFTKITTARQYAAYAGTAPYEKSSGKMDKGAHISKIGNRRSKTLLYICAESARLHNKEIKLYYERRTLIDKKPRHYVLNAIANKLLRIIFTLVEKGEYYDANFIRQDPRVVKYN

SEQ ID NO: 457578 - protein, 427 aa, unidentified
MLNQLNSSQSTPSQAAAFIGLDRSDRTLDICLQTAEGGSTRCRIDSAPESVAAWIGEVRARFEGRPVALCLEQPAAALLSQLMRHTFISVYAINPVTLSRFREAFATSRAKCDASDAAYLMELARDHCDKLTLWRPNDAPTRAVCSLVEARRKAVDMRTQLSNRLKAHLKSYFPQALELAGDELHTILACDFLTKWPCLQDVKKSRGQTLYQFYIAHNSRRKDVIAKRLELIKNAVAVCGEEYSLLSDKLTTGMIAGQLKELTAAIARFDVEIEKALESHTDAFIFASLPGAGAVHSARLLAAFGSERDRFADAAAMQNFSGIAPVIKSSGKIRLVQRRYACPRFLHQSFIEYSSQSVMHCGWAKAFYQQQKQKGKGHFAAVRALAFKWIRILFRCWQDKRAYDDAKYLAALKKRNHKLWEEAVALA

SEQ ID NO: 457579 - protein, 429 aa, unidentified
MICAAVERCAGIDVGKTFLAVCRMCGPLDGEARVEKQRFGTIRSELEKLRDWLKEGGITHVVMESTGSYWKPVFNVLEGSVKVYLANPQEVKTRKGHKTDDKDGWWLAHLLRHAMIHPSFIPPRPIRELRDLTRRRKRLLSHATAEKNRVQKILEDANVKLGNVLSDVFGMSGQLMLEALLKGDTAPGQIALLAQGSAKKKIPEILAALEGHQMSDHHRRMIRYSLEHLKFLEEQLQQMDRDIAEQIRAAGLEEQRRLLQTVPGIQDRSAANVLAETGADMQQFPTPKHLSSWAGLCPGNNRSAGKNKSSRTTGGNPWLRGTLTESAWAAAATKNCFLKEKFWRLTSKSGGKKPPALIAVAHNILNLVYQVLSTGQPYQERGAPPLQENQRQRMIRHHFHRLGKLGIAIPRYVADSEEPKPKTCKPRTQ

SEQ ID NO: 457580 - protein, 345 aa, unidentified
MHIASIGIDLGKTTFHLVALGERNKILLRKKFSRAQLLAYTANLPTSLIGLEACAGAHFLGAALREQGHEVRLIPAQFVKPYRKSNKNDFLDAEAIAEAVTKQNMRFAQLKTQEQLDWQAMHRVRDRLVQRRTALINEIRGFLLERGITFAAQPIHLRKNLPTVIEDAEQNLSPRLRWLLDRMWQEWKQIETDVEAITDEIERISNEDARCRQLRQIPGFGPLVSTATVAAIGNGSAFRRGRDFAAWVGVVPRQYSTGGKQKLYGISKRGNVYLRRMLIHGARAVLFRVKYDTGGFGQWVHRLAQRAPHNKVIVAIANKLARIAWAVLSSGQDYRHQPLQQRAAA

SEQ ID NO: 457581 - protein, 351 aa, unidentified
MRTFQKITGIVTTIGIDIGKNTFHLVGFDQRGAIILQQKVSRSQLERRVANIPRCLIGMEACSGSHHIGRRLAEIGHDVRLIPAQYVKPFLKGHKNDYRDAEAIAEAVQRPTMHFVTIKTPEQMDLLALHRVRSRLVGRRTGVINQIRGFLIERGITVRQGPMPLRKALSEILSSDTGALSPRMVGLIADLAQDWRRLDERIAAVSAEIEVLAEQDDSCQRLMTVPGVGPIISSAVVAAIGNGTGFKQGRDFGAWLGLVPKQESTGDRTILGKISKRGNKYLRTLFVQAAHVVLERRPSAAMRGLWPWAEQASKRLHRNMLAIALANKLARIAWAVLARGGTYQPRITHAA

SEQ ID NO: 457582 - protein, 398 aa, unidentified
MTESSDYESVQVFIGVDVGKDTHHAVAINRSGKRLFDKALPNDENKLRSLISDLKQHGQILLVVDQPATIGALPVAVARSEGVLVGYLPGLAMRRIADLHAGEAKTDARDAAIIAEAARTLPHALRTLKLADEQIAELSMLCGFDDDLAAQTTQASNRIRGLLTQIHPALERVLGPRLDHPAVLDLLQRYPSPEKLASLGEKKLAAQLCKLAPRLGKRLAADIAQALAEQTVVVPGTNAAAVVLPRLALQLITLRKQRDEVALEVEQRVLAHPLYPVLTSMPGVGVRTAARLLTEVACRAFASAAHLAAYAGLAPVTRRSGSSIRGEHPSRRGNKALKRALFLSAFAALRDPLSRAYHTRKMSQGKRHNQALIALARRRCDVLFAMMRDGTFYTPQAS

SEQ ID NO: 457583 - protein, 352 aa, unidentified
MERYVGLDSHARSCTLGVKSAGGRRLKSLVVETNGKALVEAVRGVGGRVHVCLEEGTQSAWLYELLKPHVAEVVVAVAPERKGSKDDQRDAWARANELRTGAIETRVFKAPEHLAGLRNAVRAYGFAVTEVVRAKNRLKSVFLSRGIGTDASVYDAAKRMAWLKQLSSPHRELAEWLGRQLDQLEPLREEAEGLLLRESKKHPIIRKLSTAPGMGPIRTAQVVAIVATPERFRTRRQLWSYSGLGIVTRSSADWVQDRTGKWVRGHHAQTRGLNRKRHPRLKAVFKGAATTVIAQLAEDPLHADYERMLKSGIKPTLAKLTLARKIAATVLSMWKHQEVYDPKRHRPTPEQK

SEQ ID NO: 457584 - protein, 378 aa, unidentified
MEAESNASKDGKEDCSLKNDVMAKRLKQSLGIDVSKLSLSLSLGFLTDKLEKEFMSHPDVPNDLSGYRELLKWLKRSVDGPVELVVVMEATGVYHQGIAHYLYSHGYTVCVMQSGRVKRYAQSLDQRSKTDALDSKMLSMLGIERSIRPWRPPSEELQELKALSRERSSLLKDRVTETNRQGAIDSGVHGSTKAVKRHRDRLKLLNGQIEMIEAEMKEIVSKNEALERKIGFIMSIPGISFISAATVVGETLGFESMTNAKQLTSYAGYDVVLRESGNFKGKTVISKKGNSHIRAVLHMPSMTCVRCNPTLKRFYNRLKPNKAKPLVALIAVQRKLLILMYTLWKNEEVYDAAYETKKQQKHEAIAAQDNNLINQLVS

SEQ ID NO: 457585 - protein, 338 aa, unidentified
MDNFIGLDVSKSTVSVFIPKGECEIEIANTAQGFTSLFSKLKKLYKKEHDSLVFVYEPTSSYSNTLELFCANKQIRVFKINPKASHNFAKALSLRSKTDKVDARMLTKAGTLAREGEIHIPVVDRLVSQINDLMSYYQLLVKQRVQTSNHLEKLQHKESSSSLKKALEKEIQAFKIKEQNAIDAIKTLIDNDAQLASKYQCILTIKGLGDIGTIVLMHLFLKYPNANQKQIVSLAGLDPIERTSGSSVRGKTRISKAGNKLYRRALFMSTMVAIRFNEDIKCFYDRLKEKGKHTTVAQIAVMKKLIIIARALFHADQDYSSEIYQAHCGIVDKKANVA

SEQ ID NO: 457586 - protein, 457 aa, unidentified
MNKVNQHKTDPFEKMPVVNVSAAGIDVGSRSHFVAIGQNKDDVKEFGVYTEDLHALCKHLVESGRTTVALESTGSYWQPLFVLLQQYNLNPILVNGKFTKNVKGRKTDVQDCQWIQKLHTMGMLEGSFIPDLFTEKVRQYYRHRQTLVESAASYINKMQKALRLINIRLDSVLRDVMGRSGRDIIEAILNGERNAKVLASLAQPAVKTSKEEIATALTGDWRDEYIFELRQCYEIYKHYHKKIDECDEVIKQILTQEIERKQKEENLAKAEGIKIKKKKARKNEANINIQQLAVNLTGGVDISSIEGVGLGLVLTLIAETGLDLTAFPTDKHFSSWLSLSPDLKKTGGKVINSHTRKGKGRLARALMHAANAIGNMKKGGYLVHFFKRIQRRSERSSAIIATANKLSKIIWNMLVKKQPYNPIIPKEYLDKIRKNEVKNIQRKIRQLNIREDEILFV

SEQ ID NO: 457587 - protein, 389 aa, unidentified
MKIYVGIDIAKLNHFAAAISSDGEIIIEPFKFTNDADGFQLLVSKLESFDRNSIIIGLESTAHYGDNLVRYLVAEFYQVCVLNPIKTCQMRKNNVRKTKTDKVDTFVIAKTLMMQDDLRFITFFDLDMMDLKALGRFRQKTIKQRTRLKIQLTTYVDQVFPEIQYFFKSGLHQNAVYALLKEAPSPKEIASMHMTHLANLLKVNSHGHFTKELAKELRVLAQKSVGANDSAISIQITQTIQQIELLDSQLEKIEAEMTDIMKFNDSVIMTIPGIGYINGGMILGEIGDIHRFSNPNKLLAFAGLDPSVYQSGNFQAKTTRMSKRGSRVLRYALVNAAWNVVRNNATFKAYYDAKRAEGRSHYNALGHCAGKLVRVIWKMLTDEVEFNLE

SEQ ID NO: 457588 - protein, 375 aa, unidentified
MLMVAERSPSPQPPTVAEVYRFVVGVDTHAKVHQYAIVEAATGRVLDEGGFPTSAAGLARAAAWIARRTGGDLDPGPGSVLVSCEGTGSYGARLAKLLLEVGYRVVDAPSPKRDRGQDKDDTIDAIKAARGVLGTRVDRLAEVRAGQLQEALKVLLAARDRMAGESTRSVNALTALLRGVDLGLDARRKLTAPQIRQVARWRTRSESPAAAIARAEAVRLAARIMQLRVELAANKTQLRQIVQAHAPVLLDTYGVGPVNAAIVLSVWSHPGRVHHEAALAKLGGVSPIKLESGDSTEHRLNRGGDRQLNRALHSIAKTRMERDPHTQAYVERRTRQGLSKRRIRRCLKRYIARQLFRTLTTHTEQINNQVMPPAA

SEQ ID NO: 457589 - protein, 360 aa, unidentified
MTQITHFVGLDVHANQTHAGVLDHNTGELRRRRLRGDPLVALRLIEELGPGALAVYEAGPTGFILARGAVARGLDVRVCAPGLIPRKPADRVKTDARDAERLARLLAAGELSFVRVPSVDEEQLRDLVRAREDLRGDLNRARQRISHFMRRRGLHFPSKAWSAQHRTWPRGRDFPDRASKVTFADYLAAVFALEQRRDALDATLAELAPQSPWAQTIARLRCFRGIDTLSAVGLCAEVGEFQRFAHPRQLGAFLGLVPSERTSDEKRRQGSITKAGPKHSRRLLVEAAKHVWRRPSISEELRRRQLGQDPRVINVAWRAQRRLHRQWHKLAGKRGKHSNIATVACARELAAFVWEAATLA

SEQ ID NO: 457590 - protein, 399 aa, unidentified
MAAPSLWAGIDAGKLDHHCVLIDASGERLLSRRVRNDEAPLTALIDDVIALADGGLVQWAIDLNGGGAALVISLLLARDQHLLYIPGRIVHHASAAYRGDGKTDAKDAAIIADQARMRRDLPEFRHRDEFTVELRTLCARRTDVAADRNRAINRLRAQLLEYFPALERAFDYSHRRGALILLTGYQTPEALRRIGRTRLEKWLRGRNAYNSVAIADRAIAAANAQHVVVTGQRLGSTIVARIAQQILDIDAELSDLDDMIEERFSQHQQAALIRSMPGFGPLLGAELVAATNGGLDSFHSADRLAAVAGLAPVPRDSGRISGNLKRPRRYDRRLLRVFYLAANNSIKTCPQSRAYYDRKRAEGKHHRQAVLSLARRRVNVLWAMHRDNTTYKSTAKTAA

SEQ ID NO: 457591 - protein, 343 aa, unidentified
MQVTTIGIDLAKNVFQVHGVDGTGKVVIKRQLRRGQIIEVFRKFPPCLVGIEACATAHHWARELAQLGHTVRLMPAAYVKAYVKRSKNDAAEAAAICEAVTRPSMRFGRVKTGEQQTALMLHRSRDLLVRQRTQLINALRAHLAEVGLVAAAGAEGAKTLVAIVTDETNRTDLPGPMRQALLPLVAQLVSLSEQIGMIERAIHAQHRASEASRRLETVPGIGVIGATAIAATVTDPTAFKSGRDLAAWIGLVPRQQSTGGKQRLGGISKQGDRYLRRILVVGATAVIRHARAHPEKQPWLTKLLATKPAKVVAVALANKMARIAWAILTRGETYRAPALAAAA

SEQ ID NO: 457592 - protein, 341 aa, unidentified
MTKNIYYVGIDIAAANFVASIYQSPKQPVITKEGFENTFDGFNMLNSWLETQKINPTNCVTCMEATGVYGEGLAHYLVTQGFKVSVEPPLEVKRAFDPIGHKTDPVDSRQIAEYACRYSDELRFWQPKDEIIEKIRHLLTAREQFTKQSVALQNSMGAYKKHVAQVSLITDAHSHILKELKKQIAEIDKELEQLVRKNPTISNIKNQLMSLPGYGLLLSSSLIAMTGAFREITSYKTLAAYIGICPYQHQRGSSVYRPPHIRHFGPAYSRKPLMLAARSVVTHNADFKKYYLRKLTEGKAKKLVLNNVANKLIKIACAMIKSNARYVSTYRSVNPMRLISA

SEQ ID NO: 457593 - protein, 433 aa, unidentified
MKVKYEDRLKQKVIAITTDTLVVGVDIAKNYQWARFVDFRGIEHDRALKFKNSKGGFETILARIREICKKENFAKAVVGMEPAGHYWKALANWLEKQEGITAVLVNPYATKQAKELDDNSKTKSDKKDALTIAKLVKDGRYFELYLPHGVYAELRGLSTTRSGLNKRKSALKNTITAVMDEFFPEYAEVFKCPLSGKASRHILKNCPFPKFILALGEDGVTDEIRKAVRKTVGRKKAARLVEAAKDSIGVDYGEESARLKLRLMLEELELLEKQTEELEGEMEAALGKTDYAEFLLSIKGIGIVTLAACLGEPGEPTRFDNPRQMSRMAGYNLVEDSSGKNKSGTKISKRGRKNLRGVLYQMALTMVATNGEMKQLYHYLKTRKKDPLRKMQALIAISKKILTLIHTLAKKKESYDPGKVFGHVRREQLKSAA

SEQ ID NO: 457594 - protein, 344 aa, unidentified
MSTIRVVGIDIAKSVFQVCVWMVDGSVAWNKKISRSKLLDTIRQFEPGTLIAMEACATAHFWGRTFASMGYCVRLIPAQHVKAFVRSQKNDANDALAICETAFRPGIHFVSVKTTEQQDIKALRNTRQLMVEQRTALANQLRSLLAEYGFTIPVGILRLQQQLPELIEDASNSLTFTLRRLLSSLREDMQALNERITSLDSEIAALSSQQIAYRHLLTIPGVGPLIAAAFISEVDATQFSSGRELSAWCGLVPRQHSSGGKQRLSSVTKNGNRSLRTLIIHGARSVMRCVKKRDYSLSIWLQRLEARRGFLKTTVALANKLTRIIWRVLTDGIDFNMQKAVAIN

SEQ ID NO: 457595 - protein, 345 aa, unidentified
MEIHTIGIDLGKTVFHLVGLNPRGEVVVRKKCSRNQILRFTSNLRVSLIGMEACGGAHFLGRALREQGHDVRLMPAQYVKPYVKTNKNDYIDAEAIAEAVGRPSMRFVPIKTDDQLDLQSLHRVRERWVGHRTAVINQIRGLLLERGITIRKGRRYIEEALPGILEDADNKLSGALRVLLTELQREMQYLDRQVEESDRLILRIAGDLEACRRLVAIPGIGPLTATAMIAAIGNGAAFKKGRGFAAWLGVVPGEHSTGGKQTLTGTSRRGNKYLRKLFVQGAHAVLLQKTKQATGLSTWLAQLTSRKRTPVATVAMANKMARMAWAVLAKGEAYRPPLLLETAGD

SEQ ID NO: 457596 - protein, 341 aa, unidentified
MSIITVGIDLAKNVFAVHGVDDNGKAALVKPKVSREHLLPLIAQLPPCVIGMEACSGAHHWARLFRQHGHTIKLMAPKFVTPYRMSGKRGKNDAADAAAICEAVTRPHMRFVPIKEEHQQIILCLHRTRNGFVEERTATYNRLRGLISEFGIVLPQKVACLRRDIGERLEDLPGYANQCVGDLLAHADALDARIDEYDRIIAKAARDDARSKRLMERPGIGPISASALLASIGGGHDFKNGRQVAAWMGLTPGQYSSGGKARLGRITKAGDPYLRSLLVMGARAVLAGLGDKQDGFSRWARSLQERRGYWKAVIAIAAKNARLAWAVLKYGEEFRLNPNAA

SEQ ID NO: 457597 - protein, 410 aa, unidentified
MQTLVERGCGLDVHQATVVACLLIVSTKGKVQKQVRTFGTTTRELVSMREWLLSESCTHVAMESTGVYWKPIYVILEGAFEIVVANAQHVEKVPGRKTDVKDAEWIADLLCHGLLRSSFVPPKPIRELRDLTRYRRKLVESRSAERNRLLKLLETANIKLASVASDVFGVSGLLMLHALVEGKATAQEMAQLAKRQMRKKIPVLELALEGKVEEHHRFLLRVQLRRLQAVEEDLSVLEHRIQEKLQPYAAEATLLDEIPGVDETLAAAIIAEMGVDMSVFGGVSQLASWAGICPGNNESGGKRRSSRIPKGNVYLKTALVEAANAAAKAKGTYLRDKFYRLKARRGYKRAAVAVAHKILVAIYYMLSHRVCYNELGDLYLDKLNKHHLTRNLVHRLERLGYTVTLEQKAA

SEQ ID NO: 457598 - protein, 313 aa, unidentified
MPSPMDFGVDVAKDTLQIASAQSPTELSLSNRRSSISAWLAKLPRGSRLAMEATGRHHLLLAELAHAAGMIVYVLNPCDLRHYARAVGLRGKTDRVDARLIARYLLREQAELHPYVPPTPVQREIDQLLRRRATLVNTKTRLQLSLRGMASYAADLRHVLKRLEALIAKFDQRLRQLATHQADAQRRVESTLGIGPLLGVALTNTFERVPLHKGDAAVAFVGFDPRAKDSGQFKGRRRLSKRGPAELRRLLFNGARSASKTKLWHPLYERYRNRGLSATEATVILARKLLRIAFSIYRHGTTFDPARLRSCLT

SEQ ID NO: 457599 - protein, 455 aa, unidentified
MDVQIERCAGLDVHQATVVATVRYPGPSGRASETVTFGTMAADLLALREWLQAYGVTHVALESTGVYWKPVYYLLEDAFTLLLINMTKLKHVPGRETDVQDSAWLAQLLECGLLSSSFVPPPAIRELRDLTRYRLQQVRERAREVNRLCKVLEDSGVKLTSVLTDVMGVSGRSMLLALVQGTTDPVVLADLARGRLRKKLPELRRALAGRFRRHHAFLVEQILAKIDFLDETLERLNTEIDERLGPFEPMLARLDTIPGVNRTVAISIVAETGGDMARFPTAGHLCSWAAVCPGQNESAGKRRSGRTRQGNRYLRGQLIQGALGAIHSKGHRPAGPLSPGEAAPRPQESGRRRRSSDARDRVLRHARRWDLSRIGCRLFRSPSCGTRRAPPCPSTGRARLSRDDRQGRVMRAWVSYRADFLSSHGGAETHGGRLHASTGKRSHHAGRAGLRPAHG

SEQ ID NO: 457600 - protein, 407 aa, unidentified
MEVLVDRGAAIDVHKDSLTVCAMTTEGREAVKTLMKFSTFHDDLEAMRKWLLEMRVTHVAMESTGEYWKPVYEVLEGSFELIVANAQHVKNVPGRKTDPNDSEWHARLLRHGLLQPSFVPAVPIRDLRDLTRLRRKTIEMGARIRNRAQKVLEASGIKLGSVVTDVFGATGQAILQQLSENKTDPVALAELAKGSLQNKKPQIVRALAGSFTKHDADLLKHQLILHQQLQERRTNIELQLAALVTPYEELISRLDEIPGINRDAAIEILGEIGNDMSPWANARRFSAWAGLCPGNHESAGKRKNVAVRKGNAFLKSILVQAATAAVKTKGTYYQAKFVRLSKRRGYKRAIVAIAHKMLIAIYHMIRDNKPYQELGAAIFDQRSAESKTKSLVKQLESLGYTVELRAV

SEQ ID NO: 457601 - protein, 347 aa, unidentified
MKHYNTIGVDLAKNIIQVSVVSSSNKERLNKALTRKKFSEFLAKQAPALVAFEACASAHYWGRVAIQFGHQVKIIPAKSIVPFRQGHKTDENDALAVAEAANRPNIKVAPHKGIEQQAMQSVQRSREHLVCERTALSNHLRGLIMEFSLVIPQGFAALTRCIPEVLEDGENELSDIYRPTLARLYERFCRLQDDILFVDKQIASLIKENDRCLRLTALEGVGPISSILLYSSLGSGEAFKSGREFSAYVGLTPKQFSSGGKVNIIGISKHVANKRLRAVLIQGARAYVYKLKEPKTAKDKWLAALIERAGYGRAAVALANKNVRTAWALLSQGTVYNKEHDKLLQAA

SEQ ID NO: 457602 - protein, 313 aa, unidentified
MMSQKLYVGIDVSKKTLDVYVSGLNVFKSYANDDLGIKGLKDFLLPLSPALVLLESTGGLEQNAARALAQCFLKVTIVNPQRARKFAQAADLAKTDKIDAKMLSNFAYAFADKLEVFKVLDDVSLKMKALSTRRNQLMKMKTQEKNRLRWVKEEWVIADIKDVIDLISKKLKKLDQEVSSLIKANESWNKRCDILISYPGIGKVTSNLLIGSLPELGITPKKKVSRLIGVAPINSDSGTHKGKRSIKGGRFNVRASLYMAVLSATRHNPVIKEFYQRLLAKGKPKKVALVACMHKMIHTLNSMIAKGEKWKNA

SEQ ID NO: 457603 - protein, 337 aa, unidentified
MNKITLIGIDTAKQVFHLVGVDAQGHYTWRKQLSRRRLLSSLAQLECCDVVLEACGASHHWARSIKLLGHKVRLIGPQHVKPYRRGQKNDYRDAEAIISAALSPGMRFVGIKRADQEAEQALHRVRSRLMSHRNAAANELRGLLAEYGQVFGCGFKPLREGARCFAETEEAHTLGLVELVNDVLEEMEMLQRRMDHYERQIEQRVQADETSRRLREELSGVGKLGASALRVKVADVRDFGNGRQFSAYLGLAPGHSGTGGTVRIGHLKRGHDRYLRQLLIHGARSALQHLGDKQDPQSRWLRGLLERRGFNIACVALAHKNARQAWAIMAREQGTLN

SEQ ID NO: 457604 - protein, 343 aa, unidentified
MEYYAGIDVSLESSSLCVVDATGRIVREAKVASEPEILITWFQSLGFALSRIGLEAGPMSQWLYAAMKQAGLAVELLETRHVRNAFKIMPVKTDRKDARGIAQLMRLGWFRPVHCKSLPAQETRSLLGARKLLQGKLHDIELSLRGTLRGFGLKIGKTTPKTFEGRVRTLIADHPTLTTIAEALLRARAVLLDEFLNLDQKVHTLARQDPRARLLSTAPGVGSMVALTYAAAIDDPARFKSSKTVGALFGLTPKRYQSGETDVTGRISKIGDAAVRTALYEAANIILERPVKGGWLKAWALGVAKRAGMRKAKVALARKLAVVMHRMLVDGTPFNMEKAAAKP

SEQ ID NO: 457605 - protein, 388 aa, unidentified
MQVVADRAAAPTAIQTDLRAIFVSLELSRSTWLITSLSPGGGEKMSKHSVQAGDIAGLLRRFAQLKEKARARTGRDFPIITIQEAGLDGFWIHRVLQSEGIESHVVDPASIATSRRRRRAKTDKIDGETLVRTLLAYKRGEPRVCAMVKVPTPEEEDSRRLCRERKVLTAERVLHVNRIKGMLFCQGISGYEPLRRDRHERLEELRTGDGRPLPPHLKAQVNRELDRLELLLKQIKAVEAERDALLVAAHTPAAVPASMLLNIKGIGPEFAAVLWSEGLFRHFDNRRQVAAYAGLAPTPWQSGAVDREQGVSKAGNPRLRTTLIQLAWLWLRNQPHSALTLWFHERVNRNGGRLRKTTIVALARKLLVALWKYVNAGVVIEGAAMTTA

SEQ ID NO: 457606 - protein, 385 aa, unidentified
MNPLYVGIDVSSKNNVIYLMLPNGDKHSSFSLANSHDGSTQLVKRIFTAMTSNNIDSVLIGLEATSVYGDNLVYFLKEDTTLASFDRKIHVLNPKQVNKFKESYNDLPKNDYVDAFVIADCLRFGRINKEVYMDDYRYKALQNLTRARYFAVTNLTKEKQRFINVLFKKYSTMTQEKVFSDTFSTTALAVYEKFESAETLAKMDLQELTAFIMEKGKNRFPDPDAVAKALQKAARSSYRLPKTVNDSVNQVLAISITSIRSLESQIKAFDKAITKQMELLPNVLISIPGIGPVLSAGIMAEIGDINRFQNQAALAKYAGLAWQQHQSGDFEAQTTRMIHSGNRFLKYYLCEAAFSLVRCDKEYSRFYHLKYKEVNRFQHKRINCS

SEQ ID NO: 457607 - protein, 354 aa, unidentified
MIIIGADYHPGFQQIAFVDTDTGELQERRLEHREDAEKFYRDLAAQELKVRVGMEASGHARWFERLLGELQFELWIGDAAEIRAKRVRKQKTDRQDAQLILRLLLEDRFPQVWVPSWENRDLRQLLWHRHRMVQARTRTMNQLQAVALNEGLRCKKKLWRDAGREQLESFRLAPWASRRRRDLLELLDRLTPTIAELTQAIEQEAEKCPAARRLQTHPGVGALTALAFVLIIGRADRFECGKQIASYLGWVPSEESSGQRRRLGHITKQGNSLLRFLLVEAAQVTVRSDQEWRNRYFHLVLRRGRKIAKVAMARRLAVRLYWMWRRGWDYQQLKKFGSHAGEPGNPDGVQSSTE

SEQ ID NO: 457608 - protein, 329 aa, unidentified
MNVHQQGRETTAASRINAGIDVCKQWLDACWGDRSQRFNHDAEGIRQLAAALLEARTDLVVMEATGGYEVAAAAALQAEGLAVAVLNPRQTRDFAKSLGVLAKTDRVDARVLRDFAQVIAAHPRRERYLRPAPDEQRVQLAALVMRRRQLVDMRVAEANRLTLAHKAARKSVEAILAALDEQLAHVDSDIDQHMREHYKETMAFLRTLKGVGRVTLTTLLAMLPELGHLRGRSIAALVGVAPLARDSGQRHGRRQTWGGRHEVRAALYMAALSAVRHNPILRQFHQRLIAAGKPPKVALVACMRKMVVILNAMARDHASWDPARTTPHA

SEQ ID NO: 457609 - protein, 345 aa, unidentified
MVTIGIDPHKSSHTAAALDASGETLGQLRLRADGATLSRLLAWAAGWPQRVWAIEGAGGLGRLLAQQLIATGETVIDVPSALTAQVRVLHRGHGRKSDGIDARSVAIVAQHRDDLATVSADDHTALLRLLSDRRDELTAERRRAVNRLHRLLRELHPGGAPRQLSAQHATRLLATIKPAGLVDSERKAMARELITDVRRIDRALLENRRRCAQAVAASGSSLTEIFGISEVLAAKLIGHTGDITRFASADHYASYSGTAPIEVSSGEQTRHRLSRAGNRSLNHALHLAARVQTMHPGPGRDHYQRKQAEHKSSAEALRSLKRQLAKVVYRQLRADHALQTSASPN

SEQ ID NO: 457610 - protein, 370 aa, unidentified
MKEYSEAFIGFDTAKKKHAVAIADVGGEGEMRDRGGRDSSPLTNERMIRKLAGRYEKLHFCYEAGPTGYGLYRQVRGLGHDCSVVAPSLIPKKSGERVKTNRRDAVSLARLFRAGELTSVWVPDTVHEAVRDLVRARETASQDLRRKRQQLLSFLLRHGRIFSGRQHWSRAHLRWLAQQKFDHPAQQIVFQDAVDAIDDAAARLRRLDEQVAAIVPSWSMAPVVEAYQAMRGVSFVVAVTFVAEIGDLRRFDNPRQLMAFLGLVPSERSTGERVRRAGLTLAGNKRARRVLIEGAWSYRYPARVSQTLQARLEGLPKAVREIAWKAQIRLCARYRRLTAAGKKLPVVIAAIAREMAAFLWAIARHVAPAA

SEQ ID NO: 457611 - protein, 466 aa, unidentified
MSKPARPRSAAEQRLPPQLQAVRLHAAGIDVGATEHWVAVPEGADPQRVRRFGACTADLEALADWLAACGVTSVALESTGVYWIALFELLERRGFEVLLVDPRQFHQMSGRPKTDVHDCQWLQRLHTCGLLAGAFRPDDQVVVLRSYLRQRAELLAEAGRDIQHLQKALTQMNVKLQHVVADTVGVTGLSIIRAIVAGERDPAKLAKLRDPRCKQSEAAIARALLGNWRDEHLFALAQALEAYDFHHRQLAACDRRIEAELGKFPDRSGGAAPPPRPGKRAKGKARRNQPAFDARRPLYRMAGVDLTVIEGIEETTALILIGEIGLDMSRWPTEKHFCSWLCLCPNRRISGGRTLSSHTKKGASRAAMALRLAARSLERSKSALGAFFRRLRGRLGMPKAITAAAHKLARLVYAVLKHGTAYVAQEMAAYERQYRERLVNGLKRKARELGYELVAPAGAAAEAGPR

SEQ ID NO: 457612 - protein, 360 aa, unidentified
MKLGQEVVARSVVGGVDTHKDLHVAAVVDEQDRVVGSQCFAATRHGYKQMLAWMRSFGQLRRIGVEATGTYGAGLLRYMQSAGVEVLEVTTPDKHDRRKRGKNDDLDAQNAAHAAFTGRRAVTPKSRDGMIESLRVLKACRKTAVAARRVALQMIQNTIVSAPDELRETLRKMTRMQLVRTLAAWRPDLSDYRNLVSAYRITLKSLGRRYLESHDEIADLDTMIIGIIDELAPALVARNSIGHGCAGQLLLTAGDNSERLRSEASFAALCGVSPVPASSGKIIRHRLNRGGDRAANSALHIIAIGRLRTDPRTQAYMAKRIAEGHSKLEVIRCLKRYIAREVFALISHRRREINQIRLSA

SEQ ID NO: 457613 - protein, 343 aa, unidentified
MKLSRIGVDLAKNVYQLHGVDRSGKTLWKRRLRRGQWLQALMDKAEPGCVIGMEACTGAHHWARVLQSRGYEVRLIAPQFVKPYVKSNKNDANDAEAICEAMSRPNMRFVTVKSVEQQDIQATHRVRSEIKDQRNAKANQIRGLVAEYGLVAPLTLLALRTAIPCWLEDADNGLTDHFRSLLHGLWGDLLALEDRMTELNKAIQTIADSNEVTLRLQQLRGVGPLVATALVATVGTGEQYSKGRQMAAALGLTPRQYSSGDKQRLLGISKRGDTYLRTLLIHGARAVVSQAKHRDDPLSRWAISIAKRRHPNVAAVALANKTARMAWAMLRNNENYDPDFAIS

SEQ ID NO: 457614 - protein, 430 aa, unidentified
MTKLYSTPPDAVLVAIDMSKHRQEVLLERPEGGRRRRMTVMATKADYDRLADDLTTIGRPVIVGFEATGNYHRTLAHRLLSAGCELRLISSVALARTREALHNGWDKNDSKDAQVILHMLKVGATQRYVDPLAAGINDLQEMSKTHEAISKAKTQTWHRILTHYLPLYFPEIERFAGNSRSDWFLALIERFPTPGSITSIGREAFTEQAWPLIGRKVSKARVVNDIYETACASIALPIDEDSTAVAMFRMVIAQARTLIQQRNEIERIAHDALATNSDYQLLRMIPGIGPINALTILAEAGDLRRFSHHRQFLKFCGLDLATYQSGIFRGRTKLSKYGNARLRRTFWMATQVAIRQPNNSFRDKLSRYVDGHADDPDRRRKAMTALTAKMARVVHAVIKAGTEYRPFVERADTRWKDPSLLCREGATATL

SEQ ID NO: 457615 - protein, 345 aa, unidentified
MEHYAGIDVSLESASLCVVDATGRIVREAKVASEPEILIEWFRGLGFAIARIGLEAGPLSQWLYAGMRDAGLTVELLETRHVRNAFKAMPVKTDRKDARGIAQLMRLGWFRPVHCKSLPAQEMRALLTARKLLQTKNHDVEMSLRGVLRGFGLKVGPTTPRNFAGRIRELVAGHATLSTVAEALLAARGSLFEQWQKLEKRLRSLAREDSRARLLMTAPGVGTIVALTYASAIDDPGRFRSSKTVGAHFGLTPKKYQSGETDITGRISKIGDGGVRTALYEAANVILTRPVKGSTLKSWGMRLAARAGMRKAKVALARKLAVVLHRMLTDGTGFVADKAAAAVTR

SEQ ID NO: 457616 - protein, 430 aa, unidentified
MSSTESSNQNPVAAFIGIDWADQKHAIVLRAAASTASLEHRSIGAEPDALAEWVLEVRERFAGQGRILVCLEQSRGALIHFLMGYECFELYPINPKQLASYREAFRPSGAKDDPIDAELLYQFVSLHHRQLRPWHPDDGLTRKLALLCQKRRQAVDARTTLSNQLKSELKQYYPLALAVLDNDLTTALAADFLLQWPNFESLKKTAPHKLRKFFYGHQCRSEQKLQARLERIAAAQPLTRDAAIIEAGTLTVQMLAQQLKALVPYIARYEKEIAQLFEIHPDSALFNNLPGAGPTLGPRLLVAFGTDRERFHSPLEAVTFFGVAPVTEQSGKSRWIHFRWACPKFLRQSFHEFAGQSIRFCDWAALYYQQQRARGKGHHAAVRALAYKWIRILFRCWKTHQPYDPQLYLTALLQRGSPYTSPVKNSTPKT

SEQ ID NO: 457617 - protein, 410 aa, unidentified
MRTVVERCCGLDVHQAVIVACLLVGKPGQKVKKDLRSFPTTTAGLLALRDWLDDAGCTHVAMESTGVYWRPVYELLEDAFEVVVGNAQRIKNVPGRKTDVKDCEWIADLARHGLIAPSFVPPRPLRILRDLMRFRRSLIEARTNCRNRILKVLESANIKLASVASDVFGVSGTAMLEALVEGSRTPAEIANLARGRLRTKLVRLELALHGSLNDDHRFMLDQLLRSLEQEDQRITATEDLIAQKLEPCQEEHGLLTTIPGVDWVVAATMIAEHGVDMTPFASPARFGAWSGTAPGNNESAGQHRHAPARKGNPYLKTALYTAAVSASRTSNTYLADKYHRIKARRGPGRAAGAVAHKIAIAAFHILTTHKPYHDLGGDYLDKRTQRRTKQRLIQRLERMGYNVVLQPKAA

SEQ ID NO: 457618 - protein, 332 aa, unidentified
MYLGIDVHKQYSQVAVMDESGEIVEEVRVENANLDDLARQYTGAKAAIEATSNYYHIHDTLSEYLDVTVAHPGKLTLIANTDKKTDRVDAKELARMLRLDSVPESYVPTEEIRQARALVRGRQKLVETRTDFANKIHGLLSDHGITRNIKPLSVSGRESLRDISLPTPWDTMLISYVRIIETLTDEIDHLESAIEERAGSLKETQLLMTIPGVSYYSALMIYAEIGEVDRFDHDKEVVSYAGLNPIIRESGDSRIEGGISKRGSRQLRWILVQCSRTAVHTCQDVYLSRFYERLEGRKGSQKAIVATARKLLVSIYHMLDREEVYDPPGVSA

SEQ ID NO: 457619 - protein, 362 aa, unidentified
MEYFTGLDVSVDETAICVVGDDGKVAFETAVETDPAAIAEALRPYADRMRRVGHEAGSLSPWLHTELLAEGVPAVCLETRHVRAALSAQRNKTDANDALGIAHIMRTGWFRQAHVKTDACYRIRLLLVQRRNLKRKFLDLENAIRHSLKVFGIRLGKVGRGAMEKVVRESVAGDAMTAGLMDCMLRARAALWAEYLTLHKLVVQIAMRDELCRRFMAIPGVGPVTALSFSSAIDDPQRFRRSRNVAAYFGLTSKRWQSGTSIDVHGRISKAGDPDVRRALYEAASAMLTRFKGRDMIKTWGLKLAKTKCHAKARVAVARKLAIVMHAMWRDGTFYVGDPDASAHDNDASNAAKLRRLSRANS

SEQ ID NO: 457620 - protein, 341 aa, unidentified
MEQYIGLDLPLKETAISVRQNGKRIWRGKCPSNPQLLAEVIRKRAPNATRVVFETGPLSVWFYHELMAEGLPAICIDARHAKAALDMAPNKTDANDADGLAHLAEVGFYREVRIKQYDSMLTRTLVGARGQLIKIVTELSNQIRGLMKTFGLVVPKGAGRLFEANVRHLLAGNNGLEQIILPLLEAWRGVRGRAAELDRQLVAVARESAPCRLLMSIPGIGSVVAASFATAIEAPENFRTSRSVGAWLGLTTRRYQSGEVDFDGHISRRGDSHLRSLLYQAATVILTRSRADSTLRSWGLQLRERVGFKRAAVAVARKLAVIMHTMLKTGERFDRSAGASA

SEQ ID NO: 457621 - protein, 418 aa, unidentified
MQTELSQYTAVIGIDWADRKHDVCVQDMATGKRRFSQVRHRAEDLDEWARSLQRRFGGRIAIAVELSKGPIINALQKYDFFVIFPIEPAGLASYRRTFALSGAKDDPTDAEFALKLLLSHAEHFKPLQPQSVEMRTLMTLVEQRRQLMNDRVRITNRLRNALKQYYPQPLEWFDHIDTVLFCDFIRRWPSLSQARRARRATLEKFFREHNMNRRALLERRIKAIKSAMPLTTDDAVIVPHRLRALTLVAQLEVTLECIKQYEAEIASLAPQHPDYALFEPLPGAGAVYTPRLMVAFGEQRERFNNAAEVQKYGGIAPVTQRSGQSTWIHWRWQCPTFLRQTFVEWAAQTVNKSYWAGLYYQQQRNEGCSHQAAVRALAFKWIRILYRCWKTRTPYDETRYLRALQERGSPLLKTANAA

SEQ ID NO: 457622 - protein, 391 aa, unidentified
MIYIGIDVAKDKHDCFITNSDSEVLFKAFTIFNNLDGFNDLYQKIESVMDDVTKVKVGLEATGHYSYNLLGYLIDKGLPTYVINPLHTNLYRKSLSLRQTKTDKVDARTIASMLMSDVNLKSYSDTSYHNEELKSLTRYRFDKVKERAKLKTSVSRLVCILFPELEKLVPTLHMASVYALLSEFPSAKHVATAHLTRLTNLLSKSSKSRYGKDTAITFRDSARASIGSNMPAKSLELKHTIKLIQELDSEIDEIENEIKIIMDEINSPILSIPGINYRMGAMIIAEIGDFNRFDSPDKILAYAGFSPSTYQSGQLDGAYAHMEKRGSRYLRYALYNATKYVCHWDPTFAAYLAKKRAEGKHYNVAISHAVKKLVRVIYHLEKTKQQYIKAA

SEQ ID NO: 457623 - protein, 411 aa, unidentified
METIVKRAAGLDVHKAQVTACVRVPGRGRERVQEVAEFQTTVRGLLALRDWLKAHRVAQVAMEATGVYWKRLWAILEDEFDCLLVNARHVKQVPGRKTDVSDAAWLCQLLEAGLLKASFVPPKPIRTLRNLTRYRKSQIQERQREANRLHKALEDTGIKLDCVASDILGVSGRRMLDALIAGTTDPVVLAELAKGSLRRKIPALRQALEGRFDRHHALWIGAILNHIDFLDEQISALSEAIEEEIRPFVPAVKLLCSVPGIQQRGAECIIAEIGVNMSVFPTSKHLASWGGQCPGNDKSAGKRRSGKSRNGSKWLDYALEEAAMAAIRASENYLAAQYQRLRPRRGHKKALGAVKHSILCICWHMLATGELYNDLGGDYFHRRDPERQTKRLVKQLEALGHTVALQEAVAA

SEQ ID NO: 457624 - protein, 451 aa, unidentified
MASSRKKGTKKAPPLAPLNRRAAGVDIGSTFHVVAVPPELDAEPVRSFRSFTGDLTSLADWLVGLGIATVAMESTGIYWIPLFEILEARGLEVVLVNARDAKNVPGRKTDVNDAQWIQQLHSYGLLRASFRPGSQIVALRAYLRHRERLLEYAASHVQHMQKALMQMNLQLHHVVADITGVTGMKILREIVAGQTDPDALAAYRDMRCKASVETIRDALTGHYRPEHVFALRQALELYDFYHQKLSDCDVEIERALQALPRGPDAATPPRGRQRGKNEPRFDIRPILNTLLGVDLTEIHGLGPYSVLRIFAECGSDMTRWPTAKHFTSWLTLAPGNKISGGKVLSAKTRRSANRATLLFRLAAVSVSRTATALGAFFRRLAARVGKAKAVTATARKIATVLYNTVRHGKAYVDPGASYYEERYRERALNNLRRRAGAMGFSLVASSVEGAS

SEQ ID NO: 457625 - protein, 491 aa, unidentified
MAKEIKPKFGLIFLPSPAQPNHRRAGNLRLGRIVSETITSRYKEFAFRLGPRERPVTLLRKGANMNESVADQPIGTPQLAAYVGIDWADQKHDVVLRSVDNPAKAEHQVIKSELNALNDWIAQMHERFGAKGKVLVCLEQSRGALIYQLMAYELFELYPINPSQLANYRKTFFSSGAKDDGPDADLLSELLMCHRDRLKAWKPDDQLTRELATLNEGRRNAVDRRTELANEIKSQLKLYFPLALQILENDITTALAADLLVQWPTLAELQKVSPSKLRKFFYGHNSRQEKKILERLALIKEAKPLTTDAAIIRPTALRVKLLAQQLKSLLPFIAEYEKRIAELFGSHPDSFLFDNLPGAGPALAPRLLTAFGTDRDRFEVASDVSTLNGIAPVRVASGKRSSVHFRWACPKFQRQSFHEFATHSIRFCPWAQTYYQTQIARGKDHHVAVRALAFKWIRILFACWKNRVPYDPERYLKALQSRGSEYAQPAV

SEQ ID NO: 457626 - protein, 322 aa, unidentified
MTRIICGVDVSSHSLQARIGQEGAAASFPNQAEGIAQLAAFCREHRATLVAMEATGGYEQQAFAQLCELGLPAAIVNPRAVRQFAQAMGLLEKTDRIDAGVIAWYAETRKSQPLCLAPQTQLELRARVTRLRQLTEVRTAQLNQQRLVTNGAVREGFRKMLAFLADQIAELEQAIATLIQTDPLWRELNQAFRTIKGVADRTVARIMAEMPEIGTLSNKTISKLAGVAPLANDSGKHQGKLVIRGGRATVRDLLFIVASVVGRHEPDFILFQDRLRAAGKPPKVVRIAVAHKLLVRLNAKAREVRQRMTTASTCNQAEAVMP

SEQ ID NO: 457627 - protein, 343 aa, unidentified
MKITTVGVDIAKTVFQVHGVDEQGAPVLRKQLKRGQVLSLFANLTPCVIGMEACRGAHHWARQLQKLGHTVRLMAPQFVKPYVKTNKNDMADAEAICEAVSRPTMRFVPMKNGEQQAVLALHRARQGFVRARTAQANQIRGLLEEYGTVIPQGICQISKRLPVILEDGDNDLPGLFRQLLQRLGEHLKQLDLQVKELDSQILLWHRQHEGSCRLAQIPGIGPLTASALVASIGDARSFENSRQLAAWMGLVPRQHSSGGKTLLLGISKRGDGYLRMLLVHGARSVLRVAERKPDYGTSWIAGLVKRRHVNIAAVALANKNARVVWALLRHERNYDARYQAAAA

SEQ ID NO: 457628 - protein, 357 aa, unidentified
MLSSNVKYIGLDVHKEATTVAVRNAAGKLVMESMVETKARTLLDLLDGLRGELHVTLEEGTWAAWLYDVLKPHVREVVVCNPRRNALLKEGSKDDRVDARKLSELLCARMLRAVYHGENGLRTLRELARSYEVVSKDLMRAMNRIKALYRSWGIPCTGTKVYTRRHREQWLQHIQEHGVRRRAELFYQELDGLQSLRRTVRRELLAESQKLPAVKLLRQIPFIGSLRAAQLVALMQTPHRFRSKRQLWTYSGLAVVKRDSAQYRYVDGQLQRSKKPQQVRGLNQNHNHAMKDIFKSAALSSALHPGPFQDFYAGLLAKGMKPEMARLTLARKIAAIALTLWKKGECFDVSYVKSQAA

SEQ ID NO: 457629 - protein, 339 aa, unidentified
MREVSTIGLDLAKNVFQVHGVDAAGETVVRRVLRRARVLVYFAQLPPCLIGMEACATAYYWGRELGKLGHRVKLIPPAYAKAYVRRNKNDAADAAAICEAVSRPSMRFVAIKSEAQQAAAGIHKVREMLMKQRTMLINALRGLMAEFGIVVGVGTRHVGELTAILVDPEDDRIPALLKDGLRRMAEMLRGLERQLQGIDKQIVDWGRGNTTCRHLITAPGYGPILSSAMAAIVVNPAVFRSGRDFSASLGLVPRQDSTGGKVKLGPISKRGNGYLRRLLVNGAMSVLNSKRAKQDPWLLKLLANKERKVAAVALANKMARIGWALMMRQEDFRATSTAA

SEQ ID NO: 457630 - protein, 379 aa, unidentified
MPHTLHHVGLDVHAETIAVAVAEADGSVRELGIIPHRPEAVRKLLAKLGPVADLRVCYEAGPTGYPLYWQLTALGVHCDVIAPSLIPTKAGDRVKTDRKDAVRLARCYRAGDLTAVWVPDAATEAFRDLVRAREVSKQDQLRARHRVSKFLLRHGRQRPEGMRAWTLKHAQWLARLTFELPTLQVVYDEYRATLAVLADRIARLERAIQAALPTLAPAQQALIGALATLRGVQTVTAATVVSEVGTLRRFATPRHLMAYAGIVPREHSSGSGIHRGAITKTGNAHLRRVLVEAAWAYRHRANPASSTLRVRQADQPAAIVAIATKAQHRLCPRYRRLLDRGKQPLAVATTIARELLGFIWAIGQTIEPPPAPVGVVMPM

SEQ ID NO: 457631 - protein, 345 aa, unidentified
MKIVGCDLHTRYQQIAMLDEETGELIERRLEHENGEARAFYAALAAPVRVGIEATGHTRWFERMLAELGQELWIGDAAKIRASMVRKQKTDARDAAHLLELLLSGRFPRLWRPTMAERDLRQLVWHRQKLVWMRHAVGNQLHALAMGEGVCRKKKLFTKKGRIELEGLPLDAWASRRRQELLRMLDQLDASLEEFDQAVTEQAEQNPAAALLMTHPGVGPVTSLAFVLTLGPVERFARSKQVVSYLGLNPREHSSGGRQRLGSISKQGNPMMRSLLVEAGHTAARLDHELKQDYQRLKLRRGGGVAKVAIARKLAVRMYWMLRRHSSYAQLVRMQGSPRATLVQP

SEQ ID NO: 457632 - protein, 369 aa, unidentified
MRRNITYVGLDVHKDSIVIALAEEGRGEEVVEYGSIECSVTALDAVIRKLQSRGKRRLEFAYEAGPCGYEIYRHLTGKGFNCSVVAPSKVPRARGERIKTDRRDAVQLAKLLRSEYLKPIYVPDEEDEAMRDLSRAREDAKQAQGKARQRLNAFLLRHGHRYHGKKHWSQVHLRWMGDIAMGHPAQQLVLAEYMEAVRCCTEQVERLTEQIRHFVPQWRMAPVVNAMQALRGVSLITAATSVSELGDLSRFDNPRELMGFLGLVPSEHTSGTQVRRGGITKAGNGHARRALVEAAWASRFPARVSRALLCRQEHLPQEVRETAWKAQLRLCARYRSLMARRKPRQVIVTAIARELSAFMWAIARQVPIN

SEQ ID NO: 457633 - protein, 400 aa, unidentified
MMTPDDIDVWVGLDVGKSAHHAHALDHDGNTLYDKPLKQDEKAIRTMLGKLSKHGRVLLVVDQPNTIGSLPLTVARNMGIAVAYLPGTAMRRTAQLLPGDAKTDRRDAHVIAWAALKLPETLRDAGPDDETLAALKLLAGHDEDLAHESTRHVNRLRSLLLQTHPAFERALKGERITRDATLALLERYGGPMGVKRAGIEDVKDWAKSNGLRAGRIIDDMFKAIGEQTVTVPGTLMAETIIPSIAHDIKTIRDRRREVDRQVEKLLEDHPLLTVLTSMPGIGVRTASNILLGIGGDIANFKSSAHLAAYAGISPVTGQSGTSIKGERPSRRGNKRLKNALWQTAFGASTKHPPSVAYYKRKREQGKHHNAAIICLARRRCDVIYSMLKNGTLYQEPALVA

SEQ ID NO: 457634 - protein, 340 aa, unidentified
MEKRYVGIDLHRNRFTCCIRLENERTYLTEWKLEQLARFVKKLRPTDEVAVEITGNTRLFHDAVAPHVARVAVVDSNQFRVISRSVKKTDANDARLLALYLSKGLLPEVRMKSKQHAHLASLTQTRDTLVKQRSALKNKINNILSARGLNLPKEALSSQKRLAEVVSLPFDEIVRVELRVIADQIRGLNKSVAELDQAIAEASAELEGHASLTSIKGIGATTSAILLSVIGDVNDFPDESRLASYFGIVPRVSNSNEKEHSGHIHKRGSKLGRTALVQSALVAAQYSPYLKSFYERVKARRGAGKAIIALARKFLGVIYRTLKNKWVFADFPNFVLAEES

SEQ ID NO: 457635 - protein, 368 aa, unidentified
MFTERTSVGLDVHARSVAAAAIDGATGELVQARLTPDHGHIRSWIQDLPGPVAVAYEAGPTGFDLARALNTEGIRCVVAAPSKLQRPSGDRVKTDARDAVHLARLLRLDEITAVTVPGVEQEAARDLVRAREDCRGDLMRARHRVSKLLLRHGIVYTDGAAWTGAHHAWLARQHLDTAATRMAFDAEHETVLATLARRDRLDQAITAMAADSQFTPVVHRVCCLRGISTLTGFALAVEIGDWHRFTGNTIGAFVGLVPSEHSSGASRSQGPITKTGNTHVRRLLVEAAWHHRPAYRIGATMRARWDKAPAAARARGDAGNRRLHERWVRMLERKKRPTIATVAIARELAGWCWSLAVMDEEMDEAAAG

SEQ ID NO: 457636 - protein, 476 aa, unidentified
MGDSTTGRQKRKQRGNKRRETGRQGAGGLASMPLLYPDLAGIDIGSRVHYVSVPADRSPDPVRTFGCTTPDLVEMARWLKDCGITHAAMESTGVYWVPVATVLEAEGLQVALVDARESHRLSARKTDVHDCQWIRQLYACGLLRGAFRPASEILPLRSYWRQRQEIVSLCATALHHMHKALELMNLQLHKVVSDIAGATGMRIIRAIVEGRRDPESFLPMVHRACKSAPEEFVKALTGHYAAEHLFALRQALDRYDMYQRQIAELDGELHRATREFASARPQECGAQEQGQGKPRGGRRKNQCHFDLAGEALRMAGVDLTRIEGIDALTAFTIITEQGVDMSPFPTEKHFASHLGLCPDNQITGGRVRKKSTRRVASRAARALRVAAQSLARSKTALGAFYRRIKGRCGAAKAIVATAHKLAKIIYRMLKHGEQYVARGQEEYERQYQERLLKNLARQASRMGCQLVVENSGEVLS

SEQ ID NO: 457637 - protein, 351 aa, unidentified
MEHTTIAVDLAKSVFQVAVSHRAGRVDAERRLSRDRFLAYFAQQPPATVLLEACGSSHHWARQLEQFGHVVRLLPAHDVHRYVRRNKTDRTDAKALLEAARNEEIHPVPVKTVEHQAITSLHRLRSTWLATRTARLNTLRGLLREFGIFIPVGAHHVVPRVRELLGEPTATVPVAVHSTLANACAEIEVLETNMRDVERQLAAIARQLPDVALLQTVPGVGLMTATALIALVGDIRRFGSGRHFASFLGLTPKEDTSAARRRLGAISKQGDVYLRMLLIHGARSVLWHAKSCAHPSDFQAWARCTEQRRGHNVAAVAVANKLARIVWAVWSQQRPFAANHRHAETTSVSNT

SEQ ID NO: 457638 - protein, 339 aa, unidentified
MGLYTGFDLHSSNSYLEIIDEDGKRIWKKKLRNDPTLILATLRPFKEDIAGIVAESTYNWYWLVDLLMEEGYEVHLANPSRIQQYSGLKHGDDEDYAFWLAEMLRLKILPKGYIYPKEQRPLRDLLRKRGHLVRLRTSLILSLQNILARNIGTKMNTNRMKALRTDHVAPLLAGNDDLSLAGKVSKDAIDSLSRQIIAIETVVEKKLPLRKPYDFLLSMPGVGRVLALTIMMETGPIDRFPKVGNYVSYCRKVPAARFTNEKKKGAGNRKNGNKYLAWAYAEAAELARRFDPAARAYYDRKRRRTNAPIAYNALANKLSRAAYYIMRDGVLFMPERMFT

SEQ ID NO: 457639 - protein, 356 aa, unidentified
MSYQLNSAIAVIGIDIGKNSFHVVGQDRRGALVLRQKWSRGQVEARLANLAPCLIGMEACVGAHHLSRKLQALGHDARLMPAKYVRPYSKGQKNDFRDAEAIAEAVQRPTMKFVATKTADQLDLQALHRVRERLVGQRTAIINQIRAFLLERGIAVRQGLRFLRAEMPTILAKRSDVLSPRMLRIVEDLAGDWRHLDERIEGVSSEITALADQDAACKRLMTVPGIGPIISSAMVAAIGSGDVFGKGRDFGAWLGLVPKQISTGDRTILGKISKRGNRYLRALFVQAAWVVLVKIGPKHWHRYGLETWIGAARKRLHHNVLAIALANKLARIAWAVLHKGRAFECVKTDAMAFRPA

SEQ ID NO: 457640 - protein, 360 aa, unidentified
MAKARTLVGLDVHATKIVVAVLDAETGQLQYFRLGGEVRDAAGLCAGLPRPVRAAYEAGPTGYGLARELERRGVECVVAAPSKIPRAAGDRVKTDRRDAELLVRLLLAGKLHPVRIPGVEEEALRDLVRAREAVRVDLMRCRHRLSKLLLRHGIRFEDGRAWTDRHHAWLAGIELGWPAAQATFADACGAADALVHRREALEREIVALVPDSPWQVQVARLRCLRGTDTLSAVGLCAEVGDFERFAHAEQLMSYVGLVPSESTTGQQRRLGAITKTGSAHARRLLVEAAWHYRPRPRIGKALTERQHGQPAEAIAIAWSAQQRLHRTWNRLQARGKRRTIIAVAAARELAGFCWAITRIP

SEQ ID NO: 457641 - protein, 463 aa, unidentified
MPKSAVKKARSRRAKKPKTTQSQPIIRPHAAGIDVGATELYTAVPADADPEPVRTFATFTEDLHALADWLERCGIQTVALESTGVYWIPIFQILEARGLEVCLVNARHVKNVPGRKSDVSDCQWLQYLHSVGLLRASFRPPAQVCAVRSLWRHRDTLVRYAASHIQHMQKALTQMNLQLANVISDLTGKTGLAIVDAILAGERDPERLAAWRDHRIKAETQTIARSLVGDWKEEHLFTLRQARTLYAHYQQMVAECDTQIAAFLSAFESRVDLQAHPLPARHSSPARPQRTEPALDLRRELYRILGVDLTQVPGLQSLTASAFLSEVGPTVERFATPKHFASWLGLCPDNRITGGRVLSAATRDVKSRTAYALRMAAQSLHRSQSALGDYFRRMKPRLGAPEAITAAAHKLARIIHHLVKYRCPYDASVFAQEEELHRRRREKNLRKQAALFGFQLTPLQSNV

SEQ ID NO: 457642 - protein, 358 aa, unidentified
MQRNKISFKGQKIFVGIDVHAKNWEVAIAPEVGIVKRHSQKPSAKELFDFLKKNYPDGDYQSVYESGFSGYSTYYALKEVGIDCMVIHAADVPTTQYEEVMKTDRVDAVKLARSLKAGLLKSNYVPEKQYIDDRSVVRIRKTIQKQLSGYKSRVKHLLHCHGVEFPERFSKKQTHWSRAFITWLMKDVRLMSETRASLDLLIRQVEVLRGTLLEATRQLRKMSQTERYKHRHDLLRTIPGIGIIVTMCILTEVCDVKRFRNENQFAAYLGLIPTSHSSGEKTVHGEKTFRGNKQLGPMIIEAAWITIGRDAGLGAQYFQYKQRMEPQEAIVRIARKLSNIIFSVLKNEKEYVPYQTGN

SEQ ID NO: 457643 - protein, 403 aa, unidentified
MNPCITIDVSKETSHVQGFLDNNVPLSKPKKILHTKEGFSNILTIYNQIVYKTGIEPTVFFEYTGVYHKSLMAYLKTNNLSFIPIPPLVAAKVRNADLRNKKTDVRDCKTISFVYYEDKIKKYYEPTKDEKKLKDLQRYYMITEKQYQEITVHLYEMIDSIYPFYKSVMSEFDCFTSLKFLQKYPHPDFVTSHREKTLIKDFMELTGHGDKYATKVIHKLLNLIDTTVPGCSNDDFEVEMLKDYATQALFYKNRLNKTLEEINRIINQDYSKKSLVENIDSIPGIARNTAARFIAEVSNVDRFNSSKALVAFAGTDPNINQSGIIDGKHLSITKCGNKRLRTILYIMVRSMIRKRIPANPIKDFYKKKTQLGLPPKVVLIACINKLLGIIYQLNKTGEVFVLK

SEQ ID NO: 457644 - protein, 365 aa, unidentified
MWEAPVVVQRTNVGLDVHARSVVACGLDRQTGEVFEQRLTPSHEEIAAWIRSLPGPAAAVYEAGPTGFGLARSLRAVGIDCEVAAPSKLMRPSGDRVKTDTRDARHLARLLMLGDVTAVAIPSREQEAARDLVRAREDCRGDLMSTRHRLSKLLLRQGIVYSGGKAWTGKHELWLRCQRFDDPALQLAYDTSFEAMLATIARRDRLDRAIEQMAADSEFTPVVSRLCCVRGVATLTAFGLAVEIGDWHRLTGRSIGAYLGLVPTEYSSGASRVQGGVTRTGNGHARRLLIEAAWHHRARYRPGATLRRRWDAASAPARARGQLANQRLHARWQTFDARKKRAVVANTAIARELAGWCWSLAVLDG

SEQ ID NO: 457645 - protein, 360 aa, unidentified
MAQVRTWVGLDVHAAKVVAAIADSQSGELAVRRMGGSTERVAEFCAGLPAPVRVAYEAGPTGFGLARALAARGIDCTVAAPGKIERPTTDRVKTDRRDAERLVRLLMIGGLHAVRVPTPAEEAMRDLVRAREDVRGDLMRTRHRVAKLLLRHDLRFEGNNWTQRHLDWLGRVELPEPVAQSVLLDGIGAIDALLVRREGLETQMASLVEGSPWERQVAHLRCLRGIDTLSALGLCAEVGDFERFERPAQLMSYLGLVPSENSSGERRRQGAITKSGSRHARRLLVEAAWHYRRAPRKGRELRRRQEGQPQAVCAISWKAQQRLHRSWVRLDSERGKRRTLCAVAVARELSGFCWAVATAD

SEQ ID NO: 457646 - protein, 410 aa, unidentified
MPSPLFVGIDVSCRNNKVQLLHSDGSEIVRFSVPNNYPGAKSISEKITGVMGKNKFDSLVIGLEATSVYGHPLVYFLKQEPSIKAFNPRIHVLNPKQVANFKKAYPELPKNDWVDAWVIADNLRFGRITKEVYMDEKFVALQKLTRERYHVAKNLTREKNRFLSNLFLKFSTLAQEDIFSDKFGATSVAIIEDFFSVDDIAYMDVDKLAEFLNNKSKGRFADPHELAETIKKAARSSYRLPKTVNDSVNQVLAVSLVAIKALKKQLETLDKAIETQLALIPNTLQSIKGVGPVYAAGIVAEISDINRFPNHAALAKYAGLAWTEHQSGQFKAENTHMIRSGNRYLKYYLLEAANKVRVHDPEFKRFYGLKYAETPKTPHKRALALTARKFVRLVYALLRSNRIYTPPKGE

SEQ ID NO: 457647 - protein, 368 aa, unidentified
MKTKEINPISFLYVGVDAHKDQHTAVATNCFGQALLEKEINNSEEEFAELVSKVKILAQAKSLKPIFGLEDTSAYGQRLALHLCQSFPVKVVSPVLVIRERKKLTHPEKSDSQDALGVAKALISKIGTLPDFSISKTSEISKGLKDLTVDREFLVKEQTRIKNQLHRLLHKAYNSGYREKFKNPFAVRALQYWSKHPVPTELSGNTLLKNLIRRKIKRLKNIKKEVAEIEEEMKTLLDQIDQKLETLNGCGIVSASSVLAEIKDIDRFSSPNKLARYGGFCPGEKSSGKRIRHIKSKSGNRNLNKAVHRIALSQLGRQGNKYSKEYFQKKIAEGKNKSQAICCLKRKLVNIIYMMLKHKAAYDYAARC

SEQ ID NO: 457648 - protein, 344 aa, unidentified
MAYYAGLDVSLRTVNICIVDDEGEFVAESKLASDVQEIVAYLDELKLDIECVSLEAGTLAQYLTYGLQSAGFEVICMEARQVKGALSAMRNKTDKHDARGIAQILRSGWYSRVHVKSMQSHHIRMLLSSRKAVLSKCVDLENEVRGLFKIFGIKLPPKLGHGAFDVAVRDIIEIDETLSHALLPLLDARLVLYRTFRVLDNRTRKMAHADPVCVRLMSVPGVGFITALTFKAGVDDPKRFKRSRTVGAHFGLTPRRFQSGEIDIDGHISKCGDADVRSTLYTAANALLTRSARWSPLKAWGMKLAKTRGHRRAVIAVARKLAVILHRVWIDDTQFRWGNEGARS

SEQ ID NO: 457649 - protein, 433 aa, unidentified
MQNPHPYDLVLGLDRSDAKADLCLIETGTLHRSSLCLDTSPEALWEWLCELRQLHPKARIALCLEQPAGHLISFLEAYDWIDLYPINPITLQKYREAFVTSRAKDDTRDADYLADLLLNHLDKLKLWAPEDDPTRAIQQQVFHRRSVVDERTALTNRLQALLKQYFPQALALCGEDLWRPLATRFLLKWPSLQSVQKAKSSSLVQFYHLQGSRSPSLLQQRLALIQKAVPVTDQAAVIDSFVLRVQLIARQLQLLQQAVATFDRQIAQAYQQHPDYPIFQSLPGAGPTLGPRLLGSLGSQRERYPSHTNLQRYTGTAPVTKKSGGSCRIHRRYLCPKFHRQSFHEYAKESVLHSRWAAAYYLQQRTKGSSHHTAVRALAFKWQRLIWRCWQDRKPYSEQVYEAVLRRRHSPLVPLFDKITVGKTPFKKPVKKS

SEQ ID NO: 457650 - protein, 313 aa, unidentified
MNIITVGIDLAKNVFAVHGVDENGKAVLIKPKVIREQLLPLIAQLPPSLIGMEACSGAHHWARLFRQHGHTVKLMAPKFVTPYRMGGKRGKNDAADAAAICEAVTRAHMRFVPIKEGHQQIILCLHRTRQGFVEERTAVYNRLRGLITEFGIVLPQKVSCLRREIGAHLEDLPGYANQCIGDLLSHADQLEARIAEYDHIIAKAAREDARSKRLMQRPGIGPVTASALLASIGCGHDFKNGRQVAAWIGLMPGQYSSGGKARLGRITKAGDHYLRSLLVMGARSILAGLGDKQDGFSRWARSLQERRGWPGRC

SEQ ID NO: 457651 - protein, 456 aa, unidentified
MAKQAIKQRDRKIRQLNPNAAGIDIGSQKHYVAVPTDRDNEPVRSFGCLTPDLHQMAKWLKSCRIETIAMESTGVYWVPVVAVLESYGFDVKLVDAYKVKNVPGRKTDVKDCQWLAELHRFGLLSGAFRPDKQIQVLRSYWRHRSTLVEACSTQIHLMQKALEQMNLQLHKVITDITGVTGMKIIRAIVAGERDAVKLAGMKHPLIKSSTETIAKALTGEYRQEHLFTLKQALEIYDVYQDKIAECDRHIEEYMKTFEHKADANDFDSKSGKNNRTKRRKNQPNFDLRTRLFEMTGVDLTQIDGIETMTAQTVISECGFDMSVFPTEKHFTSWLGLCPNNRITGGKVRKRSTRKVQNRAARALRLAAQSLHSSKSALGAFYRRMRARLGAPKAITATAHKLAKLVYRMLKYGMDYVDSGQQYYENQYRERVIRNLTKRAREMGYVVVCTNTGELVS

SEQ ID NO: 457652 - protein, 320 aa, unidentified
MQKIALGLDISKQTIDAYFSGQEDFMRVMNNQAGIEKLIECIKSHQQQGKEIHACCEYTGVYYLPLASALHESGIKISVINPLSIKLYAEYRLRRTKTDKQDAKLIADYCEKENPPLWKPISEKRNTLKVLNRRIEQLNVLLNIESNRQDVSDTVIKSGIERILEAIKNEIESCKKAIQNLIDSDKELSHNQKLLQTISGVGKSTAAWLLSVLVDIDKFENSKKLISYLGLSPVIKDSGTSVRQAKISKMGDKKVRKALYYPARAACLRSKLWRPWFEQKIKQGKHPKQIYILMMCKIVKYAYAVIKTGQPFDENRHKPA

SEQ ID NO: 457653 - protein, 367 aa, unidentified
MGIDVHKDTYSLCCFDFFRNELSDEMTIKATTKAVIKYLEAIKKKHREEILFACGYEAGPTGYGLCRGLQKAGYGCVVMAPTTMSNPEGKRRVKTDRIDARAIARILAYKSYSQVHLPSEEMEALKEYTRARDAKKRMFKKAKQELLSFLLRNGKSYPESGNYWTEKFFKWIKTVQFSEKWMQEAFSEYLAEVYSLKAKIELMDMKIREIAELEIIKDKVDKLVCFSGIDVTTAVETAVEIHDFTRFATAAQFVSYLGLCPGEDSSGKTKNMLPLTKAGNRRVRALFCESAKAIKRTNPYGQKSKRILERKKNASPEIVAYADKATKRIRTKMRHLEERGKNYNVSSAAGARELACFVWGMMNGKIA

SEQ ID NO: 457654 - protein, 355 aa, unidentified
MLIIGCDYHPGFQQIALVDTETGELSERRLAHREQAEQFYRERKQQNLCARVGMESSGHSRWFERLLHELGFELWIGDPAEICTKRVRKQKTDRQDAQLLLQLMLEKRFPRIWVPDAENRDLRQLLWHRHRLVQMRTRVMNQLHVVPLNEGLQRKKALWRPAGRKELESIALAPWASRRRQDLLDLLDQLTPKIQELTHALEEEVEKRPVTRRLMTHPGVGPLTALAYELVIGTPERFHCGKQIASYIGLVPEEKSSGDRRRLGHISKQGNVLLRFLLVEAAQVTVRSQPQWRSKFFHLAMRRGRKIAKVAMARKLAVHLYWMWRHGCDYGQLEKFGSQGRKLSSHTVVTKGSTR

SEQ ID NO: 457655 - protein, 359 aa, unidentified
MKNTNREVRDAEKPAMTVGIDLGDRFSRYCVVDQAGEVVEEGKIASPAAALKRHFAGQPRMRVAMECGTHSPWVSRLLRDWGHEVWVANTRKIRAITGSESKNDRNDAEKLARFAAHDPRLLSPIEHRSPERQRDLNLLQARDTLVRARTMLVNAVRGMAKSSGHRLPKCSTESFAKVARSAVPSGYELAMLPLVEQVGAVSEQIRTMDKQIAALAKRYPEVERLRSVPGVGPVVATAYVLTLDSPATVASSRAVGAFLGLRPRQAQSGERDPQRRISKTGNGFLRRLLVQAAQYTLGPFGPDTQLRRWGLKLASSGGKRGKKRAVVAVARKLAVLLHRLWRTGESYRPFPNAHQPLAA

SEQ ID NO: 457656 - protein, 426 aa, unidentified
MKSNTQNEKIKAITEKTLVVGIDVGSETHFARAFNWRGYEFSQKPIAFSNTEEGFETFQTWMEGLKGKHGLNQVLPGMEPTGHYWFNLGNFLRANGMRPAHVNPHHVKKSKELDDNNPAKNDRKDPKVIAGLVNEGRYFYPYIPEGVYAEIRALSGLQVVAQNEKIRLKNRIARWFSIYFPNYKDVYGNVGAMSGLMVLKVAPLPEDIVKLGVDGVNRIWRDAKLRGVGIKRAQTLVTAAAHSIGSREAREAARVELRILLSDYEMQTERETELMSLLKEKMAEVPYVDKLLAIKGIGLKTVVGFVAEAGDITRFDNPKQLQKLAGYAIVKNDSGKHKGESHISYRGRKRLRYVLYEAAVSVVSHNPEFKSIYQYYLTRDKNPLKKMQAIIAVACKLIRIFYLILRTGVAYDATKLTGDIRRPVAA

SEQ ID NO: 457657 - protein, 436 aa, unidentified
MRGCRCSMIMGFTKPIEHLNLTTKEGDFMNPLYVGIDVSSKSNVVYFMLPDGSKHSNFSVANSHNGSTQLVKRILSAMESKSLDTVLIGLESTSVYGDNLVYFLREDASLASFNRKIYVLNPKQVKKFKDAYNDLPKNDYVDSYVIADCLRFGRINKEVYIGDYRYKALQNLTRARYFAVCNLTKEKQRFMNVLFKKYSTMTQEKVFSDTFSTTALAVYDEFESAETLAYMDLQELTAFIIEKGKNRFPDPDAVAKAIQKAARSSYRLPKTVNDSVNQVLSISITSIKALEAQIKEFDKAISAEMELLPNVLISIPGIGPVYSAGIMAEIGDINRFDNQAQLAKYAGLAWTQYQSGNFEAENTRLIKSGNRFLKYYLCEAAFSLVRCDKEYKAFYHQKYKEVNRYQHKRALALTARKFVRLVFTLLKDNRLYRPAE

SEQ ID NO: 457658 - protein, 343 aa, unidentified
MDHFAGLDVSVKETSVCIVDDTGKIVREVKVASEPEALLAVLTNPACHFKRIGLEAGPLSQWLFGALAEAGLPVICVETRHMRAVLKAQINKTDRNDARGIAQMMRVGLYRPVHVKTLRSQKQRMLLTHRKLLQSKAIAIENDLRATLRNFGLKVGVVGTVKFEARIKELIENLPDLVVLVEPLLIVRRVLREQIGILHRRLLAIVRDDDVCRRLMTVPGVGPVVALTYRATVDVPSRFRNSKAVGAVFGLTPSKHQSGESNRTGGISRCGDEMMRMMLYEAAHIMLVRSAKWSWLKAWAMKIARHRGLKKAIVALARRLAVIMHRIWVDGTEFRWTREVAAA

SEQ ID NO: 457659 - protein, 410 aa, unidentified
MQSAPDTLPRIPEGGLTSGLDWARDDHAVSVVDADGREVHRFTIEHTAAALLALTRRLRKLGVREVAIERPDGPVVEALLAAGFTVVVISPNQVKNLRGRYGSAGNKDDRFDAFVLADTLRTDRARLRPLVPDSPATVALRQTCRARKDLVAHRVAVANQLRAHLQVVFPGAVGLFADLDSPISLRFLTRFDCQDRADWLSAKRLEAWLTSVGYCGRTDPAELYDRLIAAPRAAGGGPAQAQITRAMVAVLTTLVEQIKALSEEIGEQLAVHADAQIFTSLPRSGTVRAARLLAEIGDCRARFPTPESLACLAGVAPSTRQSGKVRTVGFRWACDKQLRDAVTDFAGDSRHANPWAANLYNLAIARHHDHPHAVRILARAWLFVIWHCWQTNNPYDPAKHRALQILGLPA

SEQ ID NO: 457660 - protein, 400 aa, unidentified
MKGPIVSIDVSNGNSHFQCFTQRGTKMGKVHRISHTVEGFNCLKSKIEELEKKTNEEVVAVYEATGVYAKPLERFLEKNEIKQYSISPLQSAKQRKTEIHNKKTDKKDPESIAEVYYIKELREDEKEADLYHELRTANRVYEDCLVHLRKYKVTFQSHLSIVFPGYMKLFQDGYSQISLQLLEMYPHPDRLKNKQPEKVAKKLNKHTDHSFEVCLKTAEKAIAFANKTYPGCDKEDAWVAVLVDDIHHLQDTMEEAEAKLDKIIELAKATPYYSIILSIDGIGPNLASRIIAEFGDISKFKTRGAMVAYVGNDPNRAESGDIEGYHLSISKKGNKRLRCILYLAVTCSIRSRKENPINAFYQKKRQQSTPLKSKAAKVACITKLIRTIHGMCKTGTVFTS

SEQ ID NO: 457661 - protein, 338 aa, unidentified
MNKFSGIDLHSNNSVVVVSDDADRVVYQRRLPNDPVQIRAALAPHREDLVGVVIEATYNWYWLVDQLMNDGYRVHLANPAAIRQYEGLKYSGDFTDAAHLAQLLRLGLLPEGYIYPAEERPVRDLARKRIQLVQCRTAQILAIENLFSRHTGGQMQGERVKRLDEMQVNGFGFAPDVTLAMQANLAVMQTLQEEIGIVEKRLMERVKLRPDYALLNTVPGIGPVLATTIMLETGTISRFTKVGNFSSYCRCVDSRRESNSRKKGEGNTKNGNKYLAWAFVEAANFAIRSCPEARRFYERKKRARNGIVAIKALAHKLARACYHMLREHKPFEITRCFG

SEQ ID NO: 457662 - protein, 326 aa, unidentified
MQGKESSKQKADAESTAGIDVCKSWLDVHVVPQGHSIRVSNDARGHDKLTRWLGQREVGLVVMEATGKWHRNVHGVLHRAGFRVAVVNPRRTRLFAEVLGELAKTDKVDARILALFGASLSPPARPPAPETMQALQELVTARDTAVREQTRLQNQLAAAMLDFVRRQLRNRIDRMEKDIAQLTAEMQRLIRADEVMVRRYAILCSLPGVAAITAATLIAKMDELGSCSAKQIAALAGLAPFDDQSGDRDGQKAIRAGRGAVRRALYLCAPAARRGNAAWNGLFDRLVARGKPKKLARTAVARKLLIAANTLIAEDRLWQPQSPLHA

SEQ ID NO: 457663 - protein, 347 aa, unidentified
MGKFITDLSSVTTVGLDLAKHVFQVHCVDASGRVIVAEAVRRKNVLAFFAQLPKCRVGLEACGSAHYWARELIKLGHDARMMPPAYVKPYVRRQKNDAADAAGICEAVTRPSMRFVGVRTLENQATLMHYKARGMLVAQHTQLINALRGHLAEIGIVAAQGFKGARELAHVILAEDDETIPACVRAALAPLARQLHVLDQEIARSDRTIAAMARGDEMARRLMTIPGLGPVTASAMAASIQDVSAFSGPREFAAFLGLTPKQNSSGGKERLGRISKMGNRYLRTLLVVGAHAVLHHRKPHDDALRSWAKKLMQSKPFKLVAVALANKMARIAFAIMRGKTTYCAVPA

SEQ ID NO: 457664 - protein, 411 aa, unidentified
MGSDTLIAGIDLAKRESVVVFIRAKDKARLGKLRIPTTREGVAELERRGRLMMEREGLTRLVLGMEPTDHYWKVVCRAGERLGIGYAIVQSFVVARARELDDLTRDKTDHRDAALIADLVADLRFTDVRLESGAWLALRSYADARARYRVERASALQEQRSLLELAWPELLRVVLDLRGCHLQAALRLGLTPSEIARIPLHRFTSRLRIKQRAHRFSPEMSRRIWEAARAAREEPEAVSAALRWQLAGERAQAAELAISRLDVRMREAFAATGLDWMRGQIRGLGEILLTNLLAFSGDPRRLDDAACMLKLAGSNPTERSSGEQVAAGGIHRRGRPSLRLLAFQAATCLLRHNPEFQIRYRALVDRARHPLSPKQAQLAVANKLLRVLWSMAVSGRPYDSQLAAGGLRQAA

SEQ ID NO: 457665 - protein, 343 aa, unidentified
MEYYVGLDVSLKQTSICVVDQTGSVVREGVVDSDPEAISVYVRSKAPDAVRIGLETGPTSTWLWTELKRLGLPVICIDARHAKAVLKMQINKSDRNDAIGIARIMQTGWFKEVHVKDIDSHSVRALLASRALLVKIKRDLENHVRGLLKNLGLVIGRAKFNAFAVRAEELIEGRPELIAAIRPLLEARNAVGQQVSELDRKVMKLARHDAQVRRFMTAPGVGPITALAFKATIDDPARFARSRSVGAYVGLTSRRHASGEVDWTGRISKCGDAMLRSYLFEADGVLLTRVPKWSAVKAWGVRLAKRNGLRKAKVAVARELAVILHRMWIDGTEFNWSKKEIAA

SEQ ID NO: 457666 - protein, 368 aa, unidentified
MRTDQAYTGIEEVLAVSLELAAAKWKVALHDGHREQPAVHTVAQLQASARLQAVLDLIEQHKEKWSLPAGVRVVVSYEAGQDGFWICRALQGRGIECYVIDPASIPVERHKRRAKTDRLDAIKLVINLRAWLRGERDRMHVVHVPSPQDEASRHLMRDRGQLQKEVLQHCDRMRKLLATLGCWDEVDHKHFAGRLARDEVKCHDGAPLPPEMRERLLRECERLALAQQQLAALEKTRQASLPAPARQRRDDLARLKGIGEVGASRLALELFWREFSNRRQVGACTGLVAQPYDSGESQVDQGISKQGNARVTGRDGMVLAALPARQCTHALVQRAHPEHGTKPAGPAHRDRCSRTATRHCAVALSERR

SEQ ID NO: 457667 - protein, 433 aa, unidentified
MSAFARRDRAQRAIAVVGVDAGKFHHVLVVRPRGRPDSRPFRFATDRPGFEQAVAYVRDQIGLGGTAGDILVGIEFAGSYGFTFAHYLNALDAGFSVVTVLPAHTKRWKEVAHRQPLKTDAKDAIGITDLAAQGHFVAFPFLATAYAELRYLLSARERVATLRRGVITRLRTSLDVVFPEFATFFSSVSKPTARTLLRAYPGPAALRAAPARAVVTLLKQLSHNHRGRAFYDRLMEAAVNTVAPPASQGAMRDEIPLLIDRLDLYEAQLRTIEARMRLVLRTLPAAHALLTIPNVAPVTAAVILGSLGDPKAYDSSRQVLAVAGLSLVERSSGILKGLKRISKRGRPVLRKHAYMFAVRSVHKNGIFRREYEALLGRNGHKAIPALMAVARRGLKLLFAVARSERPWTPALPGTAGVDQIGGEVNVGAAEGSR

SEQ ID NO: 457668 - protein, 408 aa, unidentified
MADKIAGIDVHKKVLMVVVIDARTPESKPERRRFATMPGELRRLSTWLQEQGVEEAVMESTAQYWRSVWLELEPHMCLHLAQAFSNRAPRGRKHDFKDAERLVRRLIAKELILSFVPDGEQRIWRNLTRMKLQLTRDRVRIQSQIECLLEEMRIKLSIVVSDLLGSSGLRILHALANGETDAKSLALLGDDRLKCTEEQLVEALTGRSHPMHGQMLALQLERLRLLDEQIAKLNSLIAQAMKPHQDAVIRLAEVPGLGIDSAQQVIAEVGVTASTFSSAAEFTSWVGTCSGKEESAEENSSSRSAKGNKYMRRVLNQAAHAAARSKGTHFQAVFRRLLPRLGYQSAVWAIAHRLCRLVWKILHQGIRYIEQGIESEPKLLIYRANYLAKQLRQFGYNVQITPANGAPA

SEQ ID NO: 457669 - protein, 402 aa, unidentified
MDQDDDVPRFGVYLGLDVGKEEHHACALNTQGKRLHDKALPQDEAKLRELFTRLAAKGRVLVVVDQPASIGALAVMVARAEGIDIAYLPGLAMRRIADLHPGNAKTDARDAYVIAEAARTMPHALRRVDTGDEALADLEVIVGFDDDLATEVTRITNRIRGLLTQIHPALERAIGPHIQHKAALALLSQFGGPTGLRAAGQTQLLAVAKPLAPRSHPRLVERLWQALDQQSVTVPGTRAAELVLPKLADQLADLLAQRAEVAAQIEDMLEAHPLSQVLTSMPGIGVRTGARILLEIGDATAFPTAGHLAAYAGLAPVTRRSGTSIRGEHPNRGGNKKLKRAMFLAAFAALADPTSRAYYERKKAEHKKHNAALICLARRRCDVLFAMLRDGTLYQPSIPAAA

SEQ ID NO: 457670 - protein, 314 aa, unidentified
MVTPCGVGIDVSKATLDVAWATDPTARWQTTNDEAGWIALVAHVRARPPSVIVLEATGGYEIGAATALSMAKLPVAIVNPRQVRDFAKALGRLEKTDALDAGVLASFAARIQPTPRPLPDDLQADLQALVTRRRQLVDMLTAERNRVPLARGAVRQNVVAHIAWLEKQLGKTDRDLRTQIEASPIWRARDHLLQSVPGIGPATSARLLASLPELGTLTHRQISKRVGVAPLPDDSGRRSGYRRVQGGRGDVRSALYMATVTAVTHNPTIRAAYRRWRAAGKLPKVALVAAMHKLLIHLNAMLKHQTSWQPPVTA

SEQ ID NO: 457671 - protein, 345 aa, unidentified
MEPMYYIGLDVHKRKISYCVKDSSGQVCAEGSLPATRFDLDRWMKTLPQPWSAAMEATMFTGWIYDHLKPHAASLKVAHPLMLRAIAAAKRKNDRIDANKICDCLRCDFLPECYMASTAIRERRRTLRYRNLLVRQMVQMKIKISSLLMEAGVSYNKQRLHKAGYFRELLATHPDIDEGLRSLLCQCRETVVRLGKTENALIRSLEHDRLLAERVERLMSIPAIGPITALTWALEVGEVQRFSSIKKAISYCGLCGAEKSSGNTVQRTPLSKQRNKHLQTTLIEAAKMAPRYSPTLALLYDREKQRGNANRATLAVARKLVAYLMSVDRGRCHFLVLDQETSTAA

SEQ ID NO: 457672 - protein, 372 aa, unidentified
MGHHTEAYVGIDTSKSCNAIAIADGGRGGEVRYLGEFAATEATIRKLVAKLAAKYRDLTFCYEAGPTGYGLYRLLKSLGHECLVVAPSLVPKKAGDRVKTNRRDAVSLAKLLRAGELTAVWVPDERHEAMRDLSRARQAVKKDLQGKRQQISSLMLRLGRIYPGKTTWGPAHMRWLMSQKLEHREQRIAFEELLEGIRQESERVERLENAIREAVPEWSLAEVVVALQAVRGIDLIAAVGVLAEIGDLSRFQNPRELMGYLGLVPSENSTGDKVKRGGITKAGNGRARRILVEAAWSYRYPPRVSRDKQPKVEAAPRVAREIAWKAQTRLCGRFRSLERKGKRRTVIVTAIARELSAFIWAINRELMPPRQA

SEQ ID NO: 457673 - protein, 275 aa, unidentified
MQIIGVDLHARQQTLAMLNVETGEIVEKTLQHEGDSVREFYSTLAGPTRVGIEATGSMQWFLELMEELGIDCQVGHPAKIRASEPRKQKHDRRDAALVLQLLVENRFPSIWMPSREQRDVRSLILYRHQWVRIRTRVQNALQAIALSHGLRRGSSLWSERGQQVIASLSLTRYTAERRTALQSLYRHLEEQIDGLNRKVEEVAWQRPQARLLMTHPGAGPITALATEAFLGEPKRFVDGKAVASYVGLIPSEHSSGGRQRLGRLSKQGNPLLRFL

SEQ ID NO: 457674 - protein, 346 aa, unidentified
MHYSTTVGVDLAKNVIQVSVVSPRGKELLNRSFTRTRFAEFLCKQKPSLVAFESCASAHYWARAAKRHGHEARIIPAKAVAPFRQGHKTDSNDALAVAEAARRPNIKDAPMKTTEQQGLQAVQRSRELLIGECTALSNHLRGILLEFGVAIPQGFASLLRALPEILEDGDNEIPDLYRPTLHRMHRRLLELREDVESMTGEIDGLVKQHPVCKRLTAIEGIGPIGALSLYAVMGSGKAFTKSREFSAYLGLTPRQYSSGGKSNIIGISKKVGNRRLRSILIQGARAYVYRMKEPRSLKDRWLKDLIERAGPNRAAVALANKNVRTAWAMVTQGTEYQRRLQLEMAA

SEQ ID NO: 457675 - protein, 320 aa, unidentified
MMPQERRVVGLDVSKRKIDACIRGVAERRSAASTPEGEAELIAWLRRHGVGVAVMEASGGYERRWAPALRQAGLAVRIVDPRRVRSFAKAAGRLAKNDPIDAAMIAWFGETFADDAAGAAHDPARHALDQLVTARATLLELDTALANRNEHAQPRLVAKAQAAVRSALRTQVEKLDKAIAATLAKHPAMARHAEIITSVPGLGRQAAAGLIAWLPELGRIDDKAIAALVGLAPYDDDSGERRGERHIKGGRQKLRNLLFMPTLVAATQCNPVLKPYYRRLCAKGKQAKVALIACMRKLITILNTMLARDETWSPPTRAAA

SEQ ID NO: 457676 - protein, 343 aa, unidentified
MYYIGLDVHKKTISYCVKDAAGCVHGEGKIGSTRRELDAWIRILPQPRMMAMEATIFTGWIYDHLLPHADKVKVAHPLMLRAIAAAKRKNDRIDAAKIADCLRCDFLPECHMASTAIRDRRRTLRYRNLVLRQAVQMKNRVSGLLMETGVSYDKLRLHRMGYFADLMSSSDEIGDSIRPLLKICREHIDRSIKLDTGLLRSLERDPLLTDRLRRLRTVPGVGPITALTWALEVGDTSRFHSIKQAISYCGLCSSEKSSADKMMRTPISKQRNKHIQQVLVEAARLAPRYSEELALLYERERQRGNSNRATLAVARKMVAHMLAVERRNTDFVPAGQFKRTSAA

SEQ ID NO: 457677 - protein, 344 aa, unidentified
MTAVMIGVDPHKGSHTATALDATEHELACLRVRAGRRQVEQLLAWATPFEARTWAIESANGLGYLLGQQLVAAGEVVLDVPATLAARVRVLSSGQSNKNDPNDARSVAIAAMHAPMLAAVPVEDHRTVLRLLAKNHTDLARWRNKICCRLHALVAELVAGGISKEVVVSDAFALLESIHPEGVAAIERHRLAGQLADELVHVDDQLKLAKANIRTAVAASGTTLTDIFGVGPVVAAMLIGYTGDPFRFPTSGHYAAYTGTAPIEFSSAGRVVHRLSRRGNRRLNHALHIVAVTQIRHAHSPGRGYYDRKRAQGKTPREALRSLKRRLSDIVWRRLIDDARRAAD

SEQ ID NO: 457678 - protein, 359 aa, unidentified
MREQRNKISFRGQKIYVGIDVHLKSWSVTVLSETSVLKKFSQHPSPEALYGFLTRSYPGAEYHSVYEAGFCGFWIHERLTALGIDNIVVNPADVPTKSSEKLRKTDTVDSGKLARSLRANELKGIYTPDSVSLEMRSLIRLKNSITKDTTRQKNRLKSQLRYLGIEIPQEFLTPFSNWSKRFFAWLKEIETLTPSGRQALDIHIRHLEELRRQKLEMTRALRTLAKTDRFREPLRLIMSVPGFGQATGMAFLSEICDITRFRNAEQLAAYIGMIPMCHSSGEKDGTGDITIRKHAVMRCNLIEAAWVAIRQDPAMNLFYTEQCKRMPKSKAIVKVARKLVNRLFFVLKHQTEYVNSIVS

SEQ ID NO: 457679 - protein, 349 aa, unidentified
MYYVGVDYHKRYSVATVLDASGTMLARRRVDNRLDDFRDFLAPYDKAEVEAVVEATRSWGIPVDILEQLADRVVLANPGEVKLIAKARISTDKVDSLSLARLLRMDWVPEAYLRPKANREQQLILRLRCFLVQLRTRVKNRIHDLIDRQDESVREMTTGFSDLFGKKSMTWLRSLDLGHPSGKLLGQLLAVYDALDKEVRQSDRLVAELFAVDDDCKLLAKTPGIGTFFAVLIKTEVGSIERFANSPRFNSYAGVVPSTESSGGKTWHGRIIKQSNCWLRWALVEAVIPATVADAGLRAHYEYYRRMKGSRVAKVITARRLGCIVYRVLKERKPYFEQPVPRRGYRQTG

SEQ ID NO: 457680 - protein, 416 aa, unidentified
MDMEREVVCGADIHKQFLLATVLSNDGKKFQDRFDANFEGLLNFRQWLLDLGCQKLAVESTASYWLPIYLVVGKDVEFILANAYQIKHVPGRKTDVLDSEWIAELCLKDLIAPSRIFSEDERDLRSMTRTRESYVKMRTQNKNRIHQELESACIKLSSVLSDIFGKSGIHIIRGLLKGSGIEDILDSIPSKKLMAKRKEIQDAIRMNMSPAQVDLISLLLDSVDILNREIESIDKQIQDLISKRQDDLKIAMSIPGMGFTNASAILAEIGDFKDFRTGDKLAAYCGLVPSVYQSAGKLITGHITKHGSPHVRRMLIEVAHAISRTKADSKLKRFYFRIKGRHGAKVAIVALARKVICILHHLIVNREMFEDEATNKSKRNKPGRSFSSPEPTITDAIQILVRAGYAIQKRSEREGG

SEQ ID NO: 457681 - protein, 408 aa, unidentified
MNTLYVGIDVSSKSNVIYLMLPNGDKHSNFSVANSHEGSTQLVKRIHSALTSHSLDTVLIGLEATSVYGDNLVYFLREDATLAPFNRKIHVLNPKQVKKFHDTYNDLPKNDYVDSFVIADCLRFGRINKEVYMGDYRYKALQNLTRARFFAVQNLVKEKQRFMNVLFKKYSTMTQEKVFSDTFSTTALAVYDEFESAEALANMDLHELTDFIMKKGKNRFPDPDAVAKAIQKAARSSYRLPKTVNDSVNQVLSISITSMKALESQIKEFDKAIKAQMELLPNVLISIPGIGPVYSAGIMAEIGDINRFNSQAALAKYAGLAWKQHQSGGFESEVTRLIPSGNRFLKYYLCEAAFSLVRCDKEYSDFYRLKYKEVNRCQHKRALALTARKFVRLVFRLLKDNRLYCPAK

SEQ ID NO: 457682 - protein, 334 aa, unidentified
MMNASELIFVGIDVSKDSLEMALDDKGKTLYISNDEKGIAELRTAILAACKPVEANDAPRTVAAIVLEATGGFERKAAVALCGAGLPVMVVNPRQARDFAKAMGYLAKTDAIDARVLSHFARTLYQSEKGVQLLMHLPDAGQVALHALMTRRKQLVEMRVAEDNRFAMCEKAQRKSIDAVRKVLNKEIGKIEQDMDGHLKEHFAKQLKLIDKCKGIGPVTQASLMAALPELGTLSHEQIAKLVGVAPLNCDSGKHKGKRITWGGRADVRCALYMATLSAMRYHPIIKSFHDRLISKGKLKKVAIVACMHKLLTILNAIMKSGKPWDDEYLTKNP

SEQ ID NO: 457683 - protein, 487 aa, unidentified
MAKRRKSTFERLSTGQMNRSQRRELGRRVAAGDAGLAIVQANAGGIDVGNESHFVAVPPDRDTNPVREFGCWTAALNEMAEWLKSCRIDTVAMQATGVYWIALYDVLEQHGVRVVLVNAQHTKNVPGRKTDVQECQWLMKLHTYGLVRDSFRLQQDMEYVRTIWRVRDRHVKEAGREVQHMQKALTKMNVQLANVISDVSGVSGQAIVTAVLKGERDPYKLADLADYRVKASREEVARSLEGNWRADVLFELQQAVDSYHFAHRQMRECDEKLTFYLVSLPTRMLEIPVPSKGAPETPESPAQKRKKAKKPRDNEPRMDMKGELKRICGVDLTSIDGINVMTAFTVLSEVGTDMARFKDEDHFSSWMGLAPSKDISSGKIVGRGKKKVKNRVAVVLRTAATTLLESDTHLGARYRHLRRQLPTHKAAVKAMARYLAVLIYRLLTKGEAWVDRGARQFEQRRTQRERVSLQTKAKAKGFTLVPLAEAR

SEQ ID NO: 457684 - protein, 411 aa, unidentified
MRVHHRICCGIDVHKRSVTACLMWGPADQEPQSETRRFGTMSSELKQLAEWLKQAHCEVAVMESTGSYWKPVWNILEGHVRLILANAKHVRALPGEKTDNKDGKRLASLLRHGLIRPSFIPPREIRELRDLTRYRRKLLGNGAAERNRIQKILEDANIKLGSVLTDVFGVSGQRMLHALVESELIDVEQVAELAHWSLKPKMDSLKKALQGRLTQHHRFMIEISLDHMENIEKQILRLDEQIAKHLAPYQKEFELLQTIPGIAETGAASVLAEIGSDMSAFDDDDHLSSWVGICPGNNESAGKRFSGKTRKGNLHLTSTLVECAWGATHKKDCHFKSKYYGLKQRRGAKRAIVAVAHGLLRTVFVVLKSGQPYQEPVRPPLPEAKRLRKAQRLSRQLRGLGYEVTIKTKTA

SEQ ID NO: 457685 - protein, 371 aa, unidentified
MEYLSKTLYVSLDVHKESIAVAYAPEERGTEVVSLGAIGTRQCDIDKLIRQLQSKGAPLVFVYEAGPCGYWLYRYLTRKALSCYVVAPSLIPRKPGDRVKTDRRDAVMLARLMRSGDLTAIYVPTVEDEAIRDLSRGREDAMRDLKATKYRLKAFLLRQDIRYEGRANWNAAHLRWLSAVVCPTPAQQIVFQEYVRAVTEQHERVQRLETELRDQVTRWRLYPVVEAIQALRGVELTGAVILVAELGDLTRFDTPRQLMSYLGLTPSEYSSGERRRQGGITKAGNTHARRALVEGAWAYRYPAKVSRHLQLRLEKLPAEVQAIGWKAQVRLCKRYRQLIARGKHANQVVVAIAREMAAFAWAIARIVPLAP

SEQ ID NO: 457686 - protein, 374 aa, unidentified
MKNVSIFVGLDVHKESIDIALVEGDRISTVRYFGTIGGDLTDLDKAVKKIKKTHPEASFHFVYEAGPCGYGIYRYLTKAGHECMVVAPSMIPKRSGNRIKTDRRDSIMLASLHRAGELTPVYVPREEDEAMRDLVRARQDAVKAGRVSKQQLKGFLLRHGIKFAGKGDWKQTHVNWLAGLSMPIPAQQIVLQEYINTVKDCMDRVARLTFQIQEVLPSWELALVVKALQAMRGVSLQVAVTVTTVAELGDLKRFDNPRKLMSYLGLVPSEHSSGGSRRTGSITKAGNGHVRKALVEAAQTYRLKARIGKELLARQAGLPKQICDIAWKAQVRLCGRFRKMEARGKKHQTIICAIAREICAFMWAIAREVKPITA

SEQ ID NO: 457687 - protein, 380 aa, unidentified
MHKSQEYYNFEKPNLKHKTQELMQTQRKELNFEGQNIFVGIDVHLKSWNVSIFTEHLHHKTFNQSASAEMLSNYLGLNFPGANYYSVYEAGFSGFWIHNRLKELGINNIVVNPVDVPTTGKEKMRKTDKIDSNKLGRSLRAKELEGIYIPNQESLEDRSLIRVRSSIVKDMVRLKLRIKSMLRFYGIEFPDEFQAKGSHWSKRFMNWLKEIQLQHESGTYALSFLISQAEQQRTLLLATTKRIKELSQSNAYVKKMELITSIPGVGIITGMLFLTEIEDINRFDNQDKFASLIGIVPNCHSSGEDNRTGEITPRGHNFLRKALIESSWIAVCKDPALSKAFSDYFKRMEPNKAIIRIARKVTNRIYSVLKNEKKYEPRIV

SEQ ID NO: 457688 - protein, 437 aa, unidentified
MSEKKSVELRVSVDVGYRRHSVAIGLPSGEVLEEFEIAHRPEGFAEFFSRIERHQKVRDYEVAVAMEGFNGCARPLDAMVRRRGYRLYNINNLKLARFKEIFPGVAKSDRIDARKGLELFQLSDHLPLAKEVLQEVKGTPRENEVLKRLTRRRRRLVDERVRVISNLQTDLQAVCPGLLEITKNACNQWFLNFLISAPTLPQLARLRPATLRKVPAVGRKYASLIEDWQKRAHFSEEVEWVSEMIQEDAQRCLDLDEKIKALRAKIKEVAKDSKIAKTLLSIPGFGTICTAELAGEIGTVERFSKEGSLALYIGMSTLDNSSGKYQGSKQPKHVNTRAKAAMMVALDRHRKYVPESQRYYEKKRSEGKKHNQAIRALGRHLCRIIYKMLTEEREYEMRPEKGNTKSKVSPRSLIKPQIRKPKISAKGKNNKIYQQRA

SEQ ID NO: 457689 - protein, 398 aa, unidentified
MTRKNTLKSLPTDTDFRVVGLDLAKSDVSVAAIPVDDNTPSLVDRMTYADLLDWAGKISPTLFAMEPCNGYSLLCLQLENLGHEIKVISGWTVSMWINTHLSGQKTDLNDAIALARLAVSDAELTPIRHKSITEIRIQTVQAVRQQLMSQRSKSIVSFKALAQQWGIPCAAGHRNLKKLRESIEAKVDLITRPVANAMLFLLDAVKSLDRQIGQLNQTLQELVMSDERGRLLQSVLGVGTQISARVITVVGNVERFNSPRSLVAYVGVAPRNFITGHKNLTKKKHGNCPDLSHKGQGKIRRRGDKLLRSLFIQGAACLYMQFCKDQLPECLLKRWILKQLAIQKPYGKLIVSLAAKLIRIVWAVLTYREKFNIQKAGMTRSMWSEMALETPLNKEVPA

SEQ ID NO: 457690 - protein, 347 aa, unidentified
MEKASQAEVQVFAGIDVSARELSVAVQCGIKEGIAITTFPNKAAGHKALLAYLLRAKGRARVCLEASGNYSLDLALTLQAHSQVEISVVNPRRARRFAESLGERSKTDPVDARVLCEYALRMPWVPWVAPSLAALRLRSITRAIEDLVAMQAQEKNRQHALLASDALPALLIRELEQHLRYLKLRITRLRREALRLIARNPELNRRFHLMLTTPGLGETSSLQILGELVVLPETLDARQWVAFSGLDPQQFSSGTSVEKKPRISRGGNRHLRRALYMPALVATRHEPFLRDFYQRLLRRGKAPLQGVVAVMRKLLHALFAMFRRDEAYDGSKLCPAEFARHTAVVCV

SEQ ID NO: 457691 - protein, 452 aa, unidentified
MPPKPERKGSWSTTTYILQPNAAGVDIGATEIYIAVPPDRDAQPVRSFRTFTAELKAAAEWLKQCRIDSVAMESTGVYWIPFFQILEAAGFKVFLVNARQVKNVPGRKSDVADCQWLQYLHSVGLLRASFRPEQAVCAVRSILRHRESLIQIATIHVQHMQKALDQMNLQLHHVISDITGVSAIAIIEAILNGERDPVVLAQRCDKRIKASRPTIAAALVGDYRREHLFTLRQSLHGYRQCQELIAACDREIEQHLAAFDSKLELQATPLPKPKDRHKPRRNQMKFDLRAHMYRVYGVDLTAVPGIDALTAHVLFAEIGPDLSQFTSAAAFVSWLGLCPDNRISGGKLLSAKTRVVKSRVAKALRMAAQSLHRSQSYLGSYYRRMRTRLGTPKAITAAAHKLARVIYHLLTTGQSYEESGFARCEALHQQRLEHRIRRQARDLGFDLVRSPS

SEQ ID NO: 457692 - protein, 383 aa, unidentified
MTGTEPHAWETGLMDTITYVGLDVHKATVAVAVAQGGRGGEVRQLGVFENRSEILTKLAARLSKPGRRLSFCYEAGPCGYGLHRLLTGGGHDCVVVAPSLIPVKAGDRVKTDRRDALMLAKLHRAGELTPIWIPDAAHEAMRDLVRARATTGRVLSKARQHLQSFLLRHDQIYRGARAWTLAYRRWLTTVRFAHPAQQIVLQDYIHAVQDAEARLDRLTRQIEELLPSWAMAPVVAALQAMRGVALVVAVTVVAEVGDFRRFANARQLMAYLGLVPSEHSSGASVRRGGITKAGNVLARRVLIEGAWTYRMPARVSRKLHDRNEKLSPAIRDIAWKGQIRLCSRYRRLAAAGKPKVVVTTAIAREMVGFIWAIARIAQPALEG

SEQ ID NO: 457693 - protein, 389 aa, unidentified
MRTVALDLGKRKTTLSEVHDGAVVARRTVRRISELHRDLGKQAPPARVAIEACRDAWAVHDLLTQWGNEVVVVDTTRVRQLGVGRHGKKNDRIDADILALALEEGRIPKAHVLSPRARKVRELLTVREMLVSTRARYVTQCRALLQARLVTVPRCKAADFVPMMRELDLPSECRELVAPLLELLPSIELQIAQVEERLHALVEQTDVVQRLSTVPGVAVVVAAAFMCVIDNPHRFKNARQVSAYLGLVPRERSSGGKRRLGSITKQGNTRLRKLLVQAAWTVLRSRSKDPLVLWCQRVAERRGKRVAVVATARRLAQVLWALWRRGTVYTPARLAERSASGHLRHSRDVARHAAALRKSADKLARQRRASARRAQRARELLEPQPEVST

SEQ ID NO: 457694 - protein, 364 aa, unidentified
MSMLAEATSTAPTVAQAYMFVVGVDTHARAHVYSVIEAITGAVVETQSFPTTPAGLARASAWIARRTVDTPEAVLISMEGTGSYGRLAAAQLAGLGYRIVEALTPVRGKGRAKSDELDAQRAARDVLGLPADRLRDHRTGAVAGALQVLTTARDRLTTERTAQVNALTGLLRTHDLGLDAGSSLSAAQIRVVKNWRTRTESLDQRVARAESIRLAARIADLDEQLNDNEKTLRDLVTEHAPDLLAEPGIGPYCAAVILATWAYPGRVRSEAAFARLAGTAPIPASSGNRADHHRLDRGGDRRLNRALHIATLSRMRNHDETHSYVHKRTAEGRTHREIRRQLKRYLTRKIHRLLTRQNTLAPTS

SEQ ID NO: 457695 - protein, 406 aa, unidentified
MERVYPRCCGLDVHKNSVWACARVDGRQQPVETFGTSTRELLRLEDWLAGLGVTMVAMESTGVYWKPVWNLLEERVGLMLVNAHHVKQVPGRKTDLKDCQWIAELLEHGLLKPSLVPQRPQRELRDLTRQRTQLLGDRARVVNRVQKTLEDANVKLASVATDITGKSGRAILDALVDGRLTPEQMAELVHKRMEAKKPALREALAGRVTAHHRFMLKQLLGQIDALDRMIETFDARVEEVMSPLERDSVRRLDEVPGFDQRTGQNLLAEIGTDMSRFPSARHLASWAGLCPGNNESAGKRKGGRTRKANRWLKAALTQAAWGASRTRRSYFSVQHRRLTTRRGVKRATIAVAHSLLTISYCLLSRPAEDYVDLGVNHVTHNAEQKVQKMVNRLRKLGYTVELRDAA

SEQ ID NO: 457696 - protein, 419 aa, unidentified
MQVLYQRCAAIDIGKDVIAVRLPGDGPDGRQTIKETFKTFYGVLRHAARWLTEQGVTHVALEATGVYSMPVYHALLEHGDFEQVLVCNAGHVKNVPGRKTDMSDADWLVHLLECGLLRASFIPPAEIKAARDVIRYRRKLMESRTSELQRLGNVLQDAGIKLDSVASSVSTKSARSMIEALIDGERRPTVLAELAQGRMRAKIPELGRALEGRFDDHHALMCRLHLHHLDQLDEMITRLDEQIEQLMQPFHPQRELLMTIPGIGPLCATAIIAEIGVELGTYFPTADQLAAWSGLCPANHESAGKRRRAPRRKGNPHLQSALAEAAWAAVRADGYLRSYYRRSVMKFGGFRSNAAKNKAIVAVAHKLLIITWHVLTTSTPYQDLGADYYTRHLDPEIETRRLVAKLQAHGYTVTLERAA

SEQ ID NO: 457697 - protein, 359 aa, unidentified
MTMLAEPNEKIEDPTVLDAVVGGDTHRDTHQLEMLTGAGVMISTISIDNDADGYAAAIAWIAQHAPGPRVLVGLEGTRSYGVGLCRAVQAAGLQVVEVEQPKKGQRRGRGKSDPIDAHLAALTVLRMPADRKALPRSDGDREAMRILLVARNEISTTRTAQINRLRALLLLGDDEDRALSRGAMSKAHLDRIGRRRGRRDETREQAVRRGEARRLAIAIRAADLELTANHKQLKTLVQAFAPGLLDRKGVGPFSGAQAIVSFSHVGRCRDDAAFAALAGASPLPASSGRTDRHRLNRGGDRQLNRALHTIMLTRWRDCTRTNAYIQKRRNEGLSDRDIRRCLKRYIARELFRALTAVGA

SEQ ID NO: 457698 - protein, 427 aa, unidentified
MKQEGQEQQEFGAYIGLDWADRTHVISLRGTDSGKVEHYQLVHKPEVLAEWVSDLQRRFPGQRVAVALEQARGAVVHALMGYDFLVLYPVNPKTLAKYREAFSPSGAKDDPTDADLLLELVTLHRDKLRAWLPDDELTRTITLLVEYRRQLVATQTSLSNRLTSLLKLYYPQALAWAGELTTVQACDFLQRWPTLAQVQQAAPAKLRQFYLAHGCRKADVIVQRLQEIKLAQPLTRDGAVITASVLMVQATTTQLRPLMEAIARMEKQIAELFRQHADHELFSSFPGAGPVLAPRLLAALGADRGRFAAATEVQQLSGIAPVMERSGKTCWVHRRWACPKFVRQSFHEFAGQSIRWSTWARAFYDQQRQRGNGHHAAVRSLAYRWIRIIFRCWQMRVPYCEETYCRALQRRQSPLAKVLAAPMQNAS

SEQ ID NO: 457699 - protein, 373 aa, unidentified
MTKNLRYLGLDVHAETIAVALAEPGGEVRSLGMIPNEPSAVAKLVRKLGGREQLRACYEAGPCGYVLYWQLTKLGVACAVVAPTLVPIKPGDRVKTDRRDAEKLARCHRAGDLTAVWVPDAAHEALRDLVRAREAAKADQLRARHRVSKFLLRHGMRAPGDVKPWTQRHRRWLDTVTFAPVAQQTTLADYIHEVDHAGARLERLETALDVAIAAAPPAMQTIMRALQCLRGVRQLTAATIVSEIGPLSRFAHPRQLMGYSGTVPSEYSSGSSVHRGAITKTGNAHLRRVLVEAAWAYRFPPKCGDALRTRQRGQPPGITAIAWKAQQRLHTRYRRLLGRGKPVPHVITAVARELVGFIWAIGIAAEREVAIAA

SEQ ID NO: 457700 - protein, 471 aa, unidentified
MGKGSGVSRGDRRRNGRAERLRALVPRDGAVIGIDLGEDKQAVAVIDHDVRVVWRKTVRVKAHQLGEVLDRAVAEAGAKGFSRVTVACEPTGARWMQVQRLCGERGLPLVCIQPLVSHIAREQQDYTPHKRDESDCVLIGRLAVELHCYVPEVLDEAWAHLRHLGRRRAQLITAATASVLRVRDFLSVAWPAAPAACAQPFVSVTWLAGVQVVASRCGGRPEQLAAMGQEAFAGLVRSAVPGWGGMRADGRVTRAVFAALADTRDAVGWSRRGLLRRVADELGDLQRTRAQLRAVEADMVTVLGELGLARLADIPGLTAVGAAAILAETGDPRRYETSSSLVKHAGLSPAGNASGAFEGQERISRRGRPGLRTAVWRAVWPLIIHNPVMAAKYQALTRATDDAAAQAPPGTRSPQASAAQRAARARRARARVACAASLLRWVYFMTVHEAGWDPAAASGGRVPSPEQAEAA

SEQ ID NO: 457701 - protein, 406 aa, unidentified
MPITVGIDWAEAHHDVAVLDEAGRILGRRRIDTGVAGFTELMTLIAEHSEDPTAVPVAIETDKNLIVVALQSAGLTVHAINPRAVARYRERHGQAGKKSDPGDAALLADVLRTDRHQHRPLPELSERALAVKALARQHQEAIWAEHETLSRLRSVLLEFYPQALQAFPKLKHKAALTVLSAAATPALGERLSERRLVTLLHRCGRRNDPSLVEQILRDLHRPALRQSPAVEAALGTTTRTLIRIVLQMQAAVNELEAALAEVFDAHQLAPILTSAPGLGAVLAARVLAEVGDDRERFSTAGGLRAFAGTAPVTRASGRSHRVRARRVRNKRLADACHWWAFAMLTKSPGARAHYDRRRAVGDTHNAALRNLANKLLGRLWWCLRNEQPWNEHTAWTQARPAPAIAA

SEQ ID NO: 457702 - protein, 410 aa, unidentified
MSTWQVLCGRPCRAKYFFEGLLMNYVGIDISKYKHDCFIISALGEVISDVFSFDNNAEGFAALLGELQRSDKWNLRIGFESTGNYSINLKLFLEENGYSFAEINPVLVKEHIKSQSLRRTVTDKLSAIAIADYLRSKAQLPNSGFAYDTFSLKQLTRFRSDLMHQRSRYLVGLTNVLDCVFPEFKPFFGGKFSTTALYILANYTSPKKIANMNVMSFDILRRKSRGRFSMDRFVALKALAKNTIGAYTEAYGLQLGTLLDIYSQIDCKLAEVDAVIARIITEINPPTLSIKGVGEISAAIIVSEFGDFSRFSNPDKMLAFAGLEPGYFQSGTAEHNGRMVKRGSAHLRCAILNCCRALRLHNETFATYYLKKITEGKKHGIAISHMAKKLVRLIYALETTGERFDPAKLR

SEQ ID NO: 457703 - protein, 381 aa, unidentified
MRQVCGLDVHKDSVFVCILNEDGLVFQEKFGVLTPELEKLASTLQAHDVSEVCMESTSVYWMPVWRVLEPYVADLKLVNPYFIKQLPGKKSDIKDAEWIATCLLKDLIRGSYVPADIIQQLRQYDRRISDLNAECVRKLGKLDAALQRCNIRISNYVSRTDGKSYQEVVRLLSEGVICPEELVKVIHGRTVKRVGKDVLLASLTGVFSVTDIDIIRQLRDEVVLAQRHKDECQSKMDALCRQHFPTQLENLQTIPGVKGRSATAIIAEVGSDVSSFQDAAHLVSWCGLKPRNEESAGKIKTRSITHGNKYLRKTLVECAWAASKTQGCFFNSFGYHQVVVRRKNKMKVQVAIARKILVAVWYVLHDNATYRDYTPDIVPAA

SEQ ID NO: 457704 - protein, 369 aa, unidentified
MAIVANIYRFVIGVDTHAKQHVLAIIKPSGELVETRSFRTNSLPAAIRWVQKVTGGDLDTLWVIEGAATYGAVLASKAQEAGYRVVEAARMNAKAHRAVGKTDILDAHRIAAAVLPLDQTRLRDPRSHQSTQAGLQILTTAREQLTDYRTCLINSLTALLRQWELGVDARRPLTTAQIAEVSRWRTKTANDIGLTVARTEAIRVAKQILDLTAQIDANYKQITELVSASEAKALLEVTGIGPVNAAIIYCAWSHPGRVRNADAFKSLAGVNPIPASSGNTTRHRLNRGGDRSLNSALYIAAITREVHDPATRAYIIKRTAEGKTRKEIRRCIKTYLARKVFRILNQATNTETWSPENSDAPAAALTPAA

SEQ ID NO: 457705 - protein, 340 aa, unidentified
MTVIIGIDPHKASHTAVAIGCDEQQLAEIRVRATCQQTAKLLAWAEPLGERTWAVESAGGLGYLLSQQLVSAGEEVLDVPATLASRVRVLGTGRSDKNDPNDALSVAIAALRSPGLRSVEPADHREVLRLLAKRNHEIGRLRNIVVSRLHAALLNLSPGGISKELNASDAVRLLNGFEPITAVEQTRYDLAHELLDDVERLDVQLKESHRRIKTAVKASGTSLTELYGVGPILACELVGYTGDVRRFSNRDQFASYAGVAPVERSSGGRIFFRLSRRGNRQLNHAIHMVAICQIRQTNSEGRIYFEKKVAEGKTKREAIRSLKRHVSNAVYRQLLIDAQK

SEQ ID NO: 457706 - protein, 467 aa, unidentified
MKHNQQRARSGRKSRGSISLLERIQPDAAGIDCGQNSHFVAVPPDRDPQPVREFRTFTAELHRLADWLAQCGVKTVALESTGVYWIPLYEILEQRGFEVLLVNARDVHNVRGRKSDVKDCEWLRELHSVGLLRASFRPAATIVPLRSLMRQRQTLVEEAATRIQRMQKALTEMNLKLHTVLTDLTGQTGLKIVRSILNGQRDPEQLAVHRDHHCHASHQEIVAALTGNYRAEHLFALRQNFAAYEFHLQQIAECDTAIEKLLAKLAEQQPPPSGPLSTPRRKRGSKHAPTFDIRTSLHRLTGGADLSQIHSIGPHAALQIVAEIGTDMRRWPTEKHFTSWLTLAPNNKVSGGRLLTSRTPPSANRAAVILRRCAMSLGRTSTALGAFYRRLAARTGKAKAITATARKLAVLVYRVLSGDLIYNDPGAAAYHQLNRARELKSLRKRAKLLGYQLVNHSTGEVLSIPVS

SEQ ID NO: 457707 - protein, 348 aa, unidentified
MGVFIGLDLSLAKTAVCVVDRDGRVLWQGKVPSEPEPLVKRLAEWSGVIDLAGIEACPLSEWLHRGLREAGIPVVCVETRHAQRFLSSRPVKTDKNDARGIAEMMRLGHYRSVHVKSPAAQSMRTTLTARMQLVASQLQIESTIRGLLKVYGLKIGAIHRNRFAARVLELLEMAALPDLSAAIEPLLRVREGMRTERKALDRTLAATARRSDIGRRLMTIPGVGPVTTLAYIATVDDPGRFGTSKALGAHLGLTPRVYQSGEIDRSGQISKCGDRMLRHLLYEAASALMTHTRKWSRLRAWGVAVAKRRGMKRATVAVARKLAVIMYRIWVTGEEFDFGGPAVAAKAA

SEQ ID NO: 457708 - protein, 355 aa, unidentified
MTSTKYIGMDVHKESISIAVMNSVGKVVMECVIETKASTILQFIDGLRGDLRITFEEGTWAAWLYDLLKPHVTEVLVCNPRKNAVLKDGSKSDRIDARKLAEQLYMNNVKSVYHGEHGLRTLKELARSYLTITKDLTRVMNRLKALYRSWGIPCVGNEVYAPRHRAEWLGKISEAGVRRRAEHYYQQLDVLRLLRQEMRRELLVEAKKHKAWKLLRLIPGIGPIRAALLMALIQTPHRFRTKRQLWKYSGLGLETHDSAQYHVAEGQLRRSKKPATVRGLNKDHNHDLKDIFKGAATRVSSSRGPLRDFYENLLAKGRKPTIARLTLARKIAAITLIVWKKEVRFDANYLKPQAA

SEQ ID NO: 457709 - protein, 412 aa, unidentified
MTKVLRRVGVDWGSGAHQVCRIDAGEEPKQRSFPHTSEGLNALVAFVVEGDIAPEQVLIAIEVNHGAVVEALLAKQLPVCSINPKLLDRLRDRFSPAGAKDDRRDAFVLASCVESDAHAFRRIEPGDEENLRLQAATRLRGDLKSGFGADANRLWSELRDYRPGLLVLCPGADEPWLWALLEKAPSPSQGAKLTRASIGAVLKRHRIRRLTIEDVQTVLRKDVLSLRPVYIESHVARVLVLTAKLKLAQIQIDKLEKEIETELTERVQSEEKTKRRDLTILLSLPGFGPLTTATALGESGDAFERRDYNALRSICGAAPITKQSGGSRFVVMRQFCQPRLRVALHISALQAIRVDPKFHDLYVRARARGHTVGRAIRNIVDRLLFLAVQLLKKNQLYDITLRQLAPGVAVGS

SEQ ID NO: 457710 - protein, 421 aa, unidentified
MRGFGLDVHRDFCEVAIAEQGQVRSAGRIESRVEALELFAQSLVAGDVVALEATTGADKIVSVLQRHGIRVVVANTRKLKSISEAKAKTDRLDARTLARLLMSGLLDEVWTPDERTRALRRLTNRRERIVRARTRAKNEAHGVLARNLCERPPVTDCFGKTGRRWLAELELPIDERLTLDGCLRQVDFLDAEVAALDREIAQQALAWPEVLRLMSVPGVNVQTAATFMASVGDIGRFSSPRKLVSYLGLDPRVRQSGNGPARHGRISKAGASETRHMLGEVAWKVMQTPGPLRVFFERVRARRGPQVAATATARKLAVLFWHLLTREQDYAFARPAMTRNKIRRLELLTGAPSQKGRKGIAGGKSKKVFEAERELSRQAEAAYARLVNDWQAAGPRRVGAGATPGRASQRPSKGKAARQAR

SEQ ID NO: 457711 - protein, 429 aa, unidentified
MTRISVGVDVSKNRSTVCIIDQDGKFIMRPFLVWHSTEELDFLADTLKRLNGEVRVIMESTSVYQYPIALQLKERGLFISIVNAYEMKQFANTDFRGGKTDKKDSRTIASYGISYWDKLVEWQIPKDTYFNLDLLNRTYMNAKKHRQIILQELQHYIDCAMPGMDKELHSLNLNTKKDFMLDFVEKFWHRDEIVNMTEAEFTEVFTAWAKKKGYRPVEGKAAKIYAIAKSCIPYYPANPTVKTILQCIVDKLSGVNRTLVTIVTQMIEEAKKLPEYQIVREMPGVGDPLAARFFGSVGDIRRFKNSKALVAYAGIDSPPDESGDFSSTHRHITKKGSKVFRDTGYEIMMALRAQKRTWEKVRKNPEVYDYMLKKEAEGKPPKVAKIAALNKFLRIIYARIKELYDNMALAERAKTKTRSKTRAKTKVTA

SEQ ID NO: 457712 - protein, 331 aa, unidentified
MFPVGIDVSKNTLDLCILYDGIKGRIKTRNIQNNRHSVENILRWLRLQHCGPEDVHVVMEATGVYHERLATELHDAGFRVSLANPHRSREFARGMGIMTKTDKVDAYMLACYAFLKKPHHWEPPAPEIRYLGALLRRRDVLLGDALREENRLEKYLSTDTPADIISSCRRMAQLLREEVSNIERQIKAHIKASPALRRDYTLLNSIKSVGPQLGMHMLVELRSHNFASAEQAAAFLGVVPIEKRSGTSVRSRPRMSKIGPPQLRAKLYMSALCGKIYNKRMRNIYDEMCLRGKPKMVAIGALMRKLVHWCYGVLKTGTVFNDEGLKQVLST

SEQ ID NO: 457713 - protein, 369 aa, unidentified
MADYREAFVAFDVAKIKHAVAVADSGRGGEVRFLGEIENRPVTIERTIRKLAKRYDRLHVCFEAGPTGYGLYRQVGDLGHDCMVVAPALIPKRSGERIKTNRRDAVTLARLHRAGELSAVWVPDIVHEAVRDLVRARQAGAEDLRRKRQQLLSFLLRHGRIYDAGGHWTLAHRRWLARQAFEHQAAQIVFQETSDAIEDAAQRLHCLDEQLAAIVETWSMKPVVEAYQAMRGASFLVAVIFAAEIGDVRRFETPPQLMAFLGLVPGERSTGDTVRRSGLTLAGNRRARRALVEAAWTYRYPARVSEPLRARLEGLPKAVRDIAWKAQVRLCARYRRLAAAGKKPPVIAAAIAREMAAFLWAIGREVAPS

SEQ ID NO: 457714 - protein, 420 aa, unidentified
MSNMNTENEIVCGADIHRDFLVATMISRKGLKLQERFSMNQDGLLEFKSWILNHKCQRVAVESTGSYWYPIFYTLEGYVEFILANAFQIRNIEGKKTDKLDSERIAVYCLNDLIKPSRIYPKDYRDLRSITRSREALVNARSKLKNQIHQLLATCCIKLSSVISDSFGKSGRYILDRLLEGKSIDQIISGIPSKRVRNKEDELRNAIRNGLDPVQLLLIKTNLDAIDDLSEKIKILDAEISIKVKPFEEDLNILLSVPGIGLTSAATILAEMGDYRDFASADKMAMYFGIVPSVYQSAGKLRTGKITKRGSKHMRRILVEVAKAISKTKKNSNLKRFFMRVYKRSGKKSVAAIALARKVLCIIYHLLMNREDYQEPEIKKTKPKISICGSPISAMDIDEMISTLSRAGYLVEKGFKEGCG

SEQ ID NO: 457715 - protein, 351 aa, unidentified
MRTSQKITGIVTTIGIDIGKNTFHLVGFDQRGAIILQQKVSRSQLERRVANIPRCLIGMEACSGSHHIGRQLAEIGHDVRLIPAQYVKPFLKGHKNDYRDAEAIAEAVQRPTMHFVTIKTPEQMDLLALHRVRSRLVGRRTGVINQIRGFLIERGITVRQGPMPLRKALSEILSSDTGALSPRMVGLIADLAQDWRRLDERIAAVSAEIEALAEQDHSCQRLMTVPGVGPIISSAVVAAIGNGTGFKQGRDFGAWLGLVPKQESTGDRTILGKISKRGNKYLRTLFVQAAHVVLERRPSAAMRGLWPWVEQASKRLHRNMLAIALANKLARIAWAVLARGGTYQPRITHAA

SEQ ID NO: 457716 - protein, 351 aa, unidentified
METQQTASPKLFIGIDIHKRSWKIHCATNLFSGKTFSMPPRPEVLKAYVAKHYGGYEVTTAYEAGCCGYHAHRCFEGYGWSSLVVNPADIFRKGKERLTKTDRIDAQLIARELKDGRLTSIRVPDKCREQLRSLFRRRNDLVKDMRQIKSYIKMQLLYYGMEIPPEHDNDHWSHDFRHWLDDLKFEYDTGTEVLRSRMRSFRFIDQEFRDVSTLLRKHTKTHFKQDYMLLRSIPGIGPIVASGILGELGDLRRFKNIKHLAGYVGLAPGIYQSGDTLRHTGVSMRAHRLIRSYFIEASWQAIRTDPVMQGYYRKHQGKNVKSIIVKVARKLLSRTLAVIKTGIPYEIGIME

SEQ ID NO: 457717 - protein, 420 aa, unidentified
MVGTSEFTFYVGVDWATEHHQVCISDCDGRVVRQQRIEHSGKAITDFMASMEDLAQGQVDRIAVAIEVPRGPVVEAFLEHRWAVFAINPKQLDRFRDRHTVAGAKDDSRDAFVLADSLRTDQRCFRRLSADHPAIVRIRELSRTEDQVGVDLRRTVNQLYQLLLRYYPQLLQICPTPDEPWIWALLEVAPTPERAGKLKVQRIRQLLAKHRIRRWSAEKVAEILSAPQLPLASGTADAVSEHALLLVPQLRLLSTMRKQVADRMEALLDEMAASSEDTPETQVFRDVAVLCSLPGIGRVVSGALLAEAAGPLQQRDYYAIRAHGGVAPVTRQSGKTRQVGMRYRCNTRLRNALYHWARTSVQHDPRSKQQYARLRAAGHSHGRALRGVTDRLLTVLIAMLKSGQSYDPTRRQSNVSAPAA

SEQ ID NO: 457718 - protein, 386 aa, unidentified
MQKLNDLSRSPSPLDPNGTLIAVIELSLSSWLVAGIVPGVERQPLKKLAVDESALVKLLHRWREEAEKAGHRIKRIVVAFEAGRDGFWLARWLSARDIEVHVIHASSVAVSREHRRAKTDRLDTELLKRSFLGWLRGERDHCKMVAIPTTKDEDAKRPNREHESLVGEQSRIVNRMKATLIRLGIRGFNPKLKKAAGRLEDLRTPEGEPIPPNTLAELRRDMERRRLISDQIRQIEDARLERIEQATGDGPHAMVRLLARVIGVGIETADMLVQEVLARNMRDRRAVARYAGLTGSPDESGAKRREKGLARSGNARVRRGMIQLAWRFLMFQKESALAQWFRARTESARGTRKTMIVALARKLLIALWRLVREGVVPDGVVLRPAQ

SEQ ID NO: 457719 - protein, 343 aa, unidentified
MKCYAGLDVSLNETSISILADDGTIVREFKIATDGKAIRSALMSQADCLERIGLEAGPLSQHLYSCLAEAGLPAICVETRHMAAALRAQTVNKTDRNDARGIAQMIRVGLYKVVHVKTERSQRLKALLTLRKVLKSKLLDIEADLRGVLKNFGLKLGKVSVRTFEGRVRELAAFDPLIAAVVEPVLRARRALREHYNERHTMLLRIVRDDPVCRRLMTMPGVGAVVALTYRVTIDVPSRFAKSRNVGAHVGLTPRRYQSGEVDWSGRVSKEGDTLLRASLYEAAQVLLSRVTRWSSLRSWAIRLARKRGRRKAVVALARRMAVILHRMWVNETDFQWGVPAAQ

SEQ ID NO: 457720 - protein, 340 aa, unidentified
MKITTIGLDLAKNVFQVHGVNEHGKAVLRKQLKRDQVAPFFANLPPCLIGVEACASAHHWARKLQALGHAVRLMAPQFVKPYVKSNKSDAADAEAICEAVSRPSMRFVPIKNVEQQSVLSLHRVRQGFVKARTAQANQIRGLLGEYGLVVPQGIAYIAQRVPPLIEDAENELPGSFRLLIQRLLDHLKVLQQQVDEIEAQIRAWHRDSEASQRLEKVPGIGPLTATALVASIGDAKNFDNGRQLAAWLGVVPRQHSTGGKPTLLGMSKRGDAYLRTLLIHGARSVIYRATQRADADSWLVKLTTRRNKNIAAVAMANKTARTVWALLVHGREFKAGYAAA

SEQ ID NO: 457721 - protein, 343 aa, unidentified
MESIYYIGLDVHKKSIAYCIKTVTGKIVCQGMVKAERRALHQWLVDLPGPWVGAMEATMFTGWIYDFLKPYAVELKVAHPAMLKAITAAKKKNDRADAEKLADLLRVNLLPECTMMPEELRELRRILRYRNMIVRTASKMKNKISGLLMEVGAIYDKRKLHGKRYFGQLLERVEDVPESVKDLLKLSRSNMELFEAVQKKLLKILREDSLISKRVELLRSISGVGEVMALTWVLEIGDPERFSNSRQAISYCGLCSAQHESAGKEHRGPISKKRNKYLQSMLIEAANLAPRWNPQLAMLHEKELTRGNRNRATLAVARKLVIYMLAVDRRGKPFITEKESLVA

SEQ ID NO: 457722 - protein, 400 aa, unidentified
MISVGIDVSKGKSTVCILKPYGEIVSKPFNITHTQKDLSELSSMLFRLNDEVKIVMEATGIYHLPILTYLQEKGFFVSVINPYLMKSYRNESLRKAKTDKIDSRIIANYGIDHWFKMKEFQTSGEIYEELKLLGQQYRHYMKLHLLSLAELTHLLDLTMPGIKNLLASWNETNRKDKRSAFVERFWHYDVITSMSEQEFTEEYILWAKEKKYVPSQEKAKVIYTLAQESIPTLPSETSSIKMLVTEAVRVLKEVDATLGLILSRMQEIAKTLPEYSVVREMGGVGNTLAPKLIAEIGDVRRFRNGKALVAFAGIDPPPYESGQFVGCNRKISKRGSASLRKVGYETMRSLKMRSRPEDPVYRYVVKKESEGKSKKSAKIAGLNKFLRIYYARVTELYKNI

SEQ ID NO: 457723 - protein, 280 aa, unidentified
MKYVGIDVSQDHLDFALLNSEGDHVESVQVRNEERAITRLVKNWIKKGKLDLSQSLFCLEPTGHYSHLLLTVLVGLQAPVWLAHPMNIKQGLGIARGKSDKIDAVRIAQYARRFRDQARMFTADHLRMSKLKQLLMKRRQLVEGKVKLKIQLGNVNRHMHKDLRSSFNRFDKAQMRTIDRLLKKVELLIEEEINADPKIKRQYDLISSVPGVGPVLASNLLALTDAFTRFSTPRQLACHAGAAPFESTSGSSVRGRTRTSRRRTPGSRACSTWPPWSPSE

SEQ ID NO: 457724 - protein, 343 aa, unidentified
MTDVVTIGLDLAKNVFQVHGVDGSGETVVRRQLRRGQVLSFFKKLPPCLVGMEACASAHYWARELAALGHEVRMMPARYVKPYVKRNKNDAADAEAICEAVTRPSMRFVAIKTPEQQAVLMEHRTRQLMVRQRTALINALRAHLAELGIVAGVGRNGLEKLLQVIDDGQDERVPAAARNCLLALRDQLVMVKQQILDADRRILAWHRANEVSRRLAEIPGVGPLVATALAASIPDPHVFRSGRDLSAWIGLVPREDSTGGKPRPGHISKAGNRYLRWLLVVGALSVIRRAKQTGCRRRPWLAALLERRPTKLAAIALANKMARTAWAMMAQGTCYQEPRVEAA

SEQ ID NO: 457725 - protein, 389 aa, unidentified
MICVGIDVAKDKHDCCILSAEGEKLNSFSFTNDRQGFELLMSGMAAFDRPENASIGLESTGHFSTNIQNYLLQKRLRVTVFNPLQVNLARKAETLRKTKTDRSDAAFIARLLLGGQTKPYIPQVWELSELRMLTRSRFRLVGMRSKYKLSVSRLVTVLFPELPQVVHSVNQKSSYALLSEFPTAAAIANAHLTRLSNLLWVNSHGKYGREKAIEIRELARNSIGLNSRAAGFELQQTIRLVLNLQAEIDLLDKEIRSIMRKIQSPVLSIPGIGFVLGAMILSEIGSVENFENHGKLLAFAGLEPSTNQSGNYTANKTPMVKRGSKYLRWALLQAARQVAYRDETFGRYYARKKAENKHHFVVLNHTAKKLVRVLFHLLKTGQNFQPQSG

SEQ ID NO: 457726 - protein, 332 aa, unidentified
MVRQIYGIDLSKEKFDVNFLDEQGKIQESVVKNDYKSICDFLSKLTTSVTLCIEYTGVYGDLLVFLANSFSIEICATPGYEIKHSLGLQKGKSDPMDAARIREYGERFTDKLKPSKVADEVMSELRELHNLRHILVKQRALLKTQCKGKCKLPYESIKAHELAEFTLQVLDSQIIEVESEIQHIINLHQEYQENSQLIQSIRGIGPVTASELIIKTHNFIKIDTARKAASFAGICPYPNSSGNMIKKSKISSMGDKSLKTLLFLCARCAITYNKDMKQYYNRKKEEGKHTFIALNNVANKLLRTIYAIIESRQMYDPNYICMDPRLENKIVA

SEQ ID NO: 457727 - protein, 354 aa, unidentified
MLYLGIDQHARQITISLRDDSGDVVLARQVSTEPEKIKAFFQQLTERLRDGESFVAVLEVCGFNDWLIRMLRDYRCQKVILIQPEDRKKCKTDRRDAAALSELLWANRERLLQGKPVRGLRQVDIASSTDQENRRLTTLRKEAGQTRTRLVNQIRHLLRRHNLQWQMPTKRLPTKAAIAWLKDVTLPEIDRLEMNYLLTDLDRLQERLKELERVIAERSGVSKEAALLATMPGVSHFTATSLACRVGRVERFPRAHSLANYWGLTPGCRNSGENNQRLGSITKAGSGMARWLLAQVTHKVLRKDTRLREWFKRIKRRRGATIARVAVMRKLATIIWHMLSKRTSYAECRGHAAA

SEQ ID NO: 457728 - protein, 331 aa, unidentified
MDYSKTIGIDVSKLTLDVNVLPDGKFCQVENNVKGITKLFRWLTKDCKVNLADALFAFEHTGFYSYKLAVCLQEKGYAFVILSGLELKRSLGMSRGKSDTTDAGRIAEYAILRKCQLIPTQMPEKVIEQMKRLLALRDKLVKQRAGHKASVGEAKQAIEKKEDPLYFKVQEDLIKNLDNNIDLLDQELLNLVQNHPVLKTQFDLIVSIKSVGTQTALFMIAVTHAFTKFANWRKFACYAGIAPFPYQSGTSIRGKTKVSHLANKKAKSILGNITGNAIQWNTEMKLYYQRRLAAGKNKMSTQNIIRNKLLARIFAVIDRGTPYVETVNYAA

SEQ ID NO: 457729 - protein, 350 aa, unidentified
MIIIGCDYHPGFQQIAFVDTETGEYGEQRLEHSEGAEKFYRDLAAQGKKIRVGMEASGHARWFERLLAELNFELWIGDASEIARKRERKQKTDRQDAQHILQLLMENRFPKIWIPSGENRDLRQLLWHRHRMVQMRTRIMNQLQAVALNEGLRCKKRLWRKHGREQLESFRLAPWASRRREDLLQLLDRLNPTIADLTQVIEQEVEKCPEARRLRTHPGVGALTALAFVLIIGRTERFQCGKQIAAYLGLVPLEDSSGNRRRLGHITKQGSSMLRFLLVEAAQVTARSNPEWRNKYFPLVMRRGRKIAKVAMARRLAIALYWMWRKGWDYEQLRKFGSHAGKLGTGDGVQ

SEQ ID NO: 457730 - protein, 443 aa, unidentified
MSKFKNTFELKFPNAAGIDIGSSSHFVAVPPDRDDQFVREFPSFTEDLHALADWLTACEIDTVAMESTGVYWMPLFELLEARGFTVYLVNSRHVKNVPGRKSDVLDCQWLQQLMSFGLLAGAFRPQGDYAALRTLARLREMLLRYQATHIQHIQKALLLMNILLTEVLSDIMGVTGQLIIRAILAGERDGETLASYRNGHVKASEEDIAKALQGSWRDEHLFSLKVAVELYDFYAEQLLACDQQIQQQMEDLARYELKPEKTKRRGGKPKNAPKFDARILLMQMCGVDLTRIDGIDVTTVFKVLSEIGADMSKFKSAKHFASWLGLCPGTKISGGKVLSAATKRTSNKVAQALKMAAVNLRNSQSALGAYYRRLCGRMDKGKAVTACAHKLARLIYAMLTKGEEYVDQGQAYYEEKYRERVIKNLTKRAEALGFQLTPALEMA

SEQ ID NO: 457731 - protein, 322 aa, unidentified
MSEPILGVDIAKKKFDVALLINGKLKHKVFTNSQEGFELLTAWLHKQSVDHVHVCLEASSTYGDELATSMHDAGHTVSIVNPARIKGFAQSELMRTKNDKVDAGLIARFCHALHPAPWTPAPPEIQQLQSLVRRVDALITMRTQELHRLGTAHTTIEHSIQEHVAYLDREIDGLKKQIADRIKNDPDLKAKRDLLMTIPGVGEATIAAILAELHMFERCDRVQKLVAFIGLAPKQFISGSSIKGKPRLSKVGNARLRKALYMPALVSIQCNPVVQIMYHRLKEKGKNGKVIVCAVMRKLVHLIFGILKSGRPFDPNYRQLCA

SEQ ID NO: 457732 - protein, 355 aa, unidentified
MDSVKYIGMDVHKEAISIAVLNSSGKLVMECVIETKAITILQFFQGLRGSLHVAFEEGTWAAWLYDLLKPHVTKIVVCNPRRNALLKEGSKSDRIDARKLAELLRSNLLRPVYHGEQGVRTLKELARSYLTISKDLGRVMSRLKAIYRSWGIPCTGKQVYAPRYRSEWLGKIAEAGVRRRAEFYYQQFDALRPLRQEVRCDLLTESGKHSVSKLLCQIPSIGPIRAALIVAFLQTPHRFRTKRQLWTYIGLGIETHSSADHRYVEGKLQRSKKQISIRGLNRNHNHDLKNLFKSAATIAAAKPGPFQEFYDALVAKGIKPEMARLTLARKIAAITLVVWKKGVSFDAQYLKPQTA

SEQ ID NO: 457733 - protein, 342 aa, unidentified
MQHVAIDLHDEYSQICVMNEQRELLAEVKVPTRRAALSDFFRQRERSRVIFEAGPHALWVSELLIELGHEVVACHARRVRLIAESRNKNDRVDAELLARLSLSDLELIRPIQQRSRSTLEQRSVVRSRAALVETQKRLRTMLRGLIKPFGVQLPAGKKRALTQAASAELPELARQSVDAILNILHSIANQIGVLNDAIEQLTRDHPTVRRLQTIPGVGSLVALSYIHAIEDPARFGASDVGPYLGLTPSNRSSAGKKLGPKDRGRPGDPYVRSLLVQAAWTLMNSRSESELARWGRALVQRVGPKKAAIAVARKLATLMHHLWLQQQDFRPSPQPRRQAVAV

SEQ ID NO: 457734 - protein, 428 aa, unidentified
MDEVDRNRLEEFRQLRQAIRQSEEHLIVGIDIAKDRHHAFFGTATGKTLLRRLVFSNDSEGFGKLLDQAEALRVRHGLKKVVYGMEPTGNYHKPLGEYLIHMGRTVVLVSGVTVKHNRESLDGRWDKHDDKDSANVADLISQGKYLYYEYPTAELRGLRGLLSLKRRLKRQEQSYRVRIRNHLIAQYFPEMDRDYDRLGAEGLSIMKWCFPPSQMTELDVAPFIERVTFRRISTEKKRRLEAIWEKAGESIGCDAVPGVEHEAKVMVEGLRQIREMIKEIDGKIQELCESFPEYRSLLSIPGFGPDVSAKVLGAIGDPDRFQNGKQVLKLAGLDLSANRSGKDSPKAIPQISKQGKADLRYALYQAAFIASTKNRDFMRYYTSKLRGREKEKGIHTKMLIKLSAKMLLIAWTVMRKKETFNPTYLKAE

SEQ ID NO: 457735 - protein, 358 aa, unidentified
MEYFAGLDVSMNETSICVVDGKGEILWEGSVPTDPQAIFQVLAKFLKSLRRVGHEAGALSPWLQPQLTALGLPVSCLETRHVRAAMAAQRNKTDTTDARALAHIVRTGWFRPVHIKSEASYRLRLLLTQRRNLKRKFLDIENSIRHSLKAFGIRLNAVSRGGFEAKVRREIGDDPILMAMLEPMLKVRSVMWEQVGKLHKLVVQVVGKDELCRRFMGIPGVGPIAALTVKTALDDPGRFKSSKLVGAYFGLTPKRWQSGTSIDVHGRISKQGDGDARRALYEAASSMLTRFQGWSALKAWGMKIAKARGLKKATSAVARKLAVIMHAMWRKGSEYRWGTSEGARGAKAGSRKLLGAPA

SEQ ID NO: 457736 - protein, 339 aa, unidentified
MEVLRQNVGNDIAKDSFVATLTFLLKGQLIKHVATKKFTNKPKGFKDYSQWVDKHKKDSIDVNFTMEATGVYYENLAYYLFENGETIHVLLPNKAKKFAGSLNIKSKTDKIDSKILGQMGVERELEKWQLSSKIYRQLRTLTRERSQLVKESTRVKNQLHAEQHTAKPMKSTIRRMKGHIKYLERHIANVEKEIRVLVKSDNFVADKVKKITTVPGLDFTTVVNIIAETQGFSNANSIKQLTSFAGYDVQLKESGKWKGKSRISKKGNSHIRGALYMPSLSAKTHSQTYGRFYERINTKKQNGLISSTAVQRKLLGLIYTLWKNDTTYIENYQLQKKAS

SEQ ID NO: 457737 - protein, 416 aa, unidentified
MQKNNKSPMKKEPKAKRAKAQGPVQREPKQVLAELLEKLSGKLELKATSASQREAGPRGELSPNLDRLTVGVDLGDQWSHYCILGLQGETLREGQLQTREAEVAEFFQALPPARVVMEVGPHSPWMQEVIAGEGHEVVVANPRLMEGSKRRKRKNDRIDAKKLARLGRVDPQSLYPIRHRSREVRQDLVVLRAREALVAARTELINATRGLVKSMGTRLPQCSSPSFGEKVKDVIPEKVREALLPLVQLADALSDSIQSYDQKIEELGSEKYGHTKLLRQVKGVGPITALAYVLTLENPEHFARSRDVGPYLGLVPKQEDSGESQPQLGISKTGDTMVRKLLVGSAHYILGPFGPDTDLRRYGLRLCERGGKNAKKRATVAVARKLAVLLHRLWVSGEVYEPLGYASSRAIVQQAA

SEQ ID NO: 457738 - protein, 320 aa, unidentified
MQTGLVITTFIGVDVSKATLVTCVHDSSTRCTLANQRGAIAAWLKSLPAGSAIGVEATSTYHELLADLAHSHGLLVYVLNPKDVHRYAKGVGIRAKTDRVDAALIARYIAHEHANLHLYRPASLEQRQLQRLLTRRAKLSRARVSVQQSLQGLPGLKVPLRKLLERFDALITVIDARIQALVNACPQRQDACQRLRSIKGVGPVVGPALLNTLERFAFKHADSFVAYTGLDPRPDDSGQRTGRRRLSKHGPSELRRLLYTAAMAAVTSPAWKSLYQHYLDKQLSRTQALVIIARKIARTAWSVYTHNTTFDPQRLTSGLT

SEQ ID NO: 457739 - protein, 370 aa, unidentified
MGKYSEAFIAFDTSKVKHAVAIAEGGRRGEVRFVGDVASSPATVARLIRKLTGRYAKLHLCYEAGPTGYGLYRQIRELGHECTVVAPSLIPKKPGERVKTNRRDAVSLARLLRAGELTAVWVPDATHEAVRDLVRAREAAAQDLRRKRQQLLSFLLRHGRIFDGRKHWTMAHRRWLADQRFDHPAQQIVVQDGIDAIEDAVARLRRLEEQLVAIVPSWSMAPVVEAYQAMRGASFLVAVTFAAEIGDVRRFDNPRQLMGFLGLVPRERSTGETVRRAGLTLTGNRRARRVLVEAAWSYRHPARVSQTLQARLEGLPKTVRDIAWKAQVRLCGRYRRLSAGGKKLPVVIAAVAREMAAFLWAIGHQVAPAA

SEQ ID NO: 457740 - protein, 403 aa, unidentified
MNGPIVSVDVSKGKSDYQAFKDLNVKFTDVRSIKHTKEGFDEIVNLVKDMERKLETEVCVVYEATGVYHRVLKKVLEDNNIKQFIINPLLSAKTRKNDSLRSPKTDKLDPKSIAKTYYNQSLHSSYKPQTTYHELRELSRYYEDILVHIRKDKVAFRAQLDIVFPGYDTLFDDLYGAVSLTVIEKYPHPELLQKKSINTVSKIIQKKTRHRQAVSNKMAFKAIEYSKTIYSGCGKDDIDVLILERLIKKLNEDLNEAERTINEMIRLVQELPDFIIIKSIPGIGDNLAARLIAELGDMTRFKKKNELVAYAGLDPRIYESGQKDGAHMHITKKGNKRLRCLLYLSVTCSIRLKRDDNSIKDFYIKKMQQSNPMCSKAAKTACASKLVRIIYSMCKTGELYQYK

SEQ ID NO: 457741 - protein, 339 aa, unidentified
MLYVGLDVHSNKINMTVIRQDGQVERRCQMRSVAEMIEQLKRLPGPFKAAYEASCAYGLYYEVLTPLAQQVVVAHPGRLHMIFRSKRKNDRNDADWLARLLLVDAIPAVHVPAPEVQAWRELITFRRRLVQKRTRVKNALRALLRTVGVRPARKPGLWTQRGLAWLRTLPFSQLSHAIKRDLMLDELAALTAQVARVEKHLDQIAENNLSICQLQSVPGIGPRTAEAIVAFVDDPHRFRHSKSVGSYFGLVPCQDQSGSTNRLGHITREGSATVRHLLTEAVWRGVRKSPTIARYFARVQREDPDRKKIAIVATAHYLIRAMWAMLKNGTLWRETHEAA

SEQ ID NO: 457742 - protein, 350 aa, unidentified
MNKITTLGIDLAKSVFQLHGVDFAGKVVLRREVRRAQLMKTIAQLEPCLIGIEACGSTHYWARRFGEHGHQVKIMSPQFVKPYRKSDKNDRNDAEAICEAVTRPSMRFVAVKSVEQQDMLTLHRVREGLMKERVALINRIRGLLSEYGIVISKNASNMRRELPGILEDAGNALTVMARQIFNELYDDLSSREGRIAQVERSIRTLGSQHEVVRRLETVPGIGFLSATALFGTVGDARQYKNGRQLAAWMGLVPRQSSSGGKQRLFGITKRGDKYLRKLLVHGARSITTRAEHKPQPQDHWLNDLRERRGKFRSYVAQANKTARIAWVIMAKGEVYKAPTATLETSVVAAA

SEQ ID NO: 457743 - protein, 405 aa, unidentified
MGKVFVGHDWAEDHHDVFVEDDTGCRLAGGRLPEGVDGIARFHELVAGRVEDPADVVIATETDRGLFVNALVAAGYTVLAVNPMSTSRYRQRHSTSGAKSDPGDAKVLADLARTDAHNHRTVAGDSELGEAIKVLARAHQSMIWTRQRQTNQLRSTLREFYPAALEAFDELAGRDALAVLTIASTPTAGSHLSLSKIASALGRAGRQRRLAQRAAEIQTALRSEQLAAPALIAEAMGATVTALAAVIVELNTQIASLETRLADHFEQHPDAKIIRSLPGLAMTLGARVLGEFGDAPNRYVDAKSPKNYSGMSPITKASGKHHVVLARHARNKRLSDACYLWAFAALTASPGARAFYDQHRANGNTHNRALRALANRLVGILHGCLRHDALYDEHTAWAHRHQHAA

SEQ ID NO: 457744 - protein, 364 aa, unidentified
MDTLFHVGIDVHLSGIHAVVLAGQQVEPDSEQRLPYDFTKIRKPFRRLLARGPVVAAYEAGCMGFELARFLEDMQVPCIVAAPGKLPRKPSDKIKTDRRDAMMLARLLRRGELEAVRIPSREEEAVRDYLRARGDLRGDILATKHRLSKFLPRHGHLYSGRNWTIAHHKWLRQLELGSAMLKQTFEGYLACLLEQLERLRSMDAEIQQLATSPRYASAVGKLRCLRGINYLTALSLVCEVGDFKRFATAAHFMAFLGLVPREYSSGTKRLQGSITKSGNTHLRRLLIEAAWHYRYNCAPSKHLRERREGQSPQVLAYVSRAITRLHHKYVKLVLIKGRKPQVAVVAIAREFAGFVWGLMVGNVD

SEQ ID NO: 457745 - protein, 410 aa, unidentified
MVLFVGDDWAEDHHDVEVQDQTGRRLGKARLPEGVAGVARLHELIAGFTGEETSADQVLVGIETDRGPWVEALVAAGYRVFAVNPRQVARYRERHGTSGAKSDAGDAHALADMVRTDAHQLREIAGDSPLVEGIKVVARAHQTMIWERHRHMLRLRSSLREYFPAALEAFDDLTAPDTLELLGAAPDPRRAARLSRSRIGGALKRARRRDVEAKAERIQTLLRAEHLTQPAELVAAYAATTAATVAVLIAFTTQIETLQGQVEACFGRHPDAEIYRSQPGLGEILGARVLGEFGDDSDRYQGARARKNYAGSAPITRASGKKTVVLARFVRNQRLAGPLQWQAFCALRASPGARAYYDQLRARGTGHQAALRQLSNRLVGILHGCLKTRTPYDEHTAWGHHQPKDQQAAA

SEQ ID NO: 457746 - protein, 365 aa, unidentified
MNATAAGCVVGIDVAKSVFQLAVADGAWRVLEQHRLTRAQMERWFVNRAVDLVVMEACGSAHHWARWLNGLGIEVKLLPALYVRAYVKRNKTDAADACALLEATRCAQIVPVKVKSIEQQALQGLHRTRSLWMGTRTSRINALRGFCREFGIAIAQGARLGVEQVARILADPNSAVPELIRGTMKLLVEEIRLLEARTAQLEHELTVIARRSPVCTTLLTIPGVGLLTATAMVAATSGSVQHFRDARHFASWFGLTPRERSSGTTRVLGRISKRGDRYLRMLLTHGARSVLHAAKRASQAGKSIDGLRRWALEVQLRTNHNKAACALANKLARICYATLRDAQPYGEPVRRPMKKIERMSFPIAA

SEQ ID NO: 457747 - protein, 446 aa, unidentified
MSNGSGLSRGDRNRNARLARLRELVPLSNAIVGIDLADGTQAAVVTDHDSRVIARRRVSARAWELGDLLDWAVTQAAGAGFASVTVACEPTGHRWRVLDQLAAGRGLALVCVQPLLVYRAREGEDLTRDKSDPKDAVLIARLASELRCYEPERADEVWARLRHLGARRSQLTTAATAAVNQIRDLLECAWPAVLAAAGSPFRSVTWCASLAVVLDRCAGDLSRVRRLGLDRFTAAVRRELPRWGGIRPRLRIIRAVFAALADPAGVAAHRPGALERAHLTLGDWRDTRARLADTETRMCAVLEDLGLTGLVTTIDGLTVTGAAAILAETGDPARFATPRALVKHAGLCPRDNSSGAAQGRTSISGRGRPGLRVAAWRAVWAAMPNNPVMAARFVHLTTRQDNRLARQQASTACAAALLRWIHVVVTRRVTWDPAIAAGGTPLRQAA

SEQ ID NO: 457748 - protein, 420 aa, unidentified
MKRSRTRKTKNINEKTLIATVDIGKRLNMGYCRCPDGKEIEPFEFFNNGRGFNEFWRCICKIMKNSHLEDVIVGFESTGPYGEPLTHYLRKRRVDLVQVNPMHSKRLKELQGNSPNKTDKKDPKVIADIIELGHALTLIVPEGTAAELRRLTQARERSINIRTALWNQLQGLVFVLFPEFCQVMKDVKTKSAQYLLKHYPTPEAITEYGLEALTLTLKKTSRGKLGKERAQALYKAARGSVGIKEGKESMLLEISNILAMIEASDCIITNIEGKMSSYLKQIPYSRFILSMKGIGEITVAGLIGEVGDFSKFNTISEITKLAGLDLFEISSGQHKGKRRISKRGRPLMRKLLYFAALNVVRKGGIMHEQYQRYLKRGMLKMKALIAIARRLLGIIFALVRDHSEYEIDYQKTQNLLKVAA

SEQ ID NO: 457749 - protein, 409 aa, unidentified
MSYKVAGIDIHKKVLMVVVTDAAAEELTFESRRFGTGASEREHLAAWLRERGVHQIVMESTAQYWKPIWLDLEPHFEQLHLAQAHSNRAPKGRKHDFGDAQRLTRRLLSGELILSFVPDSEQRSWRTITRAKVQLVRDRVRLQSQLEALLEETRIKLSSVVSELLGLSGRRILEALAAGESDPVELAQLGDRRLRASKEELADALRGQCQPVHRQLLQLFLERLEVVDRQILQLDQMAGQAMQPYEDAVIRLAAIPGFGPDSAQQTIAEVGARAQRFDSAAQLASWAGLCPGRQESAESNSSSRTPKGNKFLRRILTQAAQAAVKKKGSHFQMVFRRWMPRLGWQAALWAIAHKLIRVVWKILHDRVPYIERGEESTPLVRRRRANKMVKLLRAMGYKVAISPLGPEPA

SEQ ID NO: 457750 - protein, 342 aa, unidentified
MAVVTVGIDLAKNVFAVHGVDKNGNAVLVKPKVSRAALPKLIASLPSCVIGMEACSGAHYWARLFRQYGHDVKLMAPKFVSPYRLAGKTGKNDAADALAICEAVRRPHMRFVPVKDEEQQSMQCLHRTRQGFIEERTASYNRLRGLVSEFGLIAPQGTGQLRRLAREHRENLPGWVSQCVDDLLSHIDSIELKIAEYDRILAKIAARDSRSKNIMKLRGVGPATASALIASIGSGHDFKNGRQLAAWLGLTPSQYSSGGKARLGKITKAGDAYLRTLLVQGARSVMIGVEHRQDPFSRWVCSLINRRGYWRAAVAIAAKNARLCWASLNYGDDFKLYSSPNS

SEQ ID NO: 457751 - protein, 360 aa, unidentified
MKTIVPSHVQVVTQPLPDSTLGVDTHKDTHTYAVLTNAGVKLGVKTFSTTQVGHAAAVSWARTLGNITAAGVECSANYGAGLTRYLQSQSIPVVEVNVVDKQARARAGKTDEYDAVSAARLVLSGRCASPAKELTGLFFDLAVLINARDSAVKAQTQTMNVLKAVLVKSPDEYRQSVVTKSGTSLALVKKLASTRPNLGQEYFIIRTTLKSLAARWLALRDEAMSYEATMLSLMTPVAKELLDYEGIGVVGAGIILSHVGADLSRFSNRDDFCKLAGVSPRPVSSGMTDRYRLDRGGDRQLNKAMYHAAMTRARKPESASAAYIEKRVTQGKTKRDAVRCLKKYIARDIYTILLSVYKNL

SEQ ID NO: 457752 - protein, 338 aa, unidentified
MAILYVGIDLAKNVFAIHGVDEHGKATLVRPSVARARLMEAVAALPPCTIGMEACSGAHHWARRFACLGHTVRLMAPKFVSPYRMSGKRGKTDAADAAAICEALQRPNMRFVPIKSEAEQARLCVHRVRQGFVEQRTATINRLRGLLSEFGIVLPQKAQTVRREAAAHLEDLPGWANTAVGDALSEIHRLDERLAEYDRHVSHMAAEDERSRRLMKLQGIGATTASALVATVGHGRDFKNGRQLAAWLGLVPGQYSSGGKTRLGSITKAGDGYLRTLLILGARSVLATAKAKTDHLSRWAVALAERRGYWKAVVAIAAKNARLAWAVLVRGDDFKAMA

SEQ ID NO: 457753 - protein, 404 aa, unidentified
MWYTGIDWADEHHDALTIDEKGHQMGSIRVDHTPQGFAKLDTFLMQIIGSASKEQMACIIETTHGLLIVHLLEAGWPVYPVNPRTVDRRRAASGAKTDTIDAYLLAKTGRADFADLHRLTPDSDKVAELKQLTRDQDSLIRTQTRLVNQLTACLKAYYPVALDLFSKLQQKSTLGFLQAYPTLEIARAASLQEIQQQLKHTRHPHPADTAASIVELLHHPQLQADVVLTRTKSRLMLALVSQLLPLMEQIATYDKEIHTLFLTHEDHAIFESLPRAGQHLAPRLLAEIGDDRQRYQDASSLQALAGTSPVLYQSGMYSKAHRRLGCIKPLRNALYQFAWQSTQSEAWAQDYYQRKRTEGKSHTVAIRGLANVWVRIIFAMWTHRECYQTATFELAQQHHARRAA

SEQ ID NO: 457754 - protein, 465 aa, unidentified
MMKTPKSKSRCHQPSTNETSDLRLINPNAGGIDIGSEFHWVSVPKDRASECVRRFGCYTADLYALADWLAECKVETVAMESTGVYWIALFQILETRGFEVKLVNAHHVKTLPGRKTDILDCQWLQQLHSYGLLSGSFRPEDQICVLRSYIRHQDSLIKSACVHIQRMQKALTQMNVQLHKVVSDITGTTGMAIIRAIVAGERNPQVLAAKRHHRTKRSEAEIAAALNGDYRSEHIFILQQELQLYDVYQAQIAACDHQIHECLAEFSDKVNLDESPLPQPKHPRNKPQGNEPAFDLRTHLYRISGVDFTAIDGLGILTVQTIISEVGLDPTRFPTVKHFTSWLGLCPCNRITGGKVKSSQTRLVVNPAANAFRMAAQTAGKSNSALGAFYRRLRSRLGTPKAITATAHKLARIFYQLWTTGGNYQDLGMDYYEQRYQERVINNLQKKALALGFELIPQPEANTVS

SEQ ID NO: 457755 - protein, 350 aa, unidentified
MKIHAIGIDLSKTTFHVVGLDEKGAVVLRRKQSRKQLLIYTANLPSALIGMEACGGAHYLGRALEAQGHQVRLMPAQYVKPFVKTNKNDYLDAEAIAEAVQRPTMRFVPIKSDEQLDLQALHRVRDRWVARRTAVMNQIRGFLMDRGLTVRRGPNYLREVLVPVLDDSNALFSGRIRWLLRELQAEWNELETRIEEVTGQIEAIAKENEECQRLMEIPGFGPLVSTALTAAVGNAATFYKGRDLAAWLGLVPRQHSTGGKTRLLGISKCGSEYLRRMMLHGARSVVMHVARKKSALGAWVEQLSARTHRNVAVVALANKMARIAWVILHKSERYRPAALAPVSLSPAGAM

SEQ ID NO: 457756 - protein, 343 aa, unidentified
MKRLTTDQDALLQLLHRWRKEATQAGRTIKRIAVAYEAGRDGFWLARWLRAREIEAYVIHPSSVPVSREHRRAKTDRLDTELLKRAFLGWLRGEPKHCSMAAIPTIEDEDTRRPSREREGLVKERTRIINRLKANLARLGIRGFRPSLAQASSRLETLRTPEGAPVPANTLAELRRDMARLHFVKQQIKEVEATRAKRLQRTFGEGRDAMVRLLVRVVGVGIETADMLVQEVFSRNIRDRKALARYAGLTGAPDESGQKRRERGLAKSGNARVRRGMIELAWGHLVHQKDSALAEWYRKRTADARGGRRKTMIVALARKLLIALWRLATTGEMPAGLLLRPAA

SEQ ID NO: 457757 - protein, 401 aa, unidentified
MISVGIDVSKGKSTVCILKPYGEIVSKPFNITHTQKDLSELSSMLFRLNDEVKIVMEATGIYHLPVLTYLQEKGFFVSVINPYLMKSYRNESLRKAKTDKIDSRIIANYGIDHWFKMKEFQTSGEIYEELKLLGQQYQHYMKLHLLSLAELTHLLDLTMPGIKNLLASWNETNRKDKRSDFVERFWHYDVITSMSEQEFTEEYILWAKEKKYVPSQEKAKVIYTLAQESIPTLPSETSSVKMLVTEAVRVLKEVDATLGLILSRMQEIAKTLPEYSVVREMGGVGNTLAPKLIAEIGDVRRFRNGKALVAFAGIDPPPYESGQFVGCNRKISKRGSASLRKVGYETMRSLKMRSRPEDPVYRPDSSRTQWDKPTRAPPCESPVSCHPHVSVRSTREPPRAG

SEQ ID NO: 457758 - protein, 385 aa, unidentified
MTATTRPMDPTARRDTLYLSLELGEDGWMLSFTAGFGAPVLRRRIRSRDRDALRREIDAMKERLGLARECRVVSCYEAGREGFWLHRFLTAHGIENLVVDSSSIEVSRRRRHAKTDRLDGESLLDLLLRHWAGSRKKVWSVVRVPTVEQEDRRHLHRELQGAKRDRTRVTNRMKGLLANHGLTLDLKREVPAQLAALRQWDGSALPAGLQARLAREWERVAFGTALIERLEADRRELLREGDDPTLEKIRQLNLLRGIGTNSAWLYGMELFGWREFRNRKQVGAIVGLTPTPHASGMQEREQGMSKAGNRHVRAMAIEIAWGWLRFQPESELSKWYQRRFGSGSSRVRKIGIVALARKLLIELWRFLETGVVPPGAVLKADVRVR

SEQ ID NO: 457759 - protein, 350 aa, unidentified
MLIIGCDYHPSFQQIAFVDTDTGELQERRLEHREEAEKFYRGLGVQGMKVRVGMEASGHARWFERLLGELNFELWIGDATEIARKRERKQKTDRQDAQHILRLLLKDDFPRIWVASWENRDLRQLLWHRHRMVQTRTRIMNQLQAVALNEGLRSKKRLWREHGREQLESFRLAPWASRRRQDLLELLDRLNPTIAELSQAIEQEAEKFSEARWLMTHPGVGPLTALAFVLIIGEADRFQCGKQAASYLGLVPLEDSSGNRRRLGHITKQGSSMLRFLLVEAAQVTVRSLPEWRSKYFHLMMRRGRKIAKVAMARRLAIRLYWMWRKGWDYEQVKKFGSHAGQLGTGDGVQ

SEQ ID NO: 457760 - protein, 366 aa, unidentified
MGWMAPLRHLSAKLLSVRISSEWEPSMGEVTTIGLDLAKHVFQVHGVDAEGTTVLRKQLRRGQLLAFFSRLPSCLVGLEACATAHYWARELGALGHEVRLMPAQYVKAYVKRNKNDAADAAAICEAVRRPTMRFVPAKTADQQAAVLLHRGRERLVRQRTALVNALRGHLAEFGVVAPQGLRNVGKLIAIVRDEGDARLPDMARQVLQVLATQIEQLETAVAAVEKQLMAWHKSNPVSQRLATIPGIGPIIATAIAATVVEPTAFRSGREFAAWLGLVPRQNSTGGKIRLGGISKRGNRYLRRLLINGASANLLRSKATNADPWVIGLRRRRPSLVVAVALANKTARIAWAVMHRQEDYRQLAAAA

SEQ ID NO: 457761 - protein, 482 aa, unidentified
MAKKRMSTFERLKPGRMNRAQRRELGRRVAAGDPQLAIVNPNAGGIDVGNESHFVAVPPDRDENPVREFGCWTQALHEMAEWLKSCRIETVAVQATGVYGIALYDVLEQHGIRVVLVNAQHTKNVPGRKTDVQECQWLMKLLTYGLMRDSFRLQQDMEYVRTLWRLRDRHVKDAGREVQHMQKALTKMNVQLANVISDISGLSGQAIISAILRGNRDPVQLADLVDYRVKASREEVARSLEGNWRPDVLFELQQAVDSYHFAHRQMLECDEKPALYLASLPTRTLETPASFQPESIVQKRKKARKPRDNEPRMDLKAELKRICGVDLTSIDGINVMTAFTVISEVGTEMSRFKDEDHFTSWMGLAPSKDISSGKVVGSGKKKVKNRVAIVLRTAATSLLESDTYLGARYRHLRRQLPTLKGAVKAMARHLAVLIYRLLIHGQAWIDRGAAQFERKRLEREMANLHVKAKAKGFALVPITEGN

SEQ ID NO: 457762 - protein, 452 aa, unidentified
MLGIDVSKGYADFLLLGSDANVLEEGFQLSDNKEGRQKLKELITGWQVQGLEELYCGVESTGGYENLWYSYLKTAFKESKVYVCRINPRGVKAVGDAALKRTITDAVSAENIATYMISFSKKLDYGTTTIPLDDGFKEGRQHITYIRMLQKQKIQLGNQLEKLLYQYFSEMLVYCRHGSPVWLLSMLVKYPSAAMVVKAGAARISAIKGISAEKALSVVAKARDSMQDVSPQIGHVIMVTAREVLHRETLIKEEKQYLADLYKESEEVILISSMPGVGTDSAVVIALEIGDVNRFESAKKMASFFGVHPTFKQSGDGIWGNHMSKKGRGEIRSVLYMASLSAVRFNPILKQLYARFRTQGMSHYQAAGVVMHKMLRIIFGMLKNKTKFCAETDVQNQQQSKEKQHEKEQKDKTDKKVKKQKKHRFQKATIQAPISRRAEQKIRKQIASQASD

SEQ ID NO: 457763 - protein, 349 aa, unidentified
MNNVTTYGLDLAKQVFQAHWVDVDSGEVHRKTLSRAQVSAFFARAPRGVIAMEACGSAHHWGRLLQTLGHEVKLIAAQFVQPFVKTNKTDAADAQAIWEAAQRPEMRFVAVKSEEQQAVLALHRLRAQWVKIRTQQANQIRGLLYEFGVVVPMGWRTLLKAVPEHLTATGSPVPTLLQEPLLEQLEALRAATAHIVALEKQLASWQRSEPECQRIMAIPGVGPLTASAVVASVTDARQFRSARQFAAYLGLVPRQSGTGGRVKLLGISKRGDTYLRTLLIHGARSVLLSQSRRGRSIDPWLGALLQRRPSNVVVVALANKMARTIWALLAQGRTFDAGWVSRRPRPECN

SEQ ID NO: 457764 - protein, 381 aa, unidentified
MKKNSIAKLQVTKSQLRRKAAKQRLTVGLDLGDRTSRYCILDEAGEKAGENQLPTSRAGMDAVFAKMAPSRVALEVGTHSPWVSRQLAGMGHEVMVANPRKVRLISQSVKKNDRMDAEQLARLARVDPKLLSPIRHRGAEVQADLAVIRARAGLVESRTGLINTARGLVKPMGERLKKCDADQVREALGEGLSEEAQNVIGPLLKSVEEISKQIQVYEQKIEEIEKRYPETKVLKQVSGVGRLVALTFVLTVEDPERFEHSRDIGPYLGLTRKQRDSGEREPELGISKAGDELLRWLLVQAAHCILRRGAPDSDLREWGLKKVQAVGGKKGGKTRKKKAAVGVARKLAVLLHRLWVTGEVYDPQYNRKARETAKGKRKAAA

SEQ ID NO: 457765 - protein, 361 aa, unidentified
MQSTTIIAFDQHAATTVAAVLLAQHRTPALHSLSSDIPTIQRFVARVKRQGAVSCCYEAGPCGFELQRALTARQIPCDVIAPALIPRRAGDRIKTDRRDAGQLAVLYRAGALTAIHIPSEEEEAARDLLRCREDIRADLLRARHRLSKFLLRHGRRFTATKKQWSKRHDAWLRAQTWSLCALDQTHRAYLRAVDEVVARLRDVEVQLHDLLTLEPLRPRVQRLRCFRGIDDLTALTIAAELGDPRRFASAPRLMAYVGLVPSERSSGTKRAQGGITKTGNAHLRRVLIESAWHYRHHPFVSAGLRTRQRGAPATVIAHAWTAQQRLHRRYARFAARGKRKQHIVTAVARELTGFVWAVLTQ

SEQ ID NO: 457766 - protein, 340 aa, unidentified
MQLYTGIDLHSSNSYLAIIDETGKRVFKKKLPNDPEQILSALAPYKDTIIGIVIESTYNWYWLVDALMAEGYKVHLANPTEIKQYKGLKYSDDQHDAFWLAEMLRLGILPEGYIYPKEDRPIRDLLRKRSHLVKLRSSLIISLQNIVCRNNGFRLKTNDVKVLNTDRVAPFLEQNEDLALAGKISKESIDYLTRQIKTIENVIEKRMELREPYKKLLTMQGVGKTLGLTIMLETGPISRFEQVGNYCSYCRKVSTKWISNDKKKGKGNKKSGNKYLAWAFSEAAEIARRYYPEARAFYQRKMQKTNAMIAHQALSHKLARAAYYIMRDGVSFMPEKLFIQ

SEQ ID NO: 457767 - protein, 388 aa, unidentified
MYRIIKIGMDVHSTNYTLCAMEPTIGAEDRVFGEIQVAPDYKEILLFIESLKMKLGILDDYSIECGYEAGCLGYTLYHQLTNAGIKCVILAPTTMLSTKGKRIKTDKRDAHLIAQCLCYGGYHPVYIPTKEDDAVKEYIRMRDDHKQMLKSLKQQINAFVLRHGYQYSGTKWTIKHVIWLRTLELDPMYRETLDEYMASHEEQEAKIERYDKRIEEIAAEERYQKNARKLGCFLGISTHTALSLIVETGDFIRFAKGNIYAAYLGLTPGEHSSSTSVNRLGLSKAGNTHLRCLLVEAARSICKGAVGHKSKRLRARQIGQSAEVIAYADKANTRLRSKYFRMIRHGKAKNVAVAAVARELACFIWGMMSGNISTVSGADTSEPAVSQG

SEQ ID NO: 457768 - protein, 375 aa, unidentified
MSANLRHVGLDVHAETVAVAVAESGGEVRPLGIIPNRPEAVAKLVRKLGPRRHLRVCYEAGPCGYVLYWQLTRLGVHCDVVAPTLVPTKPGDRVKTDRRDAAKLARSYRAGDLTSVWVPDAAHEALRDLVRAREVAKHDQLRARHRLTKLLLRQGIRPPEGVKPWTQRYRRWLDAVPCDQPARQATFGDYLHEVDHAAARLERLEHALDDAVHAAPASLRAVIAALQTLRGIRQVTAATIVCEVGPLSRFPHPRQLMGYSGTVPSEHSSGGSIHRGGITKTGNAHLRRVLLEAAWAYRFPPKCTKGLRQRQRGQADAITDLAWKAQQRLCGRYRRLLARGKPTPQVITAVARELLGFIWAIGVAAERAETAAAAA

SEQ ID NO: 457769 - protein, 304 aa, unidentified
MHAGIDVSKNWVDVAVAEDGARLERARPLQAAKWLKRRKVGLVVLEASGGYELPILTALTREKIAVARINPRQARQFAGAVGQHAKSDRADAALLARYAATLKPEPTMLPSPALILLRSLCERRRTLVVLRTAERNRRAMETEPLVQESMARMLTMLDAQIDELQQLIAAHIASHPDLVACQARLRSMPGIGPVTAAMLIAAMPELGIASRTEIAALAGLAPFTRQSGIWQGRAFCSGGRAHVRECLYMAALSATRRQNGFATTYQRLISRGKPHKVALVAVMRSMLITLNAMEKNKTMFILDA

SEQ ID NO: 457770 - protein, 341 aa, unidentified
MKNKSFIGIDISKNVIDVSIFCEETPIKDFSHDVFNNSRKGFGEMCTWLKKNHVVLSNCLFGMEFTGSYSMELEKFLNTRNYQFCMLSTHVVKHYPMGSKDKSDKIDSAKIADFLFRYNGTECVKPYNMPDKTMQRLKALMNERKFLVEQRTCFMNRRQLCITKEDAQLYDGYIKKFSRDIENIELEEQKLLATDDSLLSTYKNLLTIPGIGFVNAINVIVITRNFTAFETARQYASYVGVAPHFRTSGTSVKWRPRPSARCDGQAKADLSMAATVVVQYDAELQSFYNRKLGGKQDSDTKRKALNAVKFKLVLRMFAIGKQNRKWEPLDSKSSNEKLAIS

SEQ ID NO: 457771 - protein, 353 aa, unidentified
MGQVIVSDRSLTMGLDVDSRTAYVVVRDDATGRMVDHCRLRTTEAAWSSYLTRYPGCRIRAYYEAGCTGFGLQRMLSELGVQCSVVPASEVAKEANASRTKTDTRDAWRLSQTPWVPPHSYARIPTVEEERDRQLIRTREQLRKDRARTKDRIRKLLLFHGLSVPEESGSLWSTTWLAWLSGVDLGSSPFRLSVECLLSELSHLDGLVSRIEREMRSLSRTDRYRADVVRLTSIGGVGLVTAMTFLVELFRADEFEDARQVAAHVGFTPSEWSSGGRRRHGRITRWGAPHLRRILVEAAWRWVYVDANAGRCYQALAGRIGGKKAIVAMARRLAIAMWAVVKKQEPYAYHWAA

SEQ ID NO: 457772 - protein, 391 aa, unidentified
MSMYFVGIDISKYKHDCCIISAADQQIVSKFTITNDKDGFEQLRISLNSLSNSEDIRIGFESTAHYALNLELFLENSLLTFMEVNPVLISEYKKSKTLRRTKTDSVDCESIARWLMTVEYKPHSKGFYHAYSLKSLTRLRDKLIRQRSFYLVKITNVLDHTFPEFKPFFNERLSKTALYLLENYGSAGKMARMNSASYEKLRSLSRGKFSPQQFLRLKELAANTVGVNNSIFDVELNSLLSLYKSLVKEINTIEKEINKLIEEVHPHYMSVPGIGPLSAAVIYSEYGDISNFTNPGQMLAFAGIEPGINESGTESHGGKMVKRGSSQLRYTLINCCLPLIRFDMTFATYYAKKRGEGKPHRVAITHVAKKLIRVIYALERQDIDFNAQKLR

SEQ ID NO: 457773 - protein, 341 aa, unidentified
MDEYIGLDVSMKETAVSIRRAGERIWRGKCASDPSIVAELIRKRAPSVKRVVFETGPLSVWFYHSLRVEGLPAICIDARHAKAALNMATNKTDANDADGLAQLAEVGFFREVRVKGFDSMLTRTLIAARTRLVRITTELSNQIRGVMKTFGLLVPAGKGSTFEKNVRSLLADQDRLASIVLPMLEAWRGIRVRAAELGRQLVRDARLSRSCRILMSIPGIGAITATSFTTAIEDPDNFRKSRSVGAWIGLTTRRYQSGEVDYDGHISRRGDRPLRGLLYEAAAVILTRSSTHSTLRTWGLQLRERIGFKRAAVAVARKLAVIMHTMLKTGELFNPNAGATA

SEQ ID NO: 457774 - protein, 343 aa, unidentified
MQAITTIGLDIAKSVFQVHGVDANGHLVIRRQLKRRHVLAFFQKLPRCLIGIEACATSHYWSRQLQALGHTVRLMPPAYVKPYVKRQKNDAADAEAICEAVTRANMRFVETKTAEQQSCLTLHRTRHLFIRQQTSVINAIRAHLAEFGIVAPVGRNGIEELLHVVADPNDKRVPEITRACVAALGAQLHRLREQILAFDRMIMAWHRSSATSKRLDEIPGVGPALATALVASIADPKAFRSGRDFSAWIGLVPKQHSSGGKEKLGSISKQGDRYLRSLFTTGALAVIRYAKIYGTKHRPWLTALLARRPTKVAAIALANKIARMAWAMMTKGERYKEPIALAA

SEQ ID NO: 457775 - protein, 432 aa, unidentified
MNESIPAASLEGVAAYIGIDWADQKHDVVLRSAAEPNNVEHRVIEQKPGALMEWIGQLQRRFGGQGQILVCLEQSRGALIYHLMGYEFLELYPVNPLQLARYRETFSPGGAKDDQPDAGLLCELLYCHRDRLRAWKADSELTRKLAFFNEGRREAVDQRTRLSNAIKSQLKVYFPLALELLNQDTSTALAADLLLRWPSLETLQKQIPHQLRKFFYAHHCRGESRMLERLQLVQQAQALTQDSAVIEPAAFRVQMLARQLKNLLPDIARYDQKIAELFAAHPDRFLFENLPGAGRVLAPRLLSALGSDLNRWESAQEIATLYGVAPVRRASGKKSGKKGEKKASVHFRQACPKFLRQSFHEFAGCSIRYCCWARALYEAQRAQGKGHHAALRAVAFKWIRILFACWKQRIPYDPQRYLQALQQRASPYANAC

SEQ ID NO: 457776 - protein, 417 aa, unidentified
MNSPPETIPIQRYIGIDIHKYYLMIGGQNIHQEWTLRPRQVQMPRFRDWAEKNLKPGDAVVIETTGSVWDIYDIVAPLVSKTVVAHARKVRQIAEARVKTDKEDIRRLITLLIADIVPEVWVPPMHVRELRSLISFRWRLNKQMTMSKNRLQSVVQRFNLNPPEGGLLADKNKPWWEEQEFSNLTGFEVEQDLEIVKTLEGQKEALDQKLSELSNSEPWASDMVYLMQIPGLGPIFSMVILSAIGDIKRFSHPKKLVGYAGLGAGVHASGEKYQEKSITKEGRKELRWALVEAAWRAVGSDPYWKAQHKRLEKRMHRNKATVAVARRLLVSIWHILTKREPYRHFDEEDIAYKMLIWSWAMDEKSRGGMTPQQFAKYGLLRLGIGQDLERIERGGAFRRIAPTGEILALKPELAPPR

SEQ ID NO: 457777 - protein, 353 aa, unidentified
MTDTPSIAWLGLDAHSRNCVLAQLDDQGNEINHWRFPTDPRQLLKHLQAIPATVKRLILEESNLARWISQLLRPHVQQLIVCDARRNRLISQDAHKHDRRDAFALARLLRLNEYRSVWQPTDDQRVLFKRAAQAYENSVLRQTRLKLQLKSLFQHWGLFPTGATVFSKAGRSGWLQKLPYHALRSQALLLYELLDQALAGQSQARRLLCQAGRLFPEVQRLRSAPGVGLVGAHLFVAYVQDPHRFAKFSRLTRYCRLAIRDRTSDNKPLGFKQLDRQGNGVLKAISYRAFLQAAKRRSGPLWDFYQASLRQTGSNTHARLNTQRKILLVLWTLWLKGEEFDPNKFSHPQPINV

SEQ ID NO: 457778 - protein, 352 aa, unidentified
MTVTIVETRLQARAITGGVDTHADVHVAAALDPVGGLLGVAEFPATPAGYAQLLGWLRGFGPVCLVGIEGTGSYGAGLARRITAAGVRVVEVDRADRQDRRRQGKSDPLDAVSAARAAQSGRARGAPKGRDGAVEAIRALMVARRTARSERIQTINQARALVLTGPDDIRARFAKHATDALVAELAALRPRPGSMIRYHTLLSLRELGRRAQFPGQQLDRLDELIVPLVTARAPGLLARYGVGPHTAAMLLIAAGDHPERLRSEAAWAHLCAAAPIPASSGKVKRHRLNPHGDRQANHALWQNVITRMSSHPPTRAYVARRTKEGLSTKEIIRCLKRYVAREAYPHLRAPAG

SEQ ID NO: 457779 - protein, 354 aa, unidentified
MSQTSNTAIAVIGIDIGKNSFHVVGHDARGAIVLRQKWSRGQVEARLANVPPCLIGMEACVGAHHLSRKLASLGHDARLMPAKYVRPYSKGQKNDFNDAEAIAEAVQRPTMKFVATKTAEQLDLQALHRVRERLVSQRTGITNQIRAFMLERGIAVRQGIGFLRMELPTILATRTDALSPRMLRVIEELAGDWRRLDQRIDGLSGEIEALARLDQACLRLMTVPGIGPIISSAMVAAIGTGDVFSKGRDFGAWLGLVPKQISTGDRTILGKISRRGNRYLRVLFVQAARVVLARIKHLERYGLKSWIEAAKKRLHPNVLAIALANKLARIAWAVLAKGRAFELTRTDDAGVRPA

SEQ ID NO: 457780 - protein, 498 aa, unidentified
MGKGSGQDPTEPEFFEEGTKMIYSVGIDLHQGRHRARCLDDRAQPCDGFSFQTTPEGLAILEERVFRDGANPIIVLEPAGLPWKMVAVYLRSRHPDCRLVKAKTQKVAALRRYLRGPVKSDRLDALTLAKMPFIDPEKLVEIYLPPAEIHALQRLTRQRKRIESAISGRKIRISAIVDGYLPGVRRTFNEAWSLPVRAFLRSRLNPYAVIRGGEEALHAYLSKSCPRSKWSRAETHLVFLACQSVAEVCELSRSAGTVDEEFFVDLQDEIARELRLMESEEAESESLARRIMELYRKLHPSDNLTSIPGVGEHTAPIFLSAVGDPARFCSQSAFANWEGVVPGARQSSDVEVKGLRMTKAGPSIMRMGLYQAGDISRRWDPQLAAVYHREMVHHGKNHRQAMGAVMSHLGARVFAVLKEDRPYELRDTDGNPISKDHARRLILSKYQVPEEVRRERRRRNPKGSNTTGASRRGGETAIHRTNEAAKAPQPVQIKAVSR

SEQ ID NO: 457781 - protein, 442 aa, unidentified
MMGLSTTHQGGALIMKFKQTDAQNQRIEQITTSHLVIGIDMAKETHVAQATNFRGIVVSKRHLSFSNSIEGFEKLNRWMNELQQKYRLKKLIIGMEPTGHYWFNLANWLSDKGVHVVMVNPATTKRNKENRDNSPSKNDPKDALVIADTVSRGFYYEYTRQSLVFQRIKTIMSDREFWVTNSVRLQNRIVRWLDIRFPEYPSVFKDWTCKRSLATLKTFPCPHDLENYRVLDVIEAWRMHMQRAGGSTGLEKAAQLIARAKCSVGEQAAAEEAKADLRRLIEEFERVTAMLEQIERDIEVLLSEIPMAQQLRTIKGLGKIFTAAILAGTGDLRQYAHGRQVMRKAGLNLAESSSGRRKGQIVLSKRGDSALRKYLYLATVQLVWNNPVFRHLHEHNVQEKKMKKQQSIFKLIGKLARVLVGIVQRGEKFTPEKTVLTWSEAA

SEQ ID NO: 457782 - protein, 362 aa, unidentified
MNASTTVAVDLAKSVFQLAVADAHWKVIESHRLTRAQFERFFDNRNVDTVIMEACGSAHYWGRRLAGLGIRVLLLPAAYVRAYVKRNKTDAADARALLEAARASDILPIRLKSEEQQALQGLHRIRSLWMATRTARINALRGFCREFGLVIPQGSRTGIEAIGRALADPQVAIPGLIRGSMTLLVEEIRLLEQRIAQLERELTEVARHSPACIQLLTVPGIGLLTATALVAATGGSVAHFKDARHFASWFGLTPREFSSGNSRILGRISKKGDRYLRMLLTHGARAVLRAAYVARQANRSLDRLRTWALAVQQRANHNKAACALANKLARICFAVLRDAAPYGQPVTRPNKKIERTAFAIAQ

SEQ ID NO: 457783 - protein, 372 aa, unidentified
MDERIKFFIGLDAHKESTSVAVCEATREPARFAGTIGPDMRVLLKLLAKAGDPAQVSVVYEAGPTGYGLYRELRQRGYRCEVVAPSLIPRRPGDRVKNDRRDCARLAELSRAGELKAIWVPDEAHEALRNLWRAREDAVNMRLKTRQQLKAFLLRQDRRYPGRTSWTKSHERWIAEQRFDHEADRIVLAEYQLAVDSAEQRVQRLTIALTEAVQGWRFEPVVAALRALRGIDTVSAIGLVCEIGDINRFASARQLMGYLGLVPSEHSSGNSVRRGSITKTGNAHARRLLTEAAWNYRFPARLSRDLRARSQALPEAVRAQAWKAQLRLCSRFARLSSRGVQINKVCVAVARELSGFIWAIARQASPAVQTIH

SEQ ID NO: 457784 - protein, 345 aa, unidentified
MALYVGLGVLLRMTSICVVEADGSSVWEGKAESEPVPLVKVLSPWRDKIALVGIEACPLSEWLYGALVESGFQIICIETRHAQRFLSSRPNKTDRSDARGIAEMMRLGHYRSVHVKSKASQLLRTTLIARKKFVDHMLAIEDTIRGLMKVHGLKLGAVHRSRFAARVETLLADAPDLGMAIEPLLEARNMMRKHKALMDRQLSQMARKDDVCKRLMTVSGVGPLVSLSFKATIDDPNRFKDSKAVAAHLGLTPRVYQSGEIDRSGNISKCGDKLMRHALYEAANSHMRISKKWSTLRAWGVKLAKRIGSRKACVAVARKLAIIMHRMWVEETDFRFGKPPVTQPT

SEQ ID NO: 457785 - protein, 374 aa, unidentified
MGNHSEAFVAFDTSKLRNSVAIADVGRGGEVRYFGTIDNTPAATAKLVRKLAAKYRRLTFCYEAGPTGYGLYRQIKTLGHDCVVAAPSLIPKKPGDRVKTNRRDALNLAKLLRAGELTAVWVPDERHEAMRDLVRARGAAVDDLKSKRQQILSLLLRLGLHYPGKKTWTKAHMVWLTSQKLAHREQRIAFEEMLLAARQAQERVGRLDQAIAAAVPDWSLAEVVIALMALRGFDLISATIFLAEIGDLSRFGSARELMAYLGLVPSEASTGEQVKRGGITKAGNHRARRILVECSWSYRHPPRVGKKKLDKVAAAPREVQDIAWKAQTRLTARYRALTRRGKLPTVAVTAIARELAGFIWAVGRAVGTPTAPAM

SEQ ID NO: 457786 - protein, 456 aa, unidentified
MKPKRAGKGKGKGKGVPSLKCIEPNAAGIDVGAREVYVAVPEDRDPKPVRCFQTFTEDLQALATWLLTCRIRTVAMESTGVYWIPLFQILEARGIQVCLVNSQHLKNVPGRKSDVQDCQWLQYLHAVGLLQASFRPEDAICQVRSLLRHRDGLVEMAAQHVQHMQKALSQMNLQLHHVLSDLTGQSGMAILDAILAGERNPQVLAELRDPRAKASGETIAKALVGDYRREHLFTLRQSLHAYRYYQNLLASCDAEIEAYLREFDSHIDVDQHPLEPEAYPHRPRKNEFRFDMRSELYRLLGVDLTAVPGFNALTGHTVFAEVGRDLSRFPNAQAFSSWLAICPDNRKSGGKLLSSKTRRTKNRINRALRLAAQTLHHSQSYLGAYYRRMRTRLGAPKAITATAHKLARIVFHLITTGEAYDESVFAVEEQRRRARMEKRLRQHARFLGYQLVPLAS

SEQ ID NO: 457787 - protein, 430 aa, unidentified
MENSTSKRIQAITATTLIVGVDAAKDVHWARITDYRGIDLSKPVKVNNNINGFESLLQRIEKLQIKTGCDKVIIGMEPSGHYWRAMGWYFMLHESNPTLVGVNPYHTKQTREMDDNSQTKSDKKDALLVAHLIREGRYFDMYLPEGEYAELRILNGERQRLMKQVNRANNTIVAVMDEFFPEVGKVWERVTCPTSREIMKQAAFPNEILATGKSELIVLIKKASGGTKGAKLANELISAATDSIGVREGHKSAKQKLLRLIEELEFYETRVGTLDAELETIMDTLELGDILQSMKGIGPVISAAFVGEVGDASRFESWKQIRKLAGLNLVEQSSGQHIGKTKISKRGRPYLRYMLFLAGQVCCRHNPEMRQYYQYLRLRPNNPLGGYQAIVAVGLKVMRILFYMAKNKEKYNPDKALGEIRQQQMMSLTA

SEQ ID NO: 457788 - protein, 334 aa, unidentified
MKNYLFHVGIDVSKLKLDVNLLNSQTLQSEHFVIDNNPKSIKDFVKLLTKRNIDLSQVLFCCENTGVYTNHLSYTLLAIELDLWIVPAIEIKRSKGISRGKNDKTDAKDISYYSYRNIDKLRLYNLAEIDIQKLKMLYTEREKVLKSLLLLETTKENSEFVSKEVFKEVSTINQSLTNTIKKTINKIEKRIKEIIKSNEDLNKQYTLIKSVPGIGEQTSLYFIIATKGFSAFKNWRQFACYSGVAPFEYSSGSSIKGRTKVNHMADKKMKSLLQMCAMTTLKYDPQLKEYYIKKKEEGKNSMLVLNNIRCKLISRVFAVVNRETPYINTYKFAS

SEQ ID NO: 457789 - protein, 409 aa, unidentified
MKLYVGIDVSSTDLYTCIMDQEGNTCAQFKTDNHLLGATFLRDQILRWANERQPSEILIGMEATSVYSWHPAMFFHQQEELKSWHVKVFTINPKLIRKFKEAYTDLDKTDGIDAWIIADRLRFGRLKVTAVMQEQFIALQRLTRMRYHLVHQLTREKQYFLQHLFYKCSSFTQEVDSSVFGHAILELLLESFSLDEISQMDVQQLSDFLRQKGRNRFADPECIAKSIQKAARSSYRLSKCVEDSIDLLLGLSIQSIRSLQAQMKELDKAITRHLEGIPNTLQTIPDIGPVYAAGILAEIGQIERFDNQAALAKYAGLTWSKHQSGRFQAEETSLIRSGNRYLRYYLVEAANSVQRHDASFRTYYRKKYEEVPKHQHKRALVLTARKLVRVIDALLRNGQIYTPRKGEDR

SEQ ID NO: 457790 - protein, 427 aa, unidentified
MGLIVPTTIHPEREDQPLPYEWFVGIDWGSPQHQVSVLDRDRRRVGERVVDHDGASLARLADWLWTLSAGQPQRVAVAIEVPRGAIVEGLLERGFHLFALHPKQLDRFRDRHSVAGAKDDRRDAFVLADSVCTDQPSFRRLQLDAPQFILLRELSRAEETLLEEFRRSANRLREQLHRFYPQMLQLCSAADEPWLWDLITLAPTPAHAMLLSEEQGQRVLKAHRLRRLKAPAVLACLQAPALPVAPGTAEAAQAHCGFLLPCLRVLAEQLQACSQQVSTLLRTMADEPGEGGSPSDVAIVQSLPGIGRKMTAWLFAEAAQPLAERDYQVIRTHGGVAPVTKQSGKRRQVVMRHGCNPRLRHALYHMARVAMQRDVHFSSVYAALRAKGQRHGQALRNIGDRLLRILMAMLRHRTGYDASRIRCKPVV

SEQ ID NO: 457791 - protein, 323 aa, unidentified
MDKDIKYFGIDISHLVFDVTDPEGTHYQFKNNPSGFRKFAKLLDGDSHCVMEATGYYHYQLAYHLLESGIKVSVENPLAVKRFIQMKLSKVKTDKSDSRLICEYAKQVELKLWKGNSREQTECLQMARLLDVYTKQCTMIKNKLHGEEVLGNPSRAVVSSLNRSKKHIEKEMAELEKRLLMAVKRAHQEVLTCVRSIPGIGTKTGVMLIVLTGGFERFSSASELCSYAGLTPIIRNSGSSVSGRSRISKMGNQKLRSLLFMCSFSAVKYNRACKAIYDRIVAKGKSKKLALIAVCNKLLKQAFAVAKSGLKYDREYKSVLVKN

SEQ ID NO: 457792 - protein, 416 aa, unidentified
MRVHRNCCGLDVHKLTIAACLISENGDGTSSQQKRIFGTMTQQLRELAQWLAEAKVTAVAMEATGIYWVPVWNVLEPYGFELLLINPEHYKAVRGKKTDLKDGTRIAELLQDGRLAGSYVPPVAIRVLRDLTRYRTKLVQYQSSIANRIQRLLEQCNVKLASVASDVLGVSGQAMLRALAAGETNPQRMADLAKRQLRKKIPALQLALEGCLLPHHRFLLADMLEELDHIGSKIARLEQAIEEQMRPYQKAVDAWMTVPGVKQRLAWNLVAEVGPTVDAFPSAADLVSWAGICPGNNETAGKRKSGTTRNGNRWARKALCEAAWAASKTKATYLQAQFRRLAAIRGSKRAIIAVASTILTIGYHMLKEGTTYRELGGNYFDKRNLLRTTRRLVKRLEALGHRVILAPTPSPLQSSD

SEQ ID NO: 457793 - protein, 351 aa, unidentified
MMIIGVDYHPSFQTIAFLMEETGECGEQELKHSDGQAEKFYRDLKQRGICVRVGMEATGYSRWFERLLAELGFELWIDDPAEIKAKRVKKQKTDRKDAQLLLRLMLENNFPQIWVPSPENRDLRQLLWHRHRLVQMRTRIMNQLHALAMNEGYRWKKKLFSEQGRAQLEKLALAPWASRRRQELLELLDRMNPTIEELTTAVEREARKRPEVQRLMTHPGVGPLTALAYVLIIGTPTRFPRGKQIGNYVGMIPSEDSSAGKQRLGHISKQGNSLLRFLLVEAAQAAARCNPEWRRRYMHLAMRRHRSIAKVAMGRRLGVRLYWMWRNGCEYSPKLEFGSYAGQLVTGHGVK

SEQ ID NO: 457794 - protein, 346 aa, unidentified
MGKSITDLSSVTTVGLDLAKHVFQVHGVDASGRVVVAKAIRRNKLLEFFASLPPCLVGLEACGSAHHWARELIKLGHDVRMMPPAYVKPYIRRQKNDASDAAAICEAVTRPSMRFVGVRSLENQAALMRHKTREMLVSQRTQLLNALRGHLTEVGVIAPQGLRFARELAELIEACDETIPFEVCEALAPLVVQLRNLDEAIARLDRIIAKLAQKDETARRLMSIPGFGPITASAMAATIQDTSSFAGPREFAAFLGLTPKQNSSGGKQKLGRISKMGNRNLRKLLVVGAHAVLFHRKPHTDPLRMWAKRLIEKKPFKLVAVALANKMARIAFAIMRGTTVYREIPA

SEQ ID NO: 457795 - protein, 308 aa, unidentified
MPLWIGIDVAKDTLAVHVLPLDQLLSFPNTAQGHQRLCDHLAGQCVGNALLEATGGYERAVMTALATAGIPVTRINPRRARAFATALGTTAKTDPLDAALLARMAQLVQAPAPVPDPLREQLRMLVQRREQLVQQRDDERRRLHQATLAMVRACLIEQIGDLRRRIQRMNQAIKQVRCQLDDALAHALGTVPGIGEVTTASLMAYLPELGTLDRRQIAALVGLAPYNVDSGQHCGKRRIRGGRATIRRVLYMACWSVVRTQASFKERYQQLRARGKPAKVAITACMRVLLIRLNAMARDRTPWREVIG

SEQ ID NO: 457796 - protein, 324 aa, unidentified
MCIVDAEGQTKVHKNIDAHPDRFLPLVRPYREGLVVAAECMFAWYWLADLCAEQEIPFVLGHALYMKAIHGGKAKNDKIDSHKIALLLKGGMLPIAYAYPKAMRATRDLLRRRTKLVRTRAEALAHIHNTVSQYNLPPLAKKLTFAANRAGVAERFADESVRRMIASDLALIGHADEQLQSLELYLVRHAKIDDPQAYHLLQTIPGVGKILALILLDEMHDAGRFGDQRHFVSYCRLVRPTHESAGKKSASKGHKIGNAQLRWAFGEAACLMLRELPAAQTYVARLEKQHGKAKAISILAARLARTAWLMLKRKEAFDATKFLK

SEQ ID NO: 457797 - protein, 347 aa, unidentified
MRFYTRQHRHYCGVDLHVKMMYLCVLNAAGEVLLHRKVASAPAAFLEAIAPFRDDLVVAAECMFTWYWLADVCAAEGIPFVLGHALAMKAIHGGKAKNDRIDSHKIAALLRGGLIPQAYVYPAAMRATRDLLRRRLHLVRKRGQLLAHIQNTRAQYNLPGFERRLAYPANRAGVADRFPDPAVRKSIEVNLALLDRYDTLITDLELTIGRAAKAHDGEAFHRLRSVPGIGKVLALTILYEIHDIARFDRVQEFASYARLVKCAHESAGKKRGFGGAKMGNAHLKWAFSEAAVLFIRHAPGGKRFVARVAKQHGKEKALSILAHKIGRAVYYMLSRGTVFSMDKFRTA

SEQ ID NO: 457798 - protein, 420 aa, unidentified
MTTNQDSKILSVMHTNCCGLDVHKKVIVATLIVTDHSGKDVSYTKEFGAFTDDLYKLRDWLHEYDCPIVAMESTGIYWRCVHNVLEKDVEVIRVNARHVKNVPGRKTDMADSRWLAGLLRHGLLRGSFIPAKETRQWRELSRLRRKNRDTLSDYKRRVHKLFESANVKMDSVVSDLFGVTGRNVIARLMTGPTDISLADMEVCAKGSLRDKVTELHRSIQGFFEAHHRFQLRRLMHIIVMLEAENQLIDQRIERLMRPYADLIRRMDEVPGINDLSARYILSELGPDLERFPNASALVSWAGLCPGNNKSAGKRHSGRSPVTKHHLKTIMIEVAWAAVKKKGSYYKDKYWRLRYRIGPKKAIVAIAHRIMKALFYIIKNGERYRELGDQYLAQRRQKRKLVKLRREAKQLGFHLVPVESA

SEQ ID NO: 457799 - protein, 322 aa, unidentified
MAMLSFGGIDVSKDRLDVMVLPEEQCSSVPNDAAGWAKLVEQLRGFSISAVGIEASGGYERGAVRALLAAGMSVRQVNPFKLRQFARASGVLAKNDPLDARMIASFIAIMPTRPAQPHAPAVERLAEILTMRRQLSDAKVAAENASRLLEDAMLQRLSRRRIARLAADIDLLDGRLVEIVMADAALVHRYQLLTSMPGVGPVLACTLIALLPELGRMNRKQVAALVGLAPYAFDSGKLKGARCIWGGRASIRRVLYMAALIAMRCNPALKAFHNRLAATGKKPKVVIVAVMRKMIITLNAMLRNETPWVDRSSGRHSVLTAR

SEQ ID NO: 457800 - protein, 349 aa, unidentified
MGGGKIYVGMDTHKQFSFVTALTEKGDVIKQEKLVNFSDEFNEFFRELSRNKTLEIAIESTEMIMPFVKALERYGKIKVAHPTKLRLIAESKVKTDKIDSTVIANLLRTNYLPESYIPPEEIREIRTLCREHYAIKALIVRVKNQIRHYLLSQGIIREDNVFTKENRKKLREMNSDFINRKLDMLECMEEKLREVDDEIKERVSNVKEVELLTTIPGIGIYTAALLYSEIADIERFKKFSKLCSYVGLNPSMYQSGNRKYFGRITKQGNGCGSELGFGVVGIEMGADTKRLCSSKIRSRTENLFRKTETKERGKESDCCNSKKVAEKGVCSVEEERALRKLWFVVIMAF

SEQ ID NO: 457801 - protein, 491 aa, unidentified
MGHARARKIPAQLVEDEEYQLRHERVAGIDIAKAKADVCTRLPPQRDGGRRASRVEEVPATAKAILALAVRLIADGAELVVMESTPDYWRMWYYLLEGAGLSVQLVNPAHARQLAGRPKTDRLDAQWLARLAEMGLLRPSFVPPPEIRALRDLTRTRLQLVRDRSREWQRLEKLPEGALVKLSSVVHSLAKVQSARAILEAIAAGERDPKALAALAHPNVKGGRAAVAEALEGMALGDHHPMLIRVHLDHITLLDRSVAEVEDEIEAALDAIPAAWGTDPGGETGPDAGRGPDPAVLPAAERLAEIPGVSPALARAIIAETGLDMTRFQTADHLVSWAGLAPVARQSGPRTRKPKKGQGDAYLRGYCTQAANGAARTDTFPGERLRRLSRRLDGNRARCAVARSILGQVAGARYRAPAPSEPDLPVIPASGSSKPLRTLRVAAAVLCPCAAGPCGRGCRRRVPGLWRSSRSARRPARVFLARRVRAGCPGA

SEQ ID NO: 457802 - protein, 347 aa, unidentified
MKFYTTLHKYYCGIDLHARLLYVCILDEHGNKVVHQKIKADPHQLHKLLKPYIGQVVVGVECMHCWYWVSDFCREMNVEFILGHALYMKAIHGGKAKNDKIDSYKIASLMRGGNFPLAYNYPAETRATRDLLRRRTYVMRHGSELKAHVVNTDSQYNLPAQSLNLKNVSARDGLRHYYDDPVVQRMIALDMNILDCYIRELKHVESFIEGKAKEHYGALLNIVRTFPGIGQILALTILYEIGDINRFPTVQQFASYSRLVKCKAESAGKTYGTSGNKIGNGYLKWAFSEAAVLYLRGNDNAKRYLAKLQKRMSKGKALSALAHKIGRCVYFMLRDRQVFDEDKFSNR

SEQ ID NO: 457803 - protein, 334 aa, unidentified
MKDKYILGIDISKATFHYCLQLQRRNSLRKIEAGSWSNHPADIPRFVGHLKVLIGTATLHAGMEATGRYGNNLFLALHEAGARVSVINPAQVKFFARSLNRRGKNDIMDASLVALYVMERNPHAVLPLDAATATLKEMVGEIDSLVCESVRISNRIAEVANTCKEVTASLRRRKNLVDAEIARLEKAILELIKSHPRMEEQHRLLCSIKGVAARTAARILAHLGGKVFTTARQLAAYAGVTPCENTSGTSLNGKTRMSKQGNSKLRRALYIPALVFWKHCPQVRQWADAIALRTHSKKAALGAVMRKLTHVIFGVLKHNAPFNPERVSSLPCET

SEQ ID NO: 457804 - protein, 348 aa, unidentified
MSTPKITIGLDVGERFVELCVVDVDGAVLERGRLPTRLAALEVRFACLPRSRVVLETGKHSPWVSRALESWGHEVIVANARRVYLISRSLGKSDQADAETLARLGRVDSKLLRPVTHRGAQTQADLALLRAREALVRSRTLQINHTRHVVGSFGGALPKCSAESFPRKASEAIPAELAGALKPLLEMIEALTQKIRVLEREIERVSQERYPETTRLRQVPGVGPITALAYVLVLEDPRRYRTARSVGAYLGLVPKRRGSGESDPQLRITKSGDRMLRCLLVQAAHYILGPFGPESDLRQYGLAICARGGANAKKRAVVAVARKLSVLLYALWTSGSPYEPLRRGARAA

SEQ ID NO: 457805 - protein, 442 aa, unidentified
MSNNRSLTQGEFQVVHPNAAGIDVASQMHFVAVPPSRDQPSVRKFGSFTQDLHDIAKWLKKCDIDTVAMESTGIYWIQLYLILEEYGFEVFLVNARHIKNVSGRKSDVQDCQWIQQLHSFGLLNASFQPDLNGRELRTYMRHRKQLTESYAMQIQLMQKAFEQMNIKLSNVLSDITGKSGMAIIEAILRGERDACRLAQLADSRVKSTPEEIVKSLQGVWRSEHLFELRQAHDLYLIFKAKIKECDHQIERTLYRQQNDPSEPDQSKRKPQGTNKFDFNATQYLKKILGVDITEIFGISELSAMQIISEIGVDLSKWPTSKHFVSWLNLAPNNRISGGKMLKTKRNRKKNKAGQAFLMAAYTVQRSKHWLGATYRRIAAKHGAPVAIKATARKIAIILYQMITKQIEFCPLPIEDYNQLFKERKLKYIKNQAFMLGFQLIPS

SEQ ID NO: 457806 - protein, 342 aa, unidentified
MSIVYVGLDLGSSNFQQVALNHDGVSRVNRDFSTSEANLVQAFSDLQGEIHVHLEAGELAPWAASVIAPLVTRVVCSHPQSNAWIAKDADKCDRIDAYKLAELLRLNRFKEVHYAPDQPRRNFKQLVQHYDEMTAQQARLKTKLKARLRMQGVIVTGERLFSATGRKEVLARVESCDLRTAITQLYSVLDQSVEAQTKARWLMLRAAQAFPEIKLFRTAPGVGPIGACRFSAYIHTPSRFSTTRKLWKYCRLSVSHRSSNGKPLRRPRLDRSGCGRLKDVSRKAFDVAVRSRHDNGFKRAYQRALETTHDATHARLTVQRKIVSTLRAMWLNQTPYCDELMR

SEQ ID NO: 457807 - protein, 344 aa, unidentified
MGAVGRGLHCGVDLHGNNGYYGVVNESGERLMSKRLPNSLETVLSELEPYRERLHHGVVVESTFNWYWLVDGLNKHGYDARLANPAGMEQYKGLKNTDDESDAFFLTEMSRLGILPEGYIYPKQDRPVRDLLRRRLLLVHQKTAHTLSFQNLVARETGQMISANTVQRLWPEQVKGYFEDERLVLMGRTNIEVMRFLTKEIQQIEKAVLGEVKLRPEYEKLLTVPGIGRILALTIMLETGSLFRFRQVGNYTSYCRCVKSLRLSDGKAKGQNNRKSGNRYLEWAYVEAANFMRRYCPEAKRWYQRKASRSNRVIATKALASKICKACYFIMRDQTEFDVKMIFG

SEQ ID NO: 457808 - protein, 381 aa, unidentified
MKTVAGLDVHKSSIFMCILNEQGEKIEKKFGVSTREINQLSVELKFHYVSEVCMESTGIYWKPIWHLLEDHFRLYLVNPQFLKQLPGRKSDVKDAEWIATALLKGLVRNSFVPNAKIQQLRQYGRRINELNKDIVRCEQRIDMILQSCNIRISNYVSNTDGKSYKKVVESLINGERNADKLVALIHGRTLNKYGRETVRDSLEGNVGQADIDLLRQYMEVLQLYQRQKQESLTAMIQLCRKHYNQAFMLLQSIPAIKEQSAAIIISEIGTDMSLFATAAALVSWAGLRPRNDESAGKIKSRKITHGNKYLRKALMESAWGALRTKGSVFYDKFWRLRGRNKQQNKCTVAIARHLLVIIWSLLSKNAYFDNDYMHKNISCRA

SEQ ID NO: 457809 - protein, 342 aa, unidentified
MSNFYAALDVSDQQTAVCIIDGKGDTKFEGMVATDPQSIARSIRPYGRMLKVVGLETGSKSAWLYKELSRKHYPVACLDARLAHGSLGTQRNKTDKNDARALAQLLRLGWSNRVYVKSDEALRMRLLLTYRRALKRKAISLEMTLRMSLKVFGGSITKKARSLTVRLDKRDATISTLTGSLLRARAALLKEAEVLDGVVVRTAEHDPVCRRLMTVPGVGPITALSFRAAVDDPMRFPSSRSVAAYFGLTPRRRQSGQTDITGRISRMGDGAVRSALYEAAVCLIARSKSNSALRLWALRLREEKGTRKAAVALARKLAVVMHRMWISRRDFDPHPRPSPSAQ

SEQ ID NO: 457810 - protein, 373 aa, unidentified
MKYSTVYVGMDVHKETFSLCCFTNEKEKAEYPQKVDGHYSKVINYIEAMRFHYGDDALFICGYEAGCLGFTLYHQLTDHNVKCVILAPTTMLQQKGRKKVKTDKRDAALIARCLAHHDYSPVHIPTEQDEQTKEYIRMRDDHKLALKKVKQQILSFCLRHNYRFTETSRNWTLAHIKWLKALKPEGLYAETLKEYLLTYDNLTDKLERFDRRIEELAADEAYQENVRKLSCFIGVKTVTALAVLTEVGDFRRFATAQHFASYIGLTPGEDTSGGDQNRLGITKAGNRHVRTLLVEAAQGYGRGQIGYKSKSLKNRQYGNLPEVIAYADKANERLRRRYYHMVLKNGKKVNVAKIAVARELACFMWGMITSSAA

SEQ ID NO: 457811 - protein, 358 aa, unidentified
MKIIGCDYHPSFQQIAMLDLDTGEYVELRLLHAGGEAQRFYESLSGPVRVGVESSGNMLWFERLLQRLGHELWLGDAGVIRAKAPRKQKTDVRDARHLLQLLRENNFPRIWVPSVAERDLRQLLKHRHTLVQMRTRVKNQLQHIALNQGLQKKQKLWTRAGQELLRGLELDRWTARRRDDLLHLLEYLGKQIEELDQAVKAEAEQRAEVRLLMTHPGVGPVVGLATVLTLGEVGRFPRGRQVAAYVGLIPSENSSGQRRRLGAITKQGSSFLRFLLVQAAASAVKGDAEWARAYKRLAHKKHHGVAKVAIARKLVVRLYWMLRTQTRYPEVVRMPGSPSHPVARFQADALSGHPASRR

SEQ ID NO: 457812 - protein, 356 aa, unidentified
MSRDIKYIGMDVHKEAVVMAVLNDTGKLVMESIVETEASSLLQFIHGMRGELHLTWEEGTWAAWLYDLLKPHVQQVLVCDPRRNALLKEGNKSDKIDAHKLADLLRRGMLRSVYHGEHGLRTLRELAGSYQTIGQDQIRGMNRIKALYRGWGIACGGTQVYAARYREEWLGKIEHVGVRRRAELLYQQLDGLQALRRTLRPELLAESQKHKATKLLRQIPCIGPIRAARLLALMQTPHRFRSKRQLWTYSGLGIETRDSAQYCFVRGKLQRVKKPQQIRGLNRNHNHEMKEIFKGAANRASCGVGPLRDFYVGLLDKGMKPEMARLTLARKIAAIALTLWKKEARFDAEQLKAQAA

SEQ ID NO: 457813 - protein, 364 aa, unidentified
MGVGSRHRPRLDWKPAAASADRPRMSLALQSFLPFPNSCQGTSPHQQGRGTKMTEHCYCGIDVAKERLDVQVLPHRQRFSVDNNATGWAELVERLHALPIAAVGIEPSGGYERGIIRILLAAGLSVRRINPSKLRQFARARGILAKNDRLDAQLIAEYVSIMPTRVVQRVGTAERLAEVVTMRRQLCDQHVTIENQAAHVEDAILRRLNKRRLARLKADIHLLDKRLAEIVAADVILAQRYELLTSMRGVGPTLAFTLIALLPELGQMSRKQIAALVGLAPYDFDSGKLKGHRCIYGGRMPVRNILYMAALSAARYNPALKVFHNRLAAINKKPKVIIVAVMRKMITTLNAMVRDNAAWQPRAA

SEQ ID NO: 457814 - protein, 404 aa, unidentified
MNAVGIDVSKGKSTVAVLRAYGEVVASPFDVAHTESELKELANFIKKLRGETKVVMEATGNYYEPIAHYLHEQNIFVSVVNPVLISDFGGNTLRKPKTDKKDSLKIASYALSYWVDLKEYIPQEDLRKSLKLLNRQYQQASKLKTMMNNNLISLLDLTFPGINKLFTSPSRESDGHEKWVDFVIAFPHCDMISKLTFKAFSKNYKKWCTGNSYYFTEASCEKIYDFSKECISSVSSAESTVFTVIQAAKMLNSAAENCQAIQYEMNRAAAQLPEYDTVMSMYGVGKAVGPQLIAEIGDPRRFHSRKAITAYFGYDSENNDSGQKVSISNSMTKKGAGALRRTLFIIMQVLLQTKPIDNPVYDFLIKKQCEGKHYYSYMNAAANKFLRIYYARVKEVLTAAEVKT

SEQ ID NO: 457815 - protein, 374 aa, unidentified
MSNHSEAFVAFDSSKLRNAVAIAEAGRTGEIRFLGEIDNDGAATGKLVRKLAARYERLTFCYEAGPTGYGLYRQIEGLGYDCMVVAPSLIPKKPGARVKTNRRDALSLAKQLRAGELTAVWVPDRRHEAMRDLTRGREAAVEDLRSKRQQVSSFLLRQGLHFTGKKTWTKAHMSWLASQKLEYAEQRIAFEEMLLAIRQAQERIERLEQAVRAAVPDWSLAEVVTGLMAMRGIDLIAATAFLAEIGDLSRFQTPRELMAYLGLVPSEDSTGDTVRRGPITKAGNRRARRILVECSWSYRHPPRVGKKKQEKVAAAPRAVREIAWKAQCRLSARYRALTRKGKLATVAVTALARELAGFIWAINREIAAPGPVAM

SEQ ID NO: 457816 - protein, 389 aa, unidentified
MKIFVGIDIAKLNHFAAAISSDGEILIEPFKFTNDADGFQLLVSKLESFDKNSIIIGLESTAHYGDNLVRYLVAEFYQVCVLNPIKTCQMRKKNVRKTKTDKVDTFVIAKTLMMQDDLRFITFFDLDMMDLKALGRFRQKTIKQRTRLKIQLTTYVDQVFPEIQYFFKSGLHQNAVYALLKEAPSPKEIASMHMTHLANLLKVNSHGHFTKEQAKELRVLAQKSVGANDSAISIQITQTIQQIELLDSQLEKIEAEMTDIMKFNDSVIMTIPGIGYINGGMILGEIGDIHRFSNPNKLLAFAGLDPSVYQSGNFQAKTTRMSKRGSRVLRYALVNAAWNVVRNKATFKAYYDAKRSEGRSHYNALGHCAGKLVRVIWKMLTDEVEFNLE

SEQ ID NO: 457817 - protein, 343 aa, unidentified
MQTITTIGLDIAKSVFQLHGIDTAGTVVIRRQLKRRYVLGFFEKLPPCLVGIEACATSHHWSRELQALGHTVRLIPPAYVKPYVKRQKNDCTDAEAICEAVGRPNMRFVPTKTVEQQSGLVLHRTRSLLIRQQTSVINAIRGHLAEFGMVAPVGRNGLEALLSLVASEDDTRLPEVVRASIEALALQLRALKAQILEFDRKILQWHRSNELSKRLDEIPGVGPALATALVASIADPRSFRSGRDFSAWIGLVPKQHSSGGKPRLGGITKQGDRYLRSLFTIGALAVIRYAKIHGTQHRPWLAALLARRPTKVAAIALANKIARMAWALMVKGERYREPAALAA

SEQ ID NO: 457818 - protein, 523 aa, unidentified
MARAPKSKKHSASAPQTIHKARGVISPRVQRVGPEHFGIVCVDCAKARSKWMLTDFYGRILVPPTEVEHTQACFASMIERLRTALEQAGIRDQIVVIERTGRYHRPVQRAFAKADFEVRIIHPLTTKQHRQPANPGNKTDDTDLAAMQRGAVNGFGLLEPPADPLSIRLQLLARHRRDLVEKSVALRSQIHEHLYAIMPGYSKCFEDIYDARIPLWIARQFGSATAILQAGLPGLIVQLRRAEIRVHLPTLEKILAWARTAPAAEDESHLHLKILTELDDDRLSKVRGVRAIEAELAGLLVQTPYVLLLGIPGINVVSDAEFAGEMGPIERYATARAITGRAGLFPSRYQSDHVDYPDGQLVRCANRNLRRAIMMIADNLVKCNDHFRVLATGWRLQGRDARAVRVQVAGRFSRIAYQMVAGRKAYRHPCCQQRDYILKKLLVFHTDNEISYEQLMRNLDAAVAQLPRSEYREEAVPLADELDRVLKKRGKGPRPLSEILPVVLAKLGVKPVRSPKSGEAILT

SEQ ID NO: 457819 - protein, 493 aa, unidentified
MTARRIVGIDLGIASSHTVVVIDETTEVLARRRCRPTRESLEVIEAAALAGAPDGTRLEVIIEPTGPAWLPVAVFFRRRGHVVHRVSSAKASAMRKFLSQHAKANSIDAVALARLAIVDPDGLQCLRLSEGAAASLDRRVRAADRLTETATRHKVRLRDLARQAMPMLGDVITGEMTLADVAVLERYGDPRVMLRAGRARLAALIRRTSRGHLGDDRADAWLRVARDAVDLYGDDLAVAFDDLAAEMATEVRLLRAVLGERDRHARAREAAYRQVDPDGLARTLPGVAEIGGPILVAVMGDPTRFSDAAAFKRFSGLTPKASETGDTDRKGQAISKAGPRRLRDQLVQSANTARQVDPQLAHVYFTQMVERGAHHQKALCVVAARLAERSWMVMARGEPYELRDVDGTPVSAAEAKAIIENQYQVSEEIRRRRRSRKNAGKVPQRVLEAHIKSRTHGADTRGDLPRTTTQPRTRPTVKNNPESQPRRQHAAAP

SEQ ID NO: 457820 - protein, 377 aa, unidentified
MSKLRFVGLDVHADTIAVAVAEAGGEVRSFGIIPNRLESIRKMLGKLAPIGTLKCCYEAGPTGYVLYWQLAQLGAACEVIAPSLIPTKAGDRVKTDRRDAEKLARCYRAGELTPVWVPDAAHEALRDLVRAREAAKKDQLRHRHRLGKFLLRHDKRPIDAGKAWTQKYLNWIRIHVHFEQPALEAPLKHYREEVDHIAERIAKLEQAIAEAVKQAPAEIREVIEALQALRGVAQTTAATVVAELGSLSRFASPSQLMGYSGLVSRERTSGNRVQRGAITKSGNAHLRRVLLEAAWTYRHRPNVQGRVLRRQKSLALSEEARQIAWKAQQRLHKRFDALTTRGKQSNVAATAIARELLGFIWAIAVHTEAQCKPAKAA

SEQ ID NO: 457821 - protein, 358 aa, unidentified
MTTMTTTTPGVTGGVDTHGQTHHAAVLDHLGRQLGDREFPTTPSGYRSLLAWMAGHGQLERIGVEGTGTYGAALTRQLRATADVQVVEVDRPDRKARRAHGKSDPLDAYSAARAALAGTATGTPKGRDGRVEAIRTLRVARGSAVKARSQTTNQLKALLVTAPAELREQLRSLTTTALIATCARLRPAGDIADPETATKTALRRLSRRHQYLSQEIGEADVELRALVTAAAPRLIALPGVGPQVAGQLLTTLGDNPERLHSEAAFAHLCGVAPIPASSGRTHRHRLNRGGDRAANNALYVVVLGRLRYDPRTRAYAARRTTEGLSKPEIIRCLKRYVARELYNALQPVKQPGDLALTP

SEQ ID NO: 457822 - protein, 372 aa, unidentified
MLCVGIDVAKRKHDCCIIDSDVLKTVESFTFPNSREGFDMLLSKISELGIPKDKIRVGLEATGHYSSNLAHFISEHDLPLNIFNPLLTNRYKQGFSLRKTKTDKVDACAIAQMIVSGKASQTYSPLLYHNEELKSLSRYRSQTIQKCSKLKISVSRLVTILFPELEGLTSSIHLASIYALLKAYPGHEQIAHCSMKRLTRLLSDASQGRFDKSKALEIHQAACRSIGTVSLSASMELVHAITDIEVLKQHVAEIDEKIKEMADQEESSIIDIPGIGYTLCASILGETGDFKRFPDVDKLLAYAGMSPSKYESGGFHSNHNKMEKEDPPICERHCSSLPAWLHRMCQSSKNTLKRNCPNTSLTKSLCPMWPRN

SEQ ID NO: 457823 - protein, 382 aa, unidentified
MLGSGRVSTDQAGYTALRTYAKNWPERVWAIEGSNGAGRPLAQRLLEAGEHVVDVPAKLAARVRLFDTGHNRKTDARDAHSIAIVAVRTRTLRVLRRDGELEALRMLCDRREELTRLRVQTVNRLQRLLAELIPGRAKKDLTALQAKAMLTTVRPRDIAGKTRRRIAVEELADLIAVEAKMKKATAELKVLVKARGSQLMDLHGVGPVVAARTLADVGDIARFADRNRFAPWTGTAPLDASSGEQNRHRLSRAGNRRMNHMLHIAAISQIRLDTDGRAYYRRKRTAGKTKMEALRCLKRRISDAIYRQLVADAQRAAHANAPDLVGTGPGGHCGATKESSAVDLPPHIDTSDQPLPGPANPTLQPPKPVRKSPRRKSPQTTA

SEQ ID NO: 457824 - protein, 346 aa, unidentified
MNHTILGLDLAKSIFHSVELTPAGKRPMRKKFSRGQLKKFMANRQLSKIAMEACASAHYWARLFEGMGHEVILLPPQHVKGYLRNQKNDYNDALAIAEACHHGAIRPAQIKSVAQQDEQALLRIRTQRVGQKTQLSNQIRGLLGEYGIVFPQGMAQLFRQIPLILEDAENTLTPQFRELLHREYEHLLIIKADVDWCNQQLEQKSKQDLVCKRLMKMPGFGPVVSCAVKTWMGDGQQFNKGRDASAALGLVPRQHTSGDKIRLMGITKRGDKHLRSTLVNGARAVVSHAEKKTDPLSQWINRLRETHCFNKVVIALANKLIRMAWVVISRGEDYHAYPGLAQGQST

SEQ ID NO: 457825 - protein, 337 aa, unidentified
MIVMGLDQHRAQITAEWIDTDTGEVERARISPAHREPVRRFLRRFRGCELEVALEATTGWRFVVEELRGVGAGVHLAEPAETAGLRGPKKRAKSDRADARHLRELLMVSRVPESWIPPDHVLDLRARVRLRHTLSEQRGEWQQRIQAVLYHHGLPQRRALMTGEGRAWLAGQPLPETAREQVTVAIAMIDALDVQLAPIEKELRAYARRQPGCRALMAHYGIGELTAVTILAELGDCRRFSSSRHAVRYSGLDITVHESDRRRAPGHLSRQGPPALRWALFEAAQVARRTGSPDRDYYAQAAERLGSNRACLAVARKLLKRSYHTLRELGEEALQPA

SEQ ID NO: 457826 - protein, 370 aa, unidentified
MKKNSTVAQSPKRAAARKGGPITIGMDLGDKISRYCVLGESGERLSEGSVATTRKAMAQKFAGMRRCRVAMEVGTHSPWLSRWLTGLGFEVIVANARQVQLISASSRKNDRMDAHLLARLARVDPQLLRPIRHRSEQAQADLMTIRIRAALVEARTSLVNAARGFAKAQGDRLPACDADAMGVEKMEALPAEMRERLRPLLEQVESLTEKIQESEAKIEQIARTEYPETELLQQVSGVGTLIALTFVLTVEDRDRFQKSRDVGCYVGLRPKQSESGQSQPQLRITKEGDRYLRTLLVQGAHCILSRRGPDTDLKRWGLKLAERGGKNAKKRAIVAVARKLAVLLHRLWVTGEVYDALRNNQAARSSKQAA

SEQ ID NO: 457827 - protein, 372 aa, unidentified
MGHHSEAFIGIDTSKLRNAVAIAEGGRGGEVRFLGEFPATEAAVRKLVAKLAAKYRRLTFCYEAGPTGYWLYRLIKSLGHECIVVAPSLIPKKPGDRVKTNRRDATSLAKLSRAGELTAVWVPDERHEAMRDLSRARQAAKKDQQGKRQQISSLMLRLGRIYPGKKTWGPAHMNWLMAQKLEHREQRIAFEELLEGMRQEEERVQRLEEAIRDAVPEWSLAEVATALQAVRGIDLIAAVAVLAELGDLSRFRNPRELMGYLGLVPSESSTGDTVKRGGITKAGNGRARRILVEAAWSYRYPPRVSREKQPKVAAAPRRVREIAWKAQARLCGRFRSLERKGKRRTVIATAIARELSAFIWAINREIMGGRQA

SEQ ID NO: 457828 - protein, 347 aa, unidentified
MLHAGLDLSRKRLDVCLLSDDGEHLDQLAVPPDVDSLRTLARRIEEVRGEPICAVVESMTGARIVHDTLEQEGWEVEIADAQKVKGLAPLACKTDTIDSKVLAVLSHRDLVPAIWLPDPRVREERELARFRLHLVKHKSALKCRIHSTLINFGRACPVTDLFGAEGRRLLERLEVPEPWRSNVTASVCLIDDLEHQIAVINRRLKEGHADHPYIPLLMSVPGIRWVLAFTIAAEIGEIERFASPEKLAGYTGLCPRVNQSGERDRRGPLTKHGPTYLRWALLEATMHALRHPAYAERYQRTKRRLGKQRGAKVAQVDIARRLAHAIWHMLSRKERFAPRGAAFRLAA

SEQ ID NO: 457829 - protein, 402 aa, unidentified
MNAVGIDVSKGKSMVAIMRPFGEIVSAPFEIKHTASGINSLVELINSVEGESRIVMEHTGRYYEVLAHQLSEANLFVSAINPKLIKDFDNDSLRKVKSDKADAVKIARYTLDKWQNLKQYNVMDELRNQLKTMNRQFGFYIKHKTAMKNNLIGILDQTYPGVNTYFDSPARSDGSQKWVDFASTYWHVDCVRKMSLNAFIDHYQNWCKRKKYNFSQSKAEEIYGKAKELVPVLPKDAITKLIIKQAVDQLNSASTTVESLRTLMNETASKLPEYPVVMAMKGVGTSLGPQLMAEIGDVSRFTHKSAITAFAGVDPGVNESGSYEQKSVPTSKRGSSDLRKTLFQVMDVLIKTHPQDDPVYQFLDKKRAQGKPYYVYMTAGANKFLRIYYGRVKEYLSSLPES

SEQ ID NO: 457830 - protein, 364 aa, unidentified
MKLYGAIDLHSDNNVTVVIDEQDRVVYQKRLPNDLALILKELSVYQSELEGIVVESTYNWYWLVDGLMEHGYRVHLANTAAIQQYEGLKYTDDHSDARWLAHVLRLGVLPEGYIYPRADRPVRDLLRKRSQLVRQRTTNLLSIQNLMTRNTGGSLSASQRTTNLLSIQNLMTRNTGGSLSANQIKGLDVQQVDELLPNGDLALAVKANLSVMCSADEQTEILERTITQRVKLRPQFCFLKTVPGIGQILALTIMLETGDIRRFASVGNFASYCRCVGSQKISNGKRKGKGNTKNGNKYLSWAFVEAAHFAIQFNSRIKSYYQRKKAKSKGVVAIKAVAHKLCRACYYIMRDRVAFDLTKAFGQK

SEQ ID NO: 457831 - protein, 331 aa, unidentified
MKESKIILGCDLSKDKIDIASIEKQSNIVLSEKEETNNLKGFKNIIKPYSSLLCEIHVIVEATGNYHIKFTDFLESKSIKFSIVNPLRIKRFAQMKMLRLKTDKADAMVIAQYGVEQAPEAHRPLTAAQKELKALGTVRNHLIKQRTMTKNLLHSHKLLSTTTKESVSAIKSTLKTFNAEIEKLDDKIESLVKDNYNETYTKLLSIKGIGPKTASGTIAYLGNLKNFDSYKQIASFIGITPAIRQSGKSLNKTTGITKQGNANLRTLFYLAALSASRSNLACIELYNRLILNGKQKKTAIIAVANKLIKQLFAIIKYNRTFINNYNIKLVS

SEQ ID NO: 457832 - protein, 348 aa, unidentified
MSMVGGLDLHRGQITFDVVATDTGEVWRGRIWQPDRERFRRWLRVELAERAHREPVSLAVEGCTGWRYVVEEIASAGFEAHLAEPAETQAARGRKRRAKTDRTDAKLLRELLAAGELPESWIPPTCVLEWRERVRLYKTLLDQRTQWTQRIHAELFQHGVPLPDGEIRDVKTRIWLADPGLAVSPAAHRRLAAGYAMIEATDTVLEPLRAELIGFGTRQPACRALVKTHFGIGGLTAVAIWSELGDCRRFTRSMQVVRHAGIDITVDQSDRHRAGGHLSHEGPDTLRWALYEAAKSSSRRAAPDHAYYAAVKQRHDGKLAAIAMARKLVRRCYHTLRAVDLKEVYAIP

SEQ ID NO: 457833 - protein, 348 aa, unidentified
MMIIGCDFHPEWQQVCIFDPQTGEITERRLVNGNGEAERFYRGLPAPSLIGLESCGNSQWLIDLLQRLGHEVWVGDAAQIRASYVRKQKTDRRDAAHILKLLLEGRFPRLWMPSAEQRDLRQLLLHRHRLVEIRTRVKNGLQHLMLNRGVQKKHKLWSQAGQQALRELPLQGWAAQRRQDLLALLAGLNQQIGELDQAVAAAAAEHETARLLMTQPGVGPITALAFAVTLGDASRFARGKQVASYLGLIPREYSSGGRQQLGSISKQGNRFVRLLLVEAAQSVVRLDERFRKQYQHRCHRMAKGVAKVAAARRLAVRLYWMMRTHTAYPEIVHIESSPRVALTVRSGE

SEQ ID NO: 457834 - protein, 321 aa, unidentified
MQMFHLGIDVAKAKLDCALRRPDGRYKDKVVDNNLKGFKTLIEWLEKQGAELPHICMEATGIYWEEVAEYLAMQGMTVSVINPAQIKAFGTSRLVRSKTDKIDAHLIADFCFERSPDPWQAPSPGEQALRAMVLRLEALQSMRTQESNRLEVARDAVKAGIISHIEWLENEIELLAKLIHDHIDNDPTLKNKQALLDSIPGVGERTIAMLLAFYADPERFENARQAVAYAGLDPRQHESGSSIKGKPRLSKIGHAFIRKALYMPAMVTLYKTDWGKRFRERLVAAGKAPKLIIGAMMRKLLHVAFGVLKSGQMFNPALHGG

SEQ ID NO: 457835 - protein, 456 aa, unidentified
MPGSTSTRGRSSGQLNTINPNAAGLDVGSTFHVVAVPADRDEQPVRTFRTFSGDLHRLADWLKEAGITTVAMESTSVYWIPVFEILEARGFEVLLVNARDVKHVPGRKTDVQDAQWLQQLHQYGLLRGSFRPRDGVVRLRAYLRHRERLVEYAASHIQHMQKALMQMNVQLHHVVADITGATGMRIIRAIVSGNHAPERLAEFRDVRCAASEATIGAALTGNYRAEHVFALRHALELWDFHQAKIAECDAEIERVLRTLNEVRATPAEPLPAVRHAKAKNEPEFDTRPALYTLLGADLTQIHGFGAYTVLRLVAECGDDMRKWPTAKHFTSWLSLAPRNKISGGRLLSSKTRRSSNRAATLLRIAAVNVGRTQTALGAFYRRLAARIGKAKAVTATARKLAILFYQALRFGMTYVDPGASYYEERYRQRVIQHLQHRARHFGFALVADPSASGGVS

SEQ ID NO: 457836 - protein, 346 aa, unidentified
MPIVGGLDIHRKQITFDYLDTATGELQRGQIAPADRAHLAAWLARRFPGGQDADFALEGCTGWRYVAEELAAAGISAHVGEPAETAAFRGPKKRAKTDRADSRHMRQLLADGRLPQCWIPPSHILECRALLELYHDLRVEHTAWVQRIHATLFHQGAPQLGEQNLRTGEGVAALQAIAAAQLSPAGQLQVATALDMLAVLEGHLDVLRRRLLDAARHLTGAKVLRQRLYGVGPVTALALTCWLGGAGRFSSARKAVRFTGLDVTVYSSAGKRSPGRLSRQGPAVLRWCVYEAGKTHARASAPDHPYYAGVKDRIDGKRAAISEARKIIRQACHILAELGDDALTTT

SEQ ID NO: 457837 - protein, 363 aa, unidentified
MFTERTSVGLDVHARSVAAAAIDGVTGEVFQARLTPSYEHIGSWISGLPGPVAVAYEAGPTGFGLYRALTDAGIRCEVLAPSKLQKPAGDRVKTDARDALHLARLLRLDEITAVSIPTVDQEAARDLVRAREDCRGDLMRARHRLSKLLLRHGIVYYGGAAWTGTHDRWLRTEAAPQLTSRATRMAFDADYDHVLTMQARRGRLDAAIEEMAAASEFTQVVRRVSCLRGVSTLTGFALAVEIGDWNRFSGNTIGSFVGLVPSEYSSGSSRVQGAITKTGNTHARRLLVEAAWHHRPRYHVGAVMRRRWDQAPAAARARGDEGNRRLHQRWLRFGERRKRSTVANVAIARELAGWCWSLAVMND

SEQ ID NO: 457838 - protein, 411 aa, unidentified
MAAVACGVDWAQDHHDVAVVDHDGKVVASERISDSAEGLTILLRMLVEHDPTDAQLPIAIETSRGLLVAGLRAAGRKVFAINPFSVSRYRDRYRSSRGKSDAFDAMVLANILRTDIDTHRPLSDDSVEVQALRVLTRAQQDAVWEGAEVTNRIRTLLKAFFPMALSAFERGGRHRLDSAACRTILSTAPTPEAARSLTVRRLSSLLKKAGRQRGIDEEATRLHAALRQEAMHQPAAVERAMGLQLQGLLRQLDAICGTVAELEEAVETAFHAHPDSGIVSSFPGVGTQLGARFLAEIGDDRARFADARGLRAFAGAAPVTRASGKSSFVHARRAKNNRLATTGYVWALAAVRHDKNWEALYRARRDHGDRHTAALRRLFSIMLSKLHYCLKSGRVYNPAYAFTVGEIPAAA

SEQ ID NO: 457839 - protein, 349 aa, unidentified
MLIIGCDFHTRYQQIAMAEEETGELLLERRLDHQSGEAHAFYRSLQAPVRVGIEATGPIHWFERLLAELGHELWIGDSARIRASEVRKQKTDQRDAALILDLLLARRFPKIWVPTPSERDFRQLLVHRHKLVCLRTTLGNQLHALAMSQGLCRKKKLFTRKGRVELAGLTLGLWASRRRAELLKLLDQLESPIAELDRAVLEEAERREDAVLLMTHPGIGPVTALAFVLTIGPVTRFCCSRKLVSYLGLNPSEESSGGRRRTGAISKQGNTMLRWLLVEAAQRAARYDPTLRQDYQRLKFRRGHAVAKVAIARKLAVRMYWMLRSGADYARLVRMQGSPRATLVHASTP

SEQ ID NO: 457840 - protein, 342 aa, unidentified
MSTIQTIGVDLAKNVFSIHGVDAYGKCVLCKTVKRNKLLDTFAKLPPCLIGMEACSGAHHWARELLKLGHNPKIMASKFVIPYRQNEKNDANDAEAICEAVSRPKTRFVSIKSEEQQAVLCLHRIRQGLIKTRTATINQLRGLLSEFGIVMPQGRYSAQNTIGSVLEDAENGLPILARELLQDLSNKIQHLNLEVLHYDRRVSALIREKASAKTLMDIPGVGEHSASAIVATVNDAKQFGSSRQFAAWIGLVPRQYSTGGHVHLGRISKRGEKHIRTLLIHGARAVIARCKEKTDRNSIWLNQLVERRGYKRAAVALAAKNARIIWALLTTGKEYKINYVNG

SEQ ID NO: 457841 - protein, 394 aa, unidentified
MKALKSHVAGIDVHKEMLAITVLIGELDREPKEYQFESSTFTDDLMALGLKLKEMGVTDVAMESSGIYWKPVFNVFNPLGLKVVVANAAHIKNVPGRKTDMNDSRWIAELHRFGLIRASFIPDGEFQRMRLLSRHRTNLTEDLARVKNRIQKVLEDGNIKLSIVVSDIFGVSGLKVLKQIAGGYTHPNILITEVTTKIKRMEEMKKALTNCLTTEHCFVINVLMKQYEELKNRIEEGENELCKKVEPYAHLVEELDKIPGIDAILAMGIIAEASANMSLFKDERAFAAWSAVASGNNESAGKKKRAKCRKGNPALRKMLIQAAQGAIHCKKSFYRSKYNKLSFRLGSKNKAKVAIANKIARVVYKVLAGDQYNSSFKFFINLMNLFCVPGIRNN

SEQ ID NO: 457842 - protein, 339 aa, unidentified
MNNSVIGLDIAKNIFHLFTLLDDGKTLKKKLKRHELLAFFANYPASIIGIEACGSSHHWARELTKLGHEVILLNARFVKNYVVGNKTDFNDAEAIHEAVLRPNKRVVAIKTVAQQDIQLVHNIRKDLVDQRTALVNQTRGLLSERGIVINQGIEQLREQLPLIIEDAENSLTDLSRELFAEQYEKIKTLDAEIKAQDQRINRLCNANDLSKRFLDVPGVGPLTATIVAADIGDGGKGYKSSRDYAASLGVVPKQHSSADKQHYLGISKRGNRYIRTLLIHGARAVLKNCGKKTDKLSLWLQSLVARRGFNKAAVALANKNARILWAMASNGKDYEVLAA

SEQ ID NO: 457843 - protein, 318 aa, unidentified
MELFFGIDVGKFILDIHVNPLNQIFSVNNDQTGIKKLLKKINNYTKSEHCTKLIVCEATGGYENLLVDLLRDQNIPIHVAHANKVRNFAKATGKFAKTDKIDANILSDYAMVFKPKPNAYVIDKELKALKDLQIRRRHLMDDLIKEQNRLDKNIDKELAKSINRHIKWLKQEIKLVDRKIDAFILEHKDIKAQIDLITSIPGVGQITASAILTNLPEIKSVDNKQLSALIGVAPMNKDSGTKSGKRRIIGGRANVRNSLYMAAVASIRSNHMISKFYKRLRDKGKPAKVAIVAAMHKLLFIIKSVLKRQTVWIEYHEF

SEQ ID NO: 457844 - protein, 325 aa, unidentified
MNAVGIDISKGKSTVAILRPGGEVVASPFEVSHNPRELHELVTLMKSLDGDTKVVMEYTGNYYPPVALFLQKSELFVSDVNPILVKDYSAKSLTVRKGKTDKKDSLKLAAFALDRWNELPLFSSQSDTRTLLKAFNRQYNQYIKLKVMLKNNLISILDQTFPRANTLFTTPARKADGIRNGSILCSNSHIASAFHRNLSPLFPNAIFYGAENTATISPTQKPFACNCAPSLVDSEAAHVLVSAAILQLNTLNETLSSLQREMDLLASSLPKYDTVMDLYGVGSVLGSQLIAEIGDVSLFSNKKALVGFAGIDAPPFQFGSFNPQA

SEQ ID NO: 457845 - protein, 403 aa, unidentified
MNSVGIDISKGRSTVAVMRPFGEVVISPFEVRHTDSELSELARQLKSLDGETRVVMEATGNYHTPVAKLLHDAGLYVSVVNAKLVHGYGNNDLRRVKTDKKDSVKLANYGLDRWLTLTRYVPEEDTRLLLKNCYRQYRQYSKVQTVLKNNLISLLDTVFPNVNRLFSSPAREDGSEKWVDFVAEFWHCRCVSEKSEKAFTNKYQRWCRKYGYNFNEAKAHTIHAEASGHIGVMPMSETTKLLVEQAVAQLRATSTALAALKHEMQALTSMLPEYPVVMDMFGVGPTLGPQLIAEIGDVRRFYSKKALVAYAGLDAPPNDSGDVTGRHKSMSKIGASSLRRTLFLVMSVYLQTAPLDEPVYQFMDRKRAEGKPYRVYMMASANKFLRIYYATVKAYLESLEHTA

SEQ ID NO: 457846 - protein, 444 aa, unidentified
MASRVSRSLRTNHGPLGCRAGIALTRGRFRRVLNDSHLVFPQEALPPTAERSVLCMSPRSQIECKLTARASSMPCRSQRPRTSQSGAAVTAREEPEQLRGPTARRARIARLGGRESHRLQRGDTMYVGIDVAKAELVVAMGATGPVTTFPNDDVGLTALVGAMREAKPTLIVLEATGGYEIPCTAALAAAPLPVAVINPRSVRSFAKATGTLAKTDRIDARLLAQFGERVQPEPRPLPTAAQQELEALVTRRRQLLEMRTAEQHRLGQALGGHRQRVKQSLRKHLAYLDRELRITETDLRDRMQASPVWRARDDLLQSVPGIGPTVSQTLVAELPELGRLNRREIAKLVGVAPLNRDSGTRRGRRMTLGGRASVRAILYMACLSAIRHNPVLRAFYQRLTRAGKVKKLALVACMRKLLTIVNQMVRTGQHWSPSPSIACQLQPT

SEQ ID NO: 457847 - protein, 403 aa, unidentified
MRSVLSIDVANGKSEVLLITEHGEVLIEPYEVNHCLNELNKLKDKINSFNLDDLTIFMESTSTYHLPIQRFFTNNNFKVQVINPILGKNNTRNLRKTKTDIEDCYNLADLFFKNTVKIYTKEMNTIYSNMIELSRQEKHLTENIVRSKNRFKQIIANAFPEYIKCFTSNDIYGETSLNFIKEFPHADIIKSKRIDALANNIYKSTKGYLPYSRCLTKAKKIKELANNSYPGIEVNSCEVNNLINIVDIIIYNSNKLNEVKQDIINLAKQTPYFNIINSIYGIGETSTAQIIAELGDINRFENIKQLNAFCGLDPTIVQSGKSINYNGPISKRGNRNARKILFITCCSIIRSSVLHNIDTDILVYYRKKQAENKHFKECITACSTKLLRIIFAMCKNNSLYVQK

SEQ ID NO: 457848 - protein, 371 aa, unidentified
MYIVGIDIGKNHHEASIVSPEGKQIGRSLRFATTHKGADSLMSFIFKNIGNSPCVFGMEATGHYWYPIYSFLKAKGYTIYVINPIQSDSLRKMYIRQTKNDSIDSFLIAEVIRFGQFGTTSMADENILAMRQLCRYRDSVISSRTEIKLRIGTIMEQIFPEYEKQFSSLWVSTSMGILEKYLTPENIENAPIDELFEIIKDKSHNRLTRAKAISIKEAAADTFGIKIAQDAFSFQLKQLIDRMNFLDKQIEALDCQILEYYEKFDCYLHTIPGIGMIAAATILAEIGDINRFKSSSALVAFAGIDPTVRQSGEFSSTHNHMSKRGSPYLRHAIFLAATTCSFHNSPLNAYYKKKRDQGKHHLTATGAVVRL

SEQ ID NO: 457849 - protein, 386 aa, unidentified
MRKPNDLSRSLSVLDRNSTLIAVIEMSQSSWLIAGIVPGVERQPLKKLAVDESALLKILHRWREEAEKAGHKIERIAVAFEAGRDGFWLARWLRARGIEAHVIHASSVAVSREHRRAKTDRLDTELLKRAFLGWLRGERDHCKMVAIPTITDEDAKRPNRERESLVGEQSRIVNRMKAALARLGIRGFNPKLKKAGERLEGLRTPEGEPMPPNTLAELKRDMERRRLVRNQIREIEKTRLERIEQAPSDGPHVMVRLLARVIGVGVETADMLVQEVLIRNLRDRRAVARYGGLTGSPDESGKKRREKGLARSGNARVRRGMIQLAWRFLMFQKDSALAQWFYARTKNAPQTRKTMIVALARKLLIALWRLVREGTIPEGIVLRPAS

SEQ ID NO: 457850 - protein, 373 aa, unidentified
MYVGLDLHKDSITVAYAIDAGEVELLGKTGTTGADIDRLCTRLQSKAPHVRVVYEAGPCGYGLYRQLVQKGFDCMVCAPSLIPRKPGERVKTDRRDAIKLARSLRAGDLSAVYVPGIEDEAFRDLARAWAAAREDLRHARQRLKSFLLAHGVRYTGSANWGEAHRRWLGRCSFPSVWQHLAFDEHRRTIEDRLAQCARLETALREAVISWRFYPVVLAVQAMRGVQFVTAVGMVSEVGDLSRFEHPRQLMAWLGVTPSEHSSGGKRRQGSITKTGNSYARRLLVEAAWSYRHPARVSPEIQARLEGLPKAIIERAWDAQVRLCRRFRRLTARGKPINITVVAIARELAAFIWDISRLAMALAILRSKLPAPCT

SEQ ID NO: 457851 - protein, 343 aa, unidentified
MKVTIAGLDIAKNIFHVVCFDERFKELRKRMLRRNQVLLFFANLPACRIGMEACASSHYWGRELVKLGHEVKLIPPQHVKAYLRGNKNDYNDARAIAEAATRPSIPGVSVKTAEEQDIQAVHRMRSQCLRDRTALVNSTRGLLSEYGIILPKGIASLRNRIPELLEDADNGLSMLFRHLLARRYDQLVELDSHIEFYTDKLERLGQQDEACQRLQTIPGFGPIVASAFRSAIGDGSAYSRGRDAAASLGLVPRQHSTGGKNVLLGISKRGDRYLRSLLVHGARAVVTQAARKNDKLSSWLNRIVKERGWNKAVVAMANKMARMGWAILRHSTIYHALPAVPAC

SEQ ID NO: 457852 - protein, 387 aa, unidentified
MEKKKGRVVGLDVHPDSFAGAVVEGTDPAGARVLSSSTRVELERLEQWALRHTREEDTLVLEASGNAFSVAMRLRAIGRKAEVLDSHRAGKVGKVYCANDRVDAVKIARIYLSALSPIVWQPDEKTLERREIFSAYQAVVKESTRAKQQLRSMLNEHCVRLEKGFRLCHPNALTRLLALREWTPARRMLLQQLHDTLVGARTRRTLLRRHMAQEIVAEEALLRLTRLCGINLITLYGVAAAVGDVRRFPHSKKLVAYLGLNPSVSQSGNFEGSGALKRHGRGALRALLIQSGKKLLEVNNPLQKWGLAVASRRGRNKAAVAVARKLCVALWHVLMGHAIGALERLDTLQTKLSKFATEMGPAALRAFGYNNKADFVEKKLYVLRSYP

SEQ ID NO: 457853 - protein, 355 aa, unidentified
MSTMYVGADIHKSTSTVVVKDEQGRTVSKWVGHTSAENLSTQVMAIPGTVHMTFEESPYAAWMWDTLHPLVDKLVVCDPRRNKLIAEDDKSDEIDAETLADLLRGGFLKPVYHGSHSSRDIRHLVKSYQQVISDRVRIKNRLCGLFDGYGVRTNAKERYTCDQKARETLLKKLPGRGIQQRGRRLYVQLDLLDELVDEALRDMIAEARRFDAFEWIKSIPGFGDKRAAATIGWVRTPHRFRGKRQFFKYVGLAVVHRSTSDWRQGAKGLERKNNGQTMGLNNKYSRPLKDIIKGAAVTAATTDPAWGAHEAALIDDGMDREIARLTIARKLASILLSIWKRGEHYNAEKTVLRGS

SEQ ID NO: 457854 - protein, 343 aa, unidentified
MAQPTIIGIDLAKHVFQVCMVTPTGTLKTNTTVARGKLLALMARQPPALIFMEACGGAHDWARRFCALGHEVRLLAPQYVTPFRRGQKNDPNDALALTEAGQRPHIPTVPIKTVEQQDLQALHRVRERLVKNRTAVVHQVRGLLLEYGIVIPQGIARLRKRLPRVIEEADNGLSFLMRDLLQSLQSELSALDTRITEVTGQLARLSHELDACQRLQEMEGIGPLSATALVAALGNGHDFQTGRQVAAWLGLVPRQHSSGGTTRLGGITKGGNNYVRRLLIHGARSVISHVRDKPDAKSAWIRQLVTRIGVNKACVAVANKMARVAWALLHTGEHYRKPAVLLV

SEQ ID NO: 457855 - protein, 367 aa, unidentified
MIVNEVAKNVEKIISIDTAKNSFQVLVVNHKTGKKKNTKVQRSKFVEYILKQGPCLIFMESCSTSQHWARLFESFGFTVKLIAAQHVKAFLRNRRVKNDERDAEAIYICGIQPDTKFVRIKTVEEQTVALLHTLRKAAVSQRVELSNRIRGLLAEFGIVVARGKGSFNSEIEAMFNECEKIHDVYLRAAITSLFEDYHRLEQREKELSEKIEALNKDNELVKIALTCPGVGPLTASAIVAEVGDASQFRNGREMAAWNGVVPSQHSTGGRSTLGGITKTGNRYLRTLLAQCACAVIQNASRHLEQGKDTHLDRFALRLKLNGKPVKKIMIAIANKIIRILWAMLTQRKAFENKAEETSDTSAELRLA

SEQ ID NO: 457856 - protein, 385 aa, unidentified
MLMNSDGEILIDTKEIKHNLEDFEKAKEKIKEINPENLTVFMESTGTYHLPVERYFKENGFNTLVINSLTTKNNYDTIRKTKTDKKDCYRLAKLFFVNEVEYHELSKKDLYANLKAMTRQYFYLLQQNVSCKNRYKRLLNICFPELEKIFKSTRIYDDTALNFIKEFPHAEIVKEKRIDALYNNLYKTNGRNLNFYKRLSETIKIASANSYPGVDKEHKDVKNLSDMAKIVQNNNNVINELRDKMIETAKKSPYYEIINSFYGIGEILTAEILGELGDITRFDSPKQLIAFCGLDPTIKQSGKSINVKGAISKRGNKYARYILFNCSQMVVKLGASNYPEHPVYIYYQNKKAEGKHYYESLTACSTKILRMLYSMCKNNKQFLEN

SEQ ID NO: 457857 - protein, 383 aa, unidentified
MDHKRGNQSREQSAQVPVLYVAFELANSSWKLACSDGSKLRHVNVTSGDLAQVQGAIIGARRHFGMGDEVRTVSCYEAGRDGFWLHRYLQSCGIDNVVVDSASLEVNRRLRRAKTDRVDAGKLLSMLIRYHGREKQLWRVVRVPSREDEDARHLHRELEALKRERTRYRNRIHGILIQQGLRINNPSKKKFVHELELLRTWDGRELPPEMKVRLVQVHERLRMVEEQISCLVKEKTLRLKAETDRMAQVTQLLRLPGIGPVSSWTFVMEFFGWRRFRNRREVAALAGLTPTPYDSGKRLREQGISKAGNRRVRTLAIEIAWAWLRFQPRSKLSLWFLERFAGGGSRMRRIGIVALARRLLIDLWRFLEYGVVPEGAQVRPSAV

SEQ ID NO: 457858 - protein, 371 aa, unidentified
MSEKNIVYVGLDVDDTAFHGAGINRATGEIVEFKCKPDHGVVRKKLINLFTDKANIRLCYEACYIGFSLCRFLRKSGIHCDIIAPSLVPVKTGARVKTDRLDALKLAELYAKELLTPIYVPDETDEEVRDVVRSRNFLVRQRKMLKTHILATCKRYDIDFKVESGFKTYWTDQHISWLKQRVTTLEREICKIDIELLLAQYTSLSESIEKLDAEITRVAQSERYKKAADALSCFRGIDMLSSMTIICELGDIRRFEHPQQLTSYVGLDVAEYSSGGKERKKGITKTGNKHVRTILTESCQLASSPPILSKRIKQSRANQPQKIVDITDRCMNRLHKKSTRMLYAGKHKNKIKTACAREMLGFIWEALRAVA

SEQ ID NO: 457859 - protein, 511 aa, unidentified
MCSKVIQPAARRDVERSPQATVNNFAATKFATGDKSKLGRIAPRRARSSVAKPARLKLRTPADAAARPKTSERTAPCEGSYTSTTRGQPTMPRKARMKNYTELTHFAGLDWAKDHHDANIMDRQGQVVARFRFAHTGPGWQQWREQIRIYPALGVAIETSQGAAVEQLLASGVTVYPVHPKAAKAYRQRQAPSGTKDDELDAWSLGDALRLDGAQWRALSPQDALVEELRLLCRDEAELIGQRTALVNQLQAALHEYYPAALEAFEDWTAPSAWAFVETFPTPQRLVQATGHRRRVFLHTHKLWRPGTAERRLAIFARADQFCGGEAVTRAKSRLAVALCRSLAALQLQLDDYRAAIEKLFAEHPDHDVFGSLPGVGVTLGPRLLSGVGADREQYPDVQGLQCVAGTAPVSFNSGQIQRAKIRWHCDRFLRHTVHLWAGCSLKSCTWAAAYYAAKRKDGMSHACALRCLAQRWLKILWKMWQTHTPYDPELHARNQQRHGSWVLQLNPKTT

SEQ ID NO: 457860 - protein, 317 aa, unidentified
MNSSIATVGIDVSKDELVVFALGKRLGGFPNTQAGLSKLRLKLPEGAQVHLEASGGYDRLARALLSQWGFEVRLHNPRKIRRMADGVGFSAKNDQMDAEVLALVGPLVCSKAAKNSQQERLCDISRTIKSLRDEVARHRTQMQASSIPQQCRAAYQAVNKAIERQIQKLEMEFIKLVRASEFRERYELALSVPGIGQATARVLACELPADLSGFSTKTLSSYAGLAPIDDQSGSRNGPRRIRKGNVQIKAAMYMPAVWAISRLGWANELYTGLRAKGRAHGQAIVAIMRRLLVIATAVILRGTPFQGAQPRQIIRSN

SEQ ID NO: 457861 - protein, 339 aa, unidentified
MEIALMGVDLGKNSCSVTGLDATGQVVLRRRVHRDGVVKLADKYPNCIVAMEACCGAHFLGRLLRAGGHEVRLMSPEYVRPYVKAQKNDDRDSEAIAEAATRPTMRFVELKSEEQLDMQILHRARDRLVTERTALANQIRAILLERGITIPQGRQKLESELPKVLEAHGLMLSDRIRTLLQELNEELQTLTRRITSFDKEFETFSKSNDACRRLSTIPGIGALNATAFVAAIDNAQTFGRGRDLAAWLGLVPRQMTTGGKPKLLGISKRGNSYLRRMLIHGARAAMPHIARLDTATGAWLRRLLAWANPNVVVVALAAKMARVIWAVLQRRTTYQQAAP

SEQ ID NO: 457862 - protein, 457 aa, unidentified
MNATGKPRAKTMTSIPVLNANAAGIDIGSTRHFVAVPEDRADPCVRSFETFTSDLNDIADWLTSCGVQTVALESTGVYWIPLFQILEQRGFAVYLINSRDWRNAPGRKTDVEDSQWLQYLHACGLLRASYRPKQEVCAVRTLLRHRDGFVAAAASSTHLMQKALTQMNLLLHNVISDITGTTGLAIIDAILAGERNPAVLAQLRDPRIKNTKEVIAKSLVGDYRREHLFTLKQALKVFRTYQTLITECDEEIEQLFAEFDSRPPSPEESPAGSGPRKRDRGNVLKFKDTNLEEELHRLLGVYMTRIPGFGTLTVFNLIGELGCDLSAFATFKSFSSYLGLCPGNRITGGKSMSSKTRNVPSRAAKLFRMAAQSLAHSYSCLGDYYRRMCARLGRKAGNTATAHKLARIYYHLLTTHTEYDETAFDREKQRLNQRRERRLHKEAALLGFELTPKTVNA

SEQ ID NO: 457863 - protein, 348 aa, unidentified
MRFYTKSHKHFCGIDLHTKMMYVCILDADANIIIHKNIPTNGKTFIALIEPYKDDIVVGVECMFSWYWLADLCAREKIEFILGHALYMRCIHGGKAKNDKVDSEKIARIMRGGDFPLAYAYPAELRPVRDLMRRRSHLVRIKSEIQSHIAITNYQYNLEPFEKNIVHKGNRQGIADHFRDASVRLNVETDIAVMDALHDQIKHLENYIIKHAKHYDGRMLYRLKTVPGIGDVLALTIMYEVLSVERFPTVQRFCSYSRLVKCANESAGKKMGTSGSKIGNAHLKWAFSEAAVLFIRGNEQAQKYVAKQTKKFGKGKALSILAHKLGRAIYFMMKRNDVFDMKYFFRTN

SEQ ID NO: 457864 - protein, 446 aa, unidentified
MSDRSGLSRGDRNRNARLARLRQLLPPGNAIVGIDLAGDKQAAVVTDHDSRVIARRRVTARAWELGELLDWALARAIAAGFASVTVACEPTGHRWRVLDQLAAERGLALVCVQPLLVYRSRESEDLTRDKSDPKDAVLIARLASELRCYEPERADAVWARLRHLGARRAQLTTDATGQVNQVRDLLECAWPAVLGASGSPFRSATWRAAVAVTLDRRAGDLARVRRLGPSRFEAVVRRELPRWGATRPCLRIVRAVFAALADGAGVIAHRPGALERAGLAMADWHDTRERLASTETRMVTVLDDLGLTGLVATIDGLTAVGVAAILAESGDPVRFATPRSLVKHAGLCPRDNASGAFQGKTPISGRGRPGLRVAAWRAVWAAMPNNPVLAAKFTHLTTRDENRLARQQARTACAAALLRWIHVVVTRRVAWDPVIAAGTTQLQRAA

SEQ ID NO: 457865 - protein, 348 aa, unidentified
MKNKSFVGIDISKNVIDVSIFREDTNIKMFPHEVFNNTRKGFGDMCSWLKKSRVVLSQALFGMEFTGCYSLDLEKFLTSKNYSFCMLSTRIVKHHPMGTIDKRDKNDSAKIADFLYRYDGTECAKPYKLPSKAMQQLKQLVNERKFLVKQRTNFMNRMQMFETKEDSAMYESYIKKLNHDIEKIDQEECELMSKEEDVFDTFQNLLTIPGIGFVNATNIIAITRNFTAFDTARQYARYVGVAPCSHTSGTSVKWRARPSAHCNGQVKADLSMAALRAVEYDVEMQMFYNRKLGGRKDSDTKRKALNAVKFKLIRRMFAIGKQKRKWEVLNTSDDRKNLHIEKSKASEL

SEQ ID NO: 457866 - protein, 335 aa, unidentified
MKNLSAVGIDTAKNSCYVVGFSATGEVVGRRRFGRVGLKRWLAKQKPLTVYLEACAGSHAWGRYCRGLGHEVKLIAPQFVKPYRLGEKNDWNDALAIGVAGRQPTMRFVGIKSEAQQALQSLHRVRQRAQRERVAIANQMRGLLGEYGLVVGRSMRVLRERLMEILADEENGLPGMLREVLWDLYEDWQRVDARVAKYTKQLETLAAGDVQARALLALPGIGPVTATALVAEIADARVFRNGRQLAAYLGLVPRQHSTGGRERLLGISKRGNGYVRQLLIHGARTVIQHLGDKTDRTSCWTRALIARRGINKATVALANKQARWAWVVMTRALEA

SEQ ID NO: 457867 - protein, 348 aa, unidentified
MTITTVGIDLAKNVFAVHCVDQNGKTVLVKSRVTRAALPGLIAGLPPCVIGMEACSGAHYWARLFRQYGHEPRLMAAKFVSPYRMAGKSGKNDAADAQAICEAVRRPHMRFVPVKDESQQAMQCLHRTRQGFIEEKTATYNRLRGLISEFGVIAPQSTDALRHIVFEQKNSLPLQVQQCVDDLLEHVARIEDNIAEYDRILSRMAKTDHRSQRLMELKGVGPTTACALVASIGNAHDFKNGRQLAAWLGLTPSQYSSGGKSKLGRITKAGDSYLRTLLVQGARSVLIGAEKGLIYSVVGSAHWSNAEDTGALLLPSLPKMQDCAGHHCITVMISGCTQPAKVQSYMTI

SEQ ID NO: 457868 - protein, 390 aa, unidentified
MQIIADRPEAPSAIRSDLGAIFISLELSRSTWLITSLSPGSGEKMSKHSVPAGDICVLLARFSELRQKAFARTGKSFPVIVVQEAGLDGFWIHRVLQNEGIESHVVDPASIATSRRRRRAKTDRIDGEALLRALLAYKRGEPRVCAMVKAPAPEEEDRRRLCRERKVLIAERVKHVNRIKGLLFSQGVSGYEPRRRDRRRRLDELRTGDGRPLPKHLKAQISRELDRLELLLEQIKAAEIERDALLAAQQVAAPASAAMLLDIKGIGPEFAAILWSEGLFRHFDNRRQIASFAGLAPTPWRSGSVDREQGVSKAGNPRLRSTLIQLAWLWLRHQPQSVLALWFEERVRRNGGRLKKTTIVALARKLLVALWKYVTAGVVIEGAVMKAARR

SEQ ID NO: 457869 - protein, 314 aa, unidentified
MAEGMMFVGIDVSKSWLDIAILPTGENWRMENTGKGFDLLIEKLRPSSLDRIVVEATGGYEAALVEALAKAGLPVCRVNPGRVRRFAQGMNWLAKTDKIDAKVLARFGEKAQPRLLVLPTEAEKHLSALVKRRKQVVDMLTAEQNRTELAESDVFESIATVIQFLQKQLAELDAQIQELINQTPDLKRKQELLQSVPGVGKVLASTLVSQMPELGHSDRKEIAALGGLAPFNHDSGRKRGRRMIRGGRPFIRRILYMATLAATRFNPVIKRMYDRLVSSGKCKKVAIVACMRKLLTILNAILRDQTSWQSVIPA

SEQ ID NO: 457870 - protein, 358 aa, unidentified
MMVGSNVKYIGLDVHQEAITVAVRNGAGKLVMEAILATKASTLLEFLDGVQGELHVTLEEGAWAAWLYDVLKPRVRELVVCNTRRNALLKEGSKNDKVDARKLSELLRGGLLRAVYHGENGLRTLRELARSYQVISKDLQRVMNRIKALYRGWGIPCTGTQVYGRRYREQWLQKINEAGVRRRAELFYQQLDGLQGLRRTVRGELLAESRKHAGVKLLRQIPFIGPLRAAQLVALMQTPHRFRSKRQLWTYSGLAVVTHDSAQYRYVDGQLQRSKKPQQIRGLNQNHNHAMKEIFKSAALSATCRPGPFQDFYAGLLARGMKPELARLTLARKIAAITLTLWKKGECFDAGFVKRQAV

SEQ ID NO: 457871 - protein, 392 aa, unidentified
MRERITEMQVMIEGQSHFQPCGLSYWGFANLNKGVGSMTASYDYHIGVDYHKSYSHLVVQDSAGKTLRSGRVRNDRQSLGGFLERYRENSHAVLEATRNWMVMYDWLDDICDDVVLAHPLKVKAIADAKIKTDKIDATVLAHLLRADLVPEAWAPSEKSRDLRVALRERMFYERLRTMTKNRIVTVFDRYPEQTAQLKKLGDLFGKAGRIQLAQVNVSEIDRIQIDRGLAFIGDIDGRIKQSEATIRAMTRANANVKLLKTIPGIGEFFARLIDAEIDDIGRFRNPKKLAAYAGLVPSTYSSGGKTFHGKIIKQGNKWLRWAFVEAVSPAIATDPQLRAQYEQLKIRGTNKARVAIARKLLTIAFQILRDQRAYEPRGTSPTEGASTTSRLS

SEQ ID NO: 457872 - protein, 343 aa, unidentified
MQAVTTIGFDIAKSVFQVHGVDAHGNVVIRRQLKRRQVLSFFQRLPPCLVGIEACASSHHWSRELQALGHMVRLMPPAYVKPYVKRQKNDAADAEAICEAVTRPNMRFVPTKTPEQQSCLMLHRTRHLFIRQQTAVINAIRAHLAEFGIVAPVGRRGVEELLKVAADAGDQRIPEIARACVAALGAQLRMLKAQILEFDRRIMAWHRSNAASKRLDAIPGVGPALATALVACVADPRAFRSGRDFSAWIGLVPKQHSSGGKDKLGGISKKGDRYLRSLFVAGALAVIRYAKIHGTGQRPWLTALLARRPTKVAAISLANKLARMAWAMMARGEHYKQPAALAA

SEQ ID NO: 457873 - protein, 351 aa, unidentified
MMLLGVDYHPSFQQIAFFIEETGECGERQLNHSAGEAERFYRELHSRGVPVRVGMEATGYSRWFERLLAELGFELWIGDPAEIKTRRVKKQKTDRKDAQLLLRLMREHTFPKIWVPSPENRDLRQLLWHRHRLVQMRTRMMNQLQALAMNEGVRRRGKLWSAQGRVELEKLSLAPWASRRRRELLELLDRIDPVIEELTTAAEREARRRPEVARLMTHPGVGPLTALAYVLIIGTPERFQRGKQVGTYVGLIPSEDSSAGKQRLGHISKQGNSLLRFLLVEAAQAAARSNTHWRRRYVRLAMRRHRSIAKVALGRRLGVRLYWMWRNGHDYSPSLEFGSYVGQPGTVHGVK

SEQ ID NO: 457874 - protein, 343 aa, unidentified
MKLMRIGVDLAKNVFQIHGVDCHEKPIWRQRLQRECWLQTLLEKIEPGCEIGMESCGGAHHWARQLEARGFRVKLIAPQFVKPYVKSNKNDANDAEAICEAMSRPSMRFVSIKTVEQQDIQATHRIRSGLIEQRTAKANQIRGLVSEYGLVAPKELLSLRRAIPCWLEDAENGLTLRFRHLLDGLWGDLRTLDERVRELDSEISVIAANEPSAQALQQLRGVGPMIATALVVAIGDASQFANGRQFAASLGLTPRQHSSGGKDRLLGISKRGDTYLRTLMVHGARSALRTAKSKDDRLSQWAVRLAERSHVNVAAIALANKTARMAWAMLRNSTEYQPERAAA

SEQ ID NO: 457875 - protein, 425 aa, unidentified
MKNNFLSTLFVGIDVSSKTNVLCALDFSGNKLLNLKALNNQPGAESILDSILDCLNSNSLQYVVIALESTSFYSTHIANFLSSHEVLLAYKPLVYCLNPKVVANYRKSFIDMDKTDPMDAYIIADFARCGRITSQPWRGAQFLALQRLTRHRLHLIECITREKTYMVSNIYLKFSELAVLDKKDKPFSNTFGVTSAAVLTEFLSLEDITYLSIEDLVAFVSTKGKNRFSDPYKTAKLLKKAARDSYRLDKVLYEPLNASISSSFNLIKAFEDEIKTIDKAIGKNIKGLNTTEFQSLTSIPGIGPVLASGILSEIGTITSFNSHDALAKYAGLTWRVKQSGDFCSDETKMTKTGNKYLRYYLIEAANSIIYHVPEYKDFYNKKYSEVTTHNHRRALALTSRKLVRLIFGLLTKNQIYSSNKVGESQ

SEQ ID NO: 457876 - protein, 390 aa, unidentified
MKNRSDLNQSYAAFDQASTIACVVELSSSSWLAAGTVPGVKRQPLKKLPAAPTGEGLLALLGRWRSEAEKAGSPIKRTVVAVEAGRDGFWLSRWLRDRGIEVYVIHAASIPVPREHKRRKTDRLDTQMLMRALLGWLRGEVGHCRMVQIPTLEEEDAKRPAREHDCLVRERTSIINRMKSMLVCLGITGFNVKLVKAAQKLAGLRTPNGEPIPPNTLGRLYRDMERLAMVRKHIKAIEDARVKRLKEKPDHGANPLVLMLAKIFGLGLETADLLVHEVLARNLRDHRAVGRYGGITGSPDESGKTRREQGLAKAGNWRVRHSALQLAWRWLTHQKGSALAQWFRARTADGNPIIRKKMIVALARKILVALWRYVTTGELPAGVVLKPAAL

SEQ ID NO: 457877 - protein, 438 aa, unidentified
MKVMYERVAGIDVHKDMIKVAVRSPGDKPWTRKTEILTFRTFYGVLRAMARELRRRGVTHVVMEASGVYTEPVYYALCEEDFTEVAVASPAHAKALKGHKTDARDCARLAELSGCGLLQGSYIPAAGLKEMRDLSRYRMKTVQARTPEIQRLARALESAGIKLGSVASEITGKGPVAMTGALISGERRGAVMADLARGRARTAGKLADLSMALEGRFTDHHALMCRLHLDRITALDAAVADLEARIAATAADWQREIGLLKTIPGFGGIVAWAWIAEIGPAPHQWFASHRKLASRVSPAPGSNVSAGKRKHGRTGDAGTYIKPMLIQAAWAATQVRGRLQARYNRLVRRLGGPKNPAAKKKAIVAIAHTLLKIACTVLKTGTGYQEPGADFCTRRESPGHRQAWLERQIQKLHPGCTVTITISPPPGHAPEAALTPGA

SEQ ID NO: 457878 - protein, 335 aa, unidentified
MWYIGLDVHWRTSSVCILDGNGNRVKQETIKGSWQKLLGYFKKLPRPFVVCYEASCGYGHLYDQLRKMARRVVVAHPGQLRLIFRSKRKNDRIDAERLAKLLYLGEVPPVYVPSLEVRSWRQMIEYRRRLIDKRTRCKNGIRTLLRSFGIEQPRGLWARKRRSWLQSLSLPTAWAAVQRDLLVEELDQFDGQVDRITCALDQMGRNHPGVIVLQTIPGVGPRTSEAVVAYIDDPERFERNRQVGSYFGLVPCQDSSASVNRLGHITKEGPATPRKFLVEASWQVIRRCPVARAQFDRIAAGKPDRRKVALIATAHWLLRCMHSMLRTGEVWRHVA

SEQ ID NO: 457879 - protein, 352 aa, unidentified
MSMLAGTVGAVIGLDTHRDHHTVAVVDPTGAALTSTELPTDAFGYRRMLAFARDHAPGRRVWAIEGTGSFGAGLTTYLLEQQEWVVEIDRPARPARRNGSKTDELDAVRAAREALARDHLAQPRRRGDREAMRVLLTTRAGTVTARTKAICQLKALIVGAPEPVRNQLRRSTTNAQLDRCARLRTLPQHNIEHRCTVRALRTCARQALFLEAQASDLETELDELVTAAAPELLALPGVGVITAAQILISWSHAGRIRNEAAFAALAGVAPIPASSGQIVRYRLNRSGDRQLNRALHTIVLSRLAHDSATKTYASRRTADGKSPREIKRCLKRAVARQVYRLLERTATQAPAS

SEQ ID NO: 457880 - protein, 389 aa, unidentified
MIYVGIDVAAEKHACCILTESGKVLKQFTFSNDMPGFEKFHKALLTPSETKIGLESTGVYGNNLAEFLRRNGYETHIFNPLLVKKSIQATTLRKTKTDKSDAKHIAQYTKEHSQPNPKISYHTSELKSLSRGRFSLVRERSKVKAQAKGLLVQLFPEFSQIFSDIFGAAASAVLRQLPSARMIAQCPVDVLTDLLRTASHGRLGKVKAELLIDLAEHSVGIQSMALELQMQMLLQQIDLFTLQINRYEAAIKSEMETIQSPITTIPGIGCVLGAAILSEIGDIHRFTTPAKLQAYAGVDPSVGESGTSVSTPGRMVKHGSHYLRWALCQAARCVSLYDPIFAAYMKAKRDEGKHYCVACSHVAKKLTRVIYSILKNNTAYSLTYSQIGA

SEQ ID NO: 457881 - protein, 368 aa, unidentified
MLFIGMDVHKDATVFCLFDPAAEPKAQYRHATVPTTREGLESILAPLNRNCRVAFEVGLQAQWVAEIVRPLTTDLQVANPSKMPWLFRDGRKNDKLDARKLATLLYLDQLPRVHLPRAEVSIWRSLINHRRARIKRRTMVKNQIRALLRARALRCPCKSLWTRKGQAWLRTLVFDPVCVHMMQGLLEELALIEGHIDGVEVQLDGIARTQPAIALLRTIPGIGPRSAEAIVAYTDDVRRFGNRKQFASYFGLTPTQDASGRVDRHGHISKRGPSVVRWVLVEATHQVVLRCPAFRAFFERIVRGKPDRRKRAIVAVARKLLTIVFAMWRDGTPFDPARVSPPAENKKPAPQAANDPKEKPEMTHKPAA

SEQ ID NO: 457882 - protein, 409 aa, unidentified
MIVGIEWRYYFLTHSVMATSIFHRNFPQVQELEEKCQQARYIIGLDVHKKTTAICVIDSDHADQPVYQQKRVKNNQLLEKIQSFPGKKLVVSEASYGWFPLREALESLEDVTFIIFDARKTSAWIESSGIKNDKIDAQVLAFATLHGGISRLTVNQPCREEKEHFKLVNFRDQLVCQRTSVKNQLKALDRDYGINPYTGEQIEKSQIVKDMEDCLLDQLRFLNEKIQSVEKTMDNLSRDDETISLLKTIPGIGSITAFALRWKIGTIDRFASSAHLSSYFGFGLRQQQSGEHFVKGKITKTGNPLIRKLLVQGAQVIRFQRQDLVELYFPKLGQEKAMKDFRHANKVVIALARKNLTFAYQILKTSQAFDLNIYRQKRAVSVNIPVVSSIPQQPSVETEGAGSKAAELV

SEQ ID NO: 457883 - protein, 342 aa, unidentified
MQITTIGLDIAKNVFQVHGIDAAEKVIVRKQLRRGQMLAFFKALQPCLVGMEACATSHYWARELRKLGHQVRLMPAKDVKAYVKRNKNDAADAQAICEAVRRPTMRFVQIKSVEQQGQLMLHRARDLLMRQRTQLINALRAHMAELGIVAAQGREGVKELLKIIASEQDARLPVDAHASLVVLAAGLQALQTMIGSIERRIIAQHRSDEASKRLRSIPGIGIVGATAIAATVPDPKVFRSGRDFAAWIGIVPRQDSTGGKQKLGPISKQGDQYLRRILVVGAHAVLKRARHQPEKYPWVTRLLERRPFRVVAVAVANKMARVAWALLARGGSYRAPALAAAA

SEQ ID NO: 457884 - protein, 413 aa, unidentified
MQVLFARCAGLDVHKKTVVACVMLTLLTGEVRKQVRTFATTTQGLLALADWLTNQQITHVAMESTGIYWRPVFTILEGAFTVILVNAQHMKAVPGRKTDVKDSEWLAELLRHGLLKASFIPPQPIRDLRDLVRYRQSLVQERTREINRLQKVLETANIKLTSVVSDVMGASGRSMIQALIVGEHSPEGLAELAQGSLHKKIPQLREALVGRVDAHHQILLSHLLAHISFLDQAIFHLFFQIHSYLKPYDEAVELLVSIPGIAQETAACILGEIGVDMSCFPTAAHLASWAGVCPGNRESGGKRLSGKINKGNARLKAALAEVVWVLSHMKDNYLSAQYHRLARRLGKQKAVMAVAHSLLVIIYHMLRDKQPYRDLGATFFEMRDKERAVKGALRRLESLGYTITLQPQEEVSA

SEQ ID NO: 457885 - protein, 435 aa, unidentified
MEKIRTNVGGIDIGAKKVFTSIEGHPVVSHFTFTEDFLRLRDFLLENHVESVAMEATGVYWVILYEILEEAGIDVWLVDGRQTKQVPGRKTDVKDCQWIQELHSYGLLNRCLVVEADIKELRSYLRLREDHIESSSKHINQMQKALTLMNIRLKEVLDQIHGASGMAIIEAILNGERDKQVLVRLCHNSVLKNKKELVLKALEGRYTEAGLFTLRQAYDGYKFYLQQISECDQKANVVINRIGHFGDGQELKKKRKAIRHHRPTVENLGSNLLNIFDSKDATLIAGITDYTWMQLLAETGPDLTKWPSEKYFTSWLALSPGQHNSGKMRRNARRKGKPKAGQIFRIIAQGLINSKDVAIGSFGRRLRGRKGPKVAIKAMARKVAVLYWRVMVKGIDYAEKGIKQYEEQLILNKMKTFSRLAKELNINTADYMSVT

SEQ ID NO: 457886 - protein, 387 aa, unidentified
MQVISDRRETSGAIRNDLGAIFVSMELSRSTWLITSLSPGGGEKMSRHTLPAGDIGALLARFSELGQKALMRTERSFPIIVIQEAGLDGFWIHRVLESEGIESHVVDPASIATSRRRRRAKTDRIDGEALLRALLAYKRGEPRVCTMVKTPAPEEEDRRRLCRERRVLTNERVLHVNRIKGLLFSQGAAGYEPLRRGRRQRLEELRTGDGRPLPPHLKAQISRELDRLELLLEQIKSVESERDALLAAQQTTPKPAAMLLAIKGVGPESAAILWSEGLCRHFDNRRQVASYAGLAPTPWQSGAIHREQGVSKAGNPRLRTTLIQLAWLWLRHQPQSALAIWFKERVNRNGGRLKKTTIVALARKLLVALWKYVTAGVIIEGATMVSA

SEQ ID NO: 457887 - protein, 423 aa, unidentified
MMKLKYSICCGLDVHKNVIVATIVTTNKDGISEYLQKSFSTINSDIQRFHNWLIENNCYHVCMESTGKYWIPIFNYLENDIDVCLTHPKYVKAIKGKKTDKKDSKWIADLYKFDLVRCSFIPPKDFRQLRELSRYRFKLVCMKSSEKNRIQNCMTISNVGIASVLSDPFGKTATEIISYLLEHTADSMDEKAVRKLIKKGAKSKSDEIIEAIKGYTIETDQAKKLELAGGHLEYLDDMITQTEVELYVRIKPYYEFVEFVSTMPGMTELSSTIVLAETGVDMDIFDDAKHLCSWCGLSPANNESAGKKKSVRIAKAGDYLKPMMVQCALAAIKSKKQPYFAIKYGRIKKRRGHKKAIIAIARMMMVCIYHMVSEKKPFTPTDYEELMDPQNHVESVVLNENNVFAYLESLGYDSSKLVKRNDN

SEQ ID NO: 457888 - protein, 417 aa, unidentified
MIISKTERGRIVNIGEMLVGIDIAKQTHFARILLEDGRESKPFCFQNTREGFEALLSWLILNKERAGCSSIIVGLESTGHYWEALASFLDGRHSIRLVQVNPKYVKKTKELYDNSPGKTDSKDAGIIAMLIRMGKFQRLILPRGHFADLRCYSKLREQKVVELGVQRNILHSLVDTVFPEYGSIFKKLESKTSLYILKNFTTPERIIGTNIKKLISVLRTASHGQHSHAYAERLRSAASTTIGLREGIEAAAYAIRSSVATIENIQKEISVIEKELLCLLHKIPYAGQLLSIPGIGPISLAIVLGEAGDLHRYQKAEELIKLAGLNLFEISSGKHQGQKHITKRGRPLLRKCLFFAALRTVKTGGAFREDYLRHTKNNQMHKTKALVAISRKLLRVLFALVRDGVQYNQRKMELLAA

SEQ ID NO: 457889 - protein, 416 aa, unidentified
MNAVGIDVSSRKSTVAVLRPLGEVVCLPFDVTHDIAGLASLVEKLKAIDGETRVVMEHTGRYYEAVAKALHEAGFFVCAVNPLLIKEYGANSLRRVKTDKADAVKIARYALDNWADLRDFTPMDAIRYDLKTLNRQFQLASKQRTASANNLIALLEQSFPGIRKCFDSPVRSDGTQKWVDFAHSFWHVDCVRKQPFPAFCERYRKWCKRHAYLFKLSNAEEVYALAKRAVVLTPKSKVVKVLVQEAANQLISISRSVEVYRAEMDRLAAMLPEYPVVMAMYGVGKSYGPQLMAEIGDVRRFERKQALVAFAGIDPMPNQSGDKNVRSNKSSKRGSPYLRKTLFNVIRTYLQCAPQDEPVFQFLNRKRAEGKPFYVYMLAAANKFLRRYYAKLRDYFASLDTLQPVAPIPTILKATL

SEQ ID NO: 457890 - protein, 452 aa, unidentified
MARKKKLEMEIINPHAAGIDIGSRSHFIAVGQALEDVKEFGVYAEDLTAICNHLKSYGITSVAMESTGDYWQNLFAELIKNDFDVILYNGKFTKHAKGKKTDVKDARWIQKLHALGLLTSSFLPDEQTEILRTYSRQRGNTIHQAAAASRKMQKYLKFLNFRLDVVVKDVCGLTGMKIIEDICNGNLDPHQLAKHRHYNCRKSEDEIAKALHGNNREDFLFGLKQEFNTYQFLQKQLKACDKQIDAFIKNHFKARPELKKLKVEAKPYKRENKNAPDIKNFNQLAYQYFGGVDLLKIEGLSHSTVLSIMAEIGPDGFKKFNTSKQFVSWLRLAPNNKISGGKVLSSKTPKGSNRLKIALRQAANAIGNLKDTHLSDFFKRVAFRKGRQAAVSATARKLGVIIWTMIVKKIEYQPPREYLFLDQKRKLGLAKRIKKQIDKFDLKPEDVGFVTN

SEQ ID NO: 457891 - protein, 466 aa, unidentified
MPENREKTNPADRDMEIEGLPMVRANVAGIDLGSQKHWVCAPKPGGQGREIKSFGATTPELEKMAAWLKERNVASVAMESTGVYWIAPHEVLEGHGLEVVLVDTRQLARVPGRTKKTDPVDCQWIQRLHSCGLLMGAFRPAEQVCMLRTLVRDRAVLVAETGDWLRRMQKSLDQMNVRVHRAVSDIDGATGMAILRAIVGGERDARQLAKLRDPRCRQSEEAIAEQLSGHWRADHLFSLEQALKMYDGIQERMAAYEREIMRMLAEMEREDCRGKEAPQLHNANKAKAIKKRGEEPLRQALYRASGVDPTGIDAIGVETVLLVQSEYGADLSMFPTEKQFVSHLTLAPHKPTSGGKPVQKQKNRRGSASTRVAAGLRMAALSLRNRKTALGAHYRHLAARKTADTAVFALARKLATLIYRLLRWGQPYVDEGAAAYEQRYQEGRLKRLTASAKDLGYQLTPKAATA

SEQ ID NO: 457892 - protein, 322 aa, unidentified
MAMLSFGGIDVSKDRLDVMILPEERRSSVSNDASGWAKLVEQLRGSSIAAIGIEASGGYERGVIRALLAAGIPLRQVGPFKLRQFARASGVLAKNDPIDARMIASFVGIMPTRPAQRQARAAERLTEMLAIRRQLSAEKIVVENASRLLEDVMLQRLSRRRIGRLSADIDILDKWMLEIVATDDALVHRYRLLCSMPGVGPLLACTLIALLPELGCMSRKQIAALVGVAPYAFESGTIKGRRCIWGGRAHVRQVLYMAAMSASNWNPVLKNFHHRLKAAGKLPKVVIVAVMRKMITTLNAMVRDDVAWADRLSGRHSVATAR

SEQ ID NO: 457893 - protein, 357 aa, unidentified
MPSSDVKYIGLDVHKEAIAIAVLNGAGKLVMESIVETKASTLLDFLHGLHGELHATLEEGTWAAWLYDVLKPHVLEVVVCNPRRNALLKEGSKSDKVDARKLAELLRSGMLRAVYHGENGLRALRELARSYEVVSKDLKRVMNRLKALYRAWGIPCTGTQVYSRHHREQWLKKIREAGVRRRAELFYQQLDGLQVLRRTVRGELLAESRKHQAVKVLRQIPFIGPLRAAQLVALMQTPHRFRSKRQLWTYSGLAVETHDSAQYRYVDGQLQLSKKPQLVRGLNQNHNHAMKEIFKSAALSATGRAGAFQDCYAGLLAKGMKPELARITIARKIAAITLTLWKKGECFDAGYVKRQAA

SEQ ID NO: 457894 - protein, 465 aa, unidentified
MPHPPGARLFKKGWRLRPAGGRELGRMARGAVYPMRLRLRLPEEGPLPYGRNEERRRNTMIFVGIEIAKRSHVASAVDEDGGTVVESFKFNNTASGFAKMLKRLRKADATPENSLVGMEATGRYWVALFDFLISHGYEAAVINPIQTDAFRGVWTVRKVKTDALDAAMIADLVRYKRYEPSALGDEATEELRNLARYRLSLVERSTALKNRATAILDRTFPELAGLFSNAYCPTHRELLQHCATPDQVLGTDVGTLERILREASRGRCGRAKAERLKALAKESVGVGFGSKTLAFEARLLMEELDFVQDQVKEVERELARLLERTQGKWLVTIPGIDVALASVIAGEIGDPNAFDDPHRLMGYAGMDPTRSESGETVRSDGHMSKRGPGALRWAFMQAADCARKNDPYFGDYYDRKRGVDGKHHYVALSGVARKLMGVALAVMKEGRPYEPAPPRNHRPGHLKEA

SEQ ID NO: 457895 - protein, 366 aa, unidentified
MKKNITLVENTNEIFKSQQLTIGVDLGDRTSHYCVLDEAGNVILEQRVATTPKGIQQIFSKISRSRIALETGTHSPWLSRLLTQLGHEVIVAHARNVQLITESTRKDDRLDARTLARLARIDPQLLGPVRHRSAKAQIHLTEIRARATLVSARTALVNAARGLTKSFGERLAKCGTEQMNREIAKGLSPELRDVLEPLLREIESLKERIAEYDRRIEQIAKEVYPEVALLKQVKGVGTLIGLTYILTLDDPHRFRRSRDAGCFLGLRPGRRNSGMSEPQMHISKEGDAYLRTLMVQGAHYILGPFGQDSDLRRWGLKLAERGGKNAKKRAVIAVARKLAVLLHKLWVSGEVYEPLRNNHEVVSAVA

SEQ ID NO: 457896 - protein, 412 aa, unidentified
MEVLYACCCGIDVHAQMLVACLIKNGHKQTRTFSTMTDDLLRLLDWLMAEGCTQVAIESTGVYWRPVFNILEGSLDVMLVNARDVKGYKGRKSDVIDAEWLADLLRHGLLKPSFIPPLHIRELRELTRYRESLVREQTAVANRIQKLIESGNIKLGQVISDALGVSGREMLRALAAGETDAKQMSELARRRMKRKKPELRRALAGRLTAAQRWVLAELLDQYERVEEAITRVEEKIREEVESASDPFVGEAIKLLDTIPGVGETVAQTIASEIGVEMEHFASDKRLASWAGMCPGNEESAGKRKRGKTRKGSRYLRAALVQAAWAASHQKGTYLAAQYHRLVKRMGKKKALVAVGHSILVIVYHVLNNRTSYEELGGDYFDRQQASKQRERLIRQLESLGLKVMVEEVTQAA

SEQ ID NO: 457897 - protein, 408 aa, unidentified
MEVMYERCAGLDVHKDTVVACARVVKDGVVSQEVETFDTTTQGLFALCDWLTQRSCTHVAMEATGVYWKPVWHVLEGHFELVLANAAHVRNVPGRKTDVNDATWLANLLAHGLIRASFVPPTQIQELRDLTRTRKQLVREQAQHVQRIQKTLEDANLKLASAVSNIVGVSGRAILNAIVAGETDPQKLVELTTGRLKASRATLVEALRGNVTSHHRFLIKLHLDQFDSLGRAIDAVEKEAGATLEPFRERAELLTTIPGVSDTVAQAIVSEIGIDMSRFPTVGHLLSWAGLCPKSDESAGKRRSTRIRKGGNWIKTILVQAAWAGAHKKDSYLRAQFLRLKSRRGPKKAIIAVAASILTAAYYMLRDGTEYQDLGPSHFDRHDRKKAIDRLVRKLNTLGCEVEIKTAA

SEQ ID NO: 457898 - protein, 416 aa, unidentified
MLFIGDDWAEDHHDIEIEDEDGVRLVRARLPEGLEGITRLHALVAEHAPSAWAELTAEQAVGRVVVGIETDRGPWVTALRAAGYLVYAINPMSAARYRERHATSGAKSDAGDAHVLAEIVRLDRDHHRPVAGDSELVDAVKLLARAHQNAIWERTRHVLRLRSTLREFFPAALEAFDDLTASDTLNLLGRAPSPALAAKLTRGQLAAALRAARRHHVEAKAVTLQAVLRVPALRQPPVLDSAYATIVAGQVRIIAALNTQITGLAEVMGEHFGRHPAAEIYLSQPGLGVVLASRVMGEFGDDKTRFVDTRARKNYSGQSPITRASGRKTVVLARYATNRRLGAALHMQAYAALTGSPGARAYYDELRARNIGHHAALRQLANRLVGILHGCLKTGSLYDEDTAWQHRRPDTADVAA

SEQ ID NO: 457899 - protein, 351 aa, unidentified
MSKRTNSIAVSTIGIDTGKNTLHMIGLDEKGVIVLREKVSRSRIAARLVNMQPCLVGIEAGMATHYMARELVALGHVVKQVPPAFAKPFRQGHKNDFRDAHAVAEAVQRPSTRCVPIKTDDQLDLQALHRVRSRLIGDRTAVINQLRGFLLEHGIAVRQGHRFLRQQLPRIVATRTDVLSPRMVRIIGDLIEDWANLDERIERVTDEIEGLARTNVSCGRLMTVPGIGPIIASAMVAAIGDGAAFAKGRDFAAWLGLVPRQMSTGDRTILGRITKRGNRYLRMLFIQGARAIQLHPASWAKHSFGPWLAAAARRLHCNVLTVALANKLARIALTVLVQGRNYETRIEPIPA

SEQ ID NO: 457900 - protein, 456 aa, unidentified
MEKKCFLGIDVSKGYADFLLLSNDRKVIEEGYTLPDNPKGRQKLKELVCLWQKQGLEELYCGVESTGGYEDNWFRYLRSTFIGEKVYTCRINPKGVKSMGDAALKRTITDAVSAENIASYMISFPHKLDYGIEKHLGNGGFKDGRQHLTTIRMIVKQKVQLNNQLEKLLYQHFAEILVYCRHGQPIWLLSLLVKYPTAAMLIKAGASKISSNKGISPEKAKAIIAKAKNSTQDVSPEIGRIISLTAKEVLHKNLIITKEKEYLTGLYKGAEEMVLLSSIPGVGLDSAVSIALEIEDVGRFETAKKMASYFGVHPTFKQSGDGQWGNHMSKAGRGEIRAVLYMASLSGSRYNPTLKKIYDRYRAQGMKHAEAIGVVMHKLLRMIYGILKNKTKFDADIDQQNQEKSAAKQDVNEQLERTDKKIKQLKKNRFQAVTNEAPISNRKEKAIKKQVASQTS

SEQ ID NO: 457901 - protein, 355 aa, unidentified
MKYYTSTTEFNCGIDLHARQMYVCVMDRQGKKLVHTNVKDNDFQYFLKLIEPYKHSLTVCCECMFGWYWLADACQAAGLTFVLAHALYVRAIHGGKNKNDRIDSEKLTHLLRSNLIPPAYVYPAQQRPLRALLRQRIFYVWRRAQLLARIHCHQLAHNRIPAKQSRWTRDEWEEQLLKAEIHPLRQLALSNDLAMIRHFDHQIFEVEKELYRQTKQVAGREYALLQTAPGIGENLGLTILYEIGDIHRFPTVKDFLSYCRLVKGTVASAGKIKGLRGAKLGNPYLRWAFGEAAIIAKRDHFRIRPLAQQLEARMQGNKFKANTVVAIKLARAVYFMLKNQTVFDPDRLVSALSRN

SEQ ID NO: 457902 - protein, 405 aa, unidentified
MTVMIGVDPHKGSHTAVVIGPGEEPLGELRVESSPGQAEDLLTWAAQWPERTWAVEGAAGLGRLLAQQLVAAGELVLDVQPKLAARVRLLQAGDTGKSDPHDAQSVAVAALRSRACRPVAAEGHTVVLKIWARRHRDLARARNQVACRLHAVLCELVPGGVRKQITAGQAASVLERVTLSGPIGAARRELAAQFLEDLRRIDGQLREANKKLAAAVRASGTTVTEVFGVGPVNAGTIIGDVTDVNRFPTRDHFAAYNGTAPTEVSSGGRKVYRLSLRGNRRINHAIHMAAVTQIRHSHSDGRAYYEKKIAGGKTHKEALRCLKRKISDAIYARLRADARMAARPVGEGPGGQTGNGSDSSAAGSHPEHRLFGQATPGPATTLRPPARPARQQPRTRRLKDLEKTR

SEQ ID NO: 457903 - protein, 340 aa, unidentified
MKTIKFNNIAGIDISKNTFDVAFLINNKFDKSNIFFNNLQGFKKLISWLKSKNINLDSILFCMEKTGIYSIKLSNFLAENKYKIWLEDGIKIAKSKGFKRGKNDKIDAIRIAKYAFRFQDKLNLFDLNNEIYEKMNHLFSLRERFILILGILNKPLLESKGIFEKSFQLVLETLCLLPITYIKLSIKKVDKKLDDLIKENSEINVKYKIATSVKGIGKQTAIYLLIISRGFTKIKDSKKCSCFGGMAPFEFSSGSSVKGRTKISSLGNKKLKRLVHMGAISILNSKKGEEYDYYCRKVKEGKHKMKVINALRNKMLARVFACIRDNRMYKEDYNKYKKAS

SEQ ID NO: 457904 - protein, 414 aa, unidentified
MSLKIVYPICCGIDVHKTFVVACIATTNSKGVTTYKSHRYSTFTKGLKELLQWLIENNCQDVCMESTGKYWIPVFNILEKSCKIVLAHPKYVKAIRGKKTDKKDAKWIADLFKHDLVAGSFMPSLNIRQLRDLMRYRFKLTCFMSSEKNRLQNCLTVSNIQLGNVVSDTFGKSSQNILDKILENPLDTSFDIKPLIHGSMKDKIPELELAIDGYITPEQAGKLKIIKKHFEDLESRKEELEKLILALAGPYQQELDLILTAPSFKDIFSAIGIISEIGVNMEAFPSAKHLCSWAGLTPTNDESAGKKKSVRVSKAGCYIKPLLVQCATAVVKSVKHPEIRNRYLRLKKRRGHKKAIIAIARMLLSALYNMLKKKEPYNPDLYRKSDALPVDRDITLEQAILLAHSQGYRVKPVH

SEQ ID NO: 457905 - protein, 428 aa, unidentified
MHENNENNWRQRRYYMGLDWAKEKHDIVVVDGNGRIILDIIIEHAAKGWHRLRTKLTELAGPDLSVVAVTIETNRGPAVERLLELGCAVYPLNPKAAQRYRDRKAPSGGKTDHLDALSFADALRTDGHGWRQLKPEDPKIQELRLLCRDEINLIEQRTALVNQLQEALHEYYPAALEAFDDWTAPAPWAFIERFPTPQALKKAGKRRWEKFLHTHHLYRPETYQKRLDVFSRATEFCGGQAVTNAKSMLAVSLAKQLRLLAQQLKVYRQRIEEVFQEHPDNYLFGSLPGVGEKLGPRLLSEFGEDRERFVDHEALQCYAGTAPVSFQSGQIHKVKFRYACNKNLRAAVHLWSDLSRARCAWAQIYYQQKRLQGKSHACALRCLGQRWLKILWKMWQTKKPYNEQVHTRNQIEHGSWVLALKPVHSSAK

SEQ ID NO: 457906 - protein, 332 aa, unidentified
MNNYIGIDVAKATLQVYVPEGNQDIEISNTKTALKSLYSKLKKVYKKEQGKIVIVYESTGSYSTILEDFAQQQNIKCFKVGAVQSASFAKTIKNRSKTDKVDARMSILALAKDIKVPYKDEKAHQIRSLMKYYQSLAKEQTRISNYLEAAKYNKEDSFVIKRLEQKILKLKKEQKELITKILQIIEVNEKYKKAYENIISINGVGEKSAIILLYLFLRYPKASRQHITALCGLDPIHRESGTSLKKRAKISKQGMSLVRSILFMPVMTAVVTNEEMKYHYDKLLERGKCKSLAQIAIMRKIVLLAHSLYKNNEKYDSEMYLNHLDLKDGLMS

SEQ ID NO: 457907 - protein, 346 aa, unidentified
MKIVGCDFHPSFQQVAILDVLSGEVGELKLTHANGEAERFYRELESPVLVGMESVGNSLWFERLMEQLGHELWIGDAAQIRASYVRKQKTDKRDAGHILRLLVENRFPRIWVPSNQERDQRQLLLHRHRLVEMRTRVKTELQHLALNQGMQQKRHLWSVRGRADFEKLPMEGWTARRRADLLQVLAMLEGQVADLDEAVAQVAFSNAQARLLMSQPGVGPITALAFVVTMGDVRRFKRGKQVASYLGLIPTERSSGSKRRLGAITKQGNVFLRTMLVEAAQSAVRHDEQFQKEYAHRCHSKPKGVAKVAAARKLAIRLYWMLRTQTPYRAAVHNEGSSSHPVVGVS

SEQ ID NO: 457908 - protein, 398 aa, unidentified
MNKIVHYIGLDVHKETIAVAIAPADNTEVRRYGIIGGTLDALDKLLKKIQPENVELRLVYEAGPCGYVIYRHLRMKGYHCAVVAPSLIPKKASDRVKTDRRDAEQLARLYRAGELTTIYVPDEEDEAIRDLVRARAGAVIAQRQRRQRLKGFLLRLGFRYTGKSSWNEAHQRYLARLIMPQPVQQIVFQEYIEAINCETQRLERLTQAMEDALPGWKGEPVVRALMSLRGVQVIIGMTLVAEGGDLSRFDDPRQLMSFFGLTSSEHSSGDKRRQGGITKCGNSHCRRVLTEAAWQYRLPPKLAEGLQKRQEKQSKEVRAISWKAQQRLHARYKTLCAHRKKSVVVVTAIARELTGFVWAIVCQMKAPEKIKPRPALIPVASGRKYQLNPEKTFKKAKN

SEQ ID NO: 457909 - protein, 352 aa, unidentified
MIYSLGCDVSKDEHAVCLLRYELTTQQWEIIAHKSFANNPGGSKALLAWVHRLTKNHPAPVRCTMEATGVYYEQLALYIQECARQVHISVVLPSKAKSYQASRGLRNKTDKIDAFGLAVMGAERTLESWKGIDVFWRTLRQLTRTRSGLLKQITEVRNQLHALCHSGIAADQAEASLNRVLETIEEQQQQLQRQITRHLGSRKELAPQIACLKSIPGVGIKTIAVILAETLGFEYFTSIAQLMSYSGYDVVANESGKRVGTRSISKQGSPHIRQAMYMPASTIVRRKPPEIYQIYQRLVDKHSIKMKAHVAVQKKLLTYMYILWKSKQKYDPDVINQQRRIFEKARKHDQAA

SEQ ID NO: 457910 - protein, 351 aa, unidentified
MTEPATQVVFAGIDTHKVTHHAAVIDADGRRIADREFTTGSAGCRALIDWLGQWQVERVGVEQTGTYGAGLTRLLDQGGYQVFDVNTPDPAVRATVGKSDPIDAVMAADAVRTGRAQTVAKDRSGVIESIRMLQIARASAVKARTAALTQIGDLATTLDGGLRARLGSSNRQIAATALSLRPDRARLHDPTQAAKVALRSIAARIRDLDTEINDLDAALAQLVGAAAPRLLARPQVGIHAAAQLLITAGQNPDRIATEAAFARLTGVAPIPASSGQTRRMRLHRGGDRQANKTIHMIAVGRLKNHQPAIDYLERRLSEGLSKKDAIRAMKRLIARELHGALKADLKALDAL

SEQ ID NO: 457911 - protein, 344 aa, unidentified
MDHFAGLDLSVKETSVCILDDAGKILKEVKVASEPQALLKVLGNPAYCFKRIGLEAGPLSQWLFSALAEAELPVICVETRHMQAVLKAQINKTDRNDARGIAQMMRVGMYRPVHVKTLRSQKLRMLLTHRKLLQSKAIAIENDLRGTLRNFGLKVGMVGTVRFEARIQELVETVPDLAVLVEPLLVVRRALREQIVILHRRLLAIVRDDEVCRRLMTIPGVGPVVALTYRATVDVPARFRKSKSVGAVFGLTCSRYQSGEIDWSGRISRCGDEMMRVMLYEAAQSMLRSKKWSWLKAWAMQIARRRGMKKAIVALARRLAVIMHRIWVDGTEFRWTREPTAAAA

SEQ ID NO: 457912 - protein, 388 aa, unidentified
MQDVADQSAAPTTIGADLCAIFVSLELSRSTWLVTSLAPGRGEKMSKHSVPAGDIAALLARFSELRRKACARTGKSFPIVVIQEAGLDGFWIHRVLLSEGIESHVVDAASIATSRRRRRAKTDRIDGETLLRALLAHRRGEPRVCSMVRAPTPEDEDRRRICRERKVLIMERVQHVNRIKGLLFSQGASGYEPLRRDRRVRLDALQTGDGRRLPQHLKAQVCRELDRLELLLEQIKAVEAERDALLNAEQTKASAPPPMLLGVRGVGPEFASVLWSEGLSRQFDNRRQVAAYAGLAPTPWQSGSVNREQGISQSGNRRLRTTMIQLAWLWLRHQPGSALTLWFKDRMERNGGRRRKTTIVALARKLLVALWKYVSAGVVIEGALIRPA

SEQ ID NO: 457913 - protein, 483 aa, unidentified
MVLRVPIGSWMPYKRINIPKANRHGAIFQTLKFKIMSKSKTKKEKVKRISQLTVINPTAAGIDVSDTEMMVAYPISPEQLEIRVFGCFTRDLHSIANCLKENGTTTIAMESTGVYWIPLFLLLQEYGFEVYLVNAKHVKNVTGRKDDESDAEWIQKLHSCGLLSASFQPDNMVRTLRSMVRHRKNLVRTSSTYLNRMQKAMELMNIKLHTIISDIDGKTGLLILEAILAGERDPEVLADLRDKRIKASREDIIKSLEGHWTTEHLFELGQCYQLYCTHRQMIDECDKEIEKQLVIQIASKNEGVIPDIPKVKRKASGKHKVQFNLTADLKEILKVDVTEVFGINELSALTILSEVGCDMTKWKTEHHFTSWLGLAPNTKISGGKLISSRIMKKKHHAGQSFRMAANGLYNSKSPLGDYFRRLRAKAGAPKAVVATARKLAIIYYKMVANKEAFNPKALDDYRKKYNEKKINQLKRKIAQLEAA

SEQ ID NO: 457914 - protein, 407 aa, unidentified
MRYYIGVDWADEEDVVWVANDAGDKVLSRSIPHTVAARGEWGRWLRERQAEGIEIWAAIERPHGRIVDFLLDHAVVVYPINPKSLDRARDRFRVGGAKSDPFDAQVLALFLRSDHAQLRPLYPSSEAAQELKGLTRDHRRQVKLQTRLLNQLTVTLKEYYPRALELCEDLTASWARNFLATYPTPAAAAALTKANWQAFARAHRLGATRAAALWEILQQPQLPLPAHVVRIKARLLQALLRELTPTLATVAEYRQAIDDFFAGMPGADIARSLPVGKSGTTVPSVWAELGDNVDRWTSFRDLQGYGGSVPETVRSGKHLVIHFRFACNTTLRAAIHQLAFLSLPHSTWARAYYDSYRERGHTHHEALRALGAKWLKIIFVLWKRQVPYSETHHLANIGRQHLRQKAA

SEQ ID NO: 457915 - protein, 408 aa, unidentified
MELIYTICCGLDVHKRSIQACLRRLGPDGRIHQEVRSFGTMTRDILEMADWLAAAGVTHVAMESTGVYWKPIYNLLEGRFTLLLVNARHVKHVPGRKTDVKDCQWLAQLLQCGLLKGSFIPPRPQRELRELTRHRTQLVAEKTRAANRIQKVLEDANIKLASVASDILGASGRDMLRALIAGEQDPVKLADLARRQLRSKIPQLALALEGQVTEHHCFVLGELLDHLGYLESQIERFTRRIEEVSHPFASAIDLVTQVTGFDQRAAQNVVAEIGADMSPFPSEGHLASWSSVCPGSNESGGKRKSGKTTKGNRWLRSTLVQAAWAATRKKDSYFQAQYRRLAARRGKKRAILAVAHSLLVVIYHMLKTGSTYKNLGGDYFDKLNKNRLLPFLLKRIKDLGYQVTLEAA

SEQ ID NO: 457916 - protein, 331 aa, unidentified
MHYSHYIGVDISKNTLDAVIYAAEMRRSDTKHLTNDKAGLKELVAWAKTAGAKPKDMLICAEHTGVYGNELQLFCEKKGIALCLESPLQIKRSMGLVRGKDDQIDAIRIAQYAYDHKDKLKLFHRPSGNIITLANLLRERRLYVRQKATLMAQQAEIGSYEGATSRNRRESLIDKHAAAVRSVEKQMMEIIKGDKALKKTYDLISSVVGIGPITAIDTIVYTNNFQNFETPRQYASFIGVAPFDHTSGTSVNGRTRVSQFCRKQQKVSITMAARSAIVNDPWMKNYYHRKMKEKGEQRNQHGVVLNAVKFKLVLRMFSVVKSGTPYKVMKY

SEQ ID NO: 457917 - protein, 413 aa, unidentified
MDVIVERCAGLDVHKATVTACVRYPGPGRERAQALHTFGTTTPDLLALRDWLAAHRVTHVAMESTGVYWKPVYYTLEDGFPEVLLVNATHVAKVPGRKTDVADCVWIAPRLECGLLRGSFVPPPAIRELRDLTRYRKTLIQDRTREVNRLHKVLEDAGLKLASVATDVLGASGRAMLTALVAGTTDPGVLADLARGRLRAKLPALRQALTGRCRGHHAFLLTQLLAHLDYLDEALATLSQAIEGHLAPFAEAAARLQTLPGVKARTLEAIIAEIGVDMRRFPTAGHLASWAGLCPGNNETGGKRRRGRVRKGNRWLKAALVEASLAAIRTKGSDFGAVDRRICRHAGHNVAIVAVAHAILEIAWHLLTHGTTYHELGADYLHRRNTEQTARRHVRFLETLGYRVTLEPVPAAA

SEQ ID NO: 457918 - protein, 411 aa, unidentified
MKLFCGIDWAETHHDIAIVDGGGNLVAKKRITDDADGFAQLVELLAEAGDSAEHRIPVAIETPRGLLVASLRATGRSVYAINPLAVARYRERHSVARSKSDHADAMTLANILRVDAHVHRKMPADTELCQAIAVLARGQQDAIWRRTKASNELRSLLREFYPSFLAAFKGRFQIGIASLEARAVLAIAPTPAVANKLSASRIAAALRRAGRTRNIDQVAAEIKTALRAPQLRQLPLVESAMGRQTLALLAALDAACVSVDELGQAAAELFHTHPDYAVITSFPGLADSTGARVLAEIGDDRTRFADAKALKAYAGTAPITRASGRSISITRRRIKNDRLAAAGWVWGFAAMANHPAAQDHYRRRRDQGDHHAAAIRHLVNKFLGQLHYCLQNQQMFDTVKAFPPPNEGLAA

SEQ ID NO: 457919 - protein, 350 aa, unidentified
MFSVGIDVHQKRSSVCILDQQGKKVKEFEVVGSWDNLIEAVAKLPRPMAVCFEAATGCGWLCDKLAPLAARVEVAHPGQLRLIYRSKKKNDRIDAKKLATLLFLGEVPRAYIPDVAVRGWRGLVEFRCRTVQKRTRTKNALRTLLRGCGILGLHPRKGLWAKKGVALLRELELPTGQDRLRRDLLMEELDQLNRQVKRIEAELDRLADDHAGVALLRTIPGVGPRTAEAVLAYVDKPERFDRNKQIGAYFGLVPCQDASADKNRLGHITRQGPATVRGLLVEAAWQAVYRNGTLKAYYERIRQGKKERRKIALVATAHHLVRVMLSMLKSGEVWREEAAGATPQAAETAA

SEQ ID NO: 457920 - protein, 320 aa, unidentified
MKTVLGIDVAKAKLDLALKLLNGKFRTRVVANTPQGFADLLAWLAKHEVVELHLCMEATGTYWEAVAESLADAGFSVSVVNPAQIKAFGAASLVRTKTDRVDARLIAEFCLAQCPQPWQAPTKAMRELRALVARREALQAMRIQEHNRLEVAREAVRSGIEAHLEYLAQAIAEVQAAIRQKIDDDPGLKAQCELLDTVPGLGEKTIPVLLSYYGGPQRFDRAKAAAAFAGLDPRQHQSGSSVRGKPRLSKIGHALLRKTLYMPAMVTLTRTTWGRLFRDRLAAAGKPPMVIIGAMMRKLVHVAFGVLKSAKPFNPELHGV

SEQ ID NO: 457921 - protein, 421 aa, unidentified
MLGVGIDWAEEFHVVALGRPGSGVIEVVRVEHRPQAVSALAARIAGLEADPAEVRVVIETRHGLLVEALVGAGYTVLPVNPQLVSRRRGPARKKDDAEDARICCLIALDRHAGLRRLIPHGQLAGELRSIARDDERACRDERRLLNRLRADLLVTFPAALAIAGDDLGATRILRLLERWPTAQALAAASREEIIEFGRAQRTGYLARFADRIQAALAEDHFTAPAHLVRAKVDTIRLTARQLLLIDAQRRAWEKQMGELLLGAPGQQMEDEPGQAFPGGEIYLSFPGLGRRLAARIAGEVGEHIEQFTTPNSLQCYAGRAPVTRRSGKRDLVVAHRLACNRYLADAVHKWAFASLRRSAWARQFYDAQRARGKNHHAALRALGNRWLEVLWHCLTHDVPYDEAVHTANRNRALAAITSSAA

SEQ ID NO: 457922 - protein, 433 aa, unidentified
MLFVGDDWAEDHHDVEIVDETGRTLARRRFPEGLEGITRLHALIGEHLPEPSGPGESVPEVVVGIETERGPWAAALVGAGYRVFAINPMSSARYRERHSTSGAKSDAGDAHILAEIVRLDRAHHRQVAGDSALAEAVKLAARTHQSLVWDRTRQILRLRSALREFFPAALKAFDELDAPDSLQLLRLAPDPDTAARLTRRQLVAALAKAQRRAPEAGADRIQAILRAAELRQAPPVQAAFAAIVTAQVAVISTLNEQIDALGEVVAEHFGRHRDAELYTSLPGLGVILAARVLGEFGDDPTRYVDAKARKAYAGTAPITRASGTKKVVMARYARNKRLGDALQQWAFCSMRGSAGGKAYYKSLRARNIGHQAALRQLANRWVGILHGCLKTGHPYDETLAWNHQSAAPLDIQKPGMSAAAQGIRDLGIEIDLV

SEQ ID NO: 457923 - protein, 349 aa, unidentified
MTMVGGFDVHRKQITFDYVDSDGLVRWGQIRPAMRSTLRGWLREHCPDGDGEFALEGCTGWRYVTEELAAAGVGVHLGDPAEIATLRGPKKRAKTDRADARLLRTLLLEGRFPESWIPPAHVLEVRTLGRLYCTLMDERRAWQQRIHAQVFHQGCPPVKGLLSVAGRDALAAAELSTAGRQYVDTALQCIDELTIEIDPVRMQLINFARRQVGCQALQARQYGVGWLCAAIMWAEIGDARRFARSDQLVRFAGMDVTVYSSDGKRSPGHLSRQGSPELRWATFEAAMCAARRSSPDYTYYHQVAARPDHGKNPTLAVARKILRRCYHTLRELGDAALAMPVPEAKEVAA

SEQ ID NO: 457924 - protein, 427 aa, unidentified
MPPASTWVRGNIGWPSDRDAQSVQCFGVTTPQLEAMAQWLKQCRVTHVAMEATGVYWIAVYQYLERQGFQVLLVNARQIKNVSGRKSDALDCQWIQRLHTYGLLGGSFRPADAYCVVRSLMRYLDELIAGRTTQIQHMHKALLQMNLQLRAVLSDICGESGLAIIEAILQGERDPVKLAALAHRRVKSSRDQIAQALAGDYRSEHLFVLKMGWELYGSYQHQISQCEQELAAAVERLPDRVNLSAHPLPAKPKGKKIDQALRTSLYRKLGVDLTAIESIGTTVALTVVTEVGPDLSAFPTEKHFCSWLGLCPEHRITGGKILSSHTRRVVNRLSDALRLAATSLENSASALGGYYRRMKRKLDAPQAITATAHKLARIIYRMLKHGEAYVRQGLEDYERKNQEQSLKRLQRAAEAIGYKLTKSESFA

SEQ ID NO: 457925 - protein, 452 aa, unidentified
MQKKSVKMEVINPSAAGIDIGSRSHFVAVGQADEDVREFGVYNEDLKSIAHWLKEKGIETVAMESTGTYWQSLFAVLQSEGFQVILCNGKFTKNIKGKKSDVQDCQWIQKLHTLGLLSGSFLPDEATEQLRTYCRHRSNLLEQAADTARKMQKYLRLLNLRLDIVVNDICGLTGLKIIHAICNGETNPETLASLRNGNCKKSEEEIAKAMQTNGRNDYLFTLKHEHQMYQNLQSKITECDAEIEKMLNKQINEDQNKKQHYIEKKVHKRINKNTPKNMDINLLSYQYFEGVDLMAIEGVSYSTVLTLMSEVGTGIHKFETAKQFASWLRLSPNNKISGGKVLSNKIPKGSNRLKIALRNAANAIGNLKDTALSNFFSRISHRKGRVSAISATARKLAVIIWNMVVKNKPYVPLTEYQFVDQKRKKITAMKRLITKFEITTDDLNLQLKFNEL

SEQ ID NO: 457926 - protein, 312 aa, unidentified
MNQTITSVYAGLDIAKATLQLQLQSRSYDLSNSCGGHTQLIKRLAAVPGVQVICEATGGYERAVVAALHAAAIPVSVINPARVRQFARASGELAKTDPIDAAVLTAFGQAFAPEPTPPRTATELKLAALVTRRVQLLELRVAEAQRADTCADLDLRKLFTPWLAQMQKQITKIEALIEALLKTQAPLADQVRRLDDIMGVGRITAVMVLATMPELGQLNRRQAAALAGLCPYNRDSGQWAGKRCISGGRAEVRRALYMAALSASRSNHLLKPFYDRLIAAGKPAKVALTAVMRKLIVLMNHLLKNPNFSLAH

SEQ ID NO: 457927 - protein, 331 aa, unidentified
METDQYIGVDLHKASFQVCAITPRGERLWEARFARTPEGIAAFVARCTPRSAVAVEATTPTWHFVDQITAHVATVCVVDTRKTKLKAGYAAKTDRLDARRLADALRRESVVSIYVPPPAIREQRELARHRLMLTQMRTRVLQRMRALLLRQGLGDPPTKRLRSAAGQAWLDALELPSQAHRVLITLRQIERDLCAQLAPVEADIAREASADPIVQRLQQVHGIGPVLGLMLRAEIGDIRRFPTPAHLASYAGVVPQVDSSASRTHYGRITKDGSPWLRWALVAVGVQTLRRQDPRGRWGRKLAVRKGAMKAHVALAREMCREIMEAWRRAA

SEQ ID NO: 457928 - protein, 347 aa, unidentified
MEQYAGLDVSLDCASVCIVDAQGKIVKEAKVACEPEVLIAWFAAHGTPMARIGLEAGPLSQGLFAGLKAAGLPVELLETRHVRAAFKAMPVKTDRKDARGIAQLMRLGWFRPVHCKSLPAQEVRALLTTRKLLQAKRHDVEMSLRGVLRGFGLKVGPTTPKTFEARVRDLVAQHGTVQTIADALLKARAVLEQAFEALEKRLSALARCHAPTRQLMTTPGVGVIVALTFASAIDDPARFRSSRTVGAHFGLTPRKHQSGETDVTGRISRIGDHGVRVALYEAANVILTRAVRGSDLKNWALRVAKRAGMKKAKVALARKLAVVLHRMLADGTTFMASPAARAVAGAA

SEQ ID NO: 457929 - protein, 385 aa, unidentified
MKGKTFKPTDYEVFGGLDVDKRSISVTFTNHQGFIRSLRMPYSVEHLVNHVRKHFGDQKVAFAYEAGPTGYGLYDGLVAKAYPCLIASPSMIPKAPGQRVKTNRLDSRGQSENLRGGQLRSIHVPSALYRELRHLTQLRDTFVSEMVGMKQRIKSLLLFEGIEFPPAPAGRQWSFRVKDKLRKLECSKTVRFKLDQLLDSLEFSEKQVLKATREIRRFCRNDAELSQCIEYLMTIPGIGWIVASQLVARIGDWRELKNIRQLGGFLGLVPTENSTGERTDRGSITHTGDGRLRSKLIQASWSAIRQDGELREFFRSVCRTHARHLASRVAIVAVARKLSVRISVVLMKQRPYEVRQKVRSTPLTQEETSPQGTTRRQAEPGEKNS

SEQ ID NO: 457930 - protein, 313 aa, unidentified
MTDLYVGVDVSTAHLDVAVSDGTRLRVSNDEPGQQQLVARLTAAPPALVLMEATGGLERAVAAQLSAAGIALRIVNARHVRHFAKATGLLAKTDQLDAEALLRFAQTLRPEPRAIAPEQTVALQALITRRRQLVEMLGMERNRLRTAHHGVRKSLQASIRWLEKRLAEVDKNIDGALRDCGVWREKLELLESVPGIARVISVSLLAGLPELGELNRHQISALVGVAPFNRDSGNWRGRRSIYGGRPQVRSALYMAALVGARHNPVLRAFYQRLRQAGKPGKVALTACMRKLLVILNTMIKTGQSWHAQPLAGA

SEQ ID NO: 457931 - protein, 421 aa, unidentified
MYQLAGGPYTAYVGIDWADAKHDICVQAAGSEERDFDRIVHKPERIEVWAQALYQHFGGPIAVALELTKGPIVSALQKYDFFVIVPIDPIRLASYRKTFTPSGAKDDPTDAEFALDYMLRHPEKLKVLKPQSVPMRKLSYLVEARDRLKGDQSRFVNRLIQALKQYYPQPLDWFSERNTVVFCDFLIQWPTLQKVKRARKTKLETFFKAHNVRFAHVIEARIDAIKAATPLTHDEAVIQAHQLQVEALVEQLRLTIQAMKRFDTEIETTAEHLADYKLLFTPLPGAGKVLAPRLLAAFGEDRQRYPCAEELQQRTGIAPVTKRSGQSQWVHWRWQCSKFLRQTFIDWSAQTINKSAWAGAYYRQQRAKGSSHQAAVRALAFKWIRILYRCWQDRSPYDESKYLEALRRSGSPLLQQLAEAA

SEQ ID NO: 457932 - protein, 349 aa, unidentified
MSTIVQQVAGIDVAKDELVVSFSQKTADGIIEHVSSKVFKNHPKGFQELLLWSGKLFDAALPVSFVMEATGVYHEALAYFLDEACCKVCIILPNKISNYFKTLEIKTINDKTSAQTIARFALERKLEYWVKPSPVFRTLKQLCREREQLVAQRSLIKNQLHAEKTQGFPNEASIRRMKERIGLFNKQEQQIKHELMRLIAADPVLKQQIENICSIRGVGILTAITVLAETNGFELIRNKKQLVSYCGLDVQEKQSGTSVKGKPKLSKKGNRNLRKAMHFPALTAIRHDERMKAVFIRLVSRHGIKMKAIAAVQRKLLELIYIIWKTGRKYDPEYLQKPAAVQLELEQPL

SEQ ID NO: 457933 - protein, 345 aa, unidentified
MPHYVGLDVSVKETAVCIIDQTGAICREFKVVSHPEDLAKLLSADDLDVVRIGLEAGPLSQWLFNGLAQAGLPAICIETRHAKAYLKAQVNKSDRNDARGIAQMMRVDLFRPVHVKTIASQKRRALLTARRLLQEKAISIENDIRGLLRNFGLKVGAIVTGRFEARVRDLTADQPEIAEIIEPLLIARGKLREMFMALHRKLLALVKDDSVCRRLMTVPGVGPVVSLAFVCTIDVPSRFRTSKSVGPALGLTPILNQSGESHRLGGVSSSGDGLLRGLLYEAAQVMLTRVKKWSWLKAWAMAVARRRGLKKAIVALARRLAVVMHRMWVDGAEFRWTREAPAPSA

SEQ ID NO: 457934 - protein, 411 aa, unidentified
MEVIYRRCCGLDVHKQTVVACLWIWEGGRRRKEIRTFPTMTSDLLSLHDWLLAEGATHVAMESTGVYWKPIYNLLEASFTVLLVNAAHIKTVPGRKTDVKDCEWMADLLSHGLLRGSFIPPEPIRDLRDLTRYRKSLTDERVREVQRLQKFLESANIKLSSVAADVMGVSGRAMLEALIGGNTAPEALAELAKGRLRKKLPELRKALEGRFRPHHRFMISEVLIHLDFLDEAIERISKEVESRIAPFSSQVERMDLVPGINQRVAEGVLSEIGVDMGCFPTHRHAASWTGLCPGNNESAGKRKSGKTRKGNQWLRRYLIEASWAAVRKRGTYLSALYYRLVVRRGKTKAIVAVAHALLVIIYHVLKDQTPYHELGPDYFDKLNAAYAQRHHVKRLESLGFKVSLEPIAQAG

SEQ ID NO: 457935 - protein, 350 aa, unidentified
MVVVGADVHKRTHTFVAVDDVGRKVGEKVVAATTAGHAEAVRWVRERFGVEVVWAIEDCRHLSARLERDLLGFGQSVVRVPPKLMAQTRASARTRGKSDPIDALAVARGFLREPDLPVASHDEVSRELKLLIDRREVLVAQRTATINRLLWRVHELDPDHAPKARSLDLAKHRRILSDWLTTVPGLVAELARDELADITRLTEIINALAKRIGQRVRDVAPALLVLPGCGELTAAKLVGEAAGVTRFKSEAAFARHAGVAPVPVWSGNTAGRVRMTRSGNRQLNTALHRIAITQIRLDGLGQAYYRHRLAIGDSKTEALRCLKRRLSRVVFGHLHTDEQNRQPSCQPAAA

SEQ ID NO: 457936 - protein, 341 aa, unidentified
MLIIGCDFHPTFQQIAFTDTETGEYEERRLHHPREAEQFYRALAKGKARVGMEATGSFRWFRRLLSGLGHELWLGNPTEIRASAPRRQKTDKRDARQLMKLLLEDRFPQVWLPTVADEDLRQLLLHRCRLVRLRTKVRNQLDPIAKNEGLLGQRVGTKKGRQQLQALQLSGWYQQRRQDLFELLDQLERRIVPLNQAVQQAAEERGDAQGLMTHPGVGPVVALAYVLAIGDWQRFPRGKYVASYLGLIPEEASSSNARRLGHITKQGNSLVRRLLVEAATKAQQCDPAWHRQYLRLARNKHHGVAKVAIARKLSIRLYWMLRSGQGYEQVKERSSHAGQSV

SEQ ID NO: 457937 - protein, 339 aa, unidentified
MKLYSGMDLHSTNTYTAIMDENRKRVIDHRLPNQPKVILDFLEPYRDDIEGIVIESTYNWYWLVDLLQENGFRVHLANPSAIQQYRGLKHVDDRHDAFWLADLLRLGLLREGYIYPKEVRPIRDLLRKRAHLGRLRTSLLLSAQNIVLRNHAIKVASEDIKKLTTDLLTPHLQESEGLFLTGKISKELIDAFTRQIKAIETWVMKRLQPDKLFLNLLTIPGVGEILAMTILLETGCIARFPKVGNYVSYCRLVASQRISNDKVKGKGNDRNGNKYLAWAFSEAAEHARRHYPMCRAFYNRKLQQNNGKVAHCALARKLSRAAYYIQKDQVAFDETRLFC

SEQ ID NO: 457938 - protein, 339 aa, unidentified
MKLYGGIDLHASSNYLGIMDGQDKRVFKKKLRNEPQAILKTLEQFKAEIVGVVVESTFNWYWLVDLLMDAGYRVHLANPSAIKRYEGLKHSDDNHDAFWLAHLLRLGILPEGYIYPKEERPIRDLLRKRGHLVKLRTSLILSLQGIIQRNCGVAISGNNIKRVKENHVAPLLNGQEDLELSGSVSKETIDYLTRQIRQIERFIEAKAKLKEQFVYLQTICGIGKILSLTIMLETGSVERFPTVGDYVSYCRKVPSTWTSNGKTKGKGNKKNGNKYLAWAFSEAAQFARRYDSDARAYYQRKAARTNFMVAHSALAHKLARAAYYVMRDRVPFDPEKLFA

SEQ ID NO: 457939 - protein, 316 aa, unidentified
MEVLFDSCCGIDVHKKTLTACIMIGKDGKITKKEIRTFSTMTEALEEFRDWLKSEGVTHVAIESTGIYWRPVYNILENDVEVILANARHIKNVPGRKTDVADSEWLCKLLRNGLIQGSFIPPRHIRQLRDLTRYRSRLNNNIAAEKNRLQKYLEDANIKLSSVATDTLGVSGRRMIREIIRGNRDRDSLSELAKGRLRSKIEELKKSFNSRITEHHRMLIEMSLKHIEYIEEMIEKLEMEMDGLIKERKLDEAVELLDTIPGVDKIGASIIIAETGADMSKFPSASHLASWAGMSPGNNESAGKKKAEGPHQETSG

SEQ ID NO: 457940 - protein, 415 aa, unidentified
MNRLIERCAMLDIHKSQITACARVPDGDGGRRQEIREFAATTSGLLTLADWLRSFQVTVVGMESTGIYWRPVFYLLEDEFECQLFNARHLRHVPGRKSDVQDAEWGCQLLEHGLVRTSFVPPRPLRELRDLVRYRKAKIQERTREVQRVEKTLQDAGIELSSVASEVLGVSARKMLDALISGTHDPEILAELAKGTLRKKIPALREALQGRFSGHHALLVGQMLAQIDFLDETIATLSARVEELTAPFSRELELLDTIPGVDRRAAEMLLSEIGPDMSRFPTDAHLASWGGLCPGQRESGGKQHSGKTRKGSTWLRGTLTESAKAVVRTKGTYLSARYHRIKSRRGHAKATIATAHKILTAAYHVLNQGVPYHELGEEFFYRRDTENTERYRRRLIKQLERLGHKVTLEPLKEAA

SEQ ID NO: 457941 - protein, 352 aa, unidentified
MIIGCDFHPSFQQIACMEEETGEYLERRLSHRGEAEAFYRSLAGKAVRIGVEATGNDRWFHKLMSELGHELLVGDASAIHASAPREQRTDKRDARHILRLLMENRFPAIWQPSVGNQEQRQLLLHRCRLVRMRTRIKNQLDSIAKNEGLTGSRVWKAKRRQQIEALPLSGWYAERRKDLLALLDEMDKLIEPLDEAVRAAAEQNAEAQLLMTHPGVGPVVSLSYVLILGDWRRFPRGKQVGSYLGLIPAEASSGKHQQQMGHITKQGNTLLRWLLVEAATKAQSKDPSWHRQYVRLSMNKHHGVAKVAIAHKLAVRLYWMLRSGQNYRQIVERGSHAGQSDLAGGCGLRPIN

SEQ ID NO: 457942 - protein, 594 aa, unidentified
MGRARARKIPAQLVEDEEYQLRHERVAGIDVAKAKADVCTRLPPARDGGRRASRAEEVPARAADICALAGQLLADGVELVVMESTSDYWRIWFYLLEAAGLRVQLVNSRQSRQLAGRPKTDRLDAQWIARLAEMGLLRPSFVPPPEIRALRDLTRTRLQLVRDRTREWQRLEKLLEGALVKLSSAVWSLAKSQTARAILEAIADGESDPRALAALASGRVRGGRAAIEQALEGMQVRCHHRMLIRVHLDHVTFLDRHVAAVEDEIEAALAAIPAAWGTDASGETGPAAGHGQDAAALSAAERLAMIAIASPKLAMAIIAETGLDMTRFPTADHLVSWAGLAPVSRPSGPRDRKPGKGQGNSYLKGYCTQAATGAAPTSTFLGERLRRLSRRIGGNRARSAVGRSILVINWHLLASPEARFTDLGPDWHARKDDRDRKIRAHLRQLQSLGLNVEISEAAALRNCAIGLYPLEAGTDLLISNGTLLRRDDFTSRFIHPGTSDGTPMAAIDWDAAAASLVSGSLLRRRTTNPAPVGQSRRRHPDRPPQRRHRPRPRQHRPADRPPSGTQPENHQVTAGTDNCLTEIESPGSTVAGRG

SEQ ID NO: 457943 - protein, 336 aa, unidentified
MRNIGVDLHTTQITVCYLKRDGTQEEKTYRLEELNGFLSGLDLTDRVAVEATGNSRWFVNQIKELVARVVIVNPHGFEVIKKSVNKTDRNDARNLARFLAAGLLPEVRSKSEECERVGSLNETRNKLVRLKTSFLNKIHALAVSKGRKLKKESLASECGLKRVLGDEWTPVERIEMEIIAGEIRHLKESIKKLDKAIETEAAKMKGYRNLVSITGIGSRSAGVLLSVIGSVEDFASADKLASYFGIVPRVANSNETIRTGRITKRGNKTGRTTLVQCTLVAIRHNSYLKNYYERLKARRGHGKAKIATARKYLTLIYNTLSNDWVFADFKNFELAE

SEQ ID NO: 457944 - protein, 398 aa, unidentified
MNAVGIDVSKGKSTVAVIQPFGVVIAEPFDVSHTESDLNKLVQLIKSLSGETKVVMEYTGAYYEPIANALHNQGIFVSVVNPLLIDDYGTNRVRKVKTDKKDSLKIASFAIDKWLDLREYIPANDIRKTLKILNRQYVQYNKILVMQKNNLISLLDSCFPNANTLFTSPRRESDGHEKWVDFVLKFPHIHSISKLSLSAFKVKYQSWCRKNNYNYSDKKVADIHSYCKTQISVLPMTDSVIKIITEAAVMLNSTLETLCTFRDEMDRLSSTLPEYNAVMGIYGVGKVLCSQLIAEIGDVRKLNNSKSLVAMAGIDPPPNQSGKVGTKSRSISKRGSPVLRKTLFQIMTIIIQNKPVDDPVYQFLNKKRSEGKPYRVYMIAAAHKFLRIYYARVMQALN

SEQ ID NO: 457945 - protein, 319 aa, unidentified
MTYVGIDVSKVTFVVAYSSVKTNKTRTFKNTVNGVHEFVQTISASEHNCVLEATGNSLLVYLLSEAGITISLENPLKIKNFARVMLTVTKTDEIDARLIALYGEKMQPAPYKLRSDAILVLKQKRTVLRQLKKQLVATRNLKGSMEVLPFFDPKCKKTIEKTITFLEKQIKEMEEELASLAQGEYKKQMDLLTSIKGIGVTLAAALIVATGRFSYFDNAKQLTRYLGLSPTYQQSGTSVNVKGHINRNGDSSLRSQLYVAAFSSLRCNTECKACFDRLRSNGKPGKVVVIAVANKLVRQAFAVVTQGKPYVDGFKSEKP

SEQ ID NO: 457946 - protein, 315 aa, unidentified
MTTSTVYIGVDIAKETLDVFHPNKSRKRQSQSVSHDRKGRGCLIKQLRASPGAHIICEATGGYERTLVTALQEAQIPVSVVNPRQVRDFARSRGVLAKTDKLDARILTEYGQKNNPKPTPPKALEQIQLEALVHRRQQLVGMKKMEACRLLQAQDVGIKKMIRSTIRSFETQIAKVEKEMAALVKRTAPLEAIVRAFTEVKGIGFISAVSLVALMPELGKVNRREIAALAGVAPLNCDSGKFKGKRSIWGGREEVRRSLYMVALVAARRNPKFIEFYQRLLSKGKAKKVALVAVMRKMLIFLNTLVKNQQLQLSF

SEQ ID NO: 457947 - protein, 363 aa, unidentified
MKTTNQQNNAQADGAPVVSKQYRCIKLGLDVHADSIRVVRMIDGATPQPAQKMTPDEFPKWAAKQLTLADRVCSCYEAGPLGYGLHRKLLALGIENIVIRPLVLDEYRVRVKTDKTDALALTKRLDTYVRGNRKAFAAIRVPSEQEEQDRTLSRQREQLVREARRLGAQGRSLMLFHGFHIHGVWWRVQWKTLKEKLPGWLVERLEVFRALLQVLDAQLRKLTQAVEAQAPATRPRGLGALSFEVIRREIGDWRRFNNRKQVGSYTGLCAGVASSGGSRKTLSINKCGNPRLRSSLVTLAWRLVQYQPRCRLIQKWKRILLKPQMSSGARKKAIVAVARQLAVDLWRWQTGRIQAEQLGWRMN

SEQ ID NO: 457948 - protein, 416 aa, unidentified
MEKEPAIFVGVDWASTEHQVCMIGPSGPVQRAFAHDAGGLGAMVDWLCAQTANPSDIVVAIEVPHGPVVEALMDRGLFVYAINPKQLDRFRDRFSPAGAKDDRRDALVLASSLRTDRHCFRRLEVLDPVIVELREWSRMAEELKEERNRLTNRVRQQLWRYFPQALDLSEDPGAEWFLDLWALAPTPAAVSKLTEKKVACILIAHRIRCIGAADALAILKRRALTVAPGTTDAAKAHIAAVAERLRLVNRQLKEVVHRIDLLVNRLAVSEYQPGQIAEQRDAAILRSLPGVGRIVLATLLAEAHQAVQTRDYRALRTLTGVAPVTKRSGKSRRVEMRQACSIRLRTAVYHWARVATIHDARSRARYASLRGRGHSHGRALRGVADRLLAVACAMLESRTTYDPLKVSAVTAALKTA

SEQ ID NO: 457949 - protein, 334 aa, unidentified
MDKVTTVGIDLAKSVFSLHGVDGAGRVLLRRTVRRDQLIQTVAALSPCLIGMEACSGAHEWGRRFQALGHTVKLMAPKFVAPYRKSGKNDGNDAEAICEAVTRPSMRFVPVKSVEQQALLAMHRVRQGFVVERTATINRLRGLLCEFGVVLPLRSVTVRRQAAAAAEKLPELARRAIGDLLEQLRVLDERIGGYDREIEAQARLCEPAQRLMKIRGIGPTTALAIVATVGDAREFKNGRQFAAWIGLTPSQYSTGGKPRLGHISKRGDAYLRNLLVQGARSVLNSASAHQDRMSRWILELQPRRGYYRTLVAIANKNARIAWALLARNESLRSA

SEQ ID NO: 457950 - protein, 362 aa, unidentified
MRIIGCDLHARQQTLAMLDTTTGEVVEVTLKHEGDNVREFYSSLPRPVRVGIEATGSMQWFLNLMEELGIECLVGHPAQIRAAAPRKQKNDRRDAELILKMLVEGRFPAIWLPSKELQDLRALLRHRHQWVRMRTRIQNALQSIALANGLRRGTALWSHDGQSRIASLPLAPHTAYRRSELQAMYEKFEAEIEKLNQRVEEQACKRPGARLLMSHPGVGPITALASEVFLGDPTRFADSKALASYVGMIPREYSSGGRQRLGGLSKQGNPLLRFLWGEAGAHAARKDPELQRFYRRKLVQKGLGKASVAVARKLGIRLWIMLRDQIEYNEFCRRGQKQQKSSDACVGMPETRYGAKSHRPID

SEQ ID NO: 457951 - protein, 310 aa, unidentified
MVDLVTEAKSSGEGVTNPYRRTEHCENIHEYRCDKGVGVIGIDVSKEHLVTSKGRVRKYENNKEGYEEILEMKPCTIVLEPMGVYAIRPSQYFKEKGIKVLQVSPNMLSREKEFRGKKTDFYDAEKLENMVDKAKEYEYNPLRELVTLYLFLKDIETKYKNRLKRALFLVSDNNKISKERLEKLAMGDFTQEELYQLEYTPIVVEEIKVLAKTLLETQERLKEVRRMIEGQVPQDHVLLTIPGVGRLAAGIIIGVVGDVRRFPKPESFVAYCGLDPVVERSGRAVVSRGISKRGNKYLRSLFYFLAEELF

SEQ ID NO: 457952 - protein, 338 aa, unidentified
MGEITTVGLDLAKNVFQVHAIDGEGKVVIRRRLRRVEVMPFFDQLPRCLVGLEACASAHHWARAIAALGHTVKLMPPAYVKPYVKRGKTDAADAEAICEAVTRPTMRFVAIKTQEQQATLMLHKTRDLLVRQRTMLINALRGHLTEYGIVSAQGAGGVRLAIEALHEAQESLPVLARFALHGLVSQLRSIEAEIEKIEAEILKWHRSNEASRRLATIPGIGPITASAIAASVPDASLFRSGRQFAAWLGLTPKSHSSGGTERQLGISKQGDGYLRRLLVIGATAVLRFARQSNASRAWAARLLERKRPKVVAVALANKTARIAWALLARGTTYTAPTA

SEQ ID NO: 457953 - protein, 352 aa, unidentified
MALPTLPHPQVLVTLGVDTHADSHVAVALDQAGRPLGTRTISTTPGGYAALLGWARRFGTVDRIGVEGTGSYGAGLARWLRAHGQLVIEVDRPDRAARRRQGKADHLDAHAAARAVQAGIATGQPKAGDGTVEMIRSLRLARRSAVKARTQAANQLKALLVTAPDVLRAQLRCLPPADLVTTAARLRAATKPATPTDAAKLALRSIARRWRQLTQEITALDTQLERLVAMAAPALVAVKGVGTETAAVLLVAAGDNPERLRSEAAFAHLCGVAPIPASSGKTTRHRLNRGGNREANWALYLIAVGRMAWHRPTRVYVQRRTKEGKTTAEIIRCLKRYIARELYGILVSRPAA

SEQ ID NO: 457954 - protein, 479 aa, unidentified
MTPHKDFCLDSAPAVPTPLLPPSPVLSDALQIYHPHAAGIDIGEAEHWVAVPPGCDPQPVRRFGTFTADLDALADWLLDCGVTTVAMESTGVYWIPLFALLEARGLQVLLIDPRQAKRVPGRPKTDRLDCKWLQRLHTYGLLAAAFRPDDQVCVLRSYLRHRQMLLTYGAHHIQHMHKALQQMNLKLSQVVSDITGATGMAILKAIIAGERDPLTLAKLRHPHCHHSEDEIAKALQGTWRAEHLFALQQAVALYQFYHQQLTVCDQRIQTHLGTFADKSEGQPLPPKAHRHKKVNEPRFDARTPLYRLAGVDLTTIEGIEEGTALVILAEIGTDMSRWPSVKHFCSWLGLSPQHTISGGRVLSRRVRPGAHRVAVALRLAARTVQQARTALGAFYRRMRSRLGAPKAITATAHKLARLVYSLLKHGSAYVQQGREAYESQYRERQVKAMARQAKALGYTLVALGTPEVLSLDAVAAPTP

SEQ ID NO: 457955 - protein, 414 aa, unidentified
MEGSYPIAGIDVHKSMLAVVISDVAREGDFQFERRKFGTTASELKELNGWLKQLGVRETVMESTALYWKPVWQQLEGHCELFLAQAHSNRAPRGRKRDFADAERLLRRHAAGELILSFVPNAEQRLWRTMTRSKHQLTRDRVRLHNQIESLLEDARIKLSGWVSDLLGVSSRRILQALAGGETDLTKLAALADPSLRATSEQLQDALSAATTLGALHRQILGLFMARLELIENHMEILDKSIAGALQRYHDAVQRLSEVPGFGINSAQQVIAEVGAGAETFPSPEQLSSWVGTCPGREESAEVSKNNRSPKGNRMMRRVLNQVANAAVKSKGSVFQNLYRKWVPRMGHNKAIWAIAHRLCRLTWKILHQGASYIEYGNRTNPQAVKKRANKLLRDLKALGYQVQITPLQPRLGA

SEQ ID NO: 457956 - protein, 414 aa, unidentified
MEGLHPLHRRVAGIDVHRMLHVVTVLIELPDGSMQRESREFGGFKRDCRALAEWLRESDVELVVMESTGIYWKSVYAHLERAGITAWVVNAHFIKHVPGRKTDMADSEWLAVLARFGLVRASFIPPKDLRELRLVSRYRRKLTAMCASEVNRLHKILDDAGIKLGAVVSDVNGVSARAMVKGLIEGRDVNTLLGLARGALKLKREELALSLEGELSARHVFVLGHIHAHIETLQVELAQIDAYLIAAMAPYAWAHGLLQTIPGIDQIAAALILIEIGDDMARFGGAERLACWAALSPGNNESAGKRKSGRTRHGNSTIRYILCECANAARMTKSTLAAKYRSLMVRKSHKKAIVAVAHKMIRLIYVLLTRRQPYLDQRIDYAAMSAAKNAPRWIKQLKAIGKWPAAPLTRPSAH

SEQ ID NO: 457957 - protein, 339 aa, unidentified
MKVTTFGLDLAKRIFQLHWVDMETGEICRRQLKRSEVVEFFANREAGVVAMEACGSAHYWARKLAALGHEVKLIAAQFVRPFVKSNKTDAADAQAIWEAAQRPGMKFVAVKSEAQQAVLTLHRMREQLVKMRTMQINQLRGLLYEFGADLPAGRQRGMARIPEALAKLEQTLPAMVIEAMRSQLKHIEGLDQDIAEIEKKLSAWKKEDAASKKLMEIPGVGLLTATAVVATIGDARAFKSGREFAAFLGLVPRQSGTGGRVKLLGISKRGDVYLRTLLIHGARSVITHQKERGSWLDKLLARRPFNAAAVALANKMARTIWALLAHDRTYQKGYVAKAA

SEQ ID NO: 457958 - protein, 409 aa, unidentified
MADYDIYIGIDWGTLTHQVCMTDAHGQPLDELAVAHSGPGLTALVAALRRSGGEPARIAVAIETPRGAVVDTLLEQGVHVYTLNPKQVDRFRDRHTVAGAKDDRRDAFVLADALRTDRGAFHRLRPDDPRIVQLRELSHLTDDLTQERGRLANRLRAQLLRIWPAVLTLAPAADEPWLWTLLERAPDPAQAQRLPRRALRAVLATHRIRRITAEGLHAVLQEPCLPTAPGTVEAAREHVAVLVPRLRLVATQQTHCARRLEELLAALAAPDTAERREHRDVTILRSLPGVGRVVAATMLAEAARPLAARDYQMLRAYAGVAPVTRQSGKTRLVSMRRSCSGRLRTAVFHWATNSIRLDPRWRAHYDRLRQRHSHARALRGVADRMLGVLVVMLNTGTLYDPARRTTRAA

SEQ ID NO: 457959 - protein, 358 aa, unidentified
MADKVTVAAVVGGVDTHKDLHVAAVVDQNNKVLGTQYFATTRQGYRLMLAWMTSFGALKRIGVECTGTYGSGLLRYLQNAGLEVLEVTAPDRMERRKRGKSDTVDAECAAHAAFSGIRTVTPKTRNGMIESLRVLKTCRKTAISARRVALQIIHSNIISAPDDLREQLRNMTRMQLIRTLGSWRPDASEYRNVTNVYRISLKSLARRYLELHDEIADLDVMIAAIVDELAPELIKRNAIGYEIASQLLITAGDNPQRLRSESGFAALCGVSPVPVSSGKMNRYRLNRGGDRAANSALHIIAIGRLRTDDKTKEYVARRVAEGHTKMEAIRCLKRYISREVYTLLRNQNRQVNSIPIMA

SEQ ID NO: 457960 - protein, 345 aa, unidentified
MTNNIQFSSVCGIDIAKSVMQVYKVTSDGVVSNKAVKRADFLNEFRNIPPALIGMEACGGSQHWARELQSLGHTVHLMPPKLVKPYVTGLKNDKNDARGIYKALEMSVREVPVKSAAIRDLALLQTMRTKRQREKVAKINHIRGILTEYGLVMGKSINAFLAKAGSLIVQLKERADVSPFIVSELNALFPKVKEAMAKIKELETNIDSIAKTLKQYDLFRSAPGVGPITAATMLVLLCNPAVFKNGREFAAYIGLAPKSSGSGGKNFVTHIPKKCECNNDVRALLVQCAHSICRCKHKSDWVSSILARKPKKVAIIAIANKLARQLWIMAKKGEKFEKRFILAAV

SEQ ID NO: 457961 - protein, 350 aa, unidentified
MERHTTSTKKPVFAGIDYHKKFSVVTLGDKSGKVILQETLVNNEKIVKDFFTKHKKLVCAVESCRGYEWFVSLLEELGHEIKMGDSRSIKLIAVSRCKTDRIDSLILMEMLAKGYLPCAYQPNWKERDYRQLLRHRVQMVRTSTKHKLRVHAILDKENRGVTYPFTGKGREVLKEIVLSERGRELLDDELEIIDFLEEKIAEQYKKISFLARQNPDVGRLKKIPGFDTLSAMMLFAEVGDITRFRNADQLASYTGLVPRVYSSGGSTRTGRITKQGPKLLRWILVQSAWAAIKASPNLHRFFTTISRKKSQKVAIVAVARKLATIAFHVLKEKAIFDESKLDAGLARAAF

SEQ ID NO: 457962 - protein, 392 aa, unidentified
MNFAGIDIASETHVLAVVSAAGEVQVRATPFGEDAPGYALLFERLGPPEQIVVAMEATGHYWKNLFAALGARGYAVALINPLRTRRFADEDLQRTKTDAIDALGIARFAAQKRPAITRLTDTATEELRELVRLRDRVVGEIGDRVRQLHRLVDLGFPEFTRYVPTLDTQIATALLSQYPTAQAFTRVGPTRISKLLYDGRHRVGLELARQLVDAARVSVGAHHGPAYRVQVKYLCEDLETLRSRLRELDADLERHLDDHEVGTLLTSIDGIGKLTAARLVAELGDPAEFASASALAAYVGVVPALRQSGKGRTRTSLTSIGHRHLRHALWMPTLAAVRRNPWLRAYYQRLRSKGKPAKVALIAAMRKLLIAVYAVARSRQPFVPHIANEAQP

SEQ ID NO: 457963 - protein, 353 aa, unidentified
MIVIGVDPHKTTHTASAVDPVTNTGLGSLRIDATPADYHRMLAWAKQWTHRQWAVENAEGLGHHLAQWLLARGEVVLDVPATATARVRELSRGARRKNDRIDAAGAACVAAAQGDARPVVAEDHVDALALLDERRNNLSQNRTRTINQLHRLLRELLAGGVPTDLTAAKATAALRPFRPRSTPERVRVQLCRDLIADVRRIDQQLADNQAEATQLLDEHGTRLREIVGVGPVLAARILGRTGHVSRFATAAAYATYNGTAPVEVASAERQCHRLNRYGDRQLNSAIHTIAVVQVRMRDSDGRRYYDRKITDGKTPRAALRCLKRHLSNQLWRTMIADEQRNQDKCHDQSTKAS

SEQ ID NO: 457964 - protein, 359 aa, unidentified
MVYLGVDLHRKVSHVVALDEAGNVTLSRRLVNDPAEFRRVFGELEPEPIEVAFEATYGWGWFADLLADAGVAAHMAHPLATKAIGAGRVKNDAIDARTLAYLLRTNLLPEAPIAPPEVREARRLVRMRASLVRVRSRLKCQVHAICADLGLPIEVSDVFGVRGRELLTTLALPAVTAGRLDANLRLIDALGGEIRLADREIVRHFRADPRIRRLTPIPGIGFLTAAMIVAEVGDIGRFETPDRLCSWAGLTPTERSSADHTQRGHISKQGSRWLRWAMVEAAVAAARGLSLQRFFGPIKERRGTKIARVALARRLLSLAFYALRDEAGCRAYPVLAHPSRSTRARSPYGMASPDGRDFD

SEQ ID NO: 457965 - protein, 393 aa, unidentified
MICVGIDVAKDKHDCFILSSEGEVVADVFTIQNNAEGFDTLLQMICRCARPEDKIKVGLEATGHYSYNILRFLLDKGLPTYVINPLHTNLYRKSLSLRKTKTDRVDARTIAAMLMSDVDLKSYTDTAYHNEELKSLTRYRFDKVRERAKLKQSVSRLVTILFPELEKLVPTLHMTSVYALLSEFPGAKQIAGAHLTHLKAVLNDASKGRYGRDMATTLRDAARCSVGSVMPAKSLELQHTIRMIRELDAEIEDIETAIQSMMAEIQSPITTIPGIGVRMGAMILAEIGDFSRFDSPDKILAYAGMSPSTYQSGQISLAGAYSHMEKRGSRYLRYALYNATKYVCLWDPTFSAYLAKKRAEGKHYNVALSHAAKKLVRLIYALEKSKRPYSTAA

SEQ ID NO: 457966 - protein, 358 aa, unidentified
MEYGAIDLHKKESQIRIVTESGEIFDRRIATTRDRFSALFEGRRPMRILLEASTESEWVAQHLETLGHEVIVADPTFAPMYSERSRRIKTDRRDVAALAEACQRGCYRAAHRRSGSQRTVQVHLNVRRELTDSRTRAIALARAVIRGAGLRIRSGSTGSFLVRMAALDLPASISETLGPLQRQIAALNDELATADDRMASIAAQDPVVARLTTVPGIGAITATAYVAALDDAARFGRAAQVASYLGLVPREYSSGEQQRRGRVLRSAHPYVQSLLVQAAWRVWLSKDSRTADLRRWAQGIAHRRGKNIAVVALARRLARILFAMWRDGVPYDAVRTRPTRAHGGAAIEVAAAQSADPS

SEQ ID NO: 457967 - protein, 297 aa, unidentified
MSVYVGIDVHRKRSQVAVVTEDGTVELNKNVVNGSEPMLRLIGDLPAGTPVAFEAAFGWGWLAELLEDYGFEAHLVHPLRCKAIASARLKNDKVDAATLAQLLRADLLPEAWIAPPEVRQLRALLRHRTGLVRLGTQQRNRIHAVVADFGYDRSGSYLSGPGRGWLAGLELPAASREIVTDCLAVIDGLAPLIDRIDGELRQHAKADPRVKVLTTLPGVGQFTALVILAEIGDITRFGSARKLASWAGLTPTVRGSDLTVRHGHISKMVCAGGMVPLRRPGGVRWRWLEDWICTGVS

SEQ ID NO: 457968 - protein, 352 aa, unidentified
MIVLGADMHKRSHTIAAVGSATGELLGERTVQIGVRGFGALLVWARGLDRERVWALEDCRHVWGSFERFLIERGERVLRVPTRLMAHARRGGRERGKSDSIDAIAVARAALREGLNELPAAQLEGPELDLRLLVDHRERLVRQRVALNNTLQWHLHDLWPEQTLPSSALFSTKWGTRIGRRLARAEQSTRVRIARDELRRLRELSQTIKSLEAEIAALVASIAPQLLSEPGFGPLTAAKLVGEIAGANRFASDAKLARSAGLAPIPVSSGKTNRHRLDRGGNRQINAAIHRVAVTRARCHPETKAYITRKTAEGKTNREAIRCLKRHLARRIWHLLQPPTSEPTTALPRSIS

SEQ ID NO: 457969 - protein, 362 aa, unidentified
MNATTVAVDLAKNVYQLAVADSNWRIIEKHRLTRTQFERFFANRAVGLVVMEACGSAHYWARQIRDLGIEVRLLPPRYIRAYVKRNKTDAADAAALLEAARCGDIVPVKIKSIEQQALQCLHRTRAQWMRTRTARINGLRGQCREFGLNVAQGARVGLEQIARLIADPRTALPQMLLATMRSLLDEIRLLEVRIHDLEKQLGELAKQSLPCTTLLSIPGVGLLTATAMVAATSGEVSHFKDARHFAAWFGLTPKEHSSGNTRKLGRISKRGDAYVRMLLTHGARSVICAAATKAKTGAPLDRLRQWALDLEKRSNRNKAVCALANKMARLCYATLRDREPYAAARLTRALPRKLNEMSFSCA

SEQ ID NO: 457970 - protein, 381 aa, unidentified
MDIIHERVAGLDVHKDTIVGCVRFQKGGKAERECRTFGTITDGLTALLDWLSQSGCTHVAMEATGVYWKPVWKILSDGDFELIVANAAHIKNVPGRKTDMNDAMWIADLLACGLIKASFVPEEDVEELRTLTRTRKQLVREQTRHVQRIQKTLTDANIKLDSVISDIMGASGRRIIEAMIAGVRDPRKLAALAGKRLKATPRELYDALHGRLRDHHRFLLQLHLGQWDGLEVAIRKIEIEINQRITHMDEEVPANEPPFRDLIELLCAIPGISTVSATAILSEIGRDMNRFPNAGHLVSWAGLCPGQNESAGKRKPTRLRKGAPWLKTMLVQVRLGGQAKEGQLLSRPVLPHTKQTWTSEGRLRCRRLHPHGNLPYPQEWH

SEQ ID NO: 457971 - protein, 340 aa, unidentified
MVHVGVDLDKRSSQIAVLTEEGEISQQRLPNDPVRLEKFFAELPPHTPVAIEASGTWWWLVDLLEHLGHDPILSHPKQTKAIAAARLKNDRVDAERLALLLRGDLLPTVWIPSAALREARELVRHRVQLVWLRGIVRNRLHAMLARRNLQPVSTKTWLTQRGQRELQRVPLADTPSRIREDCSALLPLLDAQIRRLDGELGARWGRDPRVHRLTTIPGIGPFIAIVLVLELGDIARFPSAKQVASYVGLTPRIRASAGRIRAGHISKEGNRLLRWVLVLAATQAVRRPGPLRTWFHAVKKRRGKKVARVALARRLAEIVFHVWKHECDYFTVVRHGVVRG

SEQ ID NO: 457972 - protein, 348 aa, unidentified
MIKITGMEKELKHFVGVDISKLTFDVALLKPLGNKEGAIAHHQFKQTAAGFAEMKEWLQKQGVLLDDETLFCMEFTGIYNAPLVNYLSKEKALVWVEMAVRIKKSEGFSRSGNDKTDAIKIARYAFRYQENKQLWTPTDDSLSQIRHLIAQRDRIVDAISALTVPVNELKEVGCLMEAKQMESLQKVAIKKLDESKENIEAAILKLVNKDSNLSSKVDRVTTIKGIGVVTAIAFLVYTNGFTSFDTAKELACYCGVVPFVSKQSGTSVKSKARVSAFANKKLKRLLHLCALSAKQHDKDLKAYYERKVAEGKNKMSVINAIRNKLVLRMFAILRDERDFVENYVRKSA

SEQ ID NO: 457973 - protein, 358 aa, unidentified
MEKLIRVGMDTSKSVFVLHGVDAAEKVVLRKKLRRQQVIEFFGKLKPTKIGLEACGAAHYWARELEALAHEVVLLPPQYVKPYVKRGKNDAADAEAICEAMSRPTMRFVPVKTAEQQAALMLAGTRDRLIRTRTQLTNTIRGYAAEFGLTAAKGLDKIEPLLARLTAATELPKLAKELFAAHAREYAQLKVEIQKIEAKLMAWHKHNELSRRLVEVPAIGPIGASLVVMKVPDPHAFRSGRDFSAWIGLTPKDHSTAGKTRLGVITRAGDETLRRTLILGATAVIQQVRRGRGHPSPWLIDLLKRKPPKLAAVALANKTARIVWKLMISGERYNPMRLRDTRSPSARCGSEPTAITQA

SEQ ID NO: 457974 - protein, 352 aa, unidentified
MKKFYGCDAHKKYSMFGSMDEECNPGPFFRVENSRDQFRGFLHTLPPGSPIALESVGNWYWMIDEMEKAGHVPKLANAGKAKLMMGQINKTDKLDAKGLALLLRNGTLPSVWIPPGELRDQRELPRMRMAFVRVRTMLKNRIHAALAKYAIEIKEFSDIFGVGGRTIMASRLGELPPQTRRSVEAQLKLLDQVGEQIKLCEKQINEVVEETPTMRLLKTIPPVGEILTVVIALEVGDIKRFRRAESLANYAGTVPRVKDSGGRRRYGKVRSDVNRYLKWAFIEAANIVVLHQASWNDRHMVRLYRRIRQRRGHAKAVVAVARHLAEATYWMLTKNEPYKEPKRNNTVSSTRK

SEQ ID NO: 457975 - protein, 356 aa, unidentified
MREGLRLARGSDVFLGLDISKTSWHVTARSGGETLLSASFPPKREALNGLLSRLKGCRVHSAYETGPFGYGLHDWLRSRQVDSMVVSAAHVPGEIGNRVKTDRRDGLKLARTLEAGLLRPIFVPEARQRADRELVRQRHRVQRDRCAAMVRIKSFFLTYDIEVPEEAGAHWSGDFEAWLRRLKLGDQSLDRVLEELRGLYFDLDARVDGLTKELRQLARSPDYAPMVELLSTVPGVGWLTALTLVVEIVDFRRFPNGEALSSYAGLTPSEHSSGEQVRHGHITRQGNPVVRSVLVESSWILIGKDPEMRRFYDGIKVRRGGKRAIVAVARKLCHRLLAIAQSGQAYRVNFRRTKEN

SEQ ID NO: 457976 - protein, 392 aa, unidentified
MVVSVGIDVSKDKHDCFIVSSDGEVLADVFTISNTLDGFHYLLQRIQDCTTPKDKIKVGLEATGHYSYNLLGFLLDNGLTTYVLNPLRTNLYRKSFSLRKTKTDRVDARTIASMLLSDVGLKPYTDTAYHNEELKSLTRYRFDKVKERAKLKSSIARLVCILFPELEKLVPSLHIASVYALLEEFPGAKQIAAAHLTRLKALLEMVSKGRYKRDVTLEIRNAARNSIGSWMPAKSLELQHTIRLVHELDSEIAEIEKQIQSLMDELDSPITTIPGLGFRMAAMILAEVGDFTRFDSPDKLLAYTGMSPSTYQSGQLKNCYPHMEKRGSRYLRYALYNATKYVCHWDPTFAAYLSKKRAEGKHYNIALSHAAKKLVRLIFAMEKSKQPYCPAA

SEQ ID NO: 457977 - protein, 417 aa, unidentified
MDEVVYPVACGVDVHQNSLVACLRTVRPDGRVQRESRGFDGTTPDIRQLVAWLVRERCPVVAMESTGVYWRPAYRALAAQGIEVRLANPQRVKPVRGKKTDKADAVRLAQLVALDQIAPSFIPPEEILALRHLARGRVKAVQDLTTEWNRVGKLLNDTGIKLDAVVSKLKIKSARLMLDALLAGERDPHKLADLARGILRRKLPALRKALDAPCGDLYTHLLALHLNQINVLEAGVTAHEALLEEACGTLRDPLARLCTIPGVGSHAAVDIVAEIGTDMSRFGSASRLAAWAGVCPGNNESAGKRYSGRTRSGNKHLRRILVQCAWSCRKHDSWLGHRFRQFMARKGGKKAAMAIAHKLLVIVYHVLQSGQPYEDSRYGDRYQEDAERLAWIPTDQPPPNGSGAQPRMFPWGARLSA

SEQ ID NO: 457978 - protein, 387 aa, unidentified
MPQVDDLSRSLAPFNQDATLTVVVEMSEASWLVAGMVPGVDRQPLKKLRPDPDALLRLVERWRDEAVKAGKRIERIALAFEAGRDGFRLARWLQARGIEVHVIHSTSVAVSREHRRAKTDRLDTAMLMRVFLGWLRGERGHCGMVAIPTLEDEDARRPSRERESLVGERTRIINRMKAILAWLGIRGFNPKLRKAPQRLDALRTPEDLPLPPNTVDELRRDMARLAMVCEQIKALEQARLAHLEQAPGTGPHAMVRLIANVIGVGIETADMLVQEVLSRDLRGRRAVARYAGLTGAPNESGSRRREKGLAKSGNARVRRGLIQLAWRFLRFQKDSALAQWYRVRTEGPAAARKTKMIVALARKLLIAFWRMVTVGEIPAGFALRQPA

SEQ ID NO: 457979 - protein, 345 aa, unidentified
MDLHTVGIDLGKTVFHLVGMNPRGEVVVRKKFSRTQLLRFTVNLKVDFIGMEACGGAHFLGRALREQGHEVRLMPAQYVKPYVKTNKSDYIDAEAIAEAVTRPTMRFVPIKSDDQLDLQSLHRVRERWVMRRTAVVNQIRSLLLERGITLRQGRRHLEHALPGILEDADAKLSGALRMLLAQLKLELDQLAERMDQADTAIAQSARQSEACQRLVAMPGIGPVTATAIIATIGNGAAFRKGRDFAAWLGVVPEEHSTGGKQTLWRIPQRGNQYLRRLFVQGARAVMQHQTKQSSGLSAWLAQLTARTHHNVAIVALANKLARMAWAVLAKNEVYRPPLLDMAASV

SEQ ID NO: 457980 - protein, 469 aa, unidentified
MCVALDYAKAQHSVLICNGLGDLLKGAFAVDNAPTGAEALLHQVRRSAKQRKIRLEHVFFGGEDYPSYAQNFLRRLRQEKFLVVRVNAWEAKQQRSNFQASSDSLDLLGIARCCLNRRGQTVRDWPVAYTNLRIATRDRDQLVRNRTAVSNRIHSYVDRLFPSFLKVEKSGLAPFSAASLDLMVERFSPAQLRRRPRQGLADWLGRRNVEEPKKVADQLKQLAKAVLPPAPEQTVMLQRSLTQWVELYRGLEKSLTLLDREQAYWLARTPGALLTSIGGFGITLAAGWTAELGPPTQWQAVRRLCSYAGVVPRSKQTGGPDQEPVVGPVQQRCNKRLKNVVLQAVGKVRQYGPEDLRQAAQRLEAQGSHVEFALAKRLVRLGKYLATTGTLYRPKALLDPDTPKLTLATHYQHLWDKLLQKWKAKADLRDVFAPEHPLGQWRNMARELYALELRLPQQGVAHCPRALTP

SEQ ID NO: 457981 - protein, 429 aa, unidentified
MKPCEQTAQDWLAHRAFGGLDWASEKHNVIVVDARGKVVEDFEIAHSSVGWKKFRERLAPYGAIPFGIETSQGSAVEQLLEAGMKVYPINAKSAKSYRERKAPSGVKDDRLDAWSFADACRVDGHGWRALRPEDPLVKELRLLCRDEVGLIEQRTSFICQLRHALGEYYPTALEAFEDWGSLSAWMFVQRFPTPQILQGVGKRQWEKFLHARHLWRTESGPRRMELFAHATELSGTVPMANAKSQLALSLISMLFALEKQLGIYRKRIEELFSRHPDHDLFGSLPGAGPKLAPRLLAEIGDDRERFEEGPQALQCLAGSAPVTRRTGKRKVKANPDQWPCHQRWACDRHLRHAMHLFSEHSLTRCVWAQIYYQHHRQKGSSHADALRRLAQRWLKIIYRMWMDRKPYDAILHHHNQLKHGSWVLELKTT

SEQ ID NO: 457982 - protein, 386 aa, unidentified
MQKLNDLSRSLTALEPDGTLIAVIEMSLSSWLVAGIVPGVERQPLKKLAVDESTLLKLLYRWREEAEKAGRRIERIAVAFEAGRDGFWLARWLKACGIEAYVIHASSIAVSREHRRAKTDRLDTELLKRAFLGWLRGERDHCKMVAIPTIKDEDAKRPNRERDSLIRERSRIVNRMKAAFVRLGIRGFNPKLKRAAGRLDGLRTPEGEPIPPNTSAELRRDMERRRLVSDQIRQIEEARLERIEQAPSDGPHAMVRLLARVIGVGIETADMLVHEVLSRNMRDRRAVARYAGLTGSPDESGRKRREKGLARSGNARVRRGMIQLAWRFLLHQKDSALTRWFRARTENARGTRKPMIVALARKLLIALWRLVREGVVPDGVVLRPAQ

SEQ ID NO: 457983 - protein, 357 aa, unidentified
MRWSPPPCERYADRVFFFLKGIIMQNVTLIGIDLGKHSFHVHAQDKSGHALLRKKFSRTQLTAFLSTCSAATVVMESCAGAHFMARHISQLGHQVKLISPQFVRPFVKSNKNDFIDAEAICEAASRPSMRFVTPRTEDQQAMSALHRVRDTLVRERVKATNQMQAFLLEFGISMPRGIAVIRRLTAVLEEHQLPPYLTRLLLRLHQHYSYLSEQIEALEQELKTHMADDDTAQRLLTIPGVGMITASLLATKLGDGKNYASSRDFAASTGLVPRQYSTGGKTTLMGISKRGDKNMRRLLVQCARVFMQRLEHNPGRLAEWVKVQQTRHHSNVVACGLANKLARIAWAVTAHRTAFSQ

SEQ ID NO: 457984 - protein, 387 aa, unidentified
MPQPNDLSRSLVALDHNSTIIAVVELSQSSWLVGGGLPGIERQPRKKLEPSPERLLALLHRWRDEAIKAGRNITRIALAFEAGRDGFWLARWLAARGVEAHVIHPSSVAVSREHRRAKTDRLDTELLKRGFLGWLRGERGHCSMVRVPTLAEEDAKRPNRERECLVKERTRLVNRMKGALARLGIRNFRPTLRNAAEHLAGLYTPEGSPLPPNVAAELERDIARLGLVIGQIKQIEEARRQRLEEQPESRPHAMVRLLVRVVGIGTETADMLVNEVLSRPMRDRRAVARYAGLTGAPDESGTKRRDQGLAKAGNARVRRGMIPLAWRFLRFQKDSALARWYQARTADRRAGTRKTMIVALARKLLIALWRFVTTGERLEGVVLRPAA

SEQ ID NO: 457985 - protein, 416 aa, unidentified
MSHKMAGIDVHKKVLMVVVIDATAPEEKPERRRFATMPSDLRRLACWLREREVEEAVMESTAQYWRSVWLELEPYVLLHLAQAFSNRAPRGRKHDFRDAERLVRRLIADELILSFVPNGEQRIWRTLTRSKTQLTRDRVRLQSQTECLLEEMRIKLSSVVSDLLGASGLRILHALAKGETDPRKLAALKDDRLKCTEEQLVDALTGSSQPMHREMLALQLEHLELIDTQIEKLSRMIAAAMKAHQEAVVRLAEVPGFGVDSAQQVISEVGAEAGTFASAAELTSWVGTCPGKDESAGENHNSRSAKGNRYLRRVLNQAAHAAVRKKGSHFQTVFRRLLPRLGYQSAIWAIAHRLCRVVWKILHEGVRFIEQGSEPDPAVRKRRAKDLARALRRLGYDVVISPIDPTIQNELQILGS

SEQ ID NO: 457986 - protein, 449 aa, unidentified
MREPQEVQDEAHEQVVERVAAIDVAKASGKVCTRVPHQSKPGGRVTKVWDVDATTGAITELAAYLVGLGIEKVTVESTSDYWRPWCYLLQAAGLGVQLANAREVKNVPGRPKTDRLDAVWLAKLTERGMLRPSFVPPAEIRQLRDYTRLRIDLTHERARHWQRLEKLLEDALIKVSSVASTLDTLSVRAMVEALIAGQRDPKVLAGLAKGRMRSKHVALVEALTGQFDDHHAELARMLLDQIDALGGQIGTLTTRIGELIAAIPAAQGVDADGTTGPDAGAGPGAAVLPAVARLDAVTGIGQGAAQVIIAELGLDMGIFPTPAHLVSWAKLCPRTIQSGATTRAGKTGKGNPYLKGVLGEAAAAAAKTDTFLGERYRRLVKRRGKLKALVAVARSILVIVWHLLADPTARYHDLGAGYYTDRIDKGKKARNHIRQLEALGFTVTLAPAA

SEQ ID NO: 457987 - protein, 458 aa, unidentified
MRRQNRQPSRAAVAPKLGRHNPAAAGLDIGAEEIWACVPADRDGQPVRAFGTFTPDLHALADWLAQCQVTTVAMESTGVYWIPSYEILEARGFEVSLVNARHLKNVPGRKSDVQDCQWLQQLHSYGLLTASFRPAEDMRVLRAYVRQRAMLIEHRAGHIQHMQKALQQMNVQLTQVVSDITGTTGLQILRAMVAGERDPQVLARLRHGRCQHSEAEIAQALSGHYRPEHVFALKQALALYDFYTEQVRECDTYLEQHYAAIKPIYDERTPPPPLGPNPKPPSHAKNAPAFDVRAGLYRILGVDLTATAGLEASSAQVLLAEIGTDMSKWPTEKHFASWLGLAPHNDISGGKVLRSKPLKGNRRAAQALRLAAQTLGRTQTALGSYYRRLRARKGPTHAITATAHKLARMVYHVLKHRTPYQPQSQETYAQHLRQRAIRHLKQTATRLGFTLLPQPVAA

SEQ ID NO: 457988 - protein, 413 aa, unidentified
MNEETFAWFVGIDWGSEKHQVCVLDQQGTVVGERSFPHSGAGLAELGDWLLTVAGAATAVAVGIEVPHGPVVDSLIDRGFMVHSINPKQLDRLRDRFSVAGAKDDRRDGYVLADGVRTDRRLFRRLHVADPRLVELRAWSRLAEELREERVRLNNRVHHELWRYYPQMPKLTNDLAAPWFLELWTIAPTPAKARQLRKSTVEQLLKQHRIRRVDAETVIRTLREPAIKVAGGVAEAASVHMRSLIARLHVINRELQEANRQLDKICTAIGEAEAVSGDSLQRQDIMILKSMPGIGKINLAALLSESSGPLSRRDYPALRTLCGAAPVTRRSGKSHIVIMRYAAHARLRNTVYHWARVAAQHDPKSKSRYAALRQRGHSHGRALRSVADRLLGLACVLLQKQTLFDPQYGHTAT

SEQ ID NO: 457989 - protein, 331 aa, unidentified
MDEVKRFVGIDVAKAALDVFIGSAAAAFSVANDEVGIQELFRQLKLADFVILEATSGLEMPVASALAAAGIAVAIVNPRQVRDFARATGRLAKTDRLDAEVLARFGEAVRPEARPLANEQAQALEALVTRRRQLVEMLTAEKNRRARAPKVLHRSIDEHIRWLEKRLAGFDDELAEMIRDTPLWRERDELLRSVPGVGKVLSSTLLAHLPELGALNRKQIAALAGLAPFNRDSGSLHGSRCIWGGRAQVRRVLYMAVVAAVRSNPVIKNFYTQLRARGKYPKSALTACMRKLLVILNAMLHNKTHWQTPALASSTSALSPFLGAVPEHGCC

SEQ ID NO: 457990 - protein, 421 aa, unidentified
MNSQSNNSYAAYVGIDWADTKHDICIQAADSEDREFDCIQHKPDKIEEWALATHKRFGGPIAIAVELSKGPIVYALQKYDFLVIFPIHPLTLAKYRQAFRPSGAKDDPTDAEFGLDLLLHHPDRLQPLQPQSVVMRSLMLLVEQRRNLVNDRVRITNSLRYALKQYYPQPLEWFDRSIGSVMFCNFIARWPTLKQVKRARKNTLITFFSDHRMHRSQILETRLTAIKAAQPLTLDEAVINPYSLQALVLVDRLRVILQGIEKFEKEIAEVAKQHEDFVLFESLPGAGPAYASRLLVAFGEQRDRYASAAELQKYAGIAPVIERSGKKNWVHWRYQCPKFLRQTFVEWAAQTINKSYWAGEYYRQQREKGCKYQVAVRALAFKWIRILFRCWQTHAPYDESAYLKALKRRGSPLVNPEIVEG

SEQ ID NO: 457991 - protein, 387 aa, unidentified
MTQVDDLSRSLAAFDQITSLVVVVEMSEASWLVAGLVPGVDRQPLKKLEPDPSALLRLLERWQAEAEKTGRTIGRVTLAYEAGRDGFWLARWLQARGIEVYVIHSTSVAVSREHRRAKTDRLDTAMLMRVFLGWLRGERGHCGMVAIPTLEAEDAKRPSRERESLVGEQTRIANRMKSALARLGIRGFKPKLRRAPQRLATLRTPEDLPIPPNTLDELRRDVARLAVVREQIEEIEQARLERLEQAPDEGANAMVRLLARIVGVGIETADMLVREVLSRNLRDRRAVARYAGLTGSPDESGSKRREKGLAKSGNARVRRGLIQLAWRFLMFQKGSALAQWYRARTEGAKGARKTTMIVALARKLLIELWRLVTTGAMPEGVVLRPAT

SEQ ID NO: 457992 - protein, 372 aa, unidentified
MKKNNTTAQSPKRAAARQAGPNTIGMDLGDKTSRYCMLGAGGETVSEGSVGTTKKAMTEKFGGMGRCRVAIEVGTHSPWVSRLLSSLGFEVIVANARQVPLISQNSRKNDRLDAQMLARLVRVDPQLLRPIRHRSEQAQTDLMAIRIRAGLVEARTGLVNTARGLAKALGERLPGCDTDSMGVEKLEGLPAAMRERLRPLLEAVKSLTEKIQEMDSTIEQIARTRYPETELLRQVSGVGTLIALTFVLTVEDRDRFQKSRDVGCYVGLRPKQSESGQSQPQLRISKEGDVYLRKMLVQAAHCILSRRGPDTDLKRWGLKLAERGGKNAKKRAIVAVARKLAVLLHRLWVGGEVYEPLRNSQAAASSKKKKAA

SEQ ID NO: 457993 - protein, 345 aa, unidentified
MEDGRALYQLYVGSDVAAETFVVAWISPGGKPATPFTGEQTPTGFAALQRRLQGTGAAPAATLVVLEATGSYWVALAVALHEAGYRVAVVNPRQAYHFAKAQLRRAKTDALDARDLAQLAAALRPAPWTPPPAVYHEVQQRLVARDGLLTMRTQARHQRHALLQWPVVVAAVREHLDERIADLDRRVAALESEIAAVLKESVWAESLACRTSAPGIGLVTASWLLVGTLNFALCAGPEALTAYAGLAPVPRESGRSIRGRPAIGHDGNSRLRTALYMATLSAARYNPAIRAFYQRLRAAGKPQQVARCAAARKLLHQVWALGSTLQRFDPDHHQHHHDTVPDLAA

SEQ ID NO: 457994 - protein, 417 aa, unidentified
MQYAPVKLADQPANGLTCGIDWARDDHAVTVIDSGARVVYRGVVEHSAKGLKDLIAVLTRTGVEEVAIERPDGPVVEALLDAGLTVVVVNPNQIKNLRSRYGSAGNKDDRFDAFVLADTLRTDRARLRPLIPDSNATTALRALCRARKDLVIHRVRVANQLRAHLNRVYPGPVGLFDALDSQISLTFLTRFDCQDRADWLTPKRLGTWLASVGYKGHTDPAVLHARLCARPRGFTGIDGAAYVGITTALVKTLTNLVSQIAELSTQIRQQFAAHADACIFTSLPRSGTVRAARLLAEIGDCRGRFPTPDALACLAGVAPSTRQSGKVRSVGFRWACDKQLRDAVCDFANDSRHANSWAADLYNRARSRGHDHPHATRVLARAWVHIIWCCWQTNTPYDPARHRALQTLLAQQPHATT

SEQ ID NO: 457995 - protein, 317 aa, unidentified
MEVSPIFVGIDVCKAQLDVAIRPSAQILWVPNDKAGIKTLVKHLEKLRPTLVVLESTGGLERQVMLALVGAEISVVMANPRQVRDFAKSTGQLAKTDRIDAAVLAHYADAIRPQPRSLPDELTLELRALTVRRRQIIDMIVAEKNHLATASKAIKKRITAHITYLEQELDDADQDLDRFIGKNPLWKENQEILCSTPSIGPVSSRTMLAELPELGTLGRKQISALVGVAPFPRDSGTLKGRRTIWGGRASVRGALFMATLVATRFNPVIRDFYKRLKAKGKPSKVALVACMHKLLTILNAMIKNKTRWSENFSLKTT

SEQ ID NO: 457996 - protein, 402 aa, unidentified
MNCVGIDISKGKSTIAVMRPFGEVVVSPFEVCHTASELSELARLLKSLDGETRVVMESTGNYHAPVAWLLHDAGLYVSVVNAMLVHDYGNNSLRRGKTDKKDAVKLANYGLDHWLTLPRYVPEEDARLMLKTCYRQYQQYSKVQTMLKNNLISLLDTAFPDANRLFTSPPRADGSEKWVDFVAAFWHCECVCGLSKKAFTTKYQKWCRKHGYNFSEDKALDIYASACGRFGVMPKTNTAKLLVEQAISQLQATSAALAALKQEMQSLAASLPEYPVVMGMFGVGPTLGPQLIAEIGDVRRFHSKKALVAFAGIDAPPYQSGQIDVRSRSISKRGSASLRRTLFLVMGVLLQCAPMDEPVYQFMNKKRSEGKPYRVYMMASANKFLRIYYASVKAYLDSLQHN

SEQ ID NO: 457997 - protein, 336 aa, unidentified
MNAVGIDVSKSKSVVAIMRPFGEIVSTPFEIKHTASDIHSLIELINSVEGESRIVMEHTGRYYEVLAHQLLEANLFVSAINPKLIKDFDNDSLRKVKSDKADAVKIARYALDKWQNLKQYNVMDELRNQLKTMNRQFGFYMKHKTAMKNNLIGILDQTYPGVNTYFDSPARSDGSQKWVDFASTYWHVDCVRKMSLNAFIDHYQNWCKRKKYNFSQSKAEEIYGKAKELVPVLPKDAITKLIIKQAVDQLNSASTTVESLRTLMNETASKLPEYPVVMAMKGVGTSLGPQLMAEIGNVSRFTHKSAITAFAGVDPGVNESGTYEQKKCSYLKTRFR

SEQ ID NO: 457998 - protein, 392 aa, unidentified
MEPQIRVGIDVGSKSHRVGIASPEGELLEEFSIPHCRQGFDRFFERVEHHRRGLAVAVAMEGYGGHARPLDKEILRRGYTLMNVNNLKLARFREIFPAPAKTDELDARLILDLFRLDEHLPLSRGALARVCEVPEVNQRLQRISRRRRELVEEKVRVQNRMRSDLMSVCPELLSITGSVDNQWFLSFLTCRDDLTQLARLRPESLHKVPGVGKKYAEKIRSWQAVAHFSPEVSWVGPMIISDASRVLELISQIASLEAGMRELAPSSEIARLLSTMPGFGDISVAELAGEIGTLERFAGEASLALYLGMCPLDNQSGEYHGSKVPRQVNKRARKAMMNALSHHIKHAPQSRGFYEKKRAEGKSYNQALRALGRHLVRVIWCMLRDGRDYELR

SEQ ID NO: 457999 - protein, 344 aa, unidentified
MLDRLFEPLLGPSGKAGESAYKPERTNMKTLPQSNPRVHFGVDVAKAELVLDLCGTIHRFANEPKSIARLIKTICHTSASPHLVCEATGGYEQPLAIAAARHRIPISVVQPQRVRAFAKGIGLKAKSDPIDAALLSRFGVATAPQPAMTKEPAIAELDALMRFRAEMIDSLQREINRAEHHTCPAVIRIHKDVVERYRKHIKTLDKAAAALVAKDGILSKTDAMLQEVIGVGAQTSRALLAFLPELGHGGRRSIAALAGLAPYDRDSGKATGKRFIQGGRAQVRRVLHMAAVVATRHNPVLKAFYQRLRLAGKPFKVAIVAVTRKLLIHLNTKMAHFLKNPVAG

SEQ ID NO: 458000 - protein, 336 aa, unidentified
MEPTTIAIDLAKRVFQIHYVEPVTGAIRSKVLKRAQLVPFFANRPATCVVMEACGSAHHWARVLARLGHDVRLIAAQFVRPFVKSNKNDAADAAAIWEAAQRPGMRFVAVKTEDQQAMLAMHRIRQQLVRIRVMQVNQLRGLLYEFGVILPAGRRASIEAAKVALASMAEQLPTMLADSLQDQISRLRGLDEQIARIEQRILEWQRNNDACRRISEIPGVGVLTATAAVSVIGQAKTFRSGRELAAYLGLVPRQNGSGGKVKLGGISKRGDVYLRTLLIHGARSVISSSRYLPERLRQMLTRRPTNVVAVALANKMARTIWALLAYGRTYQAAPAQ

SEQ ID NO: 458001 - protein, 313 aa, unidentified
MLYVGIDVAKNKHDVTALNVPGKTVLKPLTFSNNKAGFELLDLSLRQLNQDCLIALENTGHYAFNLLNFLHEQGYKVYTYTPLLIKEFAKSLSLRKTKTNKKDAHGIALKLLSDPNREQFQHDNRQVELKILARHIHRLKKKQSDWKVQYTRCLDIIFPELDKIVGKHSEYTYQLLTCYPNPQKRLEAGFDKLIEIKRLTASKIQDILSVAPRSIGTTSPAREFEIIKHYKRLIDKAETCVNDLMAEFNSVITTVTGIGDRLGAVILAEIRNIHAFDNPAQLQAFAGLDSSIYQSDQIDLAGRMVKRSSPHLR

SEQ ID NO: 458002 - protein, 338 aa, unidentified
MNYVGIDHHRQYSHLTVMDQEGQVLRSGRVPNVRVEIKKFLEGLEQVEAVIETGRSSYTMVDVLEEVGVGVKIARPNEVKAIARAKIKRDNRDSEVLAHLLRMKMIPEVYRRSQENRQAQRVLRQRAFYVSAMTALKNRVHALLAQQREEVREEVARETNIFSEKGRKMLLGLDLARGEKRLLEALLKTYRHLETRIGESTSFVEKLYEESREAQFIRTIPGFGKYLAVLVAVEIADVNRFADAAHLHAYAGVIPSTHSSGDRTHHGKSLRAGNRWLRWAAVEAVWPGVRADFDLRCLFERLARNKGANKAKVATARRLLTTIYNVLKEGRNYVAYRR

SEQ ID NO: 458003 - protein, 344 aa, unidentified
MERYLGLDVHRDSCTFCVVSEAGRQVQRQVVETNGQALVGFLRSLPGRLHLCLEEGEWSQWLYEVLSPHVAEMVVVWPERRTPAKSDALDARELAERLRTGRLGRVVYKAPRRYRRLRELARAYGLLTQDVARSKNRLKSLVRRRGIPCTGTGIYNPKERDRWVAKLPAELRSIGEFLGVELDCVVELKAEAEEAMVHEARRYPISRILRTLPGLGPIRVAQILPIVVTPHRFRTKRQFWSYCGFGIVTRSSADWVKVDGGWARARRPMTRGLNRNFNRTLKGIFKGAALTVITHPTDNQFRAAYQRLCDQGTRPNLAQVTVARKLAAAALAMWKNEEVYDPKR

SEQ ID NO: 458004 - protein, 319 aa, unidentified
MAQNEVVVVGIDVAKDKVDACIRAFKLRQTWLSTARGHRKLVVWLRKHQVNKAVMEASGGYERDWARVLREAGIEVRIVDPKRVRSFALSAGRLAKNDAIDAEMIAWFAETFSEAPGQPHDAAREELQALVKARLDLIDFRMRLVSRSEHAAPGLVQKAHAHILKSLASEIAKLEAAISAKIKSTPDFAERAEIIESVPGFAQTSSANLVAGMPELGQVSDEIAAALIGVAPYDDDSGKRRGERHIKGGRRWVRNAIYMPCVGAATQNNPVLKAYYQRLLAKGKEPKVAIIACMRKLIVILNTMIARRQKWDPSRYVLS

SEQ ID NO: 458005 - protein, 348 aa, unidentified
MSQSKQYVGLDVSLKETSICVIDDVGKIVWRGRTESTPEAIASAVKQHAPYAVRIGLESGQLSSWLFHGLKVAGLPVICIDARHAKAALSLKVNKTDANDAFGLAQIMRVGWYREVTVKGLDCQAVRALLVARAQIVSQITTTKNCVRGILKTFGRVLPKGLRSQFSGRVRAAIDGDPILGAIIEPTLRVLEAMRAQLLVYNKAVIQRARGDDTARQLMSAPGVGTVVALAYMTGVEDPARFKRSSSVAAYFGMTPRRYQSGEVDHAGRISKCGDGMVRGLLFESAKVLLSRSARPSALKTWGEALGKRIGPKKATMAVARKLAVILHRMWTTGTTFQWNAEAASPAA

SEQ ID NO: 458006 - protein, 431 aa, unidentified
MINSEATRYAEFCQFRDSIRGNDSYLIIGIDVAKDRHHAFFGTATGKTLLRRLIFDNNRTGFESLTQRAKQLMVVHGRRQVVFGLEPTGNYHKPLANRLLAQGHMLVLVTNKAIADNRESLDGRWDKNDTKDSANVADLVAQGKCQFYENASADLNALRSLLSFRKRLKKIEHRTRMQIRNGLLAKYFPEMDRYWGSGFQENLAIVRWCLDPRKIANMSFEVFLQRVTRRDRGLRQTKRLRAIHEAAKVSIGCPVDKAAEFEARLLVGQLTDLRARLEQTESRIATVCRRFRSYKRLLTLPGFGPYVASQVIARIGDPHRFAGRKQLIRLAGYDLNAKRSGKRSDTAVPVISKRGNGELRYALYQAALIATYHNDGFRALFTRYLKGRERERGIKTKMRVKLAVKMLVIAWRLMKTDTDYDPSLLQVSPMQ

SEQ ID NO: 458007 - protein, 348 aa, unidentified
MTLVGCDLHARKQQVAVLDLVTGEVQEQQLSHDGDAVERFYAALPPPVTVAVESTGYALWFHALIRQLGHTLLVGDAGRIRAMVVRKTKTDRRDALHLLDLVKHDRLPVIWVPDPETRDLRALLAHRMRLVRLRTTVKNGLHAIALSHRLVDGSKRLTRQRLTQLHRLVLPPHTARRRDESLELVAWLDQRIQQLDVLVAQAVDANPAARRLLSHPGVGPVTALTTVVVLGPVSRFPGSKEVTSYVGLAPAVHASADKHHLGQITKQGNPLLRLVLVQAASTAARYDEDLKRLYVTLRRRRGHAKAKVAVARKLLVRLFIMLRDGIDYEEFRERGRASHLREVQMAPA

SEQ ID NO: 458008 - protein, 361 aa, unidentified
MQIIGCDLHTRQQTLAILDTQTGELVEKVLVHEASNVRNFYSTLPGPVRVGIEATGSMQWFLNLMEELGIECQVGHPAKIRAAEPRKQKHDRRDADLILKLLVENRFPSIWLPSKELRDLRALLLHRHQWVRMRTRVQNALQAIALANGLRRGPSLWSQVGQHTMASLPLAPHTAHRRSELQALYAKFEGEIEKLNQRVEEQAYERPGALLLMTHPGVGPVTALATDVFLGDPARFAASKALASYVGMIPSEYSSGGRQRLGGLSKQGNPLLRFLWCEAAMHAARREPELQRFYRRKLIQKGLGKARVAVARKLGIRLWIMLRDQIDYNEFCRRGQMRLKNGGACAGMPKTGYGAKPSPTE

SEQ ID NO: 458009 - protein, 316 aa, unidentified
MQPSPVCVGIDISKAQLDLVVEPGGESLTVPYDDQGLATLILRLSQISPRRIVVEATGGLERVLLRALVDAALPVIAVNPRQVRDFAKATGQLAKTDALDAAVLARFAVVIQPPERALPDPQTQELAAVLARRRQVLAMQRAEQNRLDRASTRVRKRIEAHLRWLNAELARLDEDLDDMIAQSPVWRNRDNLLQSVPGIGPVMSRTVLAELPELGLLNRKQVAALVGVAPFNRDSGRRRGHRTIWGGRAPVRTALYMATLVATRWNPVIREFYRRLRTAGKPPKVALVAAMRKLLTILNAMVHHGTSWRSAVVQGA

SEQ ID NO: 458010 - protein, 453 aa, unidentified
MQQPIEIEVDEHEQVLERVAGIDVAKASGMVCTRTPAETGTGRRVTKVWEVKTTTRALLELADHLRAQGIQRIVLESTSDYWRPFYYLLEAAGLTVWLVNAAQVKNVPGRPKTDKIDAVWLAKLAEKSMVSASFVPAEPIRHVRDLARARFDLVEDRTRVKQRVEKLLEDALIKISAVLTDIHGVSGRVIIEALIAGQRNPKVLAELAKGRARARRAELEAACDGRFTDHHARLAKMLLSQIDDLGARIEEVTALLDEAIAALPAPAPAPADSTTAGTVNAAALDTGPTGYASAVKRLCQIPGGGPDSVRAVIGEIGLDMTVFGTPQRLCSWAKTSPRTVESGRKKGRARTGKGNPYLKAALGQMATGAAKTDTFLGERYRRLIRRMPKAKALAALERSILVIIFHLLADPAAEFADLGADFYTRRIDKARRTSHLTRQLQALGYTVALTPAA

SEQ ID NO: 458011 - protein, 369 aa, unidentified
MKNTIVHDEGATSLEAVTTKVKPTGAQIKIGLDMHARVYVAVAQYDHLLPKAARRLRPAEFVPWVEELLRGGHTVHVVYEACGLGFNLYRQLMAAGAHCYVIAPRKLDEECSRVKTDPRDASTLCQRLSRYLEGNTRELAVIRVPSQQEEQARHVSRQRTQLVCHRQKLEAQGRSLLISHALPAPAHWWKERTFSRLGQHLPAWVTTRLQMARPALLSLQEQIDALTSELEAAAPCSLPRGVGKLTSVVLTREICDWHRFNNRRAISSYTGLCPGERTSGSKRVPGSVTKRGNPRIRAALVECAWRMVRFQSQYPPVQRRLAVLAKGSGALGAVRKKAIVAVARRLAVDLWRLHTGRCTAEQLGLNISN

SEQ ID NO: 458012 - protein, 349 aa, unidentified
MDRTTYGLDIAKNVMQLHWVEAETGEIGRKKLARAKLAAYFAQLQPVRIAMEACGSAHHWARVLGGLGHQVELLPAAQVRAFVRSNKDDAADARAIWVAAQQSDIRRVPQKSVEQQAVLALHRTRQHWVSVRTATVNSLRGLLYEFGVVLRGGRQAGLKALAEQRVAIDEQIPATMRTLVDGQLNTLEQIGQRIEQLEREIAALHKKLAGARELDRVPGIGVLGCTALAATLGDAKAWRSGREFSASLGLVPAHAGTGGKVRIGHLSKRGDPYLRTLLIHGARAVIEHAKDKPKWLEQLLARRPLNVAVVALANKMARTAWALIAHGRAYQRDWKSTRPGSGAAQAAAA

SEQ ID NO: 458013 - protein, 477 aa, unidentified
MARNRKSDKSKKRQRPIRSLETIQPNAAGIDLGSREHWVAGPPQEDRSPNVERFGTTTPELLRLADWLAQQGVKTEAMESTGVYWIPLFEILDSKGFEVLLANARQVTHVPGRKTDMLDCQWLQLLHACGLLRGSFRPSDDVCRLRALMRERSTMVQQRSDWVRRMQKSLNQMNVCVHHAVSDITGVTGMTIIRAIVDGERDPHALARMRDRRCRKAEEQIAEELTGNWRPEHLFNLRQALKMYDQLRAVVTDYDSEILAYVQTLQPADNNDTDVPPPASKAKARNIAKRGQEPLRQALYQFSGFDLTTIDGIGVDTASDIVSELGLDFTVFPDENHFVSYLRLAPNLSISAGKKVSSKSKANTCTRVATALRMSALTLRNSKTALGAFYRRMAWRKGASVAVFATARKLAQLIYRLVRYGQAYVDAGAKAYEARFNQRRLKFYTKALNDMGYNVEPLAAVEASTVEASTAAEASIV

SEQ ID NO: 458014 - protein, 316 aa, unidentified
MSEPVYVGIDVAKASFEVAASGEEQTLSLGNDEAGHAELCQVLVPLAPRLILLEATGGHERLLALALAAAGLRVSVINPRQARDFARCMGKLAKTDRIDAQVLRGFAALLDAQGHEPRALLDEQQRELTALVTRRRQLVAMLVAERQRLALAHPKAKASILAIMDAIAAQLHDVDGQLREHVQAHHADLAKLLISVKGVGPTTASTLLAQLPELGHLNRKQITSLVGLAPMNRDSGTLRGQRHIFGGRADVRRVLYVAALVGTRFNPVLKAFYAKLLAAGKPKKVALVACMHKLLIILNAIARTKSPWSHEIAGIA

SEQ ID NO: 458015 - protein, 377 aa, unidentified
MSSSAPTIIYLGLDVHKDSVTIAVLPAGAAAPTRIDKYPNDFTKLRRVFERHAKDGELRACYEASGAGYVLQRAMHGWGYHCDVIAPSLIPTKPGVQRKHDKYDAGQLARLYRAGELTVIRIPSEAEERVRDLVRCRETLQREVVKSRHYILKFLARRGFIYRGGVNWRPAHYTWLRQLIGVTSPLASEDRIVFGEYFTLLEYKLSRREALDQHIEEIALRPAYAPAVAALQCFRGLQVHGAMVLATELVDWRRFASPRQLMAYLGFVPRENSSGPRERRGSITKAGNAHCRHVLVQAAWAYRLHPKIGPALTVRQRGQSPSVILHAWKAQQRLYTMYHRISLRRGPQIAVVAVARELVGYLWAVMRDVDPSTAASV

SEQ ID NO: 458016 - protein, 421 aa, unidentified
MSYKVAAIDIHKKVLMVVVASAAEEVGEATGEAIEFDCRRFGTGSSQRQHLVSWMREQGATEIVMESTAQYWKPIWMDLEPHFLKLHLAQAHSNRAPRGRKNDFRDAKRLARRLLADELILSFVPEAEQRMWRTLTRSKHQLTRERVRLQSQLEALLEETRIKLSSVISDLLGASGRRILAALAQGEKDPAKLAELGDDRLKCSKQELTDALTGSPEPLHLEVLKLYLERLQLLDQQIQSLDVLVAKELRKHQDAVLRIAEMPGFGVDSAQQIIAEIGVDATAFPTAAQFCSWAGTCPGRHESAEQNHSSRSPKGNRFVRRILTQAAQAAVKKKGSHFQSLFRRLLVKLGYKGAIWAIAHRLGRLVWKILHDEVRYVEQGQETNPKARKRRAQKLTQALRNLGYQVTLTPIQSTPIQEQQG

SEQ ID NO: 458017 - protein, 426 aa, unidentified
MYFKRSHTTNQRIERITMKTAVVGIDIAKDIHAAQVTDFRGRTLTPRHLSFTNDRMGFEKLLNWIQQVQSKHRLTSVLIGLEPTGHYWFNLTQWLLTHQIPVVLVNPVTTHRNKENRDNSPSKSDPKDALVIAELVSRGYYTEYVPQTETFERIKTLMSDREFWVKMLGSLSNRIVRWIDLYFPEFRQVFEDWTCVRAIATLKAFPLPSELQQRTVEEVVQGWYEQGMRRAGGMTGKAKAAQLLQAASRSIGHSHAREEARRDLARLIEEYERIVQQLHEMQQEVEALLEELPLARQLRSIPGLGTITIAALLACAGDLSQYAHGRQLLRRAGLNLAEHTSGKHKGEVKLSKRGSGMLRKYLYLGTLSLIAQNPEFKRMHERNQSKGMKKMASVFKCIGKLARIIIGMVQRGETYRPERMYLPSAA

SEQ ID NO: 458018 - protein, 336 aa, unidentified
MSHYCGIDLHSNNHVVVVIDEKDKRVLDKRLDNDLWATLTELAPYRETLKGIAVESTFNWYWLVDGLQDHGFGVRLVNTAAVKQYDGLKYSGDHQDAFHLAHLMRLGILPTGYIYPKEQRAVRDLLRRRMSLVRAASTQLISVQSQIWRSTGLRIKSAELRKPGFAPPPLDNYTLQAVQSGLAVYLAIQQEINGLEQSAHQAVKLSPNFKVLQTMTGIGKILGLTIMLETGDIHRFPAAGNFASYCRCVDSTRTSNGKTKGSGNAKAGNKYLSWAFSEAAHFAVRFEPLAQRFYERKKAKTNGIIAIRAVARKLARATWMMLKHQTPYEAKLMFPN

SEQ ID NO: 458019 - protein, 391 aa, unidentified
MASCFSLPKTEQNVRRKYFLSSQDNHLEKSQREASLLIFIHFKINKDSMQIIKQVVGVDVGNKELVLCLGKIYINLEKHLYQYGNFRNTPKGLEKMYEWVLKHTAPGIDLFFAMEATGVYHEKLAYFLEGKQCNISIILPNKISNYSRTLETKTTTDKTSSEAIALFGLERNLDLWHSPDPLYKTLKQLTRERDQLVHERSMVKNQIHAEKSEAQPNDRSLIRMEERVDILDRQENEIQTEIRQLVQSNAELKDITKNLTTIPGIALLSAVIVLAETNGFDNMKSKKQLVSYAGLDVKEKQSGTSVNGKPTISKRGNRYLRKAMHLPSLTAIRLDPNYKAIYARLVGRHGIKMKAAVAIQRKMLELMFIIHKTKRPYDPQYHLNQIEVETN

SEQ ID NO: 458020 - protein, 415 aa, unidentified
MSYMIAGIDVHKRVLMVAVADASLSSDDMEFHCRQFGTTEKELQHLAAWLQQCGAREAVMESTAQYWRPVWLALEGLFTLYLAQAWSNRAPKGRKTDFKDAQRLVRRHAVRELTLSFVPEAQQRQVRTLTRRRVQLVHDRVRLQNQLEALLEEMSIKLSSLVTDLFGVSARRILTALSQGVSDPEALAELGDARLQCTREQLRDALPGPIPELSRQLLVLLLEQLTLLDRQIERLFQLAASAMQEWQAAIGRLMEIPGIQMLAAQQIVAEAGPDAAAFPSAAQFTSWIGLCPGTNESAGENHSSRCPKGNRYLRRSLCQAAQAAARTKNSRFQALFRRLLPRLGFAKAIWAVARHVAIVVWLVLHNAVRYQERGGLSTPQAIKRRTQYLLKSLREAGYTVEIRSPLTAPSVQSGA

SEQ ID NO: 458021 - protein, 351 aa, unidentified
MFILGVDYHPSFQQIAFLNQETGECGERRLDHSDGGAEKFYRGLQSQGVHVRVGIEATGYARWFERLLAELGIELWIGDAAEIRTLRVRKQKTDRHDAQLLLKLLLEDRFPRVWIPNPENRDLRQLLWHRHRLVQMRTRILNQLQAVAMNEGQRWKKRLWNKRGRALLENLQLAPWARRRRQDLSELLDHFNPVIAELTTAIEREANKRPEVVRLMTHPGVGPLTALAFVLIIGDPFRFARGKQIGSYVGLVPCEDSSAGRQRLGHISKQGNKLLRFLLVEAAQVAVRFDLDWRRRYLHLATRRDRRIAKVAMGRKLAVRLFWMWRKGWEYSQVVEFGSHAGQLESTPGGQ

SEQ ID NO: 458022 - protein, 417 aa, unidentified
MAPGVMRCVVGIDVAKHAHVVCALEAPGGALCHKPSPIEATTEGYALLLSWLATWRAGGEPEAVLIGLEATGVLWEPLYDALTQAGYTVLVLNPRQTASWAASLGLRAKTDQADALTLARGLLAGLARASTLPTEEVQALRELTRARRDLVQARTAARQRLHDELVLVFPEFVRLLAQLPGDTDLGSPRVLQILCAYSSAHALVSAPLDTLAATLQEVSDGRWGAGEAELLHHTAQQSAASTRAVAARSLVVRTFAQQILHLQSQITELEAAIQVLLDEDPDGQRLQQIPGIGPHGAATIRAELGEMTRFSTVDEVVAYAGLDPRTHQSGAFVGQKRLSKRGPGALRHALYLAAFVAARCAPEWRVRYHRLLARGRAKKEAFNILARALLRVIYHLLRTGEAYDPALLNPPPAPAAG

SEQ ID NO: 458023 - protein, 482 aa, unidentified
MKAKPPEKIQETTNRSTRGHWNEMNRKQRREMMRKIQSEDISLEVVHPDAAGIDIGNESHYVAVAPSRDKQPVRSFGCTTGELKAMADWLKQCGIRTVAMQSTGVYWIAVYDILEQTGLEVYLVNARETKNLPGRKSDVQESQWLMKLHTYGLLRNSFRPSQEIRTMRTYWRQRNDLVQSAGRHVQRMQKALTQMNIQLANVLSDVSGVTGQAIIKAILGGQRDPHKLAEFRNPPVRASEEEIARSLEGHWEEDLLFVLQQEQDGYEFCQKQMAECDRQLNNYLEQREDRSQGAPLPEERRKGRRKKKSGNKPQFDLRTGLFRMSGTDLTRIDSIDVMTATTILSEAGWDMSKWETEDHFVSWLRLCPDNRISGNRVIGKGRLPTNNRVTIALKMAASALRLSDTYLGAQFRRFRTRLGAPVAIKAMAAKLARLVYRMLRYGMQYVDKGAATYQEQHRQLQIKQLKWKAATLGYQLIGVPAA

SEQ ID NO: 458024 - protein, 341 aa, unidentified
MSIITVGIDLAKNIFAVHGVDEYGKAVLVKPKVAREQLPSLIARLPPCLIGMEACSGAHHWARLFHTYGHTVKLIAPKFVAPYRMSGKRGKNDAADAAAICEAVARPNMRFVPVKEEHQQIILCLHRTRQGFVEERTATFNRMRGLMSEFGIVLPQKVACLRRSIGEHLEDLPGYANQCIGDLLSHADQLDARIADYDKAIAKAAREDARSKRLMEYRGIGPVTASAFLAGIGNGHDFRNGRQVAAWIGLVPGQYSSGGKARLGRITKAGDAYLRSLLVMGARAVLSGLGDKQDGFSRWARSLVERRGYWKAVVAIAAKNARLAWAVLHYGEDFRLNASAV

SEQ ID NO: 458025 - protein, 439 aa, unidentified
MPEVTQRKPETEFAAFLAIDWADQKHAWALQTSVAVEHGSLDHTPEAVETWAVELGRRFAGGPIAVALEQSRGSLFFMLTKYAHFVLFPVHPATLASYRRGFRPSGAKSDPSDAGLILELLVHHRDKLRRLNPDTTETRTLQFLVEQRRKFVDEKTRYSNRLTAYLKMYFPQVLRWFGDITSPIAGEFLERWPTLQTLQQAKPETIRQFLVGHHSRSHTIDGRMEEIARGLPATHDAAVIRSCSTAVVALVRILRSVREAITGYDAQIDTLAREHPDFSIFDALPGAGRAMVPRLIAAIGTQRERYQNASELQSYCGIAPVLASSGKMSCVHWRWACPKFIRQTFHEWARITIRYSAWARAYYEQQLGRGKSRQVAIRALAFKWMRIVFRCWKDRKPYSDAVYSEALSRRREPAANGLSTVNFQWKSCAGFSKFTGASS

SEQ ID NO: 458026 - protein, 347 aa, unidentified
MFPFYLGIDLHLKRSYMVLMNAEGEVIDKRRLKNTEMASYISKRIPKETYAVMEATRNWPFFYDLLEKHVDRVELAHAKGVRMIAAAAVKTDQIDASVLAHLARLNFLPIAYAAPQEIRDLRQHLRYREWLIDERRRAKNRVHAVLAGYNLASPVTDLFGRAGREWLKEVAEKKLRPTSRKVVLETLTMIDQLDTQIKELAKDIPLPEELKPKAEILMSMPGIGKLLSAVILAEIGDISRFNSPKALCNWAGLTPRVHKSDEVVRHGRISKQGSRYLRSAMVCAAMTACRISPRWYGVYEHLARKIGRRAAKVAVGRRLLTVVYFMLKRNQPYEEDYEQRRAAEQGA

SEQ ID NO: 458027 - protein, 359 aa, unidentified
MGHERTFVGLDVHARSVVACGIDGDTGEVVRARLTPDHEEIWSWLAGLEGPVAVAYEAGPTGFGLARFLGQRGVRCVVAAPSKISRAPGDRVKTDVRDAMLLARLLKLDDLTAVSVPSVEAEAARDLVRAREDCRGDLMSARHRLSKLLLRQGIVWSGGHAWTGAHDAWLRRQRFDQSARQLAFESAYESVAMTLARRDRLDDAIAAMAADSAFTPVVVRLGCLRGISTLTGFGLAVEIGDWHRFTGSTIGSYVGLVPSESSSGQSRSQGSITKTGNTHVRRLLVEAAWHHRRRNYAGAEMHRRWNLAPVEARQRGQEGNKRLHARWQRFDARGKRATVANVAVARELAGWCWSLAVMD

SEQ ID NO: 458028 - protein, 328 aa, unidentified
METLVERCAGLDVHKDSVTACVRVPDGHGGRYAETRRFTTTTAGLGLLAQWLGSFGVTRVGMESTGCSWKPVWQLLEDQVECWLLNAAHLHNVPGRKTDVADAAWIAQLVEHGLVRPSFVPPRPIRELRELTRYPKTQIQERSREVQRPGQGPGRTPGPELSSVATDIIGVSGRAMLEALVAGTSDPQVLAAFAKGRLRSKLPALREALAGHIRTDHHGLLVAQILAHIDYLDETIAVLSARISQVIAPFAEQVALLDTISGVDQRAAEVILAEIGPDMGQFPTAAHLASWAGVCPGNNESAGKHRSGRTRKGPRVAGRLSERGRQGG

SEQ ID NO: 458029 - protein, 420 aa, unidentified
MRNAGIHANSLLEVRRMYNAVGIDVSKGKSTVAVLQPGGTVIRKPFDVSHTSQNLNELADYLSSLDGTTKIVMECTGRYHEPMVKALSEAGLFVSIVNPHLIKNFGNNSLRKVKSDPADARKIARYTLDNWTELRQYSGMDNTRTQLKTLNSQFSFFMKQKVAAKANLIALLDNTYPGVNKLFDSPTREDGSEKWVDYAYSFWHADCVRKIGLKAFTERYKSFCKKHHYIFQQDKPEKLFNASKELVAVFPKEKTYKLLIQQSIQQLNLASEHVERLRREMNELASTLPEYSTVMGIYGVGKTYGPQLIAEIGDVSRFTHREALTAFAGVDPGVDESGQHKSKSNRASKVGSARLRKTLFQIMTTLLQNAPEADPVYRFLDKKRSQGKPYYIYMTAGANKFLRIYYGKVKECLRNLEQTE

SEQ ID NO: 458030 - protein, 401 aa, unidentified
MQETTQHDAVDVFVGVDVGKGQHHAVALDRNGKRLYNKALPNDEVKLRALIAELKTHRRLLFVVDQPSTIGALPVAVARAEGVLVAYLPGLAMRRIADLHAGEAKTDARDAAIIAEAARSMPHTLRSLRLADEQLAELTMLRGFDDDLAAQLTQTSNRIRGLLTQIHPALERVLGPRLDHPAVLDLLERYPSPSALAAANEKTLANRLTKLAPRMGKNWAAEIVQALNEQAGIVPGTQAAAIVMPRLAQQLAALRKQRDEIAAEVERLVLAHPFWPVLTSMPGVGVRTAARRLTEAAPKAFATAAHLAAYAGLAPVTRRSGSSIRGEHPSRRGNKVLKRALFLSAFAALRDPVSRAYYSRKIQQGKRHNQALIALARRRCDVLFAMLRDGTIYPPKSAPNA

SEQ ID NO: 458031 - protein, 430 aa, unidentified
MLYFSNDCYGGVYMPFKIFRKNCCGLDVHKTWIYACIGITDTNGLTEYRQARFSSFSKGLRELAEWLAKYSCKEVCMESSGKYWIPVFNILEKTCFVTLAHPKYTKPQKGNKTDRKDAKWICDLFMCDMIKPSFIPPQDIRQLRDLLRFRMKLTYQITGMKNRALNCLTVSNLKLDDVFSDVFGKSSRSIIKYILDHPGETFDVTPFVNKHCKHSIEEIQAAVDGAVSREQAVKLKICLDFIDEQEKRINELDAEIFRLAQPYSFVLELIRTVPGFNSNPLTAVRILSEIGADMSVFPTAKHLVSWAGCCPRNDQSAQKIKSTRISKAGSFLKPLLVQIANALLKSKEHPEFGERYRRIKARRGHKKAIIAVCRMILTAIWNILSKLEPYSDKGYLADKITEHSHIITKSQGLELLRKRGYIFSDNLIKP

SEQ ID NO: 458032 - protein, 435 aa, unidentified
MLKIRENAAGIDIGAKKVFVYVEAQDVKSFYTFTEDFELLAQYLLKHKVQTVAMEATGVYWAILYDILEEAGIDTWLVDGRQTKQVPGRKTDVKDCQWIQELHSHGLLNRCFVVKDLVKELRSYHRLREDHLRSCVMHINHMQKALTEMNIRIKEVLSQIHGASGMKMIEAILQGERDKNFLLSMCDRRIIKNKKTEVLKALNGRYTKVGLFALQQAYDGYSFYQTKISECDNEIERIIHKMGNGVKDKNLPAKRKPIRHNKPNVKDLGANLIDIFNGKDATVISGITDYTWMQLLSETGTDLSRWPTEKKFTSWLGLAPGQHRSGKMRRTKRKQGRPKAGQIFRQIAQGLLNSKTIAIGAFGRRLRSRKGPAIAIKAMARKLAELYWRVMVKGVDYAEHGIKKYEMQLVAQKQKSVERLAKELNLQLVNLQPVT

SEQ ID NO: 458033 - protein, 337 aa, unidentified
MKLYCGIDLHSNNHYVSIIDQDNNRLKEKRMSNDLSKTLTLLEPYKDNLQGIAIESTFNWYWLVDGLMDADYSVSLVNTTAVKQYEGLKHTDDQYDAYWLAHLMRLGILPTGYIYPKEQRGLRDLMRKRMQLVQCRTTHLISAQAQYWRSTGFRLRSQDIKKCPDNLLSVISDQNLFLSIQSNLNVIQLLNKQIETIEESILLQCKNLTEYEQLQTVFGIGKILALTITLETGDISRFHKVGNYASYCRCVDSKKTSNGKKKGSGNKKCGNKYLAWAFMEAANFAIRFYEPARKFYQRKSSKRNMIVARKALAHKLARASYYVMRDHVPFNPEKLFI

SEQ ID NO: 458034 - protein, 387 aa, unidentified
MMVNCWNEKLEVVVIENKPSEFKKLAEKVDKKSNHLGLEPIYGLENAYGYGRSLAVWLIEKGYIVKDINPALAYDQRKSAPMLRKNDEHDAYCVATVLINQLHTLPDAKPKDNEWTLSQLVNRRDLLVKDGIRFKNGLHEQISMAYPSYSKFFSEIDGKCAMYFWKTYPSPVHLQAKTAEELTIEFKEISRIAKKDKADLILDCVHNDGNTFREYQESRDFITTSLVRDLEHQKEELAGLDKEIEKILLSFDYKLTSMPGIGTSIASKLIAEIGDIRRFPSADKLARFAGVAPVKFSSAGKGKEQSSRQGNRQLHGLFYFLAVTMVSKPKNGIPNHPVFYDYYMRKIGDGKTKSQALVCIMRRLVNIVYGMMKNKTEYREPIREEEQ

SEQ ID NO: 458035 - protein, 474 aa, unidentified
MKEHKKTKAKTKSQANKSIREHQPNAAGIDLGAEEIWVAVPAERDQNPVRRFEAFTQDLKAIAKWLVDCGVQSVAMEATNVYWIPLYQLLEEAGLKVCLVNARHVKNVPGRKSDLSDCQWLQYLHSVGLLLGSFRPAQVICATRCIYRYRQNLLSLAGQHLQHMQAALDQMNIKLHHVIDDLSGLTGQSIIEAILKGQRDPAQLAKLRDKRIQASEEKIVKSLEGDWRKEHLFVLAKAWAQHQEVQKQIQDCDRELLEYTQQLEACTTLSKPLKVMHLKAELLGAQPLSTPVPKKKARKKTSKNQPLGPWQQELERFFGVDLTLIPGISVLTGLTLMTELGNDLSAFKTQHHFASWLCLCPANETSASKILRRHTRRSQNRVRQALRMAASSLHHDKSFLGDKYRRLRARLGPPKAITAMAHQLARLIWTLITHRVAFDLSFFAHQQKLNDQRRLKRLAASARQMGYQLTPFAA

SEQ ID NO: 458036 - protein, 433 aa, unidentified
MHEVEDEPLFAERAAGIDIAKAGVEVTIRVPSDTRAGRRQQETRSFATTRRELLSLADWLRAWGVAKVGMEATGDYWKPVYFVLESRGFDCVLYHAAQVKALPGRPKTDRADSVWLARITERGSLPSSFVPPAPIRALRTHTRYRRHLTQARTAEKQRVEKLLEDGHLKLSAVISDIHGVSGRAMLEAIIAGERNPTVLAQLARGTMRGKIRQLEEALDCSFLTEQHVAILAMMLAAIDSFTTQIDQLTARIEILAEPYWHQIQQPGAVHGTGITSAQDVIAEIGVDMTVFPTAAHLVSWAKWCPQVAQSGGKRKGNNAAGRGNPYLSAALGEVSISAGRTQSFLGAKYRRLVKRMPKKKALVATGNSVLAIFHALLSDPAATYHDLGPAYHEQRTSTRRQARNHVRGLERLGYHVTIEVISPDTGELLTATA

SEQ ID NO: 458037 - protein, 338 aa, unidentified
MKLYGGIDLHSNNCVLVILDDNGNKVLQKRLNNSIELILQTLLPFQADLEGLVVESTFNWYWLVDDLMAVGYTLHLANTAAIQQYSGLKHADDNSDAHWLAEMLRLQILPTGYIYPKQQRMARDLMRKRMQLVQQRTANLLAVQGLYSRHLCQRLSNNAIKKLSLVQVNEHFSDANVALAVNSNLAVMQCLAQQVLVIEKRLKQEQQLSPEFIRLTDIDGIGVTLGLTIMLETGEISRFKSAGDFASYCRCIGGARYSNGKKKGKTNSKNGNKFLAWAFVEAANFAIRYNTTVKRYYQKKLAKTNNTVAIKTVAHKLARACFYVLRDQVDFDVHKAFG

SEQ ID NO: 458038 - protein, 454 aa, unidentified
MARPSVKAVRRSAVLEPDAAGIDIGAQEIYVAVPPDRDQQATRMFTSFTCDLQALADWLHACRIRTVAMESTGVYWIPLYQILEQRGFEVCLVNAHSLKSVPGRKSDVSDCQWIQYLHSVGLLSASFRPPDAICAVRSLWRHRGSLLQMASEHTLHMQKALSQMNLQIHHVLSDITGVSGQAILDAVLAGERDPMRLAKLCHVLVKTPHETVAKALVGDYRPEHLFTLKQSLEGYRFYKRLIADLDQEIARLMQSLPSAKERETKLPPRTKHGVYQRNGNDPRFDLRGELYRIAGVDLTDVPGVSAITAQVILTEIGPDLSRFRHASAFASWLGLCPDKRVSGGKVLSSKTRKIKSRAAIALRMGANSLCRAKGYFGEFFRRMRARLGTAQAITATAHKIARILYHVLRTKEPYSETVFHQCDEQTLLRAESRLRKHAAQLGFQVIPINATSGT

SEQ ID NO: 458039 - protein, 355 aa, unidentified
MNSEKYIGLDVHQATIVVAVTDSTGKLVMESILETEAATILQFFAGLRGNLAVTFEEGTWSAWLYDLLNPHVEKLVVCNPRKNALLKDGNKSDRIDARKLAELLRGNQLKPVYHGENGVRMLRELSRSYLAIVKDLSRVMNRLKAVYRSWAIPCAGRDVYYRRHRAQWLDKIREAGVRRRAERLYEQLDMLQHLRQQARRELLAESRKHAITARLRQIPYLGPIRSALAVALMQTPHRFRSKRQLWAYSGLALETRISAEYRMVEGQVRRSKKLLSIRGLNKDHNHDLKALFKGAATMASVRPGPFQDFYQAALAKGIKPTMARLTLARKIAAITLTLWKKGESFDAEKLKSQAA

SEQ ID NO: 458040 - protein, 403 aa, unidentified
MTVRPQVWVGIDVGKTSHHACAVDETGKVVWTQKLANEQLVIEQLIDRAHSSAVQVRWAVDLTSPMALMLITVLLGAEQMVVYVPGRVVNTMTHAFRGEGKTDAKDARVIAETARMRSDLAEVTMPDELVIELSQLTGYRADLMADWVRGINRLRALLGSIFPGLEAAFDYSARTPLILVAGLCTPSEIRAVGIDGVTAHLIENKAWAAGITTTAATAVTLAEQQHLALPGEAGTAALVKRLARKLLDLDREIKDIDKTITERFREHPYARIIESLPGFGPNLGAEFLVVTGGDLASFATPGRLAAYAGLVPAPRDSGRITGNLHRPKRYNRRLRRVFYMAALSSIRAQGPSRQFYDRKRGERLIHTQALLALARRLVDVLWALLRDGREFTPDRPLPATAAA

SEQ ID NO: 458041 - protein, 360 aa, unidentified
MKRSYFIGIDVHCQFCEIAVVDVVGNVMFRDRCTTTIPTLLAVLEKVPRPRSLVVEEGSLAGWLWRGLAGAVERMVVSEPRRNRLIAKEGDKDDDLDAEKLAQLLRGGYVKEVHQVQSLEGAVFKQQVAVYHFRVRQRLRESLRLTWLFRQHGVMIRERDYANAKNRPALLARLPENAALRHMVTTLWSSYDALVEQEETWRKCLLQVASQEKVVQRFVAMPGLGWIRAATLYAYLDTPWRFRSKSALWKYLGIGLERHRSGNGPEHLGVPKLAHRLLKSTILGAALSAVAQGDNPFAELYRRWLAKGLSSKLARRNVARALATTLWGLWKNGSAYHPKWVGVPAAASAAARSRLGAAGC

SEQ ID NO: 458042 - protein, 407 aa, unidentified
MQITCGIDWAEAHHDIALVDEDGRVVARSRIDVGVGGFTALIELIAENGGSPADTPVAIETDKNLFVVALAAAGYTVYPINPRAVARYRERHGQAGGKSDPGDAIVLANILRTDFHMHRPLPKSTQQALTIKALARQHQEAIWAMNQTISRLRSVLLEFYPQAIKAFPKLKHHAATAVLAIAPTPAAALKLTRRRIESLLHKCGRRNDPALVDQILTDLKAAALRQPEGVEAALGLTVQGLVAIVAAMRTSVEALEAQLAREFQTHPLAPVLRSAPGLGPVLAARVLAELGDDPARFTSVKGIRAFAGTAPVTRASGRSHYVKARKVRNKRLADACHWWAFSALTWSSGARVHYDDRRARGDHHNAALRNVANKLIGRLWWCLANNQPWDDVAAWKTLPSPPTTAAA

SEQ ID NO: 458043 - protein, 420 aa, unidentified
MNAVGIDVSKGKSMVAIMRPFGEIVSAPFEIKHTASDINSLVELINSVEGESRIVMEHTGRYYEALAHQLSEANLFVSAINPKLIKDFDNDSLRKVKSDKADAIKIARYALDKWQNLKQYNVMDELRNQLKTMNRQFGFYMKHKTAMKNNLIGILDQTYPGVNTYFDSPARSDGSQKWVDFASTYWHVDCVRKMSQNAFIDHYQNWCKRKKYNFSQSKAEEIYGKAKELVPVLPKDDITKLIIKQAVNQLNSASTTVESLRTLMNETASKLPEYPIVMAMKGVGASLGPQLMAEIGDVSRFTHKGAITAFAGVDPGVNESGSYEQKSVPTSKRGSSDLRKTLFQVMDVLIKTHPQDDPVYQFLDKKRAQGKPYYVYMTAGEQVSKNLLRTSERISFISSRILIIIIIFRPALVWWSYFDT

SEQ ID NO: 458044 - protein, 346 aa, unidentified
MRYLGLDVHQRRTTVATLDDETGEVTSTLVPTVELTAYLSEQPDERRIVLEAGGNSWFVAQQLLSCGWEVVVVHPAKARPILATYGRAKTDRRDAEALVQAFRRGQLDHAVIWLPGAWIADLRELTRTREHLVKQGTRSRVAIRQALQRWGETCPYDDLRGKRAQAWLDDLEPRLRPAQRIVLGALRRTLATQAAEIERLSAEIEAWVRDEPDVQRLRTLIGVGVQTAAVVMAEIGDVRRFPSAAHLRSYSGLVPEVRQSGERSFTGPLTKAGNAHLRRAMVLAAQHFAASRATRDLRLRRWFGRLVYAHGANPAKVALARRLLDIIFALLRDQTTFDRERYALAA

SEQ ID NO: 458045 - protein, 386 aa, unidentified
MGSKPDCPPVLRVLSRRSGRTAALPYPPPKSGHYTTEEQSAEKGQDLVYYCGIDLHSNNNVLGVIDSSGNRLSIKKNPNDLETVKKVLRPFAANLEGVVVESTYNWYWLVDGLQEAGFKVHLANPAAIGQYSGLKHGDDETDTWWLAELLRLKLLKEGYVYPRSERAVRDLLRKRGQLVRMRTQNILSIQNLTCRNTGGRLSGSQVKQLTVEEVKELYKEETERGLAVICSVNVIKALEKQIETIEKKVKSKIKVSQPFQLLKTISGIGEILAMVIMLEAGDMSRFASVGNFSSYCRCVKSVRLSNNKKKGNGNRKNGNKYLAWAFMEAANYAIRYEPIIEKFYQRKSSKKGSVVARKAVAHKLARATYYVLRDQTPFDVERCFGC

SEQ ID NO: 458046 - protein, 353 aa, unidentified
MRIVCALDVHRRQITYLTVEVDSGEVSRGRISPATRQSVCAWLAQFDGVDEVHFALEGTTGWRFVVEAIERAGHRAHLADPAETAAKRGRKRRAKTDRADCDLLLRLLASGELPESWIPPAQILELRTRVRLRKALIDERTAWQQRLQAQLFHQGVAAGLKPRTRAGREALASVELSPAGRELVALALRMIDRIDRELAPLDSLLARFARRQPGCRALITELYGVGPITATAIIAELGDARRFRCSDDAVRHCGLDVTVHQSDNKRAPGHLSHEGPGLLRWALFEAAQQACRPASPDHEYYRQVALRIDHNRACLSVARKLCRRAYHILRELGDEALAPIDAPVAEEVIAAAA

SEQ ID NO: 458047 - protein, 459 aa, unidentified
MTKKARRAQRVRAHLKQVNLFAAGIDIGSRSHFVAVPDELDEEPVREFAGFTGDLHQLADWLVKIGIQTVAMESTGVYWIPVYEILEARGLEVLLVDARHVKNVPGRKTDVLDCQWLQQLHTYGLLRGAFRPQGEMVALRAYLRQREGLIASASDSIRHMQKALRQMNLLLDNVVSDITGMTGLAIIRAILAGERDAQQLAKLRDKRCRNDERTIAGSLEGHYREEHLFALAQAVERYDFYQQQVAACEGAIEQHMRQIEGDNDNDPDVPPASKPKGHSKNGFDFDVRSELYRLTGVDLTEINGMSENNVLTVISETGTDMNAWPSEKHFASWLSLSPGNKITGGKRLSGKTRPSANRAAAAFRLAAYSLANSKTALGAFYRRLRNRLGAPKAITATAHKLARLFYRLLKTKTPFVDVGQDYYEQQYRERATQNLKKRAAALGYQLIPESPNELQQSMC

SEQ ID NO: 458048 - protein, 358 aa, unidentified
MITIGVDAQKQVHAAVALDERGREIGHWRGANSLDGWRAVAAWAAGLGEACRWGIEGAWGNGRGLAQHLVAAGAEVYEVNPRWTAAGRRGARRPGKSDRLDAGAVALLVWREATTLPAVGADDETAVLGLLVAERDALVAESTRTRNQVHQLLLQRDPEYAAHLPRLRTQAGVRALEAYATDDARPLQQHRAAAVRRLAQRLRLLADQIKELVEQIRALAAPRFTPLTAICGIDLLTAAALAGILGPGRRFATDAQLAAYAGAAPLEASSAERTRHRLNRGGNRQLNAILSRIAVTQARCSPQARAYLARRTGEGKTKREAMRALKRFLARAIWRKWEECQATAAAPASPDPTSALVA

SEQ ID NO: 458049 - protein, 442 aa, unidentified
MRTLSVINANAAAIDVGSEQLHLSIAGERPVVFGTVTNEVYRLRDYVKGQGVTTVAMEATGVYWLYAYVVLEAAGLEVVVVNGRHVRNLPGRKTDMADCQWLATLHAHGLLRGGFVPPAAIRRLQDYQRLRADHISEAASQVQKMQQALERMNIKFHDVISDLTGVSGLRVVRAILAGQRDPEQLLDLCDVQIQKKKRERVIESLHGVWAPEHLFALQQALAVWEFYQQLLADCDRQIEAVLKDLAGPEPQPPTSTGGPASSTPVKPLGKNAPGIEHLHEMLVRICGGRDATALPGVGDHLLLQLVAETGTDLSAWPTEKHFTAWCGLAPGSRQSGKRRGSIKRQRNRAGRLFCTGSRSLAQSVDKALGAFYRRMRGRKGGLLAMKALARKLAELYYRVLRYGLAYAEKGLRAYEEKYAESQRRLLANLAAKQGFKLVAVQA

SEQ ID NO: 458050 - protein, 393 aa, unidentified
MGSENHYARAFSWRNYEYSKKPFAFSNDEAGFAAFKEWIDDIADKHEMEVIIPGMESTGHYWLNLGAYLQEQGMKPVHVNPHHVKKSKELDDNNPSKNDRKDPKTIAGLVNEGRFSYPYIPTGIYAEIRNLSNLRIQTQEEITRIKNRIARWFSIYFPEIKDVYRNPDAVSGLMVIKQAPLPCDIRELGVEGVNKIWRDARLKGAGIKRAKTLVTAAEHSIGNTEAPRSARKEIRNLLEDYEGYKRRMDELMEEIEKTLSEIPYIDKLMEINGIGIKTVSCFIAEVGDIGRFDNPKQVQKLAGYAIVADSSGKHNGESRISHRGRKRLRYALYEAAISVIGKNKEFKEIHSYYRTREKNLLKKMQSVIAVACKLIRIFYTILTKGGIMMVRRC

SEQ ID NO: 458051 - protein, 379 aa, unidentified
MEQVTTIGLDLAKRVFQVHGVDAAAVVIVRRSLRRRQILAFFAKLPPCLVGIEACATAHYWAREIARLGHDVRLIPPAYAKAYVRRNKNDPADAAAICEAVSRPSMRFVTVKTEVQQAAAGIHKVREMLIKQRTMLINTLRGLMAEFGIVVAEGPRHISELVAILADPADQRIPAPLHEGLMAIVETLRGLERRIERVEKQIVGWGRGSATCRHLITIPGYGPILSTAMAAMVVNPAAFTSGRHLSASLGLVPRQDGTGGKVKLGPISKRGNGYLRRLLVNGAMSVLCSKRAKEDPWLAKLLETKQRKVVACALANKMARIGWAVMTRQADFRRQPQDQLRPDRPQLGPTGHARGLKAHVLATVKTAARAPAAVAFGQS

SEQ ID NO: 458052 - protein, 424 aa, unidentified
MFIVGIDIAKRSHEAIIIAEDGQVVRKAFSFRNNCTGYNLLLEQVRRLTLVKSQIVFAMESTAHYWLALYARLLKDGYTVMVLNPIQSHSLRELYIRKAKTDARDSLVIADLVRFGRCKASNVPQDKILALRELCRSRAYLVDMAADLKRKLIALLDRIFPEYESLFDSVFSKASIAVLSKYSTPQKVKNANLRKLTDILMESSNGHFGEWKAHQLKEAACSSFGIDDSGGVYSTLLGMFLEQILSLTAQADSLEKQISVFFQEFNNPLTSIPGVGTVLAATILSEIGDITRFSSADKLLAYAGLDPSVKQSGEFKSNQNRMSKRGSPYLRRAIWLASTVAVHRDPMFQTYYEKKISEGLHYMNVIGHVSGKMTAVIFAVLRDGQPYQPILQSADWPSRVIFIRPAKGLVLCALFRYIPYTREL

SEQ ID NO: 458053 - protein, 346 aa, unidentified
MMIIGCDFHPSWQQVCWLDTETGETGEQKLVQAAGDAERFYRQVPAPALIGMEATGNCHWLVDLLSELGHELWVGDAAQIRASYVRQQKTDKRDAAHILKLLVEGRFPRIWMPSSEVRDLRQLLLHRYKLVIIRARVKNELQHLCLNQGVQRQHKLWSRAGQQVLRELPLKPWAARRREDLLRLMAMLDQQIEPLDQAVKAEAQRDKMALLLQTQPGVGPITALAYVLTMGEVSRFPRGKQVASYLGLIPREHSSGGRQKLGAITKQGNRMMRMLLVEAAQAAVRYDPEFRKEYRHRCHRKPKAVAKVAAARKLAIRLYWMLRTHKPYPEVVRIESSPRVPLVGAS

SEQ ID NO: 458054 - protein, 332 aa, unidentified
MSVYVGIDVHRKRSQVAVINEGGEVLANRNVPNGAKPILSVIGGLPAGTPAAYEAAFGWGWLLELLEGYGFEPHMVHPLQCKAIASARLKNDKVDAATLAQLLRADLLPEAWIAPPAVRQLRAMLRHRAQLVRLRTLLRNRVHAVLADHGHGRPAGCWSGPGRAWLASLELPAVSREVIDDALALMDALQQPIDRLDQEVRQRAKAGPRVKVLTQLPGVGPFTALVLLAEIGDITRFGSARKLASWAGLTPTVRGSDRTVHHGHISKQGPAWARWVLCEAAQTAKRHPDFAPGYEALARRRGRKIATTAVARKLITRAYHLLTDASAVGEPG

SEQ ID NO: 458055 - protein, 443 aa, unidentified
MTKSTLKIVNPNAAGIDIGSKEHYVAVPLDKTSEPVRSFGSFTDDLEAMSVWLKDNDVNTVALESTGVYWIPVHEYLEAKGFEVLLVNARHVKNLKGRKTDVADCQWLQQLHSHGLLEGAFRPKDEYCVLRGYVRQRKMLVEDQSRSKQHMQKALVQMNIQLNNVVSSITSKTGLAIIRDIVAGQRNPLKLSKHRDRRCRFSLEELMKSLKGNYRQEHLFALKQALEAYDFLQEKIDECDVQIEEYLSNLASSKSNDDTDIDSEAGREAQVQETQKEEQATEEKLSKIFGVDLTKIEGISLNTTLVVLGEAGADFSKFKSSKQFAAWLRLCPGNKISGGKILNSRTLPSSNRLRTALKMSACTIQRSKTALGAFFRKIRARAGTAKAIVATAHKLAKYIYAMVTKGEEYVLKTLQEYESQYKDKVRKSLEKKAEGLGLKLVQA

SEQ ID NO: 458056 - protein, 482 aa, unidentified
MKKKNIYVNQSQELLSMFEEAGNNEKIMCVPIDYAKKDHIVMFCNGYGRILRKPFSIKNSPEGIAYLTEQVTRSCSHRCIDPKHVFFGGEDVGSYAENFANTLRSGGWIVAGVNAHDAKEQRANIQASTDRLDLMGIATMLLNRRANCSPAQSGIYRNLRTLVRHRRKLVSMSTEERNRIHTVVDRLFPGFLDEKNSGIPPFSESSLYLMENRFSPLQIRRRKRHKLIEVLHRYGTSKPEDTSARLQEYAACVLNTPDEYIFTLQLSLAQHVKHFRCLQESINQLENEIAVWLAQTQGAFLTTVRGIGIVLAAGVSAEIGDPYKQKPLNNLVSYSGIIPRVKQTGGSEGKTRTGKVAKRCNRILKDYVVQSALHMGLHGPEDLMADYKRREAAGQHADFGIGRRYLRMAMCLMRTSQIYMPQQLRNTKVKPEERAGYYLMTWPYLRNKWNKAGALEAAFKNDRPLGQWRNMVQELYEIKLKL

SEQ ID NO: 458057 - protein, 461 aa, unidentified
MAKQSGKRKKGGAKVDATEGLPPLNLHAAGIDVGSAEHYVAVPLERDVEPVRRFGSFTADLHRMAHWLKDCRITTVVMQSTGVYWMALHDVLESHGFEVNVANARHTKTLPGRKTDVQECQWLQKLHTFGLLNNSFRPSEEIRVLRGYLRQRENLVAAAATCIQHMQKALTEMNIQLANVISDISGTTGLAILYDIVRGERDPYKLAMHKHSRIRASRQEIARSLQGTWRQELLFVLEQSLDLYQTYQQKIQTCDERIDGQLRSMEPKIDPVSEPIPEPRRGKDWRGHQSGFDLRGQLYRITGVDLTRIDGIEVQNAQTIISEVGVDMSRWKTEKHFASWLGLCPDNRISGGKVLKRGTRHVVNRASTALRLAASALLRSQSALGAKFRRLRSKLGAPKAITAMAHTLARLVYRMLKFGHDYVDRGIDFYEAKYQHQQLQRIRKQAAALHMQLIPLTRVVS

SEQ ID NO: 458058 - protein, 382 aa, unidentified
MRCGGGWKRTYGSAREALPTETGSKQIGRAYGAPRQSSTLPSIFVAVRDAAGKLLMECIIETKAATILEFIQGLHGSLWVAFEEGTSAAWLYDLLKPHVAHLVVCDPRKNALLKAGNKNDRVDARKLSDLLRAGLLTPVYHGESGVRTLRELGRSYLTVTKDLTRVMNRLKALYRSWAIPCAGQKIYAPRHRSAWLEKLSEAGVRRRAEHLYQQLNILVRIRREARRELLTESHKHPANQLLRQIPRLGPIRVALLIALLQTPHRFRTKRQLWAYCGLALQTRSSGEYRFTGGQLQHSKKLPALRGLNANHNHDLKNLFKSAATHASASTDPLGDFYQNLLAKGMKPAMARLTLARKMAAIVLKIWKKGERFDPGQLKRQAA

SEQ ID NO: 458059 - protein, 411 aa, unidentified
MTKEDFIYVGIDLHKEIHTAVMIDCYNQKLGEITFPNRPADFPKLVAKVKKCNTDGKTIVFGLENAYGYGRALAVWLIDKGYLVKDVNTAISHRQAKHRGAMYRKSDSDDAEAIALATLNMLDKLPDAYPNDAYWSLGQLVHRRDNIMKQRTRLVNQLHEQLCIAYPSYKQFFNDISRPTALYFWEHYPSRKYLKGKSVEDLRAELVPISHNKCSTKTCEKILDAVASDKVKNNAYQDARDMVTLSIVSDLQHYDSQLAEVDKMLEQMYKMLGCTLTTIPGVNVITAVKILAEIGDIKRFSNANKLAQFAGIAPLHLSSSGKGKDVATKQGNRRLQATIYFLAIQMVQVSSKGTPRNSVVRAYYEKRKAEGKTSQQALICISRRLISIIYGMLKNGTEYRMPVVENAGENR

SEQ ID NO: 458060 - protein, 355 aa, unidentified
MDSKKYIGMDVHKESISIAVMNGAGKIVMECVIETKASMILQFIDGLRGDLQVTFEEGTSAAWLYDLLKPHVTKLLVCDPRKNASMREGNQSDKIDARRLAELLRLNHLSPVYHGEHGLRSLKELVRSYLTITKDLVRVMTRVKAIYRSWAIPCTGKQVYAPRHRVEWLGKIGEPGVRRRAEFYYQQLDALRSVRQEVRRELLAEGKKHKAWKLLCQIPSIGPIRAAVLLGILQTPHRFRTKRQLWTYSGFGIETQSSADHRSVDGQLERVKKQSSIRGLNRNCNHDLKNLFKGAAIVASSKPGPFQEFYTALLTKGLRPEMARLTLARKIATIVLMVWKRGACFDAQHLKPQTA

SEQ ID NO: 458061 - protein, 413 aa, unidentified
MTQRPPQVWAGIDVGKGHHWITVVNADGDPLWNRKVINSETDILGVFGEVMDAADHVTWALDLVDGPAALLLETLANHGQRTRYVTGSKFAAFKKSFSGQGKSDLKDSYVIAEFARCLRRQTVPVPAPPRVTKELSLILSHRNGLSVERTRTINRMRAMLTSIFPELERSFDFARSDGPLVLLSGYQTPGAIRRMGESRLTTWLAKRGVRKAAAIAEKAVTAAKAQDSAINGEDLAAELVAELAQKVTQMNFRLKELEAKIREILSQHPQAPIVLSMPGFGELLAAELLAAIGDISRFPSAGRLAVASGMAPVSRDSGSNTGNRQRPTQYSRPLQRAFFMSSQSACLTAGTWEQEMYLRKYQGYTHDRGRHKKAVIAVARQRVSILWAMLRDGRLYEREYNPREKAAGEAQAA

SEQ ID NO: 458062 - protein, 438 aa, unidentified
MKVMHERVAGIDVHKKMIKVAIRSPGDKPWTRKTEILTFRTFYGVLREMARELRARGVTHVVMEASGVYTEPVYYALLEEDFTEVLVVNPAHVKALKGHKTDAKDCARLAELLECGLLQGSYIPAAELKEVRDLTRYRSKTVQARTSEIQRLDKTLESAGIKLGSVASDITGKGPAAMIEALIDGERRGKVMADLAKGRARAAGKLADLSMALEGRFTQHHALMCRLILDRIGVHDTAIGGLDQQIAGLAAAWQREMDLLKTIPGFGDVVAWTWIAEIGPAPHQWFGSHEKLASWVSLAPGNYISAGKRKHSRTGDAGTYIKPVLVQAAWAAIRVRGRLQARYNRLVRRFGAPKTPAAKKKASVAIAHTLLKIAYSVLKSGTPYQDLGEDFYTRRETPAQRQAWLERQIQKLHPGCTVTITISPPPGHAPEAALTPGA

SEQ ID NO: 458063 - protein, 404 aa, unidentified
MQHHIFSLEVFVMMISVGVDVSKDKHDCFIQSSEGEVLADVFTIPNNAEGFHFLLQRIRDCTTPQDKIKVGLEATGHYSYNLLGFLLDNGLATYVLNPLRTNLYRKGFSLRKTETDRVDARTIAAMLLSDTGLKPYTNTAYHNEELKSLTRYRFDKVKERAKLKSSISRLVCILFPELEKLVPSLHITSVYALLEEFPGAKQIANAHLARLKALLESSSRGRYKRDMTVEIRDAARNSIGSRMPAKSLELQHTIRLIRELDVEIAEIEEQIQSLMEELNSPITTIPGLGFRMAAMILAEVGDFTRFDSPDKLLAFAGMSPSTYQSGQLKNCYPHMEKRGSRYLRYALYNATKYVCHWDPTFAAYLAKKRAEGKHYNIAISHAAKKLVRLIFAMEKSRTTYHLAT

SEQ ID NO: 458064 - protein, 347 aa, unidentified
MRKIAYLSMDVHVRNCVLGDMNGNGKFLDNRPFTTSENNIIDALQAIKAKRKYLVMEAGPLANWVAQTATPYVTQVFISDPRENALIYKSSLKKDKIDTKKMCRLLRLNEFKEVYRPENDQRAIFKAAVQHYIDLRDQLTAIKQKTKAMFRQWGVIDVFTKSIYSTSGRKKFLIQVKQRPIYLQLKRLYALMDLTAAMKQDAKKTMKSLGRNYREIKEFIKMPGIGTVGAHTYDAYIQTPHRFEKTNRMWRYCQMGVTDRSSDGKPLGYKRLDKAGNGELKALSHRAFMVAMKTDNEVKRFYLNSLRATHNRVHARLNTQRKILSVMLSIWKKGKAYRPELFLDPSI

SEQ ID NO: 458065 - protein, 376 aa, unidentified
MDSNTIFVGLDVHKATIAVAVAPSGRSSEVRFQGSFAHRPGGMTEFARHLLAKHPGSHLSFCYEAGACGYGLARELTEAGHECLVIAPSLIPTRPGDHIKTDKRDATTLAKMHRAGELVSVWMPDARHEAVRDLVRARETAMYWRNKARQALSSFLLRQGYRYGGRSAWTASYWRWLATIELEHPAQQVTMQEYILAIREGDERHDRLVRQIEAAVPDWSLAPLVRALQAMRGIALITAATIIAEIGDIGRFDTPRRLMAYLGLVPAEHSSGPKIRRRGITKAGNTRARRLLVESAWTYCRAPRVSQEMQRRQEGLNLTILKIAWKAQLRLHDRYRRLSATGKPKNVVITAIARELVGFIWAIAQEVGPAKPAIAA

SEQ ID NO: 458066 - protein, 446 aa, unidentified
MSDRSGLSRGDRNRNARLARLRQLLPPENAIVGIDLADDKQAAVVTDHDSRVIARRRVSARAWELGGLLDWAAGKAAAAGFRSVTVACEPTGHRWRVLDQLAAERGLALVCVQPLLVYRAREGEDLTFDKSDPKDAVIIARLAAGLHCYEPERADAVWARLRHLGARRNQLTTDATAEVNQVRDLLECAWPAVLTASGAPFRSASWRAAVAVVLDRCAGDLRRVRRLGEARFTAAVRRELPRWGATRPCLRIVRAVFAALADSAGVTAHRPGALERAHLALGDWRGTRTRLADVEARMVAVLDDLGLRELVTTIAGLTPVGAAAILAETGDPARFASPRSLVKHAGLCPRDNASGGYQGKTSISGRGRPGLRLAAWRAVWAALPNNPVMAARFARLTTREENRLARQQARTACAAALLRWIHVVITRQVAWDPAIAAGSTPLHRAA

SEQ ID NO: 458067 - protein, 338 aa, unidentified
MNIVFLGIDLAKNVFQLCGLNQAGKPVYTKRTDRKELLQTLANIPACLIGIEASTGAFYWQREFEKPGHKVKVISPQYVKPFVRGQKNDGNDAQAIAVALMQPTMQFVPPKSPEQQDVQALHRARQRIVNHRTATVCQIRGLLLDRGIPIGSAVSRARRAIPLILEDAENGLSSRMRRTIAELYDLFNDLGRRIHFFDKEIETVFRQSEACQRIAKVKGIGPKTATAVVAAIGKGTEFKNGRHFAAWLGLVPRQHSSGDRQVLMNMTKKGDKHLRTLFIHGARAVVRVATNNNDGHMNQWVNQLKERRGFNKTTVAVANKNARIIWSMLRNDTEYQVV

SEQ ID NO: 458068 - protein, 429 aa, unidentified
MICAAVERCAGIDVGKEFLAVCVMTGPLQGEARKQTRRFGTIIAELERLRDWLKQEEVTHVVMESTGSYWKPVFNVLEDAVKVLLANPQEVKVRKGHKTDDKDGWWLAHLLRHAMIHPSFIPPRVIRELRDLTRRRKKLLGAGTGEKNRVQKILEDANVKLGNVLSDVFGVSGQLMLDALLKGEAEPAEIAQFAQRRAKQKIPQIIAALEGHRMSDHHRKMIGYSLEHMRFIEDQIGKLDEDIVAKIKEAGLEREWQLVQSAPGLKETSAANVLAEIGPDMSQFPSVRHISSWGGVCPGNNRSAGKNKSSHTTGGNPWLRAALTECAWAAAAKKECFLKEKFWRITTKSGGKKAPAIVAVAHTVLSLVYEALRTGEPYQERKVANLNPGQRDRMIRHHVKRLGKLGVTVRSNPLKKETKAAKTKNAKRT

SEQ ID NO: 458069 - protein, 328 aa, unidentified
MAKHTTICAGIDTGKRKLDVAIEDRGEQLQVENTPEGHKALVAWLQEHGVKRVGIEASGGYEQPVVAELRRTRFVVVVFQPAQVRAYAKFHLQRAKNDKIDAALIAACTAAVRKIHAAPDPRLLPFAEQLTMIDQISEDIARLKNRIESCRNAEIKKLWREDIARLERREKIELKALVASIRTHPDLAKRLGLIYSVDGIGLPTAVAILVRLPEIGRITREQAVALAGLAPYDDDSGEQVGVRHIEGGRKRLRRALYTASLAASFRWNQQLIQLYQRLTAAGKQHKRALVACARKMLIFANTVVARGTPWRDEPPAVKAPMVGLLSVS

SEQ ID NO: 458070 - protein, 523 aa, unidentified
MASTRSSKRSRAAAEFLQKPRGIIHPRVQQVGPDHFGIVSVDCAKARCKWMLTDFYGTILVPPTEVANNRVELDAAVARCRAAMIQHALGDAIVAIERTGRYHHPVKNAFARAGFETRIVHPYATKQFRQPANPDNKTDDTDLAAIARAAVNGFALVENPLPEAWRQLQLCIRHRRDLVRKTSALACQIREHLDAAMPGYAACFADKLWDSNVAFCLVRQFGSATVLLQQGLTGLCHYLRQQKVRFQQRTLDTVLAWAQSAAAPDPAAELHRQIALAYHDDRQRKTEEILGLERNIAHRLAQTPYILLLSFPGINVVSAADYAGEMGPIENYANPRSITGRAGLFPSRYQSDRVDHADGPLVRRANRALRAVIMGIADNLILCNQRFRMLAAAWKAAGKDPRLSHVKVACRFCRMSFHMVAGRQVFRHPSLRERGYILDKLLAFHLEHQTPYQQSLRDLNLAFTQIPAKEHAAEAQPLIDRQRTARRGRARGPQHIGEILAIVLARLGVGALPSTPSGDQDLP

SEQ ID NO: 458071 - protein, 448 aa, unidentified
MNPTPSPLGVIDPLATFVDVGSEQMHVSIAGGPPEVFGTVTGELLRLRDWLKERKIQSVAMEATGIYWLPLYAVLEAGGLQPMMVNGKHTRNLPGRKTDMKDCQWGATLHAHGLLRAGFVPPAQIRRLQDYIRLRNEHIASAAASIQHQQKALERMNVKLHDAISSLAGVSGQKVVGAILAGERDAGCLLALCDAQIQKKKAEQVKASLQGTWAEEHLFALQQAVDDWKHFQRQIMACDGRIEAVLKAIHGPPPPGKPVGGCGKRGGINAPQIEGLHALVVQLCGGKDLNVLPAHTDYSVLQLISEVGTDLSCWPDEKHFTAYLGLAPGSHQSGKRRGTVRRKRNRAGRLFCVMARSLARSKQFALGGYYRRMAGRKGGLVANIALARKLAELFWRVMVKGLDYVEKGLAAYEAQVLETKRRTLQRLAKQLGQVVLPPLSEPMLAHQG

SEQ ID NO: 458072 - protein, 414 aa, unidentified
MLKIVYRVCCGMDVHKSFVVACIASTNEYGVTTYKSKRFSTFTGDLRRCAVWLAENNCKDVCMESTGKYWIPIYNILESTCNIVLAHPKYVKAIRGKKTDKRDAKWIADIFKHDLVAGSFIPPAGIRQLRDLFRYRWKLTSFTTGEKNRAQNCLTVSNFKLDDVFSDVFGKAASAITTRILENPTEKITDVSGFRTKGMKATNAQVLDAVDGEMCAQQAEKLRIIRTHMDSLELCKLNLESLILSTAEKYLPQLNLVMTAPGIQSFAAIGIISEIGVDMSVFPTSKHLCSWAGLTPQNNESAGKKKTTRISRAGAYIKPLLVQCALCAVRAKQFPEVRNRYLALKKRRGHKKAIIAVARMLLTAIYSMLKKNEPYNPELYRVGDRPPAHREVSVEEAVFILQRQGYLVTAPPTP

SEQ ID NO: 458073 - protein, 446 aa, unidentified
MKKSSRMSVIHPHAAGVDIGAEFHVVAVPPDADAAPVRTFQRFTGDLHRMSGWLKTCHITTIAMESTGVYWLPAFEIPEAAGFNVILVNAREAKNVPGRKTDVNDAQWLQKLHSFGLLRASFRPEHDISVLRSYLRQRERLTEYRAAHIQHMQKALMQMNVQLHHAVSDITGVTGLSIVRAIVSGERDPSVLIQYRDVRCKKTPEVLQQALTGNWQPEHLFALEQSVAFFDFYQEKIRECDDQIETSLLQLSTGTEEPEGVLPSARHRTKQPNQLSFDVRPLLWKITGADLTQIHGFGPYLALKFVAECGTDMNRWPDASHFTSWLCLSPGNKISGGKVLSSKTRRSSSRIAAALRLAATTIGRSDTALGAFYRRLSSRIGKAKAVTATARKLAILFYNALKYSQKYVDPGADYYEERYRNRVLDGLKRRAKSLGYSLQQDPELCV

SEQ ID NO: 458074 - protein, 345 aa, unidentified
MKIIGCDFHPSFQQITICDLETGELQERKLSHADGQAERFYQELGESALIGIEATGNCQWFLDLVQRLGHEVRVGDAAKIRASYVRKQSTDKRDAGHILKLLLEKRFPQLWTPSAAMRDQRQLLRHRDKLVEIRTKVKNSLQHLAMNRGMQKKSRLWTRQGMEQFQQLAMPGWAGTRREDLLQLLKELNGQIEPLDQAVKQAAEQHPQAQLLMTQPGVGPVTALAFVLTVGDVTRFAGSKQLTSYLGLVPSEHSSGSKRWLGAITKQGNRFLRKLLVEAAQTTVRKDEGFRKEYQHRCRRRPKGVAKVAAARKLAVRLYWMLRSNVGYPEIVHIESNPRVPLGEV

SEQ ID NO: 458075 - protein, 361 aa, unidentified
MSSKRVSKKAKWFKENNFTPEDNIYVGVDVHQRHYHVAIWHNGRIGCVYSMSSDDERLLRDMKKMSSSLKNIVYEAGPTGYSLVRLLRSVNLPAEVVATTKTPRMSDSSAKTDRLDCQQLAEYAAKDLLSFVAVPTENQEADRQVVRLRDQLVSKRKRIMQQVKSLLLQHGISWPGGNWNKTLMKKLRQLNINDELRFTVDQYLDEYEFFCNKIADTEAKLRKVFSSEEHSAAVKIFKSHPGVGDIVAWQYRAEIFDITRFTKPEQISKYTGLCPRISQSGKTCREGPITKTGRKQLRAALIQAAWAWYRVDPYARKIYNRLLHNSGSGNKAIVGLAKRIAIHLWRMLCDGCLYDAKAVKA

SEQ ID NO: 458076 - protein, 304 aa, unidentified
MCGLKHQKEKRSMTYFAGLDVSVKETSVCIVDDAGKIVQEARVASEPEALLQVLTNTICRFKRVGLEAGPLSQWLYSVLAEAGLPVICVETRHMRAMLKAQINKTDRNDARGIAQMMRVGLYRPVHVKTLRSQKLRMLLTHRKLLQSKAIAIENDLRATLRNFGLKVGMVGTVKFEARIKELVENLPDLAVLVEPLLIVRQVVREQLGILHRRLLAIVQDDDVCRRLMTIPGVGPVVALTYRVTVDVPARFRNSKAVGAVFGLTPSKYQSGQNERSGGISRCGDEMMRMMLYEAAQSMLLRSAK

SEQ ID NO: 458077 - protein, 356 aa, unidentified
MSYDVKYIGMDVHKEAIVIAVQNGSGKLVMESVIETKASSILQFLHGLRGELHVTWEEGTWAAWLYDLLQPQVQHIVVCNPRRNALLKEGSKSDKVDAQKLADLLRTGMLRPVYHGENGLRTLRELGRSYQTISKDLTRVMNRLKALYRGWSIPCAGTQVYAARAREEWLNKLPQAGVRRRAELLYQQLDGLQALRREVRPEFLAESRKHKAAKLLRQIPCIGPIRAARLIGLMQTPHRFRSKRQLWTYSGLGIETHDSAQYSFVRGQLQRSKKPQQVRGLNRNHNHEMKEIFKSAATRASCGRGPFHDFYAGLLAKGMKPEMARLTLARKIAAITLTLWKKEERFDVEQLKTQAA

SEQ ID NO: 458078 - protein, 390 aa, unidentified
MQVKADRPEAPSAIRSDLGAIFVSLELSRSIWLITSLSPGAGEKMSKHSVPAGDIGALLARFSEMKQKVFARTGKSFPIIVIQEAGLDGFWTHRLLQKEGIESHVVDPASIATSRRRRRPKTDRIDGEALLRALLAYKRGEPRVCAMVKAPTPEEEDRRRLCRERKVLTTERVQHVNRIKGLLFCQGVSGYEPLRRNRRQRLDELKTGDGRLLPDHLKAQISRELDRLELLLEQIKAVEAERNALFAVAKAAAPTAAPVAMLLDLKGIGPEFAAVLWMEAFFRSFANRKQIAAYAGLAPTPWQSGSIDREQGVSKAGNPRLRTTLIQLAWLWLRHQPQSALAIWFKERVMCNGGRFKKTTIVALARKLLVALWKYVTAGVVIEGAVMKTV

SEQ ID NO: 458079 - protein, 402 aa, unidentified
MRYFVGVDWAKLSHAVCVIDEAGQIVVRRAVDHTADGLAQLMTALRRFGDPAELGVAIERPSGLLVDALVEAGFVVYPIHPNVVKASRPRYSAALGKTDPGDAYLLADLLRTDGHRFRALCSLSDETRALRALVRARSDLVGARVGLANQLRALLESFWAGAVAIFGEIDSPIALAFLLEYPTPASAARLGPKQMAAFLNAEGYCGRRSPDELLQRLRAAPTIELGPTEMVAKGSLACSYATLLDTTVKQIRQLTSAIERAVMAHSDATVFTSFPRIGKVNAAQILAELGVRDRFLTEEQLAGEAGVAPVTRMSGKHRAVVFRWACNHRLRTALTWWADNSRRASPWAHTVYLSARQRGCDHPHAIRILTRAWLRVLWRCWNDAKPYDVTQHHAAVALKQPA

SEQ ID NO: 458080 - protein, 400 aa, unidentified
MRAVFGIDVSKTSSEVAILVNGEKVHGYTILNDAIGFNRLLGDLKTVHNPEIIFEATGVYSRRLQAFLEEYSYAYTRLNPLEAKKQLDSLRVRKTDKIDAEKLAKSQLVHNRKPTYVQEEVYQHLRDLSRFYQNMTEDLVRTKNRLHKVLQVTFPELETLLSTPTGEQYWNLVMAFPCKEFVLSLSQSNLCEIVRQSTSKRISEKRITYLTDKLIKLAKQSFCAVKNTSPMLEEVRYYAQELLRLSERRQVVLNDMVALAQPLPEYDILRSIPGIAETTATSIIGELGDIRRFQSSNQINAFIGIDLRHYESGNFLAKEHITKRGNPYARKILFKCIHNIASASHTNPCHIADFYEKRKRQSQTTSTKPHTIASIHRLIRTMYYLITHNKLYDYSLTQNR

SEQ ID NO: 458081 - protein, 347 aa, unidentified
MRFYTTQHKFYCGIDLHARTMYLCILDQEGKILLHRDIKTDPDIFLKTIDPYREDIVVAVECIFTWYWLADLCCHEKISFVLGHALYMKAIHGGKAKNDKIDAYKIAALLRGGMMPMAYVYPPEMRSTRDLLRRRTHLARKRAELLAHVQNTLHQYNLPEIGKNLGKKCNREGVAMRFPDVSVQKSIELDLGVIDHYDQLLHRLEHELSLIAKVHDADSYFRLRSIPGIGRILGLVILYEIHDISRFPSVQDFVSYCRLVKSAKESAGKIIGSSGKKIGNAHLKWAFSEAAVLFLRRNPEAMKYRAKLERKHGKAKSLTILAHKLARAVYNILKRKEVFQLEIFFAK

SEQ ID NO: 458082 - protein, 371 aa, unidentified
MLHTIICGMDAHDNTLTNRIGVDREAAETMTVRNTQEGREKLFQHLKSLAQEHEGARIVVAYEASPIGFGIYDECVAAGIACHILAPTKMPKSLRDRKRKHDKADAQKIFELLKGHVLAGNALPDIWIPDHQTRDNREIIRSRLDVGQKLAAVKTQVQTLLKRNHVQRPESVRRCWQKSHYKWLEEVELKPGARIALSSLLRQIASLEQEIKVLDKEIGVLSETERYQLPAEALVVQIKGVGLLTAMVFLTEIGDMRRVSNRRQVGSFLGLVPSCRESGEDSDRKGHITREGSARMRKILCQASWVRIIYDEGEARVYERIVGRNPKHKKIAIVACMRRLGILMWHLAKSAQIKAGVFEDAQHDAAYARTA

SEQ ID NO: 458083 - protein, 345 aa, unidentified
MDKNISYAGKQVYIGIDVHKSKYAIAVISDGINIHRSGGIPASPWELISFIGRRFHGAQVQTVYEAGFSGFELHRALEEAGIKNTVVNPASIESSSNNKVKTDQLDAKKLAEHLYMGRFKCIRIPSREEESRRSLSRTREQLVESKKRFFIQMSMKLHASGLYPRNIKRLTVKLVKEVIDSPDVSNEVRMAIASLVSVHEHIANEINKLEEELEKQAQDDKNEKLYRSVPGVGFISARILSNELGDLSQFSSDKKLSSFVGLTPSEYSSGERVRRGRISRQGSARLRCILNQVSWVAITKDAQLRSFYDRLKVRCGGKKAIVAVSRKLLCRMLHMFKFQEEYRFA

SEQ ID NO: 458084 - protein, 343 aa, unidentified
MQITTIGLDLAKHWFQVHGVDANGHVVVRRRLRRSGVIAYFRSLEPCLVGMEACATAHYWARELSALGHTVKLMPPAYVKAYVKRNKNDATDAEAICEAVARPSMRFVPVKGAEQQSVLMLHRARSLLVRQRTMLVNALRAHMAEFGIIAPQGRRHVEILRQTIAHQQERLPELARSILQTIADQLNDTMERVREIEVRLVRLHRQNPISQLLATVPGVGIMSASAIAATTSNPTLFRSGREFAAWLGMTPRQNSSGGKDRLGRTSKRGDKYIRSLLIAGAVAVLRHARNRPTRDGEWVRALLARKPTKVAAVALANKTARIVWAVMMRGEAYQAKEVFEQSA

SEQ ID NO: 458085 - protein, 310 aa, unidentified
MSSSVYVGIDISKHRVDVATEPATPPTHFPQTEAGIGALVTHLQPLGPALIVLEATGGFETAVVTALAAADVPVVIIKPRQVRAFARATGRLAKTDAIDAAVLALLAARLQPPQRPLPDAALQDLKARVARRRQIREMITAEQQRLPQTRGRIRADIEAHIAYLKARSDEIDTDLRTLIAESPHWRATDDLLQSVPGIGPTTAAALIADLPELGRLAARPLAALVGVAPLNHDSGTRTAPRITWGGRAPVRSALYMATLTATRYNPVIKAFYQRLLAVGKPRKLALIAAMHKLLTILNAIVKTQKPWVHA

SEQ ID NO: 458086 - protein, 422 aa, unidentified
MEELHPRCAGIDIGKKFAKVCVRVPGPGGPGTRRKVERVSEVVTTWGSMTHQILQLREHLVAQRVTCVVMEATSDYWKPYYYLLEDLGHEVPGCEVMLVNARHVKNVPGRKSDVNDATWLAQLGAHGLVASSFVPPPAIRELRDLTRTRTALVRDRNREVNRLEKLLEGAGIKVSSVLSELDGVSGLAILRGLAQGLRDPVELAALAHWRLNGKKAQLIESLTGRFTDHHGFLVATHLRLVDELNILIEDLNDRIEVVIEPFRGFRDLICSIPGISTLVADVITAETGADMTQFPTPAQLASWAGVCPGNNESAGRVRATRTRQGNTHLKGALGIAALSASRTKNTYYHAKYKRLAGRRGKKRAVVALMHDMLTTIWHMAQTGELYNDPGPDFFQHLDPQREQRRARTILEAAGYHITKKAS

SEQ ID NO: 458087 - protein, 408 aa, unidentified
MELTPMHRRVIALDVHQARINACAIVEHDDGRVEITRCDFGAFKRDRRALAQWALQIRPEVVVMESTGVYWKSPFTALEAVGIVAWVVNARHVKAVPGRKTDVADAQWLATLARAGLLRASFIPPVQMRQLRLVARQRQKLVGMCSAEKNRLHKVLVDAGIRINVLVADIHGSSARAMVKALIAHKPMHEVLDCKGRLRASPEELFEALDTEQFSAAHRFVAHEIMEHIEQIEQRIARLDAYLLEGLKPWQPQLTLLQTIPGIDEQGAAMLLVEIGTDMDAFGSAERLASWVGICPGNNESAGKRKTGRIRKGNAWVRRLLCEFAQAAARTRCALKAKFDALSIRKGRKKSVVALAHKMLRTVYAMLASGTHYQDKEVDYEALNVQRNAPRWLKMLRKHGFIATPAAA

SEQ ID NO: 458088 - protein, 339 aa, unidentified
MDVFLERCAGLDVHQASVVCCVLIGAPGRKPQKLLRSFGTTTRDLEALRAWLAEHGVTHVGMESTGVYWKPVYAVLEGHVDLTVGNAHHIKNVPGRKTDVKDAEWIAQLVRHGLVAKSFVPPPAIRDLREMVRHRRTLIETRTAVRNRVLKLLEGANIKLSGVASDVFGVSGMAMLEALAAGTNNASEMAALVRGRMRRKHAALEAALDGRMREHQCFLLGMHLRNLKAIDQDLEALDARIEAQLEPYQVQHRLLMQIPGVDWVTAASIIAEIGTDMDVFASARRLAAWAGVAPGNYESAGKPKGAGTRRGNVFLKSALFAAASAAVPGLFNATKQQAF

SEQ ID NO: 458089 - protein, 448 aa, unidentified
MDSFPIINPNAAGIDIGSEEHWVCVPEDRDEQPVRRFACFTADLYAMADWLKKCHIDTVAMESTGVYWIVLYQVLETQGFQVNLVNARHARNVPGRKTDVLDCQWLQRLHTYGLLSGSFRPEDDVCVLRSYWRQRDRLIRYTSAHVQHMQKALTEMNVQLHKVISDITGTTGMRIIRAILDGERDPLKLAQMRDPRIKSSVETIAKALQGDYRQEHLFALKQSLELYEFYQHQIQSCDREIEAYLEQMDSKVDPDSTPPPASKRGNKKPRGNEPDFDLRTHLYRISGVDFTQIDGLHVLTVQTILSEVGFDPGKFPSAKNFASWLGLCPNNRITGGQVKSSKTRKVVNRAADAFRLGAQAVANSSSALGAYYRRMRARLDPPKAITATAHKLARIFYHLWKNHGLYHDPGADYYERQYRDRVINNMKKKAKNLGFEITLNPIANMQVS

SEQ ID NO: 458090 - protein, 411 aa, unidentified
MHNRQNYLYVGVDLHKEHHTAVIINCWQEKLGEIQFENKPSAFSKFLLEVETYVCDGITVVFGLEDVGGYGRALAKYLVDHEQVVKEVNPALSFLERKSQVMIQKNDSWDAECVARILINKFNQLPNAKPNDLLWSIQQLVSRRNALVKAQAALKNQLHIQLNHHYPSYKKFFSELDGKTALAFWQQYPSSSCLEGANIKQLTAFLLDVSNNTCSVKKASEILKLVKEDGHTMKEYQQTRDFLVRSIVRDIEFKKTEMKYIERELKQLVKLLDYQLETMPGIELVTASALIAEIGDVRRFPNANKLARFAGIAPVYFGSGGKGKTHKSKQGNRALHALFYNLAVQQVQVAKGSKLPRNPVFHAYYQKKLKEGKTKGQALVCIMRRLVNIVYGMMKHKTAYELPVVQEKEVI

SEQ ID NO: 458091 - protein, 436 aa, unidentified
MQPLPVLDPKAAGIDVGSEQMYVSIAGGAPKVFGTTTGQLHALRDWLVAEGVHSVAMEATGIYWLCAYEVLERAGLEVLVVNGKHVRNLPGRKTDLKDCQWIATLQAHGLLRSGFVPPEHIRRLQDYLRLRTDHIAMAASHEQHMQKALERMNVKLHDVISDLTGVSGLKLVRAILGGERNPVALLALCDVQIQKRKAEQVREAVRGTWKPEHLFALRQALELWEFYQQKIAECDQALAEVLHEVAGPDDPANPAPPATKRGGHNSPDIQNLHGMLWRLCGGKDPTVLPGVADYTMLQLIAETGDDLQAWKTEKQFTAWLGVAPGSKQSGKRHGNQKRRRNRAGRLFCVIARSVGRAVDKALGGFYRRLKGRRGGLVANLALARKLAVLYWRLMVHGMHYVEQGLKKYELQVVQTEQRVLRKLAKKHGLELQPRAA

SEQ ID NO: 458092 - protein, 353 aa, unidentified
MANHTGGVVGGVDAHTDEHHVAVVDLQGRLLGATAFPTTAAGYARMISWLRSHGEVERVGVESTGAYAAGLVRALRAGGISVVEVNQPHRHARQRLGKSDPIDAELAARAALSRTATAVPKQTSGIVEAIRQLQVVRTSALKARHAALQQLNDLIVTAPEQLRSELRHGRTMKAKAALCQKLRPDTQRIHEPAQAAKLALSSLARRIHELDREILELDRQLEQLVRAAAPRTTQLFGVGTQGASQLLIAAGQNIDRFRSEAAFAKICGAAPIQASSGRTNRHRLDPGGDRQANRALHMIAVRRLRYCQRTQAYATKRTADGLNKRDILRCLKRYIARETFHTLRADLKALDST

SEQ ID NO: 458093 - protein, 485 aa, unidentified
MAKRKMSTFERLQRGKWSREQRKELAQKLEAADLTIVHPDAAGIDVGNESHFVAVPAGRDPQPVQEFGSWTADLQRMAAWLKACGIRTVAMQSTGVYWIAVQEVLEQAGLKVFLVNARGTKNLPGRKSDVQECQWLMKLHTYGLLANSFRPPEEIRAVRTIWRQRDRLVQDAGRAIQQIQKALTTMNIRLANAISDVSGVTGLAIIRAILKGERDPRELAKLRHPCIQASEEEVVRSLEGHWRDDVLFELKQVVEGYDFYQRQMGACDEELQKYLAVLPDRRRESAAVGADPGPTKGTKQRHRSKAERKGKTRRKNQPGFDLQAELHRTFGVDLTRIDGIDIMTGQVILSEVGPDLSDFPDEDHFASWLELAPRRNITGGKVISQKSRESRNRVANALRLAAESLSRSDSYLGARYRRLRGRKEGKKAVKAMARHLACLVYRLLTKGQDYVDRGAAYFEKKRTEREMIGLQRKAAEYGMRLVPVA

SEQ ID NO: 458094 - protein, 391 aa, unidentified
MIYVGIDVAKDKHDCFITNSYGEVLFKSFTIPNNRDGFETLFQKVQSVSDDLTKVKVGLEATGHYSYNLLGFLLDKGLTTFVINPLHTNLYRKSLSLRQTKTDKADARTIASMLMSDVNLKSYSDTSYHNEELKSLTRYRFDKVQERAKLKTSISRLVCILFPELEKLVPTLHMASVYALLSEFPSAHAIASVHLTRLTNLLSESSHGRYGKDTAVIFREAARNSIGSDMPAKSLELKHTIKLIQELTSEIDEIEAEIKSIMDEINSPILTIPGISYNMGAMIIAEIGDFSRFDSADKILAYAGMSPSTYQSGQLDNCYSHMEKRGSRYLRYALYNATKYVCHWDDSFGAYLAKKRSEGKHYNVALSHATKKLVRLIFAMEKSGRAYLTTT

SEQ ID NO: 458095 - protein, 353 aa, unidentified
MIVIGIDPHKSTHTATAVDPATNTDLGSIRIDATRTGYKTLIAWAKSWPQRQWAVENAYGLGHHLAQWLLVLGEVTLDVPTTATARVRELSRGGRRKNDRIDAAAAACVAAAQGDARPVDPEGPTDILFLLDERRTNLSGSRTRIVNQLHALLRQLLAGGAPTSLTAAAATALLRGFRARREVDRVRVGLCRDLIADVRRLDDQLAANEKQMTHALDERGTRLREVDGIGAVTAARLIGRTGRPDRFPTAAAYANYNGSASVQIASADTDRHRLSRYGDRQLNSALYTVAVVQIRMPASAGRAYYDKKIAEGRKPAAARRALKSHLSDHVWRIMLADEKRRLRPEKNQSARAA

SEQ ID NO: 458096 - protein, 339 aa, unidentified
MTVKTVGLDLAKDVFQVHGISENGRVIFNKAIKRAKLLAFFEALPPCRIGMEACGSSHHWGRQLRKLGHEVKLMPAGYVKPYVKRGKNDAVDAEAICEAVRRPTMRFVEIKTEEQQAILSIHRTRDLAVRQRTQMANMIRSLLREFGHILPIGIEAVTAFAKRHLGGDRPDMPEIANGLLGIQCYQFIGLNERIEGYSKMIEQHALVNADARRLMRMPGIGPITASAIVATIGDAKQFQTGRDLAAWLGLTPLNKSSGGKERLGKITKQGDRYIRKLLVVGMTSRAVMAKRSPEKVDLWTAKIIADKPFRLATTAMANKAARSIWAMLTKKQEYRQPAF

SEQ ID NO: 458097 - protein, 345 aa, unidentified
MLDTETGEVVNLTLMHEGNQVREFYSQLPCPVLVGIEATGSMHWFLNLMEELGIECRVGHPATIRAAEPRKQKHDRRDADLILKLLAENRFPTIWLPTKELLDLRALVLHRHQWVRIRTRIQNALQAMALANGLRRGPSLWSYDGQAKIAFLPLPPHASYRRSALQAMYKKMEEEIETLTQQVAEQAEQRSGARRLMTHPGVGPVTALATDVFLGNPKRFLDGKALASYVGIIPREYSSGGKQRFGGVTKQGSPLLRFLWCEAGAHAVRRDPELKRFYRRKLVQKGLGKARVAVARKLGIRLWIMLRDEIDYEEFCRRGQKQQSGAACAGMLEVGNGANSHRPVD

SEQ ID NO: 458098 - protein, 351 aa, unidentified
MLTIGCDFHTRFQQIAMVDTTTGEMIERRLEHENGEAQKFYSTLPGPARVGMEATINAQWFEKTLHANHHELWVGNPAEIRAAMVRKQKTDSRDALHILDLLLTNRFPRIWVPSPAERDVRQMLRHRHKLVGFRTSAMNQLHALAMGQGLCRKKKLWTIAGRKELEALKLDPWASRRRQELLQLLDQLDPWIEDLDRAVIEEAEHHPGAVQLMKQPGVGPVTALAFVLTIGPISRFRRSKQVVSYLGLNPSEESSGGKQRLGAISKQGNTMMRWLLVEAAQIASRFDPELRRAYQRLKFRRGVSGVAKVAMARKLAVRLYWQLREAAQSVPPAPMQGSPTCPMVDESLSGI

SEQ ID NO: 458099 - protein, 410 aa, unidentified
MTVITIAQNTPVLVAIDIAKARHEVLIAVPGKKRRRRLTVLNELADFTRLIAALKDYGHPVRAAFEATGNYHRALAYHLATAGFEVKLVSSVALARTREALHNSWDKNDPKDAQVILHMMEIGNEQFYHDPLVRGTNDIQELSKTHDIVSKSKTELWHRILTHYLPLYFPEADRFHRSSRSDWFFAFLERYPSPHFISAMSKDAFIADAWDVVGRKVAKERLLADIYETSKVSVRLPVGLDSDAISMFRLVLGEGRSLIAQRNQIEDRAVALLKDLPDYQLLTSIPGIGPINALTILAEAGDLRRFGHHRQFLKFCGMDLATIQSGTFRGQTKLSKYGNARLRRTLWMAGQVAILQRANSFRDKFERYITKDRHNTHLRRKAYTAIAAKMARTVHGIIKNGEPYRPFFEG

SEQ ID NO: 458100 - protein, 418 aa, unidentified
MNEIRTKGRNIVNEKTLLVTVDIGKMMNMGYCRCPDKTEVKPFEFQNGYQGFNKFLNIILKTQTTKKLEHIVVGFESTGAYAEPLMHFLRRGAIQLVQVNPLHTKKLKELQGNSPSKTDKKDPRVIADIMELGHALTVMIPEGAAADLRRLTNARERVLQRRTALLNQLQDIVFISFPEFLGIMGDVKTQTAHYLLKHYPTPADILESGLDRLISEMKKVSRGKLGIKRATALYEAAKTSVGIQEGHVGLSLELQEFLRSIEECEHFIERLEEEISRCLREIPYSEVLLSMKGIGKITVAGLIGEAGDFRKFRSISELLKYAGLNLYEISSGKRKGNKHISKRGRSLMRKLLFFAAIRTVRKNGIMHDHYQRYLRRGMKKIKALVAVSRKLLGIMLALVRDHTLYQVNYGETQYLSAA

SEQ ID NO: 458101 - protein, 341 aa, unidentified
MKKFIRIGVDLAKNYFQIHALASESGPAVTRKLKRSKMVEFFSQIEPCLVGMEACGSAHYWARKLKKLGHEVLLMPPDYTKPYVKRGKNDAVDADAICEAMSRPGMRFVPVKSAEQQATLMLHKTRELLVKQRTMSVNALRSHLSEFGIIAAKGIGRVDELLELAESDATLPAATRAAVEVLALHLEGLDKSIDDLEDTIASAHAQSEMSRLLDEVPGIGKLIASVIAASVPDAGVFKSGRDFAAWLGITPRQNSSGGKQTLGAITKQGNRYIRKLLVLGATSLLRVVGKRKGALRDWIVGLLAKKPARLVTVALANKLARIIWAMMTTGESFRTEMFAKA

SEQ ID NO: 458102 - protein, 426 aa, unidentified
MQPHYQCVCGVDVHKEFLQVCILRRDEDPDIFRVFNNFSGVQDLKQRVEEEGCECIACESTGVYWYRLYLSFEGQIRVIVGNAYQIKSIPGRKTDVRDSQWIAELAMNGLINPSRVFPKKDRELRELTRTRESTVHTRTQIKNRIHRTLDSAGIALGKGVNDIFGKSGTHLLWGLLNRGSIEDVITTIPSARVKKKVNTLREILSGSLSDLQIMLIKKNLDLMAHINEHIRALDEQIIARIGDQERIRDVDIACSIPGVSVTTAVTALAEIGDYHDFVNPEKLASWAGLVPSVYQSAGKNCSGKITKHGSEPLRWILVQAAKSAGRTVNTTFRKFFNRITYRKGANTATVALARKILCILWHLLMKNELYVDPLKSAKLTKPRPVQKFSKNSPSDIQKAIDFILDAGFKVIYPDTTLDQNFRRLSR

SEQ ID NO: 458103 - protein, 344 aa, unidentified
MEPMYYIGLDVHKRKISYCVKDSGGKIYAEGLLSATRLDLDHWMKTLPQPWSAAMEATMFTGWIYDHLQPHAAALKVAHPLMLRAIAAAKKKNDRIDARKICDCLRCDFLPECYMASTAIRERRRTLRYRNLLVRQMVQMKIKISALLMEAGVSYNKQRLHKAGYFRELLASNPDIDEGLRALLRLCRETVVRLQKTESALVRSLESDALLVDRVERLMTIPAVGPITALTWALEVGDVQRFSSIKKAISYCGLCGAEKSSGNTVQRTPLSKQRNKHLQTTLIEAAKMAPRNSPALAMLYDKEKQKGNANRATLAVARKLVAYLMAVDRGQRTFQVVETSNIAA

SEQ ID NO: 458104 - protein, 422 aa, unidentified
MRSVALDVHLDFCEVAIVEDGEVRSAGQIDTKPQQIELFASSLGPDDRVALEVTGNAWESARIIEPHVAQVLVVSPSDTGIRQARAKTDRLDARTLARLLAAGSLDAVWMPDRKTWVMRRRLSRRGQLVHARTRSKNEIHAVLMRQLVGRPPVSDLFGVKGRKWLQGLELAPEERETVDGAMRQIEFLDAEIAEVERLIASDALSSAEIKRLMSVPGVNVIVAASFLAAIGDISRFQNPRKLVGYLGLDPRVRQSGLGPATHGHISKQGSVRARHALVEACWSAVRQPGPLHAFYERIRARRGHSVAIVAAARKLCCLFWCLLRREEDYAYAQPSLTKKKLRRLEITAGAPRYSANAAGIWSANDAVRQAERELARQAEVAYARTVRDWHAAQAVKAGASATLGRASKEPSKGKAARQTTSP

SEQ ID NO: 458105 - protein, 352 aa, unidentified
MLIIGCDFHPGFQQVAIFDNRTGEIEQKRLQHRGEAEQYYGSLAGQDVLVGMEACGQYPWFERLLRESGHQLWMGDAAKIRASVVRKQKTDRRDAEHLLDLLRQNRFPRIWVPSLEVRDVRQLLIHRHKQVQARTRTKNQLQAMALSHGVQKKYKLWTQAGREELQQLPLLPYGAERRQRLLEALDGLEAEIGELDRRVAQEAGQRAEALRLMTHPGVGPVTALAMVLTLGPAERFESGKQVASYFGLIPWEHSSGGKRRLGRISKQGNSFLRFLLVEAGQTAARYDPQLKRFYRRLAARKNRSLAKVAVARKLATRLYLRLRKNWTYAQLCQAVMQVSPSHSVAGEQEPSA

SEQ ID NO: 458106 - protein, 338 aa, unidentified
MNITTVGIDLAKNVFHLHGVDGNGKVMLRKRMSRRRVLEWAVNLPPCRIGMEACSGSNYWAQVLGAHGHDVRLMSPQFVKPYVKSNKNDRNNAEAICEAVTRPNMRFVRPKSVEQQDIQSLHRIRSRLVGRRTALVNQIRGLLHEYGIILPQGIGHVRRRLPELLEDGENALTILSRGFFGGLYDELRCIDERIAGMESKIQCLFKHSELCQRIARVEGIGPITATALVATVGDAGAFRGGREMAAWLGLVPRQCSTGGRSRLLRISKRGDRYLRTLLIHGARAAVRVADRKTDARSIWITGLKARRGNNIASVAVANKNVRIIWALMTRGEAYRRAA

SEQ ID NO: 458107 - protein, 350 aa, unidentified
MHATTVAVDLAKDVFELAFADAEHRIVQRRRLSRRAFAQALGNTEPLRVVMEACSSAHYWARRFTAQGHVVRLLPARDVRPYVRRNKTDRTDAAGLLEADRCAQIDTVPIKSVEQQGVQALHRIREQLKAQRTATINLVRGVLREFGFVIPLGAANVRPAVLAVLEDGDCDLPMPLRHTLAELLEQLARLAQSMIGIEQRLQRIAQCDPACLRYQQVPGIGLLTATALRASTGPLDRFRSGRHFAAWIGLAPREHSSGSQRRLGRISKRGDGYLRLLLIHGARAALRAAQLRWQHAQPLTRLQAWAIELQQRIGHNKAAVALANKMARRLWAMEHHRTNFDPDHVSLRTA

SEQ ID NO: 458108 - protein, 304 aa, unidentified
MMVNSTATSNEQSICAALELSKNSWLLAIQVPGRDNPSLHPLLGGDAEGLMAKLDAARDRVAKATGQPPAVTLCYEAGYDGFWLARFLEQRGITCQVMEPASLRVNRRARRVKTDRIDVENILHTLIAWCRGERHVCSMLVIPSVEEEDLRRCHRERDRLIRERTAHTNRIKGLLFGQGIRGINVKSRYKTLKPSELVTGDGRPLPDRLGREITREIERLAQVQAQIVSVERERDHPVTSCAATEIKRHDLLRLKGLGPALSSTLTREVYYRRFTNRRQVASYIGIAPSAYDSGDGHRSYYRSS

SEQ ID NO: 458109 - protein, 342 aa, unidentified
MQITTIGLDIAKNVFQVHGIDAAEKVIVRKQLRRGQMLAFFKALQPCLVGMEACATSHYWARELRKLGHQVRLMPAKDVKAYVKRNKNDAADAEAICEAVRRPTMRFVQIKSVEQQGQLMLHRARDLLMRQRTQLINALRAHMAELGIVAAQGREGVKELVKIIASEQDARLPVDAHASLVVLAAGLQALQTMIGSIERRIIAQHRSDEASKRLRSIPGIGIVGATAIAATVPDPKVFRSGRDFAAWIGIVPRQDSTGGKQKLGPISKQGDQYLRRILVVGAHAVLKRARHQPEKYPWVTRLLERRPFRVVAVAVANKMARVAWALLARGGSYRAPALAAAA

SEQ ID NO: 458110 - protein, 425 aa, unidentified
MNYKQNEKINQVKESTLVVGIDIGSTTQYARAFDWRGIELGKVFTFSNSREGFESFKAWMQHLQDKYKKLDAIVGIEPTGHYWFDLGAYLEDEGILLVMVNPYAVKQTKELDDNSQSKNDRKDPKVIAKLVTEGRYSAPYTPDGVYADLRIMVANRKRLIREMTQIKNRFARWFAIYFPEYTDVFGDYEAQSSMLLLKKVCTPEAIVELGAEKINQIWRDAKLRAVGMKRATTLCETAKRSIGLKKGSSAARYEMKLLLEDYEYKKAQLDAVMEEIEKLCRKIPESEQMLAIKGIGVITVAGFLAEVGDVRRFESPRQIQKLAGLSLRENSSGKHKGQTTISKRGRSKLRAVLFNAAIPLIAKNPEFKSLHEYYTTRANNPLKKKQSVIAISCKLIRVFYAILANGVTYDPQKMLSDIRRQPQAA

SEQ ID NO: 458111 - protein, 335 aa, unidentified
MHYLYYVGLDVSKETFDASLVAFEDANEMAHRKFANSRKGICSCLHWVEKRHGILLDDVIFCAEDMGSYISEMAVCASDRTLTFNFSLISPLVIKYSMGIARGKTDRVDARRIAEYAITHYRKIALYLPAEKELCQLRTWLILRAHLAKQRVAKLVLLEKLDYKEKFADVSIQRSMLQEEIAYAETHMKTIEREMKELIAADSNICRNYKLLNSIKGVGPITAIVMLCSTLNFTKITDHRKFACYCGLAPFEHSSGTSVRGGCHTSSMANRDIKVQLNRSALIAIRCDPQLKAYYERKVAEGKHKFSVLNAVRAKIAARCFAVVRRGTPYVALQI

SEQ ID NO: 458112 - protein, 408 aa, unidentified
MTVVGIDVSKSKSMVAAMKPGGKLVAAPYEVRHSDIELSHLALDVLCMEPDTRVVMEATGRYHEPVAAQLHSAGIFVSILNPLLIKQSGAGSLRKVKSDPKDALKIAKYGLDNWSTLREYTPMEAIRQQLKLCARQCDLYNKSIVMLTNNLISLSDKTFPGVNELFSSPEKADGHLKWVDFYRTFWHCDCINRMSPDTFGERYQKWCKRKGYHFSAEAADALYAASCGLYTTLPRDNNARLLVTVAADQLIALRENQSKLEAEMLNFCKQLPEYETVMAMYGVGKSTGPHLMAELGDVRRFLHRSSIVAFAGVDPGVVGSGKMQLSSVATSKRGSPQLRKALFQVVSTYVKCKPENEAVYQFYTKKRDEGKPFFVCTTAAANKFLRIYYARVKECLNAAESATQVEEG

SEQ ID NO: 458113 - protein, 345 aa, unidentified
MMLIGIDAHKRSHTAVTVDEMGRAGATKTIGTTTQDHLRLLKWAVDLAEDRVWAIEDCRHLTRRLERDLIAAGESVLRVPPKLMAHVRDSARSFGKSDPIDALAVARAALREPDLPIARLDGVERELRLLVDHREDLVAERTRIISRLRWHLHELDPGWIPPAKLERHSAFDKVDVFLSGHSEGAVVRRLALRLIEHLRLLTVEIDHLTDEITQRVGTIAPSLLAIVGCGALTAAKIIGETAHAARFRSKDAYARHNGTAPLPVWSSNKQRHRLSRTGNRQLNAAIHRIALVQARCYPPAHELLERRKSNGDGGMEALRILKRRLSDVVYRAMIADQTGSLPGAA

SEQ ID NO: 458114 - protein, 387 aa, unidentified
MIFVGIDVSKDSHSCHILSSKGKTLVDNLVISNDLEGFRTLDDSLSLVEEDIRIALESTGHYSINIESFLRNKGYSVTLLNPLIVDKFKKSQTLRKTKTDKSDAKLIATLLFSKIQEATVDVPIEIRELKSLTRNRSRLVKEKSNLKVQISRLLVILFPEFKTIFSSQHRKSAYAILKVYPNINELAKANIDEMTKILKSTSRCRYSSAKASEIIELAKKSVGSSSRALSFELQQTIRLIEVFNQEIKAIEVEIKSMLDTMKSPITTIPEVASTLGSIIISEVGNINRFSNPGKLLTFSGLEPTIYQSGQYSATRSRMVKRGSSYLRWALMQAARTVCLRDKTFKDYLAKKRAEGKHYLVALSHVAKKLIRVIFYLLKANKEFIPQN

SEQ ID NO: 458115 - protein, 339 aa, unidentified
MKEVSTIGLDLAKNVFQVHGIDGSGETVIRRQLRRGQDLPFFEKLPPCLVGMEACGTSHYWAREITVLGHEVRMMPARYVKRNKNDVADAEAICEAVTRPTMRFVPIKTPAQQSVLMLHRTRELFVRQRTMLINALRAHLAEFGIVAGVGRNGLEKLLEVIADDGDERIPSEARDCLLALRDQLVLVKRQILEADRRILACHRASEMSRRLDDIPGVGPLIATALVASIPDPHAFRSGRDLSAWIGLVPKQASTGGKERLGHISKAGNRYLRKLLVVGALSVIRRAKQTGASRHPWLVVLMARRSTKVVAIALANKIARIAWAMMVRGTRYQEPLLQAA

SEQ ID NO: 458116 - protein, 337 aa, unidentified
MKYSGIDLHSNNSVVTVTDEEDRVVAEKRLPNDLGKIVGFLSAWRDELVGVVVESTFNWYWLVDGLQGAGFMVHLANTTAIRKYDGLKHSGDEADARYLAHLLRLGILPTGTILPPEQRAVRDLARKRMQLVRSRTTHILAVENITARQHGARISSNQVKSLTPEAIEQMPLSDDVALAVKANVAVITTLSAQIDLLEKRLQKVMGERAEYGLLTSVPGIGRVLATTILLETGPIDRFAAAGNFASYARCVDSQRMSNGKKKGEGNTKNGNKYLAWAFVEAANFALRYCAEAKRFYERKKAKANRALAIKALAHKLARSCFHILKERKPFDVRRCFA

SEQ ID NO: 458117 - protein, 338 aa, unidentified
MSVYAGIDLHSNNSVLAVMDEGGQALLQCRRTNDLSRILADFEPYREDLNAIAVESTYNWYWLVDGLMEHGYDVRLVNTAAVPQYSGLKHGNDQTDALHLAQLLRLGLLPEGYIYPREQRALRDLLRRRFTLVRQAVQLLLTIQSSFSRTSGKQVSANALKRMPPAELQALFSDPNTRCGALAQYTVWLTVHEQIRQIEQRLSAQLLHSPEFTRLRSVPGIGPILGMTILLETGPIERFASVADYASYCRMVESVRLSNGKKKGHGNRKCGNRYLCWAYMEAANYATRYSPLIRHWYERKRSSKHRVVAIKAVAHKLARACYHLLKDGTEFDPKRAFG

SEQ ID NO: 458118 - protein, 336 aa, unidentified
MTYFALDVHKSTSTVAYLDPSGGPVQVRRIYTRREDLAHLLGDLPGPWIVALEATRSAPAVCAWLRELDAEIHLVDPQKLSALAALRAAKTDAKDAELMLEALLHDYLPEAYLASPEVSEDRDLMRCHTALRRVSTHLRNLLRALLARQGVEVAATDLCGQAAQAALEELQQTLAALPARLCQLYCGLLAEVEQALSMVREQIQAKVAASPLAQRLLLQPGKGPLTTLGLLAEIGDPARFPSYKQLVSYAGLAPRVAQSGDRCATGHLPQRCSRRLRHWAVLAAQCAARSRRPSPARHAYRRVCVRHGPNAAKIAAAREILRDVYFAAQRLRAEAA

SEQ ID NO: 458119 - protein, 339 aa, unidentified
MVKATTIGLNIAKQVFQVHGADKAGRTVLRRKLRRSEVARFFSEQPPCLVGIEASGSAHHWARVLGGMGHTVRLIAPQFVKPYVKSNKNDANDAEAICEAVTRPTMRFVPQKSVEQQDLQCLHRVRSRLVACRTQLVNQIRGLLAEYGIVLPQHPGQVRRGLPAVLEDAENQLTGFGRELFQSLYEELVQLDEKIGDADDRIQIAFQRTPNCQRIAAVEGVGPLIATAIVAAISNGRAFENGRQFSAWLGLVPRQNSSGGKSRLLGISKRGDTYLRTLLIHGARSVVYRAKAKTDKRSLWINDKQQRLGTSKACVAVANKNARIIWSLIAREQEYRRAA

SEQ ID NO: 458120 - protein, 479 aa, unidentified
MTPHKDFCLDLGPSAPTPTVLPSPARSDALQICHPHAAGIDIGEAEHWVAVPPGCDHQPVRRFGTFTADLDALADWLIDCGVTTVAMESTGVYWIPLFELLAARGVQVLLIDPRQAKRAPGRPKTDRLDCKWLQRLHTYGLLAGAFRPEAHVCVLRGSLRHRQMLITYAAHHVQHMQKALEQMNLKLTQVVSDITGVTGMAILKAIIAGERDPQHLATLRNPHCHHTEDDIAKALQGPWRAEHLFALRQAVELYAFSHQQITQCDQQIKAHLDTFADKSAGQPLPPKARRSKKTNEPRFEARTPLYRMAGVDLTTIEGIEEGTALVILSEIGTDMHRWPSVKHFCSWLGLCPQHKISGGKVLSRRVRPGAHRVAVALRLAARTVQHARTALGAFYRRMRSRLGAPKAITATAHKLARLVYSLLKHGSAYVQQGLDAYESQYRERKVKAMARQAQALGYTLVALGTPEVPNLNALAAPTP

SEQ ID NO: 458121 - protein, 366 aa, unidentified
MTTVTEVAEEAKEIMQPFIGCDAHKKYSIFSSVSETGRIGRAVRVSHDRETFRQHLGQLPAGSPLAVESSGHWYGLVDEIERAGHEPHLVNAGEAKRRMGKPNKTDKLDAEGLAILLRKGTLPEVWIPPIVLRDQREMLPLRMFLVALPTDIKNRIHGALGRYNLQIGVTDLFGVEGRQQLQQRMGELLVETRERVKQQLTTHDFLEWQIEDVEKRLQQLMKAVPGADLLRTLPPVGLILSAVLALEIGDVSRFPSAEHLASYAGLVPGVTSSGGKTSMGQVGGNVNRMLKWALVEAANLVVLQQRRLAHTHAFRLYQRIHTRKNHQKAVVAVARHFAEAAYWVLRKQEAYREPKSRSLSVSSTHG

SEQ ID NO: 458122 - protein, 268 aa, unidentified
MEYIAFDSHKRYTFASVEEHTGTILRDARIEHQRGAVKEFLSAWKAGTPVAIETIGNWYWIVDEIEKAGMVPQLVHARRAKMMLASVNKTDKLDCHGLNRLQRTGTLPTVWIPPAQIRDLRDLPRTRMVLSKERTRLKNRIHATLAKYAISIEGTSDLFGKRGREELKKSLDLLPPHSRFSVERLLETLELVQKQIDLFEERMKETFSTNRELQILQTLPGVGFILAVVILLEVGDMSRFPDASRFAAYSGTTPRVSSSGGKTRYGQL

SEQ ID NO: 458123 - protein, 423 aa, unidentified
MSYRIAGIDVHKKKLAVVVADVEVEEEYQFERRWYGSNPEQLQLLAEWLNEQQVEEVVMESTAQYWKCVWEALERYWKPACRERETAGKMSGTLHLAQALSNRGRRGRKKDFRDAERLVKRLVSDELTLSFVPDAEQRLWRTVTRKKYQLRRNRVRLQNRLEALLEEAHIKLSSLVSDLLGASARRMLKALAEGETDPVALAALADRRLRATSAQLRDALGACMELNPVYRCLVKMALEELQLIEQQIGQMDQEIASLLRQHQDAVQRLAEIPGLGVDSAQQIIAEVGAKAATFASAKNLSSWVGACPGEEESAGVNYSPRSPKGNRQMRRILNQAANAAVKHKGSLFEIVYRRLVLRLGHNKTIGAIAHRMCQLIWIILHTGVRYQERGPAVCEKSRQARTSRMIRTLRNLGYRVEPLGNPA

SEQ ID NO: 458124 - protein, 316 aa, unidentified
MALLLIFVGIDVSKDALDVHLLPGNASWRADNTEQGWKQLMAWLERHGEPAQITIALEASGGFEKGCARKFAEAGYTVSILDPVRVRRFAEAAGQFAKTDAIDARVIARFAQTFTTTPAVFDQATERLAETVRWRRQLIEQKTALDNQLRGLTSTSLRRATRGLLTRLETLIERISDEIAKQIQANPAWTAVTKPIHSIKGVGPVTVATLLAELPELGRLDRRKIAALVGVCPYTRQSGKSDAKRMIRGGRLGLRNALYMAALTAMRYDPTLKAFSERLRAAGKPGKVAVVAVIHKMLTILNARVRDALAAIPTNT

SEQ ID NO: 458125 - protein, 342 aa, unidentified
MQITTIGLDIAKNVFQVHGIDAAEKVMVRKRLRRSQVLTFFEALLPCLIGMEACATAHYWARELTKLGHKVRLMPAKDVKAYVKRNKNDAADAEAICEAVRRPTMRFVQIKSAEQQGQLMQHRTRDLVMRQRTQLINALRAHLAELGIVAAKGDKGVKELLTIVADERDTRLPIDARASVIVLAAQLQAVQTMIGSIEKRIKAQHRSNQASKRLETIPGIGVIGATAIAATVADPTVFRSGRDFAAWIGLVPRQDSTGGKQKLGPISKQGDRYVRRILVVGAHSVLRRAKENPAKYPWLTQLLARRPFKVVAVALANKMARMAWALLAHGGTYRAPKLAAAA

SEQ ID NO: 458126 - protein, 350 aa, unidentified
MFVGVDVHKHSLCVCYYRSAKQYRYQSYPFTEHGFQAFLDSLTRRDEVAIESVTQAYYLIEQLTPRVKRAVVVNTFAFDLIRRSRAKTDEKDAFHLAQQLSYGHLPEVHLPERTIRDLRVYQNARVALVEERTRLKNRIHAAFLMHGVVTARKHLSSRKGREMMRRESSTYAGYPELELVALHLDRIDQVEEQMGAIERKMFELGSHLPDLPVLLQVGGISPLLAITILAEVGDFRRFPRSSKVASYAGLVPSTRSSAGRAKSGRCGYGRKRLRTAMVQAVRSLTVHEPENPLAQHYQILKARRGAGRATIAVARKLLEILWIMVTTEVPYRQLVPRLYETKLRSFKTAA

SEQ ID NO: 458127 - protein, 343 aa, unidentified
MEKATVIGIDLAKRVFHLHGATADGRPVLRKKVSRGQLLSFLARQPRAIMAMEACATAHGWGRAIQELGHEVRLIPPIYVKPFVRRQKNDAADAEAIAEAASRPTMRFVAVKTEEQQARSMIFRTRDILVRQRAQLVNALRGHLAEHGIVAAQGLAKVKVLEATLRETAKGGVHPLVRELGQRYLDHIAHLDVEIADLDKRLQQLSKDDETLKRLQTMPGVGPITAAAIEAFAPPMATFKRGRDFAAWLGLVPRQHTSGGKPRLGRMSKMGQRDVRRLLIIGAMAVVRWAARKGAAEGSWLGRMMAKKPRLLVATALANKMARSVWAMLSKDQEYRGSALAPV

SEQ ID NO: 458128 - protein, 333 aa, unidentified
MKPLSIPAIFLGIDVGKTDLFCHVILKSSTESARFDNTPDGVSALIAWLCKIASPLSILACLEQTGHYGRLVALALHTFGVRSLHLVNPRQIKAFGNQKLRRNKSDTADARLIAQFLKSEYDELRPWAPLPANHEKVKELSRYAESLTQDTARLKTKLEAVTLIDVKRSINRRIKNQQKELEAIRAKISKIVENDTRLKIQNSLLYSIPGLGEITCQILLAELPEIELFGDARQLAAWVGVTPRHFTSGTSGRSTTPITKVGSANLRRALYLPAMTAMRYNPLLKEFAQRLKENGKTGKQIVVAVMRKLLHQIYGILKSGQPFNPEKRGLKAA

SEQ ID NO: 458129 - protein, 348 aa, unidentified
MKQELSVVGIDSAKTIFHLVGMDERGKIILRKRLVRGEVLSFMAKLPPVTVGMEACGGSHYWARQLREQGHEVKLMAPQYVKPYVKTNKNDLRDAEAIAEAMTRPSMRFVPIKEVEHQDIQALHRVRDRLMGARTALVNEMRGLLAEYGIVLPKGVKAFRKAVMGKLELEQAKLTPMSEELFHKLFEELAKLEEEVAYYDEKLKALATTHPECQRLLTIPGIGPITATALIAAVSDVGVFDNGRHFSAWLGLVPKQHSTGGQTRLFGISKRGDSYLRKLLIHGARATLRWARTKMDGRSQWIRGLLERRGWNRTAVAVANKNARIVWALLSRGGVYSESTGSSRRQEP

SEQ ID NO: 458130 - protein, 407 aa, unidentified
MELVALYKRVIGLDVHQAQITACALIEEVDGSVRVEQRQFGAFKRDRRELAAWAASLRADEVVMESTGIYWKSPYAALEAVGIRAKVVNARHVKNVPGRKTDVGDAHWLATLARAGLLRGSFVPPAKLRELRLIARQRQKLVGQLASEKNRLHKVLTDSGVRLGVVVSDLHGQSARAMVKAIIADKPPHEVLQLASRRLKASREELFDALHGDLTASHRFVLDELMRHIEEIEARIARFDSRLLGELQTERNTLALLQTVPGVDLIGAAMLLVEIGTDMDAFGSADRLASWVGICPGNNESAGKRKSGHMRKGNLYVRRLLCEFAHAASRTQSVFKSKFQSLVVRRGHKRSIVAIGHKILRTIFFMLKRREHYRDCATDYEAMSVQRNAPRWIKALTKFGFIKPAKA

SEQ ID NO: 458131 - protein, 357 aa, unidentified
MKMVTGKHRKSVVGKDVYVGIDVHKESWQVTIRTDGEEIFNGRIPGQYQSLKKLFERYQGCRMKVAYEAGPFGFWLSDKLVADGIEVLVVLPSLIPTESGNRVKTDKRDSRKLARLLESNMLKRVYVLTPEEREHRDLLRTRRQIVDHRNDVARQIKSKLLFYGIASPFTASTRWSLKYIEWLKVLRCDTDYLRESFNLLIDLYEYLTRQIVRINKKVGLLCRDKKYRDRIKLLCTAPGIGRLTAIEILVELQDITRFESAEELAAYIGLTPSEYSTGERTRQGRITRCGNKRVRTYLVESTWMLITKDPAIRLKYLKLKSLRGGKRATIAIARKLLIRIRRMLLDNVPYRMAAVAA

SEQ ID NO: 458132 - protein, 355 aa, unidentified
MDRYIGLDVHATSTTLAVLGPSGRRLKTAVIETNGKALIEALKAIPEPRHVCFEEGTQAEWLFQILKPHAAEVVVAKVENSRGQKSDAKDAFGLAELLRTGKLGTRVFKDVGAFATLRDLSRLYSMLRDDVVRTKNRIKSLYRSRGVATPDGDVYAVKHRTKWLKTLTPGKRLAAEKLYDELDKQSELKDAAEDALVEESHRHPIARILETCPGFGPIRAAQMMAIVVAPHRFRTKRQLWAYCGLGIVTRSSSDWVPGPKKGDWLRAPVQVTRGLNLNHNHLAKAILKGAATTVITKRTSELADAYQRLLMNGTKPNLAKLTIARRIAAILLAVWKTGEEYDPKKHRKQKLSLAS

SEQ ID NO: 458133 - protein, 296 aa, unidentified
MRTSQNTAETINTIGIDVGKNTFHLVGLDKRGAIVLQQKVTRHQLGRRLSNISRCLIGMETCSGTHFIARQLAALGHDVRLIPAQYVKPFLKGHKNDYRDAEAIAEAVQRPTMHFVSIKTPEQMDLLALHRVRSRLVRQRTGVANQIRGFLLERGITVRQGFMPLRKALPEILSSKSDALSPRMISLIGELIQDWRRLDDRIASVSTEIEAMANRDESCQRLMSVPGIGPIVSSAVVAAIGNGSGFKQGRDFAAWLGLIPKQESTGDRTILGKISKRGNKYVRTLFVHRGSHFCAP

SEQ ID NO: 458134 - protein, 341 aa, unidentified
MNEVTMIGVDLAKSVFQAHGATATGEPVFRKKLSRGQFLKFLSEHPPCVVAMEACASSHYWGREIMKLGHDVRLIPPIYVKPFVKRQKNDANDAEAIAEAAVRPTMRFVPVKSAEQQSRSMVFKTRDLFVRQRNAIINALRGHLMEYGIIAPPGRNFVKKLAEQIENPDSDLPSIVMELSRVHLDQLSVITDKVVAIERRLKEESKSDPETIRLQTAPGIGPVSAMAIKAFSPPLEGFKRGRDYAAWLGLVPVQKSTGGRQILGKTSKMGQRDIRRLLIIGAMSRVRWAIKNGPPKGSWLEQMLERKPRMLVAIALANKTARTIWAMMTKHEDYRDPIAAV

SEQ ID NO: 458135 - protein, 345 aa, unidentified
MTIRSEDARAITGGVDTHSGVHVAAAPGPVGELLGTREFPASAAGYASLLNGLGGFGDLALVGVEGTGSYGAGLARYLTAHGVQVVEVDRAGRQDRRRKGKSDPLDAVSAARAAQSGRADGAPKGRDGAVEAIRALMVAKRSARNERTPANGQARALILTGPDELRAWFAGHRAAALAAGIAALRPRPGDAGEYAVRIALRELGRRAEFPGAQIERLDDLIVPLVTVRAPRLLDLYGAGPDTAAMLLAAAGDRPGRLRSEAAWAHMYGVAPVPASSGKTRRHRLSRGGNREASHALRRIVITRMSARPATRAYVERRAKEGLSKKEIIRCLKRYAAREVYPYPRG

SEQ ID NO: 458136 - protein, 343 aa, unidentified
MIIVTLGIDLGKNSCSVVGLDESGAVVLRRRMRRQTILGFAAKLPTCVIAMKACCGAHYLGRLLASQGHMVRLMSPEYVRPYVKAQKNDDRDAEAIAEAASRPTMRFVELKSEAQLDVQTLHRVRSRLVATRKTLLNQLRALLLERGHIFPQGRRKLEQALEILIDDPAFAVSPRMRQLVIDMRAEWQDLDQRIATLNAEFVALVRSDAAARRLITIPGIGVLNATALVAAVGDASPFRQGRDLSAWLGLVPKQHTTGGKPKLLGISKRGNKYLRMLFIHGARAAMPTLAKSASPLGAWLRGLLARTHRNIAIVALANKLARIAWAMLTREGDFALNHGAVAG

SEQ ID NO: 458137 - protein, 402 aa, unidentified
MRFFVGIDWASQAHAVCVLDDTGRLHWQGSVPHTAAGLTQLVDRLRRCGARGALRVALERPSGLLVDTLVEAGMEVVPIHPNALMASRPRYSAAGGKSDPGDAFILADLLRTDGHRFRPLRAPSDDTRALRALVRGRDGLVAQRVALANQLRAVLERFWPGAAAIFADVDSPIALAFLARYPTPPSAARLGEKRLAQFLVQHAYCGRRPVAELLARLRTAPASQVGEAEAEASGEVVRALVAVLTPLRAHLQQLSAAVTAALLHHPDGPLVQSLPRSGAVNAAQILAELGDDRARFPTAEQLAAEGGLAPVTQASGKHHGVVFRWACNKRLRRALTTFADNSRHASRWATLVYQRARARGCRHPHAIRILARAWARILWRCWQDRTPYDISRHHAAQALMAA

SEQ ID NO: 458138 - protein, 351 aa, unidentified
MTPTRIAVDLAKDIFEVACSGEPGRIVDRRRLTRVQFERFIGSLAAGTEVVMEACGTAHHWGRRCYAQGLVPFLVPTQYVRPYVRRNKSDRTDVEALLEARRCGNIQAVPVKTSDQQALQSLHRVRAQWQTTRIARMNVVRGLLREYGLPMRAGAVTLHRVVPGLLEPTASVPLPLLLRETLRTLVEEIRELEDRLRRLDRQLRSIADEDVVARRLQTVPGVGVLVSTALVGSVPHIHAFQSGRHFASWLGLTPREASSGLRKWQGGISKRGDVYLRALLTHGARSVLFNAHRRARAHADRLTPIQRWVLGVADRRGYNKAVSALANKLARVIWAVWRRDMDFSTTRPIAA

SEQ ID NO: 458139 - protein, 342 aa, unidentified
MDHFAGLDVSVKETSICIVDETGRIVREARVASEPQALLKVLGNPIYRFKRIGLEAGPLSQWLFSALAEAGLPAVCVETRHMQAVLKAQINKTDRNDARGIAQMIRAGLYRPVHVKTLRSQKLRMLLTHRKLLQSKAIAIENDLRGTLRNFGLKVGMVGKARFEARIQELVEHFPDLGVLVEPLLIVRRALREQIVLLHRRLLAIVREDEVCRRLMTTPGVGPVVALTYRATVDVPARFRKSKSVGAVFGLTCSKYQSGEIDWSGRISRCGDEMMRVMLYEAAQSMLRSKKWSWLKAWAMQIARRRGMKKAIVALARRLAVILHRIWIDGTEFHWTRETAAA

SEQ ID NO: 458140 - protein, 340 aa, unidentified
MIAVGVDTHKGSHFAVALDDLGQLLGELAIAVCAAGYEELERWTRGIATDGQQIVFGIEGSGSWGAGLCEHLQASGCEVFEVERPRRRDRRRGKSDRIDALAAAKHVLAGDGTSTPRRRGVLTALRALLVAHRSAVAERTRLLNEVQALHASAPVALRERIGEGTGMQLERRLAGMRVRKDAELEERAVLGVMRDLAARSRTLAVDVARYKHELAELVRSLDPTLLEETGVGPLSAAKLLVCDPARFTSEAAFARCNGTAPIPASSGKTVRHRLNRGGDRQVNNAIHIIALSRSQHHPETRAYLDRRISEGKTKREAMRSLKRHLSRHLFKQLVETPLTS

SEQ ID NO: 458141 - protein, 333 aa, unidentified
MKFCGIDWANDHHDALSIDEQGQPLGSIRVSHTPEGLSQLDAYLERIAGPEGKEQVACIVETTHGLLIAHLLEQGWPVYPVNPRTVEKRRAPSGAKTDTLDAYLLAKTGRADFQDLRRLNPDSEQIQELKTLTRDQDALIQMQTRLVNQLTACLKAYYPVALEVFGQLQQPSTLAFLWAYPTLQAARAASVDELTTLLKQARYPGARQKAQQLVMQLQQPQLQASEVTTRTKARLMLALVAQLDPLLKQIAAYDKEIERPSWQALAGTSPVLFQSGTYQKAHRRLGCIKPWRNALHQFAWQSTHQEAWAREYYQRKQAEGKSHTVAVRALANV

SEQ ID NO: 458142 - protein, 310 aa, unidentified
MKDSIGIDISKAHLDIYRLGSHASARLSNDAAGFSALQRWIGNTQPDLVVYEATGSYHARLERAFAGRLPLVKVNPLQARHFAKARGTRAKTDAVDARLLAQMGSALDLVPDAPVAEDQRDLKELQIARTALIKDSNRLRSRLKTQTLAFTRRQTKARLAQIERQLTAIQDEMAKLINACPGRARAYAILRSIPGIGEVAAAAVLIECPEIGTLGKKQAASLAGLAPMTRQSGTWKGKAFIQGGRKHLRDALYMPALVATRFNPDMTIKYQAMIKAGKPAKVAITAIMRKLIELANALIKANRKWTPKLA

SEQ ID NO: 458143 - protein, 340 aa, unidentified
MSEITTIGLDLAKHVFQVHGIDAEGTTVLRKRLRRGQVLAFFSRIPRCVVGLEACATAHYWARELGALGHEVRLMPAQYVKAYIKRNKHDAADAEAICEAVQRPTMRFVPVKTTEQQATQLLHRGREQLVRQRTMLVNALRAHLAEFGMVAAQGLRNVGELIAIVRDDGDTRLPDVARQVLQVLADQIEQIETAVAGLERQLLAWHKTNPVSQRLASIPGIGPIIATAIATTVADPKVFRSGREFAAWLGLVPRQNSTGGKTRLGGITKRGNRYLRRLLINGASANLLRSKATKADPWVIGLRRRRPPLVVAVALANKTARIAWAVMLRQKEYQPRALAA

SEQ ID NO: 458144 - protein, 310 aa, unidentified
MKQSIVYIGIDVAKAHLDVAWAEQSRRFNNDKVGRATLVKWIKQKQSGPVQVICEASGGYEQELLDALAEAALAVSLVQATRVRQYARAAGILAKTDKVDARVLARFGAAMRPEPTSPRSAAQKLLRELESQRRHLSDLLVAEQNRIEQLHDEKLRGLARTLLGTIKKQIARIDARIATVITQDQGLCQKAQKLTGVKGVGERTAALLLAQMPELGTLNRREAAALAGLAPFNRDSGTMRGKRTIFAGRRAVRRGLYMAALVASRRNPILADFYRRLRTKDKPHKVALTAVMRKLLLALNQALTPTQSFA

SEQ ID NO: 458145 - protein, 338 aa, unidentified
METYAGIDLHSSNNFVGVINDKDKILYGKRHSNRLDDVLRALDPFKDSLNGVVVESTFNWYWLVDGLQEQGYPVHLANPSAIQQYEGLKHTDDQWDSFWLAHMYRLGILPEGYIYPKEHRAVRDLLRRRLLFVRHSTSHILSLQSMISRNLGFKMSNNEIRKLKSEDIDGLFACPNLVFMASNSLSAIKFLKKISLDIEKKVKSQVKMRKEFEKLLTIPGVGNILGLTIMLEVGDIGRFAKVGDYSSYSRCVESKRLSNGKKKGENNKKNGNKYLAWAYVEAAQFARRYCVKAQSFYQSKEAKTKPVVAIKALSNKLSKASYYIMRDQVAFDEEKLFG

SEQ ID NO: 458146 - protein, 425 aa, unidentified
MKKTDYLSTLFVGIDIGSRTNVVSAIDFNQDFFIRMKPVPNAKEGAETLESLLVDVLSVHHEFNHVIIGLESTGFYGVHIANYLSASDLLAPFGTEVYCLNPKEVAKYKESFNSLDKNDGIDSFVIADFARVGRISIKPWRGAQYLALQRLTRHRLHIAECIAREKTYVLNNIFLKFSEFAMLKKEDHPFSNKYGATAEAILEQYVTNDDIIEASIEELVELIESKSRGRITDPEETAKILKAAANGSYRLDKVVAEPITLSISSSFNCIRAFEKELKAIEKAIEHTVQGLNPVEYQVLKSIPGIGHVYAAGILAEIGTIKAFTGNGALAKYCGIVWKENQSGNFRAEDTKMSKAGNRYLRYYVIEATGSVINNCPEYKDFYDKKFAETTTHQHKRALALTSRKFLRMLFGLLDKSQLYSLERSR

SEQ ID NO: 458147 - protein, 428 aa, unidentified
MTVKDCTSVKEFWQLKKEIRGSKDHLIVGIDVAKDDHKAFFGTAYGKTLLKRLCFKNDIEGFGKLLERIREIKVKHNLNELVLGLEPTANYHKPLGDFLIKCGHMVVLVSGVSVKRNRELLDGRWDKNDTKDSANVADLISQGKCLYYEYAPVVLKDLRGLLSLKRRLKKQEHGFRIRIRNNLLAQYFPELDRYYSKWEPQILSVVRWCLDPSVIAGLEYDHFVSLVSPGSKTIRQQGRLEWIWKKAVESIGCDAGEAAEFEAKVMVEELRHIREIIKETNAKIKDICIRFPEYDYLITIPGFGPDISSKVLAAIGNPFRFNSLSQVVKMAGMDLNANRSGKSSDTAVPVISKKGSAHLRYALYQAAFVASCKNKYFIRYYTKTLRGREREKGIKTKMRVKLAAKMLVIAWTLMKKREPFDPAYLKID

SEQ ID NO: 458148 - protein, 358 aa, unidentified
MNYTQNQKIEQVTESTLVLGVDIGSSEHYVRAFDYRGRELTRKVFRFSTDINGFNSFYDWVTQICIKHGKNEAMIGCEPTGHYWYTFYQFVKDHGMKLAFVNPASVKKAKELDDNSPKKTDLKDPKTIAKLVIDGRYSFPYVPEGIYAEIREVTSSRDRIMKELNVASNRIQRWLKIYFPEYLTVYKKFDTTTGMMILEEVPLPTMVTALGVDNIIKIWREHKVRGKGASFNRAKTLVDAAHDSVGKSGGQGAVMEIQMLLEDYKVKKQQLEMVTSVMEELIMQIPNAEKMLSVDGVGLVTVAGFISEVGDISRFKNPKQIQKYAGFELVENSSGKHKGRTTIENMKVPGTLRNQFIK

SEQ ID NO: 458149 - protein, 457 aa, unidentified
MYRELHSLRQALREELKGTLPPLTGVDPDKMLATYLNQLTLYVGLDVADKTVTLLAMNANQEELGYLLDAPNTLPGYVQIGDWLESLRVQHHLRIIAVAGETTGVFYWGVWDSLAQRPNVARVLYNPRTTEHMGEVLSKRVRTELVDALLLAEQLRLGSTPEVTLTENAELLSARLCSRAARDAAQTINRKKNQLRSLVRGYNPVISQVFPGQKFHHPAVYAVLKQYVFPNEFVTAGVETLTTILTEYSRSAFGTEQAQKLVDLCRGYLSRPIRPEIVRQRVQDLIEEITLTRKHQQAMLKAGYALIKDRSEAKVLKASTGAGISNTLALVSELGDIKRFPDGEHAASFLGLTTSKHISGTSIYHSKHITKQGSPNGRYAAVNMALHLAVRVPKYQAMYKAIKSRKPPRKGHFVALVAIARDFVTNVLYDMWCYDRPFFIKVEDYRQYRKDHPRPKS

SEQ ID NO: 458150 - protein, 390 aa, unidentified
MSLDHRCEEPTAIRSNVGAIFVSLELSRSTWLITSLSPASGEKMSKHGVPAGDIAAMLARFSGLKQKAFARTGKSFSIVVIQEAGLDGFWIHRVLQSEGMESYVVDPASIATSRRRRRAKTDRIDGEALVRALLAYKRGEPRVCAIVSAPTPEAEDNRRLCRERKALTAERIQHVNRIKGLLFSQGVSDYEPLRRNRRQRLDELKTGDSRPLPMHLKAQIGRELDRLELLLEQIKAVEAERDALLASAKPTEETSALPAMLVGLKGIGPEFAAVLWSEGLYRIFANRKQVAAYAGLAPTPWQSGTVAREQGVSKAGNPRLRTTMIQLAWLWLRHQPHSALAQWFKERVKRNGGRLRKTTIVALARKLLVALWKYVNAGVVIEGAVMKVSS

SEQ ID NO: 458151 - protein, 342 aa, unidentified
MEITTVGIDLAKSIFQVHAVDAAGYVVVRKALRRAQVVPFFARLPRCLVGMEACGTAHHWARELMSLGHDVRLMPPAYVKPYVKRGKTDANDAAAICEAVTRPSMRFVPVKSTDQQAALALHRTRDLLVKQRTQLVNMIRGLLAEFGIEMARGLRHALELAARLSAGDAAEVPPLAQRVVTGLADQIGAVQIQLTRLEKELLAWHRDSDLSQRLATIPGVGIVSATALAASVSEPERFRSGRQFAASLGLTPLQNCSGGKERLGRISRMGDRYLRRLLVVGMTSLIRRAKATPTSVDPRLPALLQRKPVRVVTVAAANRTARVAWAIMTRGGTYRAPLAAAA

SEQ ID NO: 458152 - protein, 425 aa, unidentified
MPYVIGGIDVHKKMLAVTLADVAVDGEYAFSRRRFGTRPSALRDLAEWLVAEEVEEVVMESTAQYWRPVWEVLEREWAPRRRACPDAGANSGSLHLAQATSNRGARGRKRDYPDAERLVKRLVAQELTLSFVPEPEQRLWRTVMRRKYQLTRNKVQLRNRLECLLEEAHLKLSSLVSDLLGLSGRRMMQAIADGETEPARLAALADRRLRATAEQLRDALGASATLNPVYRKLLQMTLEELRLLEEQSLQLDREMAQLLREHQTAVQRLAEVPGLGVDSAQQIIAELGASATTFPSAKHLASWVGICPGAQESAGVNYSHRSPQGNRPMRRILSQAANAAVKTKGSVFQLLYRRLVVRIGHAQAIWAVAHRLCRLIWKILHQRVDYEERGPEVTRERSQRRIAQMIRDLRRLGYQIEPSPQGGSA

SEQ ID NO: 458153 - protein, 341 aa, unidentified
MNTTLIAVDLAKDVFELACANQASRIVDRKRLNRKQFHRFCAQHPPVTVVMEACGTAHYWARELDTMGHTVRLLPAQYVRAYRRRSKTDRNDAAALVEAARNPEILPVPVKTVEQQCIQTLHRCRSQWLATRTARINVLRGLLREQGHPLPLGARAAITGARACREVVPTVLQPAIDALLDEIATLETRMADIEAALARHARDSEPVQQLLSVPGIGLLTATALAASAGSPGYFRNGRHLAGWLGLTPKEYSSGSRRLLGSISKRGDGYVRMLLIHGARAVLNRAKQLHRAGQSLSRLQQWVVRLEQRVGHNKAAVALANKLARIAWAVWLRSTPYQATPI

SEQ ID NO: 458154 - protein, 321 aa, unidentified
MNKFIGIDISKQTFDVSFSKKKQEVFDNNQKGFKKMFKDIDPETGVVMEASGPYYLNLATFLHNKKVRVFVINPLKIKRFSQMNFNRAKTDKKDAEVIRNYALKMQEDLKEWKPEPKHIKDMKQLHTSIELLNKQLQQTKNQLGAFEDSGSVCKELGKSFRSILKKLEKEKERLEGQMLALGKEEYQQTVKSLTSIPGIGDKTAIMLIAISGDFEKFDHYKQLIAYVGFSPRIYQSGTSVKGKGHICKMGKSQIRKLLYMCSWTAKRYNKACVEMYERLEKKGKPERVIKIAIANKLLKQAFAIAKNKTTFDKNYQSKVCF

SEQ ID NO: 458155 - protein, 348 aa, unidentified
MTVYIGVDFHARQQTISYLTTEDGEIKRLQLDHGQPDEVRRFYHQFAGERVVVGFESSGRAAWFEELLEDLGCEIWIGHATAIRLFARRRQKNDRRDADLILDLLVRGDFPRIHRYSAESRTLLQQLRYRQRLVKMRTMLLNSLVFLAATRGVVLRSQLKTKRGLERLRQIDLPPALGGQRDELCQLLLDLKPKIDKVERELAAKAESDIRVRRLRTQYGIGPLTGLCLAHTLEHPERFANPRKVTAYVGFDPVEDSSGERRRIGSISKQGSRLLRFLLVEAGQIAVRRDQELARVYKRVLVRRGHAKAKVAIGRRLLVRAFIMLRDEIDYAEFQRRGVAARSSREIA

SEQ ID NO: 458156 - protein, 343 aa, unidentified
MQTVTTIGLDIAKSVFQVHGVDAAGQVVVRRQLKRRYVLAFFEKLPPCLIGIEACASSHHWSRELQALGHKVRLMPPAYVRPYVKRQKNDAADAEAICEAVTRANMRFVATKTPEQQGCLMLHRTRHLFIRQQTAVINAIRAHLAEFGIVAPVGRNGVEELLGVVADASDKRLPEIARACLVALGAQLRMLKAQILEFDRMINAWHRSNETSKRLDEIPGVGPALATALVASVADPRAFRSGRDFSAWIGLVPKQHSSGGKDKLGGISKQGDRYLRSLFTAGALAVIRYAKIHGAKHRPWLTALLARRPTKVAAVALANKIARMAWAMMARGERYKESVALAA

SEQ ID NO: 458157 - protein, 347 aa, unidentified
MNFYNQQHQYYCGIDLHARKMYVCILDQKGKTMIHENIKTDPEMFFKLISPYLEDIVVGVECIFCWYWVSDLCAKHNIHFTLGHALYMKAIHGGKTKNDKIDSYKIALLLKGGNFPTAYPYPAEWRATRDLLRRRMYLVHRCGELVAHIQNTNTQYNLPAFNKKLSRKYNHAGVAEQFENPEVRKSVEVDLAAVGSLNKILNQLEWHIEKTAEQHDYHTLYLLRSIPGVGLILALVMLYEIQDIKRFPSVQDFSSYARLIKPIKESDGKWAGKSNGKIGNHHLKWACNEAAILMLRESEKAKQYVAKLERKYNKGKALGIFTHKIGRAVYFMLKNKEAFNMEKFYSQ

SEQ ID NO: 458158 - protein, 353 aa, unidentified
MRTYYVGMDVHRASIVIVVLNGAGKVVMESIIETGAETVRSFIKQLRGKVYVTFEEGTQATWLYDVLRPLVTEVVVCDPRHNKLLTAGNKSDRVDARKLAELLRNGSLRAVYHGDKGVRTLKELVRNYDCLVADMTRVMLRLKAIFRGRAIACAGHEVYRSDRRAQWLGKLSEPGAKQRANFLYEQLAALKRLRHEAKQVMLKEARRHPAYQLLLSIPLLGPISVAQLIAVVETPFRFRSKRQFWTYVGLAVVTRTSAEYVVVNGVVRRSMRPVATRGLNRNHNHLLKRVFKSAASSACASGPFKPAYDARVAQGMDPSLARLTIARKLAATTLAVWKRGEQFAPERMQQQVA

SEQ ID NO: 458159 - protein, 400 aa, unidentified
MNPVVGLDVAKGESEAQAFLDKDKPFGKSFSVSHTKEGLDSFISFLKELKRKSGIKPAVILESTGHYHTPIIQCLEENQYLYILVNPIISYQAKKTSLRKVKTDAVDAHHLCILYYKVEFEPYKKRGERFLNLRTLSRQYETVTNLYVQTKLQFHTILDQVFPEYRGVFGDLFSKVSLKLLKEFPTSEDVLLTGIAEIIDRMEEMNTKRSRSWIREKAVKLLESAERNPFHQGVYESQLFSLDMYITMLLQYQDHLSNLETQIDDLAEEIEECKIIQSIPGIGEKIAATIISEIGEIDRFNHLKKLVAYAGIDPSVHSSGKFTATINHITIRGSSRLRHALYMAVLCGIRSSRNKKLKEYYDRKRNEGKPSKVAMIAGLNKLLHWIYAILKSNEQFLDLA

SEQ ID NO: 458160 - protein, 332 aa, unidentified
MENNCFIGIDVSKNKLDICVLQGKEVLQEDVIDNNPSAIQRFLVDMAEKRGLDLCSCLVCAEHTGNYTYPLTLACRDLGCRLWLENPAQLKYSSGVHRGKNDRVDARRIALYASRFNDKAMLYHELTPELERVKQLRQERSLYRSDLSKYKGQLSDQKNFMESTVYKAKANRLKHVIKELEKMIDVVEREITGIIDSCDVLKRQMKIITSVEGIGRETALCFIVETAAFTRFTDSRKFACHAGIAPFQYTSGSSVRSRNRVSRRANKQVKTLLHMAALSITRKKKSELKVYYKRKVEEGKNKMTVINAIRAKLVARVFAVIRKNDIYSINFT

SEQ ID NO: 458161 - protein, 338 aa, unidentified
MTIIATGIDLAKNVFAVHGVSAGGAVQMRQPKVARGKLNALIASLPPGVVGMEACSGAHHWARQFQAHGHTVRLMAPKLVTPYRMSGKRGKNDAADAAAICEAMQRPNMRFVSIKTEEQQAQLMVHRARQGFVTERTACINRIRGLLSEFGVVLPLKAEVVRRQAREHLEDLPGYANLVIGDLLSEVAHLDERIAQYDKHVHAIARQSTPAQQLMQLMGIGETTATALVAMVGNATEFSCGRQFAAWIGLVPGQYSSGGKTRLGRITKAGDAYLRSLLVMGARAVLNAAKNKTDSISRWALAVEQRRGYWKAVVAIAAKNARLAWAMLTKGEAFKLPA

SEQ ID NO: 458162 - protein, 386 aa, unidentified
MIEAVIERCAGIDVGKKFLVVCVMSGSLEAEPKTEIRKFGTIVAELEHLRDWLIQEGCSHAVMESTGSYWKPVFNILEDSVEVVLANAYDVQNRRGHKTDPNDSRWLAHLLRHGMIRPSFIPERAIRELRDLTRRRRQLVGERARERNRIQKILEDANVKLGDVLSDVLGLSGRLMIDALLEGRLQVEEIAQLAQRKAKQKIPDLIAALQRNRLTDHHRFLLRHALRHLDFLAEEIEALNIEIRSRLTAEQFRQKHALLQSIPGIQEEASAAILAEVGPNMAQFPSDAHLASWAGLCPGNHESAGVRKTGRTNRGNNWLRSILTQCAWAASNKKNSMLQSFYFRLSSRCGRKRAIVALGHRLLRVIYHVLLRDQPYHESSMRPLSA

SEQ ID NO: 458163 - protein, 415 aa, unidentified
MKTYSELSHFGGLDWAKEHHDVCVLDPGGQIVERLRFEHNGPGWAKFREQIRKYPALGIAIETSQGAVVEQLLGSGVTVYPVHPKAAKAYRQRQAPSGTKDDELDSWSLADALRLDGGQWRALSPQDPMIGELRLLCRDEAELIEQRTALVNQLQAALQEYYPAALEAFADWTAPYTWEFIACFPTPQELAGATVHRRRVFLHTHKLWRPGSADKRLEIFARADQFCGGAAVTRAKSRLALALVKLLQALQLQLDSYRAAIEKLFAEHPDHDVFGSLPGVGPKLGPRLLGSLGADRGQYPDVQGLQCVAGSAPVSFKSGQMRRVKIRWHCDRFLRHTVHLWAGCSLKTCAWAAAYYQAKRDAGQSHACALRCLAQRWLKILWKMWQTHTPYDPEFHARNQQRHGSWVLQLNPKKT

SEQ ID NO: 458164 - protein, 354 aa, unidentified
MKRTTKYVALDVHQATTVASVREESGRVIARSVLPTDLGALTEFVRGMRGARHVTFEEGTQAQWLYDVLAPLVDRVVVCDRRGASRQGNKGDQVDADQLSELLRRGALRAVYHGSADRATLKELTRTYRNLVEDATRVMLRLKALFRARAIQTRGTNVYQVRARGQWLAQLGDRGARFRAEALYAELDVLRTLRPRAKAAMVTEARRDPAWPVLRTIPFFGPVRVALLLATMQTPWRFRTKRNLWAYAGLAVVTRSSAEYTLVAGQPVRRRRPPMTRGLNRNHNRVLKDVFKGAATAATARPGPLQDFYHSVIARGTREDLARLTLTRKLAALTLRLWKNGERYDPTKLTTPAR

SEQ ID NO: 458165 - protein, 351 aa, unidentified
MIIIGVDYHPSFQQISFLDQETGECGDRRLNHSDGEAERFYKELKERGVSVRVGLEATGYSRWFERLLAELGFEVWIGDAAEIKRQRGRKQKTDREDGRLLLRLLLENRFPRIWTPNPENRDLRQLLWHRHRLVQMRTRIMNQLQAVALNEGYRWKKKLFSEKGRVLLEKLSLARWASRRRKELLELLDQLDPKIAELTAALEREANQRPEVMRLMTHPGVGPLTGLAYVLVIGTPDRFPCGKKIGSYTGLIPSEDSSAGHQRLGHISKQGNALLRYLLGEAAQAAARCNPDWRRRYRHLMMRREKRIAKVAMARKLAVRLYWMWRNNWQYSQLVEFGSNAGKLGTGHGVK

SEQ ID NO: 458166 - protein, 349 aa, unidentified
MRHIGVDLHKTNFVVCFLSQDETSRTETYPLTQTGINRFISHLDKEDEVAVEVTANIYYFYDHIKAHVSRVVLVDTYRFAVIAKSKKKTDKADAQALARFLKLNHLPEVPVPSEKIRQLRHLLQARETLVGMRTKLKNMGHGALTRNGVALSRSAFASRVSRARLAKRDDLAPADAAIMQAVLRQIAELDGEVELLEVEIIRIGKTLAGLKRLLQLHGMNLVSAISLLAEIGDIQQFETSKQLTAYAGLATSTRQSNETTRHGKITKQGRKRLRTVAIRAVLSMVNRTDTPLMKFYSKKKEEKGSGKAICATARKLLTIIFVMLKKDLDYWYLEDRLYNRKLRALDAAA

SEQ ID NO: 458167 - protein, 410 aa, unidentified
MELLHRRCCGLDVHKETVVACLRLVSNGKVTTEVRTFQTTTADLLRLSEWLAANECTHVAMEATGVYWKPVWHILDDGEFELVLANAAHVKNVPGRKTDVNDAMWLAELLAHGLIRASFVPDSQTQEMRNLLRTRKQLVREQSRHLQRVQKTLEDANIKLDSVLSSLMTKSGRAMIEALIAGETNPVKLASLADPRVKASPKELREALRGRVTKHHRFLLRLHLNQIDALGAAIATVDVQVETNLGPFRTAVDLIKSIPGFDNLGAHVVVSEIGIDMSRFPSEAHLISWAGICPRNDESAGKRRSNRLRKGAPWLKTTLVQCSWAAIKKKNSYLQAQYHRIKARRGPKKAIMAVAASILTAIYHMLKDGTMYQDLGHNHFNRHSADRQKHRLVKRLADLGYTVEIKPLAA

SEQ ID NO: 458168 - protein, 327 aa, unidentified
MKQILIVGVDVSKATLDLFIKPWNRGYRVANNQKGYKEWMEKIQPLLEPDHQLLVVMEHTGLYSHAFEVYLQSQGIDYCKIPALQIKRSMGVVRGKNDKVDAERIAQYGWLRRDILSADQLPDEQITQLRQLLSLRAKLVKDRSGYVVRLKEMKTAGCCDSFLDRAQQQVIQSLSEPIVLIEERIKRLIEDSAELKNTYELLRSIKGVGRIIATYMICCTGNFKKFKNARKFNCYAGLAPFKYESGSSIKGRSKVSHLANKEAKALLNLAACCAIRCDSEMKQYYQKRVAEGKRKMSCLNIIRSKLVARMFAVIKRQTPYQEKLLAA

SEQ ID NO: 458169 - protein, 349 aa, unidentified
MRFYTKTHTHYCGIDLHAKTMYLCILDQSGQILLHQNLKSRPEDFLAATQPYRNDLVVAAECMFTWYWLADLCGKEGIEFVLGHALYMKAIHGGKAKNDKIDAFKIATLLRGGNLPRAYVYPQEMRATRDLLRRRLHLVRRRGNLLAHIQNTHHQYNLASPQAKIAYKANREGVAEAFAEPDARKSMEVDFTLIEHYDALIRDLELHLERRARQHNPQDYHRLRSVPGIGKILALTILYEIHDIDRFDRVQDFLSYTRLVKCDHSSAGKKLGTGGAKIGNVHLKWAFSEAAALFLRNNPEGQKHLRRVAGRHGKAKALSILAAKLGRAVYFMLRQERAFDMRRFLARNN

SEQ ID NO: 458170 - protein, 402 aa, unidentified
MITNNPQTIPPATAATATPPTATAVPSVKPHRVIKLGVDVHWREHVVVRQIDGTSPQPAQRFAPEAFVAWVAKQAQQADVVHCCYEAGPFGFVLHRRLVGLGVKSLVVRPRNWDEYGKKVKTDRRDALALVSCLDRYVAGNTEALTSIRVPTETEERARSLTRQREQLLEHRKRLAAQGLSCARYYGHDLPDEWWRAKKFEALRAELPEFLCTLLESVQRIALLVHAELEARSADVESAQTQELPTGLGALTAQILDREIGDWGRFKNRRQVASYTGLVPSEHSSGERRQRGAITKHGNPRVRHILIEASWRLQQFQPDYRALKLRQAAFDTAKRKGDKPTRKKLCVGLARQFIVDWWRIRTGRTTPAKLGLQMSWPAAYVLRGKAPQAVAVPVAVPQPAAA

SEQ ID NO: 458171 - protein, 346 aa, unidentified
MLHAGLDLSRRRLDFHLLDVGGATVEAGLAPPDADGLRSLAERVGRHHQPVRAAIESMNGARFVHDQLERHGWQVEIADAHKVKGLAPLACKTDRIDAWVLAELSRRELVPAIWLPDPAVRAERERARFRLHLVRHRSSLKQRVHAVLLAHGKPCPVSDLFGVSGRRLLARLALPEPWAGTLEASLRLIDELDREIEGCETELRRLGAGHRYAPLLLTVPGIGWVLAYTIAAELGDISRFPTPRKLAGYTGLCPRVYQSGESDRRGSLAKHGPRYLRWALIEAATHARTHAVYRDRYERTKARVGRQRGAKVAQVDLARRLAEAIWHMLTRNQPFAPAGATDPLAA

SEQ ID NO: 458172 - protein, 422 aa, unidentified
MNINTDSKRRQVPDDYLVAGIDPHKKTHTMVLMTRGEKVLTSLKFDNSKSGFEHAVKRVDDQISKSGNKGVIFAMEAGGHYWRNLAYFLNKRGMWFCLVNPFTAKRLREGKDINRAKSDMRDARVMAELVISNGVPQTNLPQGIYAELRAVYNAYQRLIKERSRIKSRMKSLLDQLFPEFCLVFSNVCSKTAMQVLDCCLAPADIARMQEAQFIARIREGFTGRALKIHSLQELYQLGKTSIGAEAGARGLALELRLMTQQLLLLSEQIEETKHILQGLLLSIPESRCILSIQGVGHIAAAGILAETGPLQAYRNSGQLIKLAGTNPTSWESAGKRHSITHMSKKGRPKLRSCLWIAAIALLRSNPDFKEWARVRRERELHMHPLKPRETVGAVANRLLRIVYALVKNGSMYCLPQANEVLV

SEQ ID NO: 458173 - protein, 370 aa, unidentified
MPEPRTLFVGLDVHKDSIAVAHAAAERDDPPLFVGPIGPRQADLDQLIRRLQSKASRLVFAYEAGPCGYGLHRHLTGKGLDCRVVAPSLIPKKPGDKVKTDRRDAVELARLLRSGDLTSVYVPRVEDEAIRDLCRARDAARVTLKAAKLRLKSFLLRLGLPYTGRADWNPAHRRYLAKVVCPTPAQQIVFQESVRAVDEQVERLGRLETELRAAVEPWRLAPVVEALQALRGVQWLVAMTVVAELGDLTRFTNPRQLAAFVGLTPSEHSSGDTRRQGGITKAGNGRARRALIEAAWAYRYVAKVSPSIQARLESLPPHIQAIGWKAQVRLCKRFRRLLARGKHANVVCTAIARELLAFMWAIAKEVPLPV

SEQ ID NO: 458174 - protein, 416 aa, unidentified
METENEVVCGADIHRDFLVATIVSRGGLKLQERFSMNQDGLLAFKSWILDHSCQRVAVESTGNYWYPIFGILEGHVEFILANAYQIRNIDGKKTDRLDSERIAIYCLNDLIKPSRIYPKDYRDLRAVTRSREALVNVRSKVKNQIHQLLATCCIKLSSVISDSFGKSGRYIIESLLEGKTIDQIISGIPSKRVRKKADELREAIRNGIDPVQVFLIKTDLEVIDAISEKIKLLDAEISIKVKPFEEDLKIVLSVPGTGLISAATILAEMGNIRNFPSADKMAMYFGIVPSVYQSAGKLRTGRITKRGSKHMRRILVEVAKAISKTKKDSKLKRFFMRVAAKSGRNVAAVALARKVLCILYHLLMNREDYQEPEVEKTKPKIPSCISPISMMDIDEMIRIICKAGYLVEKDLKEGSG

SEQ ID NO: 458175 - protein, 412 aa, unidentified
MKRIRDRVAGLDVHRDTVVACCRVVDPDGEVEVTKQSFATTRKGLGELAVFLSGAAVTTVAMEATGVYWRSPYYALEGMFDELWLCNAQHVKNVPGRKSDLSDAEWLADVAAHGMVRPSFVPPPEIRELRELTRYRKTQVDARAREIQRLEKVLQDAGIKLTSVASAVWSVSSREIIEALISGTADPAVLAQMAKGRMRGKIDRLEEALSGHFGAHHAVVCRQIIDHIDFLDHSIATLTEEVTTRLVPFEAAVTIVTSVPGISRRTAEVIVAETGADMSRFPTPGQLCAWAGVAPASYESAGKRRPSGTRHGSQWLRRALIESARSAARTKASYYSAQYARIARRRGANKAAVAVANSMLFTIWHLLSTGAFYDDPGVDYFLRRHDPAVEAKRLARRIEALGFDVSLIERAA

SEQ ID NO: 458176 - protein, 334 aa, unidentified
MNFKNFIGIDVSKGTFDIALLRESAGNSIVSAQYSNDFHGLVKLEEFVKKQGLNMDETLFCMEHTGIYCRLLSHYLVENKYHVWLEMPVQIIRSLGIQRGKNDRVDAIRIAEYACLKKDKAVLWQPPREIVIQINDLLTLRDRLIESRKSLKQPIKEFIDAGFKDTAKLIENMCRNTLKALDKEIEQIEKELDKIINKDSNLKKLFKLATSVPGIGKITAFTLLYFTNEFKLYTNANQLACYCGVAPFERTSGTSVKGKSRVSSFANKRLKKLLHLVAMSTISCDKQLSVYYQRKVNEGKNKMLVINAIRNKVLHRLCSVIKRGTPYQVEYQIA

SEQ ID NO: 458177 - protein, 340 aa, unidentified
MSEITTIGLDLAKHVFQVHGIDAEGTTVLRKRLRRGQVLAFFSRIPRCVVGLEACATAHYWARELGALGHEVRLMPAQYVKAYIKRNKHDAADAEAICEAVQRPTMRFVPVKTTEQQATALLHRGREQLVRQRTMLVNALRAHLAEFGMVAAQGLRNVGELIAIVRDDGDTRLPDVARQVLQVLADQIEQIETAVAGLERQLLAWHKTNPVSQRLASIPGIGPIIATAIATTVADPKVFRSGREFAAWLGLVPRQNSTGGKTRLGGITKRGNRYLRRLLINGASANLLRSKATKADPWVIGLRRRRPPLVVAVALANKTARIAWAVMLREKEYQPRAVAA

SEQ ID NO: 458178 - protein, 371 aa, unidentified
MDVVIGVDAHKATHTFVGVDSGGRKLAEITVAATTDGHLEALSWARATFEGGLVWGVEDCRNLSTRLENDLLHAGQHVVRVPPQLMARTRASARTRGKSDPIDALAVARAVLREPDLPVASHDDTSRELKLLVDRREHLVQHRRATMNRLMWRVHELDPPHASKRMRLDHELPRQVLRSWLATQPGLLAELAYDELTDIARLTDEIDALERRIAVRVRAAAPSLLTLFGCAELTAAKLIGETAGVHRFRSEAAYARHAGLAPIPHTSGGSQVRLRGSRCGNRQLNAALFRIAFTQLRGGSGADYYRRRRDAGDTHAKALRCLERKIVRKVYAHLRTDEANRHQSQPAPGHFEELERLNDQWSRALATLGDR

SEQ ID NO: 458179 - protein, 406 aa, unidentified
MSTVIHFIGLDVHKESVSVSIAPSNSTEVRHYGTIGGALADMDKLIQRLSLPGVELRFCYEAGPTGYPLCRHLRKRGYVCEVVAPSLIPKKASDRVKTNRRDSDQLARLFRAGELTGIDVPDAGDEAVRDLVRCREAARIEQLKARQRLKGFLLRHGFRYAGKSSWTEAHRRYLGTLKMPFAAQQIAFQEYIEAITVAGERLARLTQAVEDAAVGWKCEPVVRALMSLRGINVLTAMILVAEAGDLTRFDSPVELMSYFGLTSCESSTGDKRVLGGITKCGNGACRRALVEAAQHYRVAPRVSAGLQKRQEKQSREVRAIAFKAQQRLHARHKVLSGHRKKACVVATALARELCGFVWAIACQISAPEKVKMRAEPSAPARKNARAYELDAKKSFVKKERAGQEPK

SEQ ID NO: 458180 - protein, 433 aa, unidentified
MKVTIRPEEFKSEETLVVSFDVSKDKLNYFFCYRDATDGQRRECEEHFSNRTPVIERQLREFRALGQQQGLPELLVVCEPTGGYERSLLKTAHRLGLRTAYVNPESVNKLQVVQSNDSGKTDEKDPRTIHTLAAVGKTLKQRPLPEPYLQLRRLHGFYEDEVDAGVRLRGHLQAVLQELFCDYAQSADFLYTKTGKALLDRYGFNPYRIVADSWGQFVRNLQRHSRVRLTVLEAIYQAAKASRLHQASAWEQEVLEQRLRQLYQDWERHEQRKAELRQQMTEIFSRLPEHQTLGGIPKVSAFHLARLVAQTGPLSDFRHSAQLVRLSGLNLRERRSGKYVGQLKISNKGRALLRKVLYQVCFGCLIGKGRLYHEYYQAHVNPKQSHSAMRTMVSVMRKFVKLLHGVHRSRTAFNPARVRVSASEFARQQKLAV

SEQ ID NO: 458181 - protein, 344 aa, unidentified
MKHYAGLDVSIKETSVCVIDGAGQVVREVKVPTEPEAILAVLVDEAFAIERIGLEAGPLSQWLYSALADAGLPVICVETRHMKAALSAQVNKSDRNDARGIAHMMRVGLYRPVHVKTLASQKRRMLLTSRTLLQAKAIDIESDLRGTLRNFGLKVGMVSVAKFEPRIRELVADHPDLATITEPLLIARRVLREQLGVLHRLLLAAVRHDEVCRRLMTTPGVGPVVALTFRATVDVPARFASSKAVGAVFGLTPRRHQSGEIDRMGGISKCGDAMMRTMLFEAAQSMLTRTIKWSWLKAWGMKIARRRGMRRAIVAVARRMAVVMHRMWVDGTEFRWTNSATAAA

SEQ ID NO: 458182 - protein, 369 aa, unidentified
MTVYIGVDLHKTQFTVHERTEETVESIEQIKQYPTTEVGYAAFLARITEYKIGGFTVKIGVESTGNTRFFKAQVEKVGAHVTVINTLKFKVINESTKKTDKHDASTISEFLSKDMLPESYLCSKETENLRRLLKSRERLVHSIVGQKNEIHALLVSMGLQDESRSLQSKKGRQEVLDALSSRSDLVLEAQSVKLMIEIIEQMSQSVKLIEKQLSELTKDDEMVSRLMTIRGCGKITAWIIRSYTEDIGRFASAKKYAAFCGLVPWVQDSNETVRHGRITKRGPQELRTAYVQLVLGIRRCKDTSGWRIMQRLDYMKKNKGSGKSIVAAARKMAEIVWALLTGKQDFDSTKMMGRYKPMSLAEQALVAMN

SEQ ID NO: 458183 - protein, 389 aa, unidentified
MPTIADRHDAPTAIQTNLAAIFISLELSRSIWLITSLSPGSAEKMSKHSVRAGDVAALLARVSELKRKASERTGKSFPIVVIQEAGLDGFWLHRVLQSEGIESHVVDPASIATARRRRRAKTDRIDGEALLRALLAFKRGEPRVCAMVKAPTPEEEDRRRLSRERKVLVADRVKHVNRVKGLLFSQGVFGYEPLRRDRRQRLDNLTTGDGRSLPMHLKNQISRELDRLELLLDQIKRAEAERDALLAAQQAAAPAPTGRMLLEFRGIGAEFAASLWLEALFRHFDNRRQLASYAGLAPTPWQSGSVDREQGVSKAGNPRLRTTLIQLAWLWLRHQRQSALALWFKERVNRNGGRLKKTTIVALARKLLVALWKYVTAGVVIEGAVMKDA

SEQ ID NO: 458184 - protein, 438 aa, unidentified
MSNKVIFNLDDLFISVGIDVGADFSWMSIALPNQQFVGKPYKILHSSIDSLTTAVSKIKEAEEMYSLESRIFLESTGIYHYPLFCYLRDKGFNCSVINPIITKNSTNINIRKVHNDRFDSKKAALVGLKPDLKVSLMPSDLALNCRNLCREYYDLMDNRGAYVNKLQGELRMAFPQYLGIFSKVTINTSLTLLETYTSPSAFLEADKQEIIDIIKSTARFGLTYAQNKYNAIIQAATDANQFGYIIDSNIKRIRLYISFIRKYDEEINNILESLHELVDANEDADFVKQIHLIETFKGAGFLSAVSIMGEIGDFSAFSKPKQLFAYFGLDPAVKQSGKFEGTKVQMSKRGSAIARRVIHTLTLQSISISRNGEAKNPVLREYYLKKCDSKPKLVAMGAVSHKVCNMIFAILRDNKSFEIITPQEHIKQYNASKCDMAA

SEQ ID NO: 458185 - protein, 387 aa, unidentified
MGQVIIGVDPHKRSATIEVIDQRERVLGKGRFGTDLDGYQSMLSAGREHTDRVWAVEGCNGIGRHVAQRLVADGETVLDVPAKLSARARVFSTGQGRKTDPVDAHSVAVVALRTPDLREVVIDDIAVALRLLVDRRDQLGYARTEIVSRLHHLLLELIPGGAKKFLSAQQARVLLNTVRPRDVVGKTRRWLASELIHELTVIDKKIKVANQELTELVASTGSRLQQLHGIGPSGAARLIGDIADISRFTSRAHFASWNGTAPIDASSGDQNRHRLSRAGNRRINRVLHIMAVVQLRNHTEGRRYYRRKLAEGKTTMEAMRALKRRLSDVVYRQMTADAKRLRTGPGGHVGATLQSSATDPNPEAGTSEKSLPGPAEPQPRTPLLTVS

SEQ ID NO: 458186 - protein, 341 aa, unidentified
MEHTTIAVDLAKSVFQVAVSHRPGHLDEERRLPRDRFLAFFAQRPPATIVLEACGSAHYWARQLQPLGHAVRLLPAHDVRPYVRRNKTDRTDAKGLLEANRNEEIHPVPVKTIEHQAIASLHRLRSTWLATRTARLNTLRGLLREFGIFIPTGSQRVVPRVRALHEDPAVPPLLHATLAAACDEIEMLEVNMRAVERQLAALADDMPDVQLLQTVPGVGLITATALVALVTDIRRFPSGRHFASFLGLTPREDSSALRRRLGAISKQGDVYVRMLLTHGARSLVWHAKAAKRPTSLQQWAMQTELRRGRNVAAVAMANKLARIVWAVWVQQRPFAADHRRG

SEQ ID NO: 458187 - protein, 304 aa, unidentified
MRLEAMRLRVANDAAGWNELVAKLQAAHADLVELEATGGYERGVVCALHQANICVARVNPRQARDFAKSMGVLAKTDGVDAEVLRDFADVLARHEQRAKYITPPLDEPRRELSELMTRRRQLVDMIVAENNRLELAGKAAVRSIKNVLKTLEKQLAAIDKDIDEHIDRHFGKQRTLLDTVKGVGPVTILTLTAALPELGQLDRRAVSKLVGIAPLADDSGKRSGKRRIWGGRAEVRAVLYMATTVAIRHNPVIRVFHSRLIAAGKPKKVAIVACMRKLLTILNAMLRDGAVWNPAKHVPQPQGA

SEQ ID NO: 458188 - protein, 358 aa, unidentified
MAGKVTETAVVGGVDTHKDLHVAAVVDQNNKVLGTQFFSTTRQGYRQMLAWMTSFGALKRIGVECTGTYGSGLLRYLQNAGLDVLEVTAPDRMERRKRGKSDTIDAECAAHAAFSGIRTVTPKTRNGMIESLRVLKTCRKTAISARRVALQIIHSNIISAPDELREQLRNMTRMQLIRTLGSWRPDASEYRNVTNVYRISLKSLARRYLELHDEIADLDVMIAAIVDELAPELIKRNAIGYESASQLLITAGDNPQRLRSESGFAALCGVSPVPVSSGKTNRYRLNRGGDRAANSALHIISIGRLRTDDKTKEYVARRVAEGHTKMETIRSLKRYISHEVYTLLRNQNRQINSTPITA

SEQ ID NO: 458189 - protein, 404 aa, unidentified
MWYAGLDWSDTHHDVVVIDADGRHLASKRVAHTKAGLETLVQFLEGISGSALKEQMACIIETTHGLLIAALLEAGLPVYPVNPKTLDRRRVPSGAKTDLIDAYLLAKTGRADLADLRRLQPDSALVQELKTLTRDQDALIQMQTRLVNQLTACLKAYYPVALSLFGKLHQRSTVRFLQAYPTPQEAIDASQAHLTSVLKQAGHSKAEQVAAKLFERLHQPQLVADPITTRTKSRLMLALVAQLLPLLEQIAAYDEEITALFLTHADSPVFASLPGAGKRLAPRLLAEWGDDRVRYTSARKVQALAGTAPVPYESGNYRTAHRRSACLKPLRNALYQFAWQSTLCEPWAKDYYHRKRAQGKSHSVAVRALSNTWVRIVFRMWVDQQGYARGIFEAAQGAHAPLAA

SEQ ID NO: 458190 - protein, 457 aa, unidentified
MMETKRRREQRSMLPVHPDAAAIDIGATVHVAAVGPARDPEPVRSFGTFTGDLHRLADWFAQCGIKTVVMESTGVYWIPVYEILDQRGFEVRVVNARDAKHVPGRKTDISDAAWLQRLHEFGLLRGSFRPQGAIAALRAYLRQRERLLDYAAAHIQHMQKALTQMNLQIHHVISDITGATGMRIIRAIVAGERDPDTLASYRDIRCHSSAETVRQALIGNYREEHLFALAQAVELYEVYQAKVATCDEKIEGVLERLKQPCRAPAKPLRAARHKTRQPNAPAFDARGALYAVLGVDLTQIHGLGPYLALKLISECGTDLSAWPSAKHFTSWLSLAPRNKISGGKILSSRTRPSGNRAAALLRLAATTVGRTETALGAFYRRLSARIGKAKAVTATARKIAVLFYNAVRHGMDYADPGASYYEERYRQRVLTNLQRRAKAFGYVLQPTEIKVVSMAVS

SEQ ID NO: 458191 - protein, 293 aa, unidentified
MGVLIGIDPHKKSVNAAAAIDEQGELAGHQTFPANQKGLRALERWAKRFPERRWAVEGAAGIGRPVAQPLARAGEKVVDVPPKLSSKARLLSTGNARKNDRLDATFTAQAALHNERLAPVQPEDGDDAYVEVLRLLTDRREDLVAERTRALNRLHVLLRDLLSDTVSKQLSADAASKLLRRVRPRDEPARTRKQLAAEVVRDVRALDRRIADLDERIRQEVEASGTTLTEVFGVGSILAAKIIAIVGNVARFPSKAHFASYAGVAPIEASSGEVVRHRLSLAGNRTLNQVSCT

SEQ ID NO: 458192 - protein, 368 aa, unidentified
MANFTRILLEIIIGLDLGDKFSYYFVLDSKGERLDEGRIKTSPEAFKESFGKLKPSRVALEVGTHSPWASRVIKECGHEVLVANSRQFHLIYKNPKKTDRIDAQNLARVARMDPELLKPIQHRGLKAQRFGAILRARESLVKSRGVLINHVRGAVKSFGGRIRCTAHAFHLQAEEQIPEEVRRILKPLLETISQITDQIKLYDKNIQRAGEEHFPDAARLRQVKGVGPILSLAYVLCLEDPKRFTRSRTVGAYLGLTPRKDQSGESDPQLRISKCGDKSVRRLLVGSAQYILGPFGPDTDLRRHGERIIKGGGKKAKKRAVIAVARKLAVLLHRLWVSGEDYEPLRNAKRQGTTPVSPSGAESSFEAK

SEQ ID NO: 458193 - protein, 461 aa, unidentified
MTRYGRKKKGVPQKGGSFPIINNDAAGIDIGSEEHWVAVPDDRDENPVRPFGCFTADLHAMARWLKACGVTTVAMESTGVYWIPPFQILEEHGFEVKLVNARHVKNVPGRKTDVSDCQWLQRLHTYGLLSGSFRPEDQICVLWSYWRHRANLVRYASDHIQHMQKALTQMNLHLHKVLSSVTGVTGMNIIRAIIAGERDPKKLALMREPGVKNTSEVIAKALEGDYRQEHLFALKQAVELYDFYHRQIEACDREMERYLRTIEGKVDPVQNPLPKQKGRGKKPIGNQSFIDLRTELYRISGVDFTQIPGLDALTVQTILSEIGLDPAKFPTEKRFVSWLGLWPNNRITGGEVKSTKTRKTVNRAANAFRMGAQTLANSNVALGGFYRRIRSRLGSPKAITATAHKLARIFYRMWTTGQSYIDLGKDYYENRYKERVLRNIAKRARELGYDAVLQPIGERVA

SEQ ID NO: 458194 - protein, 410 aa, unidentified
MSPLYVGIDVSSKSNVAYLMKPDGSKHSNFSVPNTRDGSRQLVKRILSAITSESLTDVVIGLEATSVYGDNLVCFLREDGSLAPYNKKIHVLNPKQVNKFKLSYNDLPKNDYVDSFVIADCLRFDRINKEVYPDDYRYAALKNLTRARFFAVQNLTREKQRFMNQLFKKYSTMAQEKVFSDTFSTTALAVYESFESAETLANMDLHQLTEFIIEKGKNRFPDPDSVAKAIQKAARSSYRLPKTVNDSVNQVLSISINSMRAMESQIKAFDKAITEQMALIPNTLTSVNGIGPVYSAGIIAEIGDINRFPNQASLAKYAGLVWSQHQSGDFEAQNTRLIRSGNRYLKYYLCEAALSLVRCDAEYRSFYHRKYKEVNKYQHKRALALTARKLVRLVFRLLKDNCLYRAPESN

SEQ ID NO: 458195 - protein, 357 aa, unidentified
MVRVGMVVVGVDAHKRTHTLVAVDQVGRKLGERTVAATSDGHLQALRWAAQWPQPQVKFALEDCRHLTRRLAADLLRAGHRVLRVPTRLMATARRSGRQPGKSDPIDALAVAQAALREPDLPAAHLDGPTRQVKLLADYRADLVVERTMLCNRLRWHLHELDPELQVPSRGLRRYKVIDQLTAHLADVDGTVAQIARELLGRCRELTVRINQLEGELRELVRTLAPGLLAIPGCGVLAAATILGETAGAGRFRSRHAFARFNRTAPIPVWSGHSVRVRLNRGGNRTVNWALHMIAVTQARGVGPGQAYVERLLAGGKTRTEALRLLRRRLADVVFRVLLADEHRQAEPSPASAPQAA

SEQ ID NO: 458196 - protein, 344 aa, unidentified
MSKHTLVAVDLAKSVFEVAVSHHPGQVAKQKRYSRQQFPLALAQLPEVTVVVMEACGSAHFWARRIQALGHEAVLLPPHAVRPYVRRNKTDRTDTKGMLEAYRNEEIRHVPVKTIAQQTLASLHRLRSGWLAERTARINTLRGLLREFGILIPLGAHHAVPSAWAQLEDAESEIPDPLRPALAEICLEIRELERRVKMIERQLAALAAQTPAVSQLMTIPGIGLIIATALVAFVGNIHRFPSARHFASYLGLTPRESSSGLRRRLGAISKRGDVYLRTLLIHGARSVLLAAKRRTPDRLQAWALSRQAARGHNKAATALANKLARIIWAVWKHDRPFRSVPNVA

SEQ ID NO: 458197 - protein, 374 aa, unidentified
MREFSKYVGLDTHKETVAVSVGDAIGGKARYYGEIANTPEAIRKLVKKLCPDGEVISFCYEAGPCGYEIYRQISQLGHHCSVVAPSLIPTKPGERVKTDRRDSEKLSRLDRAGELTAVWVPDQEQEAMRDLTRAREDMKGLERITKQRLNAFLLRYGRIYESGKSRWTQAHFRWVEGLKFDVTVQQIVFHEYVDAVKQAEARVARLEKEMEKALEHWVLAPAVEALMALRGIKLITAMTVMAELGDITRFDSPRQLMSFLGLVPSEASSGQTRRQGGITKTGNSHVRRVLVESGWCYRFPARKTAHLQRRAEKCSAEVQAIAWKAQKRLCGRYTHLIGRGKLKVQVCTAVARELVGFIWAIACEVMNKPVESTC

SEQ ID NO: 458198 - protein, 407 aa, unidentified
MPRYYIGVDWGDQQHGVCVREEGGRVVWESLVAQTPAALSEWGRRLDEWRAAGVTLWAAIEKPEGRLVEFLLDHGVVVYPVNPKALDRARDRFRLSAAKSDRVDAQVLAEFLRTDHPHLAALVPSSAEAQEMKLLTRDYARLVRQQTRLFNQLTSTLKEYYPRAGEMFGDWTTQVARDFLRAYPTPEALTAVRLAQWRRFARAHRLSAARTTALWEQLTAPQVPVPAHVVRSKARLLATLLTQLEATQQGVESYRAEIERMFATLPAAQWMQTLPGGKSGTTVPTLWAELGDAPGRWTSWQHLQAQAGSVLVTIQSGKSCVVRFRFACNQALRQAVRWLAFCSLKQSAWAKAYYQQQRARGHRHNQALRALGAKWLKILFRMWQHQVPYDEQYHLANMAKHHLRATA

SEQ ID NO: 458199 - protein, 422 aa, unidentified
MARQKTDEYAALIGLDWADQKHDYYLGLVGRNTGESGLIGSRPEEVAAWINQLRKRFKGQRVALCLEQSKGALIHQLMAVEFIDLYPINPQALAHFRKAFAVSGAKDDPTDAQLLWEYLLKHRDRLRVWTPEDVDTRLLALLVQDRRKLLDLRTKLSNKLTATLKGYFPQALELIGTKVASPMACDFLQRWTSLAAIKKCRTHTIQTFYTQHQVRNQGKVEARIARIRASVPLVEDAAIVETSVLKVKSLSRQIACLNDDLDEYEQYIAALFETHPENDLFEALPGAGAALAPRLLVAMGTDRTRFAAADEVATFAGIAPVTERSGQHTWVHWRLACAKFLRQSFHEFANMSRHQSVWAHAYYEGQRARGKAHHAALRALAFKWIRIIYRCWKQHEIYNESTYLAALVKSKSPLVKLMAEAA

SEQ ID NO: 458200 - protein, 377 aa, unidentified
MKAPSTRPAAVLGLDVGKSSHWACLIDRDGEVLDSAPVRNREAELDALFASAPAGTLVVVDQFRNIGSLAVRRARAAGLGVAYLPGLAASRAAGLFAGEAKTDERDAAVIARTALGVPDSLSGVPGRGEALEAARALSSQRDHVVACATRDKNRLRAVLLESCPALEAAVDLSDRRWLELLAGFGGAWGIARSGAEGPRAEAAGEAAAASTAPPPALVEAENRQVRFLAARISEALDEAGALEAETAALLEGDETHACLLTVPGIGPRTAAQLAVSVDIGRFPDHDHLASYCGIAPRVRSSGTSVRSVRASRRGDARLKSLLIFSCNSLVRSSGRYGEYYRACRARGMGHGRALKAVARKRLRAIYAVMRDRVPYRE

SEQ ID NO: 458201 - protein, 379 aa, unidentified
MEIITQNEKILYIGIDVHKDTYSLCCFDFFRNELSDEMTIKATTKAVIKYLEAIKKKHREEILFACGYEAGPTGYGLCRGLQKAGFGCAVMAPTTMSNPDGKKRVKTDRIDARAIARILAYKSYSQVHLPSEEMEALKEYTRARDAKKRMFKKAKQELLSFLLRNGKTYSESGNYWTEKFFKWVKTVQFSEKWMQEAFNEYLAEVYSLKAKIELMDMKIREIAELEIIKDKVDKLVCFSGIDVTTAVETVVEIHDFTRFATAAQFVSYLGLCPGEDSSGKTKNMLPLTKAGNKRVRALFCESAKAIKRTNPYGQKSKRILERQKNASPEIVAYADKATKRIRTKMKHLEERGKNYNVSSVAGARELACFVWGMMNGKIA

SEQ ID NO: 458202 - protein, 385 aa, unidentified
MVTGITAYKRRPLMNNSIVYIGMDVHKESYTVCCYTFDYDRIEYLQKMNADYKNILKYIESIRKRYPEDAEYVCGYEAGCLGYALYHQLTDHGVKCIILAPTTMATTNNKRVKTDRRDAGSIARCLAFHTYSEVYVPTDEDNAIKEYIRMRDDQKKMLKGTKQQILALVLRHGKRFDGGKTYWTIAHIKWLKALKLDGVIQESLDEYLITYEYLVDKIERLDRRIEELATGERYEEKVSKLKCFIGVKTHTALSLVVEVGDFERFAKAGNFSAFLGLVPSEDSSAEKQNKYAITKAGNSHLRRLLVEAAQAYTRGAIGHKSIALKKRQEGNSPENIAYADKANERLRRRFYRMTLKNGTKRNVATTAIARELACFVWGMMTENIA

SEQ ID NO: 458203 - protein, 366 aa, unidentified
MKKGSTVAAKQGRNFKHQKLTIGLDLGDRASWYCVLEQTGAVLWEQRVSTTPKAMREAFSTVTRSRIALETGTHSPWVSRLLAEFGHEVIVAHARNVRLIGESRKKDDRWDAQTLARLARIDPQLLCPVKHRSAKAQADLTVIRARAGLVRARTALVNTARGLAKSYGERLRSCNVRNMNPEKAEGLSPELQTALEPLLLAMESLSEQIREYNERIENMAQQRYPPVALLKQVKGVGTLIALTFLLTLEDPLRFRKSRDVGCYLGLQPGRRNSGQSQPQLHISKEGDPYLRTLLVQGSQHILGPFGADSDLRRWGLTLADRGGRNGKKRAIVATARKLAVLLHHFWVSGEVYEPLRNSGQLVATAA

SEQ ID NO: 458204 - protein, 342 aa, unidentified
MKDTMIGVDLAKNVFQVHGALRTGEVQFRKKLTRKQFPVFMAQQEPCTVILEACCGAYYWARQMEALGHEVKLIAPQYARPFVKRQKNDAADAEAIVIAARQPEMRFVAPKTVEQQSRAAVFRGRERLVHQRTADVNALRALLHEHGHVFPIGTRHLDRMRALVEDEASDLPALIREECQDMLVQIAEKTARITERTMKLKVLAARSDRARRLQTMPGVGPLTAVAVEAFGPDMAAFKTGRDFAAWLGLVPRQHSSGGKERLGRMTKAGQADIRRLLIVGAMSRLNWLGQRTITEGSWLSRMLARKPKMLVAIALANKMARQIWAMLTKNEDYKDPALAGAT

SEQ ID NO: 458205 - protein, 352 aa, unidentified
MNPIATVGADLAKAVIVVCAADIEGRVLFYKQLSFNGFAQWAATISPCTFGMEACGSAHHWARRLTAYGHTVRLMAPEFVKPFRKSQGAKNDRNDSQAILTAVRQPDMRFVSVKSVDQQAVLAWHCMRRGWSDDRTSLINRMRGLLAEFGIWLAQSPEALKRSLPRLLESEALPSRMRTLLTVAREELRELEERIELCEMEIRTHARQSEEAQRLEAIIGVGPMTASAIAATVTNARDFKNGRQMAAWLGLVPKQFSSGGKSSLGKITKRGDTYLRGLLTGGARSALMAAMRRPPAERTRLQHWMVEARLRLGFYKTLVAIANKHARMIWALLAKGEAYDPQAWKRPLPQAA

SEQ ID NO: 458206 - protein, 411 aa, unidentified
MDKIYDKCCGIDVHKKLIVACFRCGKKQEVREFGATTRELLELADWLKDGGCEMVAMESTASYWKPLYNILESSDLNAIVVNARHMKAVPGRKTDVKDAEWIADLLQHGLLQPSYIPDKDQRELRELVRYRKSLVGERTRELNRLQKMLEGANIKLSGTVSDINGKSARSILEYLLTGKSIDGSKYDEMYEQKIIAHNLKATKEQIVDDLNGVMSPLQRRMMKELLVHLDELNIHIKNLDDEIDNFMKPEEKQASQAIQDVTGIGNTSAQAIISVIGSDMGRFPTDRHISSWAGLCPSDNESAKKRKSGKTRKGNALLRTTLITCAHAAVKNKKSYFYAQYVGISAHRGPKRAYVAVAHSMLISIYHILKDGVVFKDLGADYYNQFNKERKINAYLKKLKALGWEAPIVAA

SEQ ID NO: 458207 - protein, 463 aa, unidentified
MSTTLGIDVACRAAHQAALAVDGKVIWKGRKFFTRPADLDRLWADLDLEDPGELSVVLEPTRNAWIVLVAWFRRRGAKVVMVPTTQSADLRAYYSKHAKTDRLDSALLARLPLLHPEGLRAFTGDGPADPLRRLVKQRSSIVKRRTAVLQRLDALLELLGPAWYEVLGSNYGKAALMLLTRYADPNALTRLGQARLARFLARHSRGWWKEDHAARLIAAARESIALWGSGIDFTELAADIAIEASQAQMLTDQIEDLDERIANLYDLADPDGLVASAPGVGPVTSAIIVGRIGDPHRFTSLAAIRAYSGLVPKVSQSGVAETRGGITKAGDPLLREALYAAADAARRTDPQLAAKYKRLMDTDRHHDSALCHIAASLLTRIATCWRKGEHYTLRDLDGRPITEAEGKMIVKPRYQIEPRHRDNAAHRRMRQTTKTASREQKKSHSAPTSRPATKSIEPTPEVA

SEQ ID NO: 458208 - protein, 339 aa, unidentified
MAIQALGLDIGKSTFHAVGVDAQGQVVHRHKYTRTALMRFMANLPPCLVGMESCPGSQHLARRFLERGHTVKLMAAQFVKPYVKSNKSDFLDAEAIVEAVTRPTMRFVPVKTPAQQDLQAVHRVRSGLVTQRTATINQLRSFLLENGLTMPRGMSALKQRVPEILEDAENGLSPRMRALVAELWRQVLDLRARAQALTEELTQLAEGDEACRRLLTVPGIGPLTATALVAAIGNGSEFRRGRELAAFLGLVPRQYSTGGKPTLLGISKRGNNYLRMLFIHGARSVLQRADKRADRLGPWLRGLKARRHANVAAVALANKLARVAWAVLVHGDDYQPSAA

SEQ ID NO: 458209 - protein, 397 aa, unidentified
MSELKGSFSGFVGIDISKDKFDACGITREETKLFQISTTMDRKGFEKLKGHLADTSVLIGMESTATYHINLFSYLVSEGYNVVLINPLLVSNYVKMQLRKTKTDKKDAAVIASFLLANGNTLMQRVPSSLIVDLRDLSRQRESLTDEMTALKMNIKRLLNITFPELEHISDVFTKSMLKLLQQYPSAFVLRDVDIGKLSQTLIADSYGHKRESFASELIKAARTSVGTSSPVKEMILKQETNLLLHLEDSLQEITVMLIEMSRKLMEDDINIMTSIKGIGDTTAANFLIEMGGDINQFEYSGKIIAMAGLDPAIYQSGKHEGKGKITKRGNRHLRKIIWNMTTKVIQYTDTFHAYYSKRRKEGLPYKKAVLATAHKLIRVIYAMLTKRTTFCPQPNS

SEQ ID NO: 458210 - protein, 357 aa, unidentified
MKIVGCDLHARQQSIAMMDMESGEFTEKTLVHEGNAVREFYGSLEGQVVVGIEATGAMQWFLELLEELSIEYRVGHPAKIRAQETRKQKHDRRDAGLLLTLLSEDRFPEIWMPSIEQRDLRTLLRHRDQWVRMRSRVQHTLQAIALNHALRQGRTLWSAAGQSALQALSLPPYTAQRRNELLAMYGQLQRRIQELDKEVEHQASQRPHSRRLMTHPGVGAVTALATEVFLGDASRFSRGNEVASYIGMIPCEHSSGKRQRLGKLTKEGNKLLRYLWTEATLHAVEKDGELKHFYRRKLVQKGMGKARIAVARKLGIRLWIMLRDQIDYAEFCRRGQLRQKGKAHAGMPELQHGPAMQ

SEQ ID NO: 458211 - protein, 359 aa, unidentified
MKILTLDLGKYKSVACDYDQQSGAHEFQTIATNPQALHDLLVERQPDRVVIEICSIAGWVCDLVRALGLEMQVASTNDERWRWKRVKKKSDRVDALKLAQLSALNQLSLAQGPEHQLTLVHVPERHIRQWRALINYRQHLIRRRTKIKNHIRDLLAREALLLPQARKAWTLEGMLALEEMTRPLAEVEMDELWRGELALELDALRQLEEPLRKVEQKLDALGKADQRVELLQTIPGVGPRLAEALVALIDDPRRFKKGKEVGAYLGMVPKQLDSGESVRQGRITRHGSRLVRALLVEVSWIGLRYNPWARQVYERTRAGKKERKKIAVVAVGRRLLIRSWAMLRDEQPWRVAAQANSAS

SEQ ID NO: 458212 - protein, 369 aa, unidentified
MTFYVGVDLHKTQFTVHVRTEEKIESMNEIRMYPTTEIGYAEFCKRIRTYKETGAVVKLAVESTGNTKHFKNQMEKAGAEVIVVNTVKFKVINESVSKTDKHDAATLSEFLKDYKLPQSYLCSKETENMRRLIKSRERLVRAQVGQKNEIHALLVSLGLSDEPRSLQSKKGRQKVLDALESNNDYVLEAQSVKLMLDIIDTFAEKIKIIEKQLEELTKDDDMVKLLLTIRGCGKITAWIIRAYTEDISRFSNSKKYASFSGLVPKVRDSNETVHHGSITRHGPVELRTAFVQLFMGMRRCKDTKSWRMMQRYEYMKKNKGSGKSIISGARKVAEIVWALLTAKTEFDSARMTGTYKPMNLPEQALSVAM

SEQ ID NO: 458213 - protein, 347 aa, unidentified
MDQQCHYVGLDVSLETTSICVIDDAGAIIWRGKCRSDPDTITAIVRQHAPGAARVGLETGQLSNWLTLSLRRRGVPVVCMDARHAKAALSLQINKTDANDAFGLAQVVRTGWYREVAVKSMDAHALRMLLVARSRLVSQRQATANTIRGLLKTFGLVVAKGSKGLFPVRVREQIVGNPALIAIIEPLLAVWYAIRDQVVMLDRQMLARARNDQVARRLMTIPGVGVVIALAYTAVIDDPARFRRSVSVGAYLGLTPRRYQSGEVDTTGHISKCGDSLLRGYLYEAAAVLLYRDGRASVLKSWGLGLAKRIGMRRAKVAVARKLAVIMHRIWSDQSEYRWMAIPSTTA

SEQ ID NO: 458214 - protein, 345 aa, unidentified
MDHFAGLDVSVKETSVCIVDDTGKIIREVKVASEPEALLAVLKNPAYHFKRIGLEAGPLSQWLFSALAEAGLPVVCVETRHMQAVLKAQINKTDRNDARGIAQMMRVGIYRPVHVKTLRSQKLRMLLTHRKLLQSKAIAIENDLRGTLRNFGLKVGIVGRVRFEARIKELVENLPDLAVLVEPLLLVRRTLREQTIILHRRLLAVVRDDEVCRRLMTIPGVGPVVALTYRATVDVPARFRKSRAVGAVFGLTCSKYQSGEIDMSGRISRCGDEMMRVMLYEAAQSMLRSKKWSWLKAWAMQIARRRGMKKAIVALARRLAVIMHRIWVDGSEFRWTRGQAAAAAA

SEQ ID NO: 458215 - protein, 343 aa, unidentified
MNYYAALDVSLRSVHLCVIDGKGEIQAEAKLDSEVEDIVAFLRALDLEISAVGLEAGVLTQYLTYGLQSAGYEVICMESRQVKAALSAMRNKTDKNDARGIAQILRSGWYSRVHVKSIESHRVRALLSSRKAVLSKCIDLENEVRGLFKVFGIKLPPKLGHGAFDRTVRPTIEADPALAHALLPLLEARLMLYHSFRELDNRTRKLAQQDLICQRLMSAPGVGFVTALTFKAAVDDPTLFKRSRTVAAHFGLTPRRFQSGEIDYCGHISRAGDPTVRCTLYTAANALMTRSSSWSSLKVWGMQLAKTRGHRRAVVAVARKLAVILHRMWLDDSQFRWGTEGAS

SEQ ID NO: 458216 - protein, 312 aa, unidentified
MAPLYLGLDVAKTTVQLASEPAGLGGQFATDPSGLAVLVAQCQAQPVALVVLEATGGYEAPLAAALATAGLPVAVVNPRQVRDFARALGRLAKTDRIDAQVLALFGARVQPAPRPLPDEATQELEAVLLRRRQLLEMLHAERQRLPRARGREVRRNLRAHIRWLERSLVDTDATLATLIQASPLWRVQDQLLQSVPGVGPALARSLLALLPELGHLDRRQIAALVGVAPLAQDSGMQRGRRHCWGGRPALRTVLYMGALVAARWNPVLRPFYQRLRAKGKPAKVALIAVARKLLTILNAMMRDQRAWQTAHA

SEQ ID NO: 458217 - protein, 370 aa, unidentified
MAQASTLFVGLDVHKETIAVAYAADDREAEVVAFGTIGTRQCDIDKLIRKLQAKGKSLHFVYEAGPCGYWLYRYLTKKKLTCWVVAPSCIPKKASDRVKTDRRAALQLARLLRSGDLTPVYIPSVEDEAIRDVVRAREDALKDGKTAKVRLKAFLLRQDIRYEGRANWGPAHLRWLANVVCPTPAQQIVFQEYVRAVSEQTERLQRLEAELPALVQSWRWAPVVAAIQALRGVQVLAAVTLIAELGDLTRFDQPRQLMSYLGLTPREHTSGERRRQGSITKTGNSHARRVLVEGAWAYRYPAKVSRHLQLRLETVPKTIQDISWKAQVRLCKRYRRLVARGKQVNQVVVAIAREMAAFVWAIAREVKGAH

SEQ ID NO: 458218 - protein, 346 aa, unidentified
MGKSITDLSSVTRVGLDLAKHVFQVHGVDAAGDVVFNKAIKRDKLLAFFAALPQCLVGLEACGSAHHWTRELIKLGHDARMMPPAYVKAYVRRQKNDAADAAAICEAVSRPSMRFVAVRPVTNQAELMRHKAREMLVAQRTQVLNGLRGHLGEVGVIAAQGPRHARELAGLIEACDESIPLEVCAALAELVHQLHRLDETIDRLDKTIAKNAQANATSRRLMTIPGIGPITASAIVAAVPDVSGFSGPREFAAFLGLTPRQHSSGGKERLGRISKMGNRYLRKLLVVGAHAVLFHRKAHNDALRMWAKKLIEKKPFKLVAVALANKLARVVFAILKAETSYRAVPA

SEQ ID NO: 458219 - protein, 321 aa, unidentified
MKNSTNSVPIGIDVAKASLEVSLGTDGSTQSFANDVEGHDALLACLQRTPISLIVLEATGGYEAAIAGTLQAAGLPVAVVNPRQARDFAKAMGILAKTDSIDARVLARFAQALLQRDDLQRLIKPLADEALKALQAQLLRRRQLCSMLIAERQRLSMCHRSTRADIEASIHFLKNRLDKAEAELARLIEQDHAALNELLRGVKGIGPNTLATLIAELPELGHMTRREIGALVGVVPLNRDSGQFRGRQCTWGGRATVRRALYMAALVASRHNPAIRRFYAHLIEQGKAPKLALTACMRKLLTILNAIARDHVPFNPALHQC

SEQ ID NO: 458220 - protein, 360 aa, unidentified
MEGGQTVADRDVVGGVDTHKDLHVAAVVDGLDRVLQSRSFATTRQGYKQMLTWMRSFGQLRRIGVEATGTYGAGLLRYMQNAGVEVLEVTTPDTHDRRKRGKNDDLDAQNAAHAAFAGRRTVTPKSRDGMVESLRVLKACRKTAVAARRVALQLIHNTIVCAPDDLRETLRQMTRMQLIRTLAGWRPDLTDYRSVVSAYRITLKSLGRRYLELDDEIADLDTMIVAIVDELAPALVARNSIGHGSAAQLLLTAGDNAERLQSEASFAALCGVSPVPASSGKTIRHRLNRGGDRAANSALHIIAIGRLRTDPRTKAYIAKRVAEGHSKLEAIRCLKRYIAREVFSLISHRKREINQGRNAA

SEQ ID NO: 458221 - protein, 397 aa, unidentified
MYSIGIDVGASQHSVALCREGQVAAERAVMRISATRQGFAELDRWMARHRGDGVERIVMESSGHYWQPLASHLRAAGHPVAVVNPLAAKYFAKRRLARAKSDPADARTLAALGMVDRPEPREPLAGAELREAARFAMRLVEEQSRLCNRILRLVDLGFPELGEAFEDPTCKTAIALLKVAPTARQAARRKVSTLARANQGPGQRSLGAAKAGTIHAAAKDTIAVRELEEQIVFEMPLLIEQHELLERQIDRAERRVASLLDGELARRLQTIPGVGPAAAAALIAEVVEITRFSSFDKLVAFAGVHAAEKSSGKKGADPETSWHMAKTGSPYLRAALYRIAVVGLQHNPIIKAHYARKRAQGKAKMNALGHCMKKALAIVWGVWRSGRDFDPAAHSVA

SEQ ID NO: 458222 - protein, 349 aa, unidentified
MLAGIDTHKDTLAVAVIDQAGRPVVVTEIANTEAGFTDLEQLLVEHAVTRVGIEGSGNYGRGAAVHLVLTGPAEVVEVPPSLTSRERSGRPGQGKTDPVDAVAIARITAREPNLPAVRLAVGQAADLRALADYRAQLVAERTALANRTHTELHGLLPGYQAEIPRLTAPTFIAAAKDLLAGETGVRAQLTRRRLTRLAELTAEIKEVAALITSAVAEVETGLTGLYGLGPIGAATILGEVADIRRYRSRHAFAAANGTAPLPASSGRTTRHRLNRSGNRTLNRVLYTMAITQIRADTEGRAYYLRKRAEGKTGREALRCLKRRLSDLVYRTLHEDLAAGRIPTPALQGR

SEQ ID NO: 458223 - protein, 316 aa, unidentified
MQAQQVFIGVDVAKDNLVISMGGTPKPQLVVNDEPAIKHWLKTLSPQAVIAMESTGRYHQRLARLAHQAGLRVYVLNAKDVYFYAKALGARGKTDALDAQIIARYAAEHHVSLHPWSPGTPAQVEVQELLQRRARVAQCRASLRQTLAGMKKLAPAVLQLERQFEKLLGRIDREVQRLVHSEPKLSQGSEVLQSISGIGPQSAAMLVALLSRIPFANADALVAYSGLDPRPADSGMRNGRRRLSKRGSPGLRRQLYLAALAATRTKALGPTYQALRAKGFKSTQAVVILARKLLRIAWAVWRSGKPFDAAKLTPVA

SEQ ID NO: 458224 - protein, 336 aa, unidentified
MQVTTIGLDLGKRLFQVHGVDAAGTVMLRRQLKRRQVEPFFAKLPRCLIGIEACGTAYHWARRLGELGHEVRLIPPAYAKAYVRRNKTDPADAAAICEAVSRPSMRFVPIKSEAEQAIAAVHRVRDRLIGQRTMLLNALRGHLAEFGVVVSRGPAHVKELIEMLAEPGSVPEILRSVLLGLASVLARLERQIVLVDKQLMRWHRDNARSRRLATIPGLGPIISTAMAARVLQPQRFRRGRDFSAWLGLVPKQSSSGGQIRLGAISKQGDGYLRRLLINGAQAVLGSKRAKTDPWLKRLLDTKPRLVAAVALANKMARIIWAVMVRQTGFREAVATV

SEQ ID NO: 458225 - protein, 332 aa, unidentified
MNKLFIGIDFSKKKVDVSVIEKENMSSGVHREFSNDVAGHESLLAWLCESYPQTGKDQMLFCGENTGLYSVCLSNTLAHEGYTLWLEHPYSIKHSSGMQRGKNDKSDSLLIAQYACRFEDMAKVYAPNTETIRALHSFFTFRDLLVKMKNEALVHAKELHSVLKGNRATDYIYQHSLTQVKNLTREIKDVEKEIMDLINSEEEIKNNYERITSIKDVAFVNALALIVYTENFTCFDDPRKLACYAGVVPFQRTSGSSVKGNAKTSGFANKKLNTLLTQAARTAAIHDPILREYYRRKREEGKHHNLVINNIRNKLIHRICALVRNQTFDQAA

SEQ ID NO: 458226 - protein, 366 aa, unidentified
MIVIGADTHKATHALAAVDAGTGRVRGSREIKAEGPGHLAAVRWARALAEDRVWAIEDCRHVSRRLEQALLAAGERVVRVPPHRMGASRKGEREPGKSDEIDALAVGRAVVKDGVEQFPIAYLNEQAMDIRLLFDHRADLVAERTRIVNRLRWHLLELCPELERSCKRGSLSKSRALDRLERALRKLPLSARMRVAREQIRELRRLNRQIDALHCELQELVSAHRPQLLAELGCGALTAAILIGRTAGNERFRSEASFALQSGTAPISCSSGQRIQHRLNRGGDRHLNHALHIIAITRAKCDPDTKEYLARKEAEGKTPKGALRSLKRHLARRFHRLLSEPAANQQRPAIDPNSNGGAPSPMVCVT

SEQ ID NO: 458227 - protein, 418 aa, unidentified
MNNNTLYVGCDVSSDDNYFCFLLDDGTKLSTKRFANNKSGASKLVELMLQYLKDNNLDSLVFGVEATSNYHFHLLNFIAYNELLTSYEVKVYQLNAKLIRNFKEAYPDKSKTDKYDAFIIADKLRFGRLPEEYKPFNEYEPLKRLTRTRFHLAENLKREMNYFISNLFLKFSEYKKLPFSNTFGATSVALFTEFDVEEIADLSVQELIDFLVEKGKNRFSDPEGYAKEIKRLARNCYNLDRDIEDAVNLTLETSLETIKSLKSSLKRVNKAIKREISKFQQTLDSIPGIGDIFTAGIIAEIGDISNFANESKLAKYAGLVWNHKQSNNYESDETSMSKYGNKYLRYYLIQAANSVKNHCQEYKDYYWKKYNESTKHKHKRSLVLSARKLVRLIFVLLRDNKLYDPSRYLKTAGGDPHA

SEQ ID NO: 458228 - protein, 412 aa, unidentified
MSVVQFTQVLSRGCGMDIHKKVVVATVQGEGLCKETRSFDTFTRSLTQLREWLVSLGITHVAMESTGVYWKPIYNVFEGFIPHIWIVNARHIKNVPGHKTDKNDSEWICQLLMAGLLKPSFIPPKAQRELRDLTRYRRKLIQSVSANKNRIIRILEDGNIKLSSVLSDTSGATAVKLIDMLCDGKQITLSDIESVRHGRCQHTKEEMLEACTGCLDEHKVYMLGKIRECNASLKEDILDFDKRIKDVLSPYHDAIERMCEIPGIQNRVCEDLVAEIGLDMSNFPTSAHLCSWAGMCPGNNESAGKKKSSRTNHGDKQVKETLVEAAWAASRAKGTFFMERFNRLAPRKGSKKALIAVGHSLLKCIHYVLSTGGRYKELGDNYVPNKKEQKRKEYLKKELQKLGYSVTLSKED

SEQ ID NO: 458229 - protein, 407 aa, unidentified
MSLSNQRYVGLDVHKHYVMVAAVNAAHEVVLRPQRVNLTTLPAWAKKHLRPTDEVVLEATGNAWYVHDLLEPLVSRVVVGVTQQIKLIAAALVKTDRKDALTLARLLAVNMIPPVWVPPLPVRDLRALINHRQRLIQAQTRLKNRLHSVLHRQQVVPPEGELFAQANRAWWLALALPSGEKLRLRQDLTQLELLVPLIAEVETELHRLSLADPWGEQMPYLLQLPGLGLLTAMTVLAAIGDITRFPTTKKLVGYAGLGARIHSSGETHYTGGITKQGRRELRTVLIEAAWVAVRYNPFWQAQFQRLVARKEPNKAIARMLLVVIWHVLYQHVADRHANPEKVAAYFLQWARQIKAPSQFGVRTATFARQQLDKLGLGRDLTQVKLGCLYKLPPSSLPPANDDGANPA

SEQ ID NO: 458230 - protein, 451 aa, unidentified
MKTKNANKSTDKMISMPVVNLHAAGIDLGSTSHFVCVSQDNVKEFGVFTIDLHAIARHLKEHEVQTVAIESTGFYWRPLYLLLLDYGFEVVLVNARHLKNVKGHKTDVVDCKWLQLLHSIGLLSNSFQPNVATHELRVLTRHRKSLIEDASRFISKMNKVLVLMNIQLHVVLRDITGQSGLNVITAILQGERDAKKLTELVSFRVKAKREDIGKALTGDFRKEYLFELKQCYQLYSVYWQKIEETDKQIEGLLKLQIADTPANNAYKAPKNKQYQKNDPNFNVGYYANQMSGGVELLEINGVGAATILTLISETGLEMSKFKTAKHFASWLGFAPNRKISGGKVISSHTRKKTNPLAKAIRDAANAAGNSKSRLGDCFRRLAYRKGRVVAIGAISRKIAVIIYTMLTQGKAFCYEYAQDEALNLKNNKLKNIVKTLKKYSISKSELDLAMA

SEQ ID NO: 458231 - protein, 353 aa, unidentified
MIITGVDYHPSDQYIAFVDTETGEYVERQLNHSDREAEKFYRELAARGVSVRVRVGMEATGYSRWFERLLAELGIEVWIGDAAEIKTKRVRKQKTDREDARLLLRLMRENNFPRIWVPSPENRDLRQLLWHRHRLVQMRTRIMNQLQAIAMNEGQRRKKKLWNEQGRAQLEKLPLATWASRRRKDLLELLDRMNPTIEELTAAIEQEAKKWPEVLRLMTHPGVGPLTALAFVLIIGTPERFKCGKQIGSYVGLIPCEDSSAGHQRLGHITKQGSSLLRFLLGEAAQAAARWDSDWRRRYIHLAMRRQRNIAKVAMARRLAVRMYWMWRNGWEYSEWVKFGSHAGQLGTRHGVN

SEQ ID NO: 458232 - protein, 445 aa, unidentified
MWEQAMPVRKREDEVFPNAAGIDVGASSHWVAVPPHLAEDSVREFGAMTDDLNAMADWLIACGVDTVALESTGVYWIPLYEVLEQRGLKVWLVDARQMKYVPGRKSDVQDCQWLQKLMSLGFLRAAWRPDGEICVVRAVARQREVLLIEQASWVQRMQKSLVQMNIQLTEVLTDVMGMTGQAIIRAIIAGERDPKALALHRNRRVKASAEEITKALTGNWRDEHLFVLGQALAMYDDIARHLAECDTKLQALLRALGQRNVDLGKVPRAGSKTRQDFDARQTLANWAGVDLTRINGLGLAAVMKILSEIGPDLSRFETVKHFCSWLGLCPGTKISGGKVLSAKTKRSANRVRQALKMAAMSLSHSDSALGAFYRRLCSRMDKPSANTATAHKLARMVYFMLTRGETFVDLGQQRYDEQQRLRSIAALRRRAAALGFEINPSPVPV

SEQ ID NO: 458233 - protein, 388 aa, unidentified
MSQEKYIGMDVHAATISAAVKNAEGKLLMECVLETKAATILEFIQGLRGTLALTFEEGTLAAWLHDLLKPHVSRLVVCDPRKNALMRDGNQNDRVDARNLAELLRTNQVKAVYHGKHGTRALKELGRSYLTLTKDSTRVMNRIKSVYRSWAIPCAGTSVYSRGHRGEWLAKLVEPGVRIRAEHLYQQLDSLEPVRQAARRELLRESRKHAAVKLLRQIPAIGPIRSALLVALLQTPHRFRTKRQLWAYSGFAVQTYDSGEYRFVRGKLQRNRERITVRGLNHNHNHHLKNLLKGAAISAIERPGPLQDFYAALVEKGMRPSMARLTLARKIAAITLTMWKKGVSFDPPTVAATSRLSIAEEEPSIPRVPSANGRSVSRDARFEGSISQ

SEQ ID NO: 458234 - protein, 312 aa, unidentified
MTQIICGVDVSSEALDARIGRDGAEVRVAATPEGVAELAAFCREHQVRLVVMEATGGYEKLVHAVLWDHGVPAAIVNPRAVRQFAKAMGFLEKTDRIDAGVIAWYADTKHIVAQEPASAAQQHLKALVTRLRQLTELRTMQSNQRRLVADPEVNGLFSELLALIARQTRAIETEIAALIGSDPLWHKLDECFRSIKGVADRTVARIMAEMPEIGTVSGKAASKLTGLAPLADDSGKSQGKRSISGGRANLRNILFVIAETVRRHNPDFAAFHERLTAKGKPKKVIRVALAHKLLVQLNAKARDARKELALAA

SEQ ID NO: 458235 - protein, 448 aa, unidentified
MLNYTAERLKEIGPDTLLVGIDIGKKQHACIVMDLRAKVLTRFKFSNSRQGFERLLERVEATGREAQADHLLFGMEPSGHYWRNLAYFLEGQGFRFRLVNPFTLKRHREGQDLSRTKNDYRDAAMVAELLRTGKFTLTRLSYGRRAELQRTFILYTRLVDDRGRQKTLLRGALDCLFPEFTQVFRDPLGLTARAVLLACPPPHTIREKSLEGFVSLVREAYRGRRLALGKLRALHEVAEESIGIPAENGALALELRTIIQIVETLDHQIKEVEAQLVEQFLALEESIYLLSIKGIGLTTGAGILAEIGDISTYQSVKSLPKLGGINPSQNDSGVHRGTHTPMTKKGRARLRRVVYQATLCCIAHNPAFQADYRRLRERKRNPLPKMKAVGAMMNKLLRVVYALLKEQRAFEENHQWQAKPLPTAFGILRTLRVRRKHPKEVRVATLVA

SEQ ID NO: 458236 - protein, 344 aa, unidentified
MSGAYEGRQIVGMDLHRRRSVLVRMTETGQHLETARISNDPDYLREVMTRAGEAPDVVLEATYGWYWAADTLAELGAQVHLAHPLGVKMFALRRVKNDQRDAADLADLLRMGRLPEAWIAPPATRELRGWVRHRAKLVGLRSNLKCQVHAVLAAAGVTVPMSDLFGSTGRQLLAATRLSVESRSRIDSLNRLITALDFEIDLYTRLVAGRLRADPGYRTVQTIPGVGAVLGAVFVAEIGDITRFARPQQLASWAGLTPKHHESDTTVHRGRITKQGSRLVRWAAVEAVQRVPAHTRFGQRRDRVAQRRGRNIGVVAAARDLITLVFYGLRDHHIRCLPSGTGAA

SEQ ID NO: 458237 - protein, 422 aa, unidentified
MKKRAYKTTDVKKVNVERLQKKVEGHDIIFSVDVAKTDFVGCILTSNKEVLITLKWKHPSESLLLLELILRDLRWYSLEVVMEPSGTYGDSLRAQFLGHGIDVYRVSPKRSHDASEVYDGVPSMHDAKASAIIGYLHLEGYSEPWPMADEDHRTLNAMICTMNMYDEAYFRNINRLEALTMRYWPELSKILSLQSATLLELLIEYGGPEQVALHPEEAGTFMKKVGGVQLKEEKIQAVLASASSTLGVKSIEAERCQIQELCSEIRRLQKHRRQAQWRVEAQTQTVACVNAMSPVLGKVTAAVIYLALGDLNKHAGAGSVVKALGLNLKERSSGKHKGQLRITKRGSGLARMYLYMAVLRLIHHNSIVNAWYRAKVARDGGKKMKAIVAIMRKISGALWHVGRGGTFDASLLFDTQRLALNG

SEQ ID NO: 458238 - protein, 463 aa, unidentified
MAKAKAKRSVKRRHEPVEVELPVELKSVNLNAAGIDIGANHHYVAVPEGRDTVAVKKFGVFTADLEEMAEWLYHCGVTHVVMESTSYYWIPVFELLERKGFKVQLVDARQSKNVSGRKSDLLDCQWLRELHTVGLLKGAFRPTDEVCVMRGYMRQRQMLVEAATMHIQHMQKALTQMNLRLANVVSDITGVTGTKIIRAIINGERDAKVLASYRSEQCKHSSAVIAKSLEGNYREEHLFALKQAFELYETYQAKIKECERELMKVVQQQPHKTEAEPPKVKQKLRARDKMRGEVDVHSELFKQTGVDLYRVPGLGPETLLTLRGEVGLDISSWLTEKHFASWLGLCPGTKESGGKILSRRSKRSRSRAAAAFRIAAASLRTSPTALGAFYRRIRARRGEAKAVTATAHKLAKIYYRLLKYGEQYVEAGEKAYEERYEEQRLKRFKKQAALLGYALIPIAAAQT

SEQ ID NO: 458239 - protein, 402 aa, unidentified
MNAVGIDVSKSKSVVAIMRPLGEIVSTPFEIKHTASDIHSLIELINSVEGESRIVMEHTGRYYEVLAHQLLEANLFVSAINPKLIKDFDNDSLRKVKSDKADAVKIARYALDKWQNLKQYNVMDELRNQLKTMNRQFGFYMKHKTAMKNNLIGILDQTYPGVNTYFDSPARSDGSQKWVDFASTYWHVDCVRKMSLNAFIDHYQNWCKRKKYNFSQSKAEEIYGKAKELVPVLPKDAITKLIIKQAVDQLNSASTTVESLRTLMNETASKLPEYPVVMAMKGVGTSLGPQLMAEIGNVSRFTHKSAITAFAGVDPGVNESGTYEQKSVPTSKRGSADLRKTLFQVMDVLIKTHPQDDPVYQFLDKKRAQGKPYYVYMTAGANKFLRIYYGRVKEYLASLPES

SEQ ID NO: 458240 - protein, 327 aa, unidentified
MQISVVNAAGEQLLNCACPNDYMKIVNKVGSLGVVQHAAIEACCGAADLAEELIGRAAWPIDLAHPQYVAHLRKSPDKSDYSDGRLLADLTRVGYLPRVWLPSSYERDLRHLVNHRQSLVNRRRTVKLCIRALLREHRVRPPEKAVGWRKAWMNWLKTTPDLGSHARWIIDDLLEELEYLDKKISAAEKHLHQATANDPQVKKLLEEPGIGPVTAWILRGFVGRFSRFGNGKQLSRYCGLTPCNASSGKRQADAGLIQGCNKLLRATLIQSAHQLIRREERWGNLAQRLQKQGKAYGVIVAAVANRWMRGLWHRMSKERKAAMLAEA

SEQ ID NO: 458241 - protein, 371 aa, unidentified
MADYREAFVGIDVAKLKNAISVAESGRDGEVRYFGEVEATDASMRRVIQRITAKFDRVHFCYEAGPTGYGLHRLIRSLGHECIVVAPSLIPRKPGDRVKTNRRDSLALARLLRAGELTAVWVPDESHEAMRDLVRARAAAVETLRVHRQQISAFMLKHSRVYPRKKGWTMRYLRWLQEQQFDHPAHQIALQEMVDAVRVSKERVERLEKVIGEFIPSWSLGPVVRALQTLRGVELIVAVTFATEVGDVTRFESPRQLMGYLGLVPGERSPGETVRRGSITKAGNGRVRHMLVESAWTYRHPPKVGAKKLYRLEQAPPKVREIAWKAQSRLTARYRTLAARGKRTTVVCTAIARELAGFMWAVAREAQTIKS

SEQ ID NO: 458242 - protein, 413 aa, unidentified
MHYKMRHVYVGLDLHKAHHTAVIINCWHERLGEIQIENKPSAFDELMKFVKKHTPKEMTPVYGLEDTGGNGRALAVYLVEKKQIVKEVNSALSYNERMSNATTQKSDSWDAFCIAKVLFARLDDLPDANPQDIYWTIGQLVARRNSIVKHAASLKNQLHQQLSYHYPSYKKFFCDIDGKAALAFWEKYPAPYHLESVGAEELAAYLRKASHNTCSTRKAEEILELVKKDGETKRNYQASRDFLVVNMVQDMKRSRELIKETEAQLRQVLSETDYKLDSMDGISTVTAAELIAEIGDIRRFPNADKLARFAGIAPIRFSSGGKGKDQASGQGNRVLNAIFHNLAVQQIQVAKGDNKKQRNPKFYEYYQRKLAEGKTKKQALICVMRRLVNIIYSMMKHKTEYRAAATLTERQAS

SEQ ID NO: 458243 - protein, 358 aa, unidentified
MLYLGIDQHARQITISLRNEDGDVVQARQVSTRPEKINEFFQRLTRERLRDGESFVAVLEVGGFGDWLIDMLNDYRCHKVILIQPDQRKKQKTDRRDAAALSELLWVNRGRLLHGKPVRGLRQVDIASKVDQQNRRLTVLRRDARRERTRIINKIKYVLRRHNLMWHLPTKTFPTVNAVNWLKKLSLPEIDRLEMDYLLADLEHIQQRVKELEKVIDERCAASKEAVLLTSMPGVGRFTAIALACRVGRVERFPRSHSLANFWGLTPGCRNSGDNNKRLGSITKAGSSMARWLLAQVAYQALRQDKPLREWFKRIKRRRGASIARVAVMRKLATIIWHMLSQDKTYGECRQLSTDQQK

SEQ ID NO: 458244 - protein, 364 aa, unidentified
MAALSIADVPANVTVGVDTHKHSHVARAKDGLGRHLGQLEIGTDPRGYAGLLEWAQGFGPVVTFGIEGTSSYGAGLTRFLRAQGQSVIEVLRPVRRDRRFGSKSDPIDADAAAGAVLSGKATAAPKAGDAGVEMIRALKIAKQTAIKARTQAVNAVKALIVLAPDPIREQLRNLKTPALVRTCSAYRVDGASDPTSAIKLSLRSMCRRYVVLDQEVRSLEKELDALTIRLVPQLRQLFGVGQDVAASLVLAAGNNSGRLRSEASFSMLCGASPIPASSGMVQRHRLNRGGDRQANAALHQIVVVRLRHNEATRAYFAKRKADGKSKKEIFRCLKRYVAREVYRTLVDPRVEAFSQRVNTLKLPL

SEQ ID NO: 458245 - protein, 344 aa, unidentified
MLHVGLDLSRRRLDVCLLDEGGEVVAETAVPADADGLCGLAQRLAGRQVRAVIESMNGARFVHDTLEEHGWEVLIADAQKVKGLAPLACKTDKIDARVLAELSWRDLVPAIWLPDPSIRRERELARFRLHLVRHRTTLKNRIHATLITFGHPCPVSDLFGLAGRELLDRLAIPDPWRRNVDVSLGLIDDLELQIARLTVQLKRQGADHRYIPLLVSAPGFGWINAFTVASEIGDIERFASPAKLCGYTGLCPRVIQSGNTDRRGPISKHGPRYLRWGLFEAAMNACKHPLYKERYQHTKRRLGRQRGPKVAQIDLSRRLTEAIWHMLTRNEPFAPAGAGFRLAA

SEQ ID NO: 458246 - protein, 356 aa, unidentified
MNSTKYIGMDVHKEATTIAVMNAAGKLVMESIVETKAATIVQFLEGLRGELYVTFEEGTWAAWLYDLLKPYVTKVVVCNPRKNALLKVGNKSDRIDARKLAELLRAGLLAPVYHGETGLRTLKELGRSYLAINKDLTRTMNRIKALYRSWSIPCGGVSVYAPCHRAEWLSKLTEPGVRRRAELFYQQLDGLQKLRQQARGDLLAESRKHGARKLLQRIPYIGPIRSALLIALMQTPHRFRTKRQLWAYSGLALETHSSGEYCYVQGQLQRSKKSIALRGLNQNHNHDLKSIFKGAATKASSAKGPFHDFYTGLLTKGMKPTMARLTLARKIATITLLVWKKGVCFDAQQLKRQVSV

SEQ ID NO: 458247 - protein, 352 aa, unidentified
MSHKSAPYAAVSTIGIDLGKNSFHLIGLDQRGAIVLQLKCSRAQLERRLANIPCCLIGMEACSGAHYIARQLSALGHDVRLIPAQYVKPFLKGHKNDYRDAEAIAEAVQRPTMHFVAIKTPEQMDLLALHRVRSRLVSQRTGVTNQIRGFLIERGIIVRQGVVPLRKAMADILSSNTHALSPRMVNLIADLVQDWRRLDERIAAVSAEIESLAEQDEACQRVMTVPGIGPIISSAVVAAIGNGAGFTQGRDFGAWLGLVPRQESTGDRTILGKISKRGNKYLRTLFVQAAHVVLARRPKAAMRSLWPWIEQAARRLHRNMLAIALANKLARIVWAVLARGRSYQPRIVADVA

SEQ ID NO: 458248 - protein, 320 aa, unidentified
MKQAIYVGVDVSKKQLDVAIRPLGQVFGVSNDRRGIAQLVKRLKKLQPVCIAIDATGGLEKELAYALAAENLPVAIVNPRQVSNFAKSTGQRAKTDAIDAAVLAHFAEVMKPEVRRLPDAASRELSALVTRHRQLVEMMTAESNRRDLASKSVRKLINSLLRSLKDQLAVVDREIRKAISASETWRHKAELLRSVPGVGKVTTATVLAGLPELGELDRRQIAALVGVAPFNRESGTWKGKRMIAGGRGWIRSVLYMSTVVAVRRNPVLKEFYERLRARGKPAKQALTACMRKLLVILNAMVRRQTHWSVPVSFPTLSVHT

SEQ ID NO: 458249 - protein, 329 aa, unidentified
MSNLLKKVIGVDVGSKFLTLSFLDDEKGEQVLNLPNNERSILSFLSKISPSDYCFVIEATGNYSSRVLHLSIGKGFESSLINCMSVKHFARMKNIITKTDAEDAKLIRNYGEMFRPQFYIPKTQDIEYLDQELKLLNDLEEEKRRYAVKLKALRFHPVVNPSTEKHYEKRLKQLEKEIKEVEARLPQLQDEEFTETKNLLQSVSGIGEKTSLQLMTATSGFKNFHSSKSLVKYFGLAPRIYQSGKKSYSPGKCRTSKAYIRSILYVCSWTAIKHNQKCKELYLRLLEKGKAKKLALIAVCNKLLRICFSVVKNKTPFQQDFQNKLKIST

SEQ ID NO: 458250 - protein, 333 aa, unidentified
MQNFYFIGIDVSKKKLDICVMSNSKVLKEEQVSNHPQAITTVIAGIKEELSMSNDCFIICAEHTGQYTYPLICACKSVGSKLWLENASQIKYCSGVTRGKNDKVDARRIAEYAMRFFDKAKPYQRPIEELMRLKQLEAERSLYLTDLAKYKAQLSDQEGFMEDKIFKRKAKRLKEMIKSLEKTLKEIAQEMADVIYSSEELSRQMRLLKSVEGVGPVVAMNMIIATEAFTRFDNPRQFNCYVGVAPFAYTSGSSQHSRNRVSQRAVKYIKCLLHMAAVAIAHKKTGDLKTYFERKVAEGKNKMTVLNAVRAKLVARMFAVIRNNRVYQPILSV

SEQ ID NO: 458251 - protein, 326 aa, unidentified
MSRIQEKKTITTATSPFIVIGVDVSKDQLDVYVSPAGNHHSFKNDAGGAVELVNVCRDHDADLVVLEATGRYHRMAHETLHGAGVKTAVANPARSRNFARSIGRLAKTDRIDAQVLAEYGERLRPPASTPPSKLQAKIAEITVARRQIVDEMKILKHQQTQTLDDLVIAQIAARISLCQGHCKDLEQLLAELIQEDDGIRRKHEILTSIPGIGLTTAATLISELNELGGANAKQIASLSGVAPMNRDSGSFRGKRKIGGGRKPVRDVMYMAAVVAIRWNKDMAAFYQRLKKAGKPFKVAITAVMRKLLILANTLLSENRLWSETQP

SEQ ID NO: 458252 - protein, 436 aa, unidentified
MPRASTSGRPATSSPCLIDRDDQPVREFKSFTADLYRLAQWLKDCGVTAVAMESTGVYWIPLYELLDSQGFTVYLVNARHVKNVSGRKSDVLDCQWLQQLMSYGLLAGAFRPSDEICVLREFSRQREMLLASQVRHVQHMQKALAQMNIQLTQVLSDVVGVTGQAIIRAIVGGERDPHALARLKKRQVKASEDDIAAALQGNWRHEHLFALRQALALYDTYQQLLNDCDQHIQAELHKLHRHDGDPGKSQRRWPKKAMAFDLRTHLFAMCGVDLTRINGIDEMTAFTVLAEVGPDMNRFPSAKHFASWLGLCPGTRISGGKVLNGATKRSPNRAAQALRLAAMALRHSQSALGAYYRRLCARLDKRRAITAAAHKLARLIYTLLTKGSEYVDQGELYYEERHRQRVLHHLTKRAETMGYSLVPLTASGETNEVSMT

SEQ ID NO: 458253 - protein, 347 aa, unidentified
MVTFGGDSHKRTHTLVAVDENGRQLGERTVAATPSGHMDALGWAGQWPQRRWALENCRHLSRVLERDLLSAGESVVQVSPKLMGSARRSGRELGKSDPIDALAVARAALREPHLPVAQLEGKSREVKLLVDHREDLVGERTRIQNRLLWHLHELEPGYQVVAGGLLRVVVLAEVSRRLESHTGVVAEIAQELVARLAELTQSVKRLQRRIETLMRELAPHLLSLPGCAALSAAKLVAETADVSRFRSSAAFAMHNGTAPIPVWSGNQERHRLNRGGNRQLNVALHRIAITQMRLGGAAATYVARRLAMGNTKTESIRALRRQISDEVYRRLRQDHIERSTAPIAVAA

SEQ ID NO: 458254 - protein, 355 aa, unidentified
MNPEKYIGMDVHQATISVAVMDSSGKVIMECILETKAATILEFVDGLRGTLSVTFEEGTSAAWLHDLLKPHVSHLVVCDPRRNALLKDGSKSDRIDARKLAELLHANKLHAVYHGEHGVRTLKELGRSYLTITKDLTRVMSRIKALYRGWAIPCSGATVYAPRHRDEWLAKIPHPGVRLRAERLYQQLDVLEPVRQEARRDLLVESHKHHAVKLLHQVPSIGPIRAALLVALLQTPHRFRTKRQLWAYSGFAVETHDSGEYRLVRGKLVRNRERITVRGLNHNHNHDLKNLFKGAAISASTRPGPLCDFYVALVEKGMRPTMARLTLARKMAAITLAIWKKGVDFDAKHLNRQAA

SEQ ID NO: 458255 - protein, 429 aa, unidentified
MKQATVASERTQAVWEAVIERCCGLDVHQKMVTACLLAGALDQQPGESLRTFSTTTKGLLELRDWLEEHGCSHVAIESTGIYWRPVFHILEDTVTVLLVNAYHMKQVPGRKTDLKDAQWIARLLRWGLLKPSLIPPRPIRDLRDLCRYRKKLTEQASAEKNRIQKVLEDANIKLASVVSSVFGVSGRAMLEALIQGVMSPEETADLAKRKLRSKIPQLVEALEGRVNEHHRFLMQMQMEHLEYLEKAIAQLHDRINEKIKPYQHEVELICTTPGIDTVGAQHIFAEIGGDITVFPSEGHLASWIGICPGNNESAGKRKSGRTTGGNRWLKSLLVQCAHGASRTKGTYLKAFYHRIAARRGKKRAALAVAHKQTAIIYHELSEGKPYQELGEDFFDRINQKALEQRLVRRLRSLGYRVDLHPEPVTPQCS

SEQ ID NO: 458256 - protein, 350 aa, unidentified
MYAITIGLDIAKSVFQVHGEAEGKVVLTKRLRRSQVVEFFAKLPRCLIGIEACGSSHYWARTLRELGHEVRLIPAGYVKPFVRRNKTDARDAAAICRALTQPDMRFVPIKSVEQQAARGLERSRDLLVKQQTQLTNNVRSQLAEFGIVAAQGQRGFNDLTALLAAGDHRVPPVLLSTLRLLLRQIEQLGKAIFILERQIVMRARENEAMRRLTTIPGVGPLTAHAIVTAIGDGKQFDTARDFAAWCGLTRRVDQSANTRRERGISRQGEMRLRKLLALGASTTMRYARSSPERATEWQRGILARRPVKVGVIAQAARNARIAWAMLQSGESYRRPAVSAAGQATTALLAG

SEQ ID NO: 458257 - protein, 360 aa, unidentified
MNAIHYIGFDVHKKTIAYCVKTADGHIVEEGTLQAQRMELCRWAKRRQVAWQGAMEATLFSAWIYDTLKPYAQQLSMGHPAKMKAITAGKKKSDCLDARTIADLLRCNLLPACYVLPPHLRDLRRLLRYRNLVVRQSVRMQNRMAGLLMESGAPFDRERLHRKKYFADLMKSLREVPESVKDLLRMSRGSMEMFESTQKQLIKRLLCDPVLEQRLERLMSIDGVGPITALTWALEVADPHRFSSVADAVSYCGLTAAFRSSAGKQQRGPISKQRNAWLQTALIEAAKLAPRWNPQLAALHAQQRERGHANRATLQVARKLVAYLLAVDKNGQPFQVRTPPPRPKAKPRKRKQPATLASAA

SEQ ID NO: 458258 - protein, 402 aa, unidentified
MHIHILQKGYIFMRYFIGIDVAKFKHTACVIDTDGIALVEPFDFTNDIIGFQSLLKNIKPFLKKKHLVGMEDTGHYGDNLRNFLLEKQYKVVMLNPIVTSHIRKASNKAKNDRIDCFVIANTMMNPNFYRDQQVQSIDYATIRQLTRMHHTHTEEINRYKCQLQKSIDIVFPEFNSLLNTKYSKTYLEILDTYRGAYTIANTDIRLLRNTLKNVGVGRSVSISAEQLKKSAKESIGQHNLAIEMDIPFLISLIRRLTSILGEIDKKIEEFSHQLNSPILDISGISHFSAMSIISELGDITYFSNEKKLIKFAGVNPCVYESGTYSMTHTRLEKKGSKYLRKTLYQIIDSVIRFNPIFQAFYQKKISQGKSYRCAQGHCIRKLLRVIYKIISTGEGFDSAKLK

SEQ ID NO: 458259 - protein, 430 aa, unidentified
MTELNSTPAPATLVAIDISKHRHEVLIEAPGQARRRRLTILSTKADHDRLVEALAAYGGPVLIGFEATGDYHRGLAYRLLSAGFELRLVSSVALARTREALHNGWDKNDPKDAQVILHMLRIGATQRYVDPLAAGINDLQELSNTHEAIAKAKTETWHRILTHYLPLYFPEIERFAGNSRSDWFLALLERFPTPGSITALDRESFVQEAWPVIGRKVSKARLLNDIYETARASTALPVTEGSAAITMFRMVLAEARSLIRQRDQIEKLAHAMLADHADYQRLCTIPGIGPIHALTILAEAGDLRRFGHHRQFLKFCGLDLATCKSGTFRGRTKLSKYGNARLRRALWMAAQVAMRQRDNSFRDKLGRYTERDRHDADLRRKAVTALTAKMARVVHAVIKGGAEYRPFFERPVPGGRTSLCTGREGASATL

SEQ ID NO: 458260 - protein, 423 aa, unidentified
MNKSENIRLEEFRQLKKEIRGSQDYLIVGIDVAKNKHNAFFGTATGKTLFKRLVFENNIEGFKRLLIQADAVKIQHNITKTVFGLEPTANYHKPLGEFLIKGNHMVVLVSGVAVKRNRELLDGRWDKHDTKDSANVADLISQGKCLFYEYPPMALRELRNLLSLKRRLKKQEHGLKVRIRNHVLAQYFPEMDSYYGQSESDSLAIVKWCLNPSVIAGLEYEQFLQLVAPQKRGIWHENRLKAIWKKAVDSIGCDAGKSLEFEAKAMVEALEHIRETIRATDAKIKEICLQFPEYSYLLTIPGFGPDVSSKVLAAIGDPFRFKTGKQVLKMAGMDLSANRSGKNSDSAIPVISKKGKAYLRYALYQAALIASIRDRHFIVYYTNTLRGREKERGIKTKMRVKLAAKLLIIAWTLMKKKEVFYTP

SEQ ID NO: 458261 - protein, 341 aa, unidentified
MKNLFIGIDFSKEKVDVAIIFAENLSETASRVFNEFKTTVSGYKQLVNWVEQNSYGIDSSLWLFCGENTGDYSKGLCNFLYGKGYDMWLENAKSIKDASGLRRLKSDRADASMIAEYAMRNYDKAIMYEPLSESLAQLRELFLYRQIVVRHRCSFQVRRGEKILTMEKSPVKTMISQSGRHIVSELNKEVAKIDKRIAELIKSDEELSEVYTIVTSVPGIGTQNAVCLMIYTDNFRKFNYNSRKIACYYGIAPFGKDSGTSVHSDPHVHYMANRQIKAMLTQAALSAVNFNPIMARYYMRLVECGKKKQVALNNVKNKLIHLVTAMVRNHQLFSPEYKISA

SEQ ID NO: 458262 - protein, 336 aa, unidentified
MNTTRDVLGIDVSKKKLDLTLLVNGKAKTKVFDNTSAGHRALVAWLGASKASLPTLHICMEATGVYYEAVATTLHAEGFKVSVVNPACIKGFGLGENIRNKNDEIDAGLIARYCLALNPEPWTPPPLEQRQLRAWTLRVQSLKDIRQQEENRIEAHMVADLRDVAANVAEHIKWLDAEIEKLQREIDDHIDRHPGLKNDAALIASIPGLGATTVARILGHLGDIRRFKSAKAFAAFLGVTPKHRTSGTSLKGRTMVSKTGNASLRAALFMPSMVARRHNPILRQFAERLLANGMAKRAVISAVTHKLTHLIYGVIRTGKPFDAGYLQKNLAIQDGI

SEQ ID NO: 458263 - protein, 410 aa, unidentified
MIFVGDDWAEAHHDVYVCDEAGVKLASRRLPEGIEGMARFHDLVATHADGPDQVVVGIETDRGLWVYALVEAGYVVYAINPKAASRYRDRHTLSGAKSDPGDAKMLAELVRTDRHNHRQVAGDTALSEGIKVIARAHQTLVWERTRATNRLRCSLREYFPAALDTFSELADRDTLAVLATAATPSEAAKLTPGKIRTLLRRAGRQRNIETRADVIAAGLRSDALRAPAVVEAAHGATTRASVAILAALNAQIDTLASELADHFEQHPDSDFYLSLPGVGVVLGARALGEFGDDPNRYADAKSRKNYAGTSPITRASGKRHVALARFVRNNRLADALDQWAFSSITASPGARAFYNRRRAAGDSHHKALRALANRWVGILHGCLDHRTYYDENTAWAHRIDIDLKKIAQAA

SEQ ID NO: 458264 - protein, 371 aa, unidentified
MKSIVYVGMDVHATNYTLSCYMVENDRCFATVQVEPSYKEILKYLENVQKNVGEPCEFHCGYEAGCLGYSLYHQLVDHGVDCIILAPTTMPNYKKNEIKTDKRDAMKIARCLAFNTYRAVYIPTKEDSNVKEYIRMRDSHKLALKKVKQQILAFCLRYDFRFTIGKSYWTQKHLVWLRSLSMDALMREVLDEYLQTYQNLMDKLERFDKRIEELAGGKTYAEKVKKLSSFIGIRTHTALALIVETGDFTRFAKAKQYAAFLGLVPGEQSSGDKQKRTGITRAGNSHLRKLLTEAAQCYGRGRVGFKSKALKERQYGNTLETIAYADKANERLKRKFYHMVLSNNKKHNVAAAAVARELSCFVWGQMTGHTA

SEQ ID NO: 458265 - protein, 348 aa, unidentified
MDHYAGIDVSLECSSVCVVDTNGKIVSEDKIASEPEALIAWFASLGHELARIGLEAGPLSQWLYATMKQAGLAVELLETRRVRDAFSAMPAKSDRNDARGIAQLIRLGWFRPVHCKSIGAQEVRAMLTARKLVQSKLQDVENSLRGILRGFGLKVGKTTPRSFAGRIRELVAGHANLHSIAQALLSVRAVLLRELGAFEKRVRYMARADAKAKLLMSTPAVGPIVALTYASAIDDPARFKSSKQAGAHFGLTPKRYQSGTIDRTGRISKIGDASVRTALYQAAHVMLTKPIKDCSELKSWAMRIARRGGHNKAKVALARKLAVVMHRMLADATTFNPTAKTKMMAAAV

SEQ ID NO: 458266 - protein, 448 aa, unidentified
MWAENPVNLSLDRLTTRFSCEHPVPACFLEYFLRSMPMPKIVYPVCCGIDIHKSFVIACIATTDKNLVTTYSKPKRFSTFTGDLRRLADWLAQNNCKDVCMESTGKYWIPVWNILEKTCEPVLAHPKYLKAIKGKKTDKRDAKWIADVFKFDMLHGSFIPPAKIRQLRDLVRYHVKLTSYTTGEKNRAQNCLTVSNIKLDDVFSDVFGKSASAIITRLLENDEPFDVAPFVDRRCKTPVDMIQDAVDGVMCAEQAEKLRIIRSHMDSLELCKLNLESEILTIAQPFLPQINLVSTAPGIAAFSAVAIIGEIGVDMSVFETSRHLCSWAGLAPQNDNSAGKKKTTRISRAGVYIKPILVQCALAAVKSNKHPEVRNRYNAIKKRRGHKKAIIAVARMLLTAIYNILKKNEPYNAELYRQSDKPPIGREVTFEQAIFIIQRQGYIVTAPT

SEQ ID NO: 458267 - protein, 456 aa, unidentified
MAGKGKTRGTAARQLSTVHPHAAGIDVGSTAHVAAVPPERDDRPVRTFQTFSGDLHRLADWLRAVGITTVAMESTGVYWIPVFEILEARGFEVLLVNARDVKHVPGRKTDVNDAQWLQQLHQHGLLRGSCRPRDGLVRLRAYLRHRERLIDYAASHVQHMQKALMQMNVQLHHAVTDITGVTGLRIIRAIVAGTHAPAELAAYRDARCAASEATLREALTGNYRPEHLFALRQALELYEFHQAKITECDREIEAVLQDLTATRVAPAPPLPAARAAKARNEPRFDARPALYTLLGADLTQIHGFGPYTVLRLVGECGDDMRKWPTVKHFTSWLSLAPGNKISGGRLLSSKTRRSSSRAAALLRMAAVNIGKTQTALGAFYRRLAARVGKAKAVTATARKLAVLFYRALRFGLTYADPGSSYYEEHYRQRVIRNLSRRAKDLGFTLVAASPATPGVS

SEQ ID NO: 458268 - protein, 351 aa, unidentified
MKYFAGLDVSLDETAICVVDEDGIVVTEGKAASEPDDLVRWLVATGLTITRVGLEAGPLSPWLHTELRAAGLPAICIETRRMKGATAAMAVKTDRNDARAIAHAMRVGWFTVVHVKTAESQELRLLLNNRRTLLEKRVAIDNEIRGTLKAFGLKLGPVTVASFEARVLELLASRSRLLGMVKPMLSARTALRQQCDVLHRMVLKTVRANAVCRRLLSVPGVGPIVALTYATGVDDPARFAHARDLGPHFGLTPRKYASGEIDRNGCITKAGDGAVREALVQAALTLLTRVQRWSVLKARGHGHCQATRPAPCDRRRGAQARDRHAPDLGGRHNIHLVTRDCGLGVGLAVTR

SEQ ID NO: 458269 - protein, 413 aa, unidentified
MLFAGDDWAEDHHDVEIQDETGRKLAARRLPEGAAGIAALHELIAGHLGHNGDPGQVVVAIETDRGLWVQALVAAGYQVYGLNPKQVARFKERYNLSGAKSDAADAHALADMVRTERHQLRAVAADTPEAEAIKVIARAHQTLVWERTRHTLRLRSALLEFFPAALAAYAGLGLTGADTLELLVKAPDPASAARLSAAQITAALKRARRHNAAVKAGAIKDALRMQHLIQPTAITAAYAASIRATASALITLNEQISELERQVEAHFRQHPDAAIYLSQPGIGTINGARVLAEFGDADGRYSSARARKNYAGSSPITRASGRSKIVLARYVRNDRLADALQSQALSALTGSPGARAYYDKQRERGLGHNAALRQVSNRLVGILHGCLKTGTLYDEATAWPDHHATRHASRLAA

SEQ ID NO: 458270 - protein, 315 aa, unidentified
MYHNFIGIDISKNDFVIAVHRNKKAFKYLNNPKGFNELLKEHPILKNNSFVVLETTGGYEKALLDYLLSHKIAVHRANTRVVKYFIRSTGQLGKSDNIDAIGLARYGHERHRCLTLYKPNKDNLQELVKYTLRKQDLKKQLVAEKNRSQAPDQECTKESHIRVIEFLEQEIAIVESLIDDLVEDCEYLTKARDLLVKEVAGLGKATATSLLALMPELGNLNRKQVASLAGVAPYPYESGKKIGYRKTYGGRADLKPVLFMPAMTASRSNGKLGTFYNKLVENGKKKMVALIAVMRKIIVIANAKIRDLRLKMQIS

SEQ ID NO: 458271 - protein, 369 aa, unidentified
MQAVRSFVGMDVHKETISISVAEDGRNGPVRFIGVIPNQPDDIAKMAKRLAKHGELDFCYEAGGCGYNIYRQLTALGHSCTVAATSMIPRKPGERIKTDRRDSQKLAILHRSGDLTQVWVPDATHEALRDLVRARVDASMHLMRCRQQLLAFLLRHGRSYPTGKHWTQRHRSWLAGQTFQVEVHRIVFRDYVEAVWTAQERRDALIERIGAMTASWSLGPLVEALRGLRGIDLLSSATFLATTGDLSRFESPRMLMGYLGLVPSEHSSGGSIRRGGITKTGNREARRMLIEAAWSYRYPARVAKEKAEILVRLPKNVRDIAWKAQTRLCARYRTMIARGKKPTVVVAALARELAGFIWAIGQEMRLSGA

SEQ ID NO: 458272 - protein, 387 aa, unidentified
MQKPHDNSKVCRAAFVQDSTLVVVIEMALTSWLVAGMIPGVDREPLKKIAPDPEELLQLLYRWRDEAIKAGREITRIAVAYETGRDSFWLARWLRARGIDAHVIHATSVAISREHRRAKTDRIDTAMLRRGFLGWLRGEPGHCSLAIVPTVAEEDAKRPHRERESLVQERTSTVNRMKSILIQFGVRNFNPVLRKASEKLDAVRTPEGIPLPPNAAAALRRHMERLRVIKEQIKAIERTRLQRLQQDPADKMNAMVFLLVRIIGFGVETAEQLVHEILFRDLRDRKAVARYAGLTGSPDESGSKRREKGLSRSGNGRVRTILIQLSWRLLKLQPGSELVLWYQKRTADAKGSRKPMIVAFARKLIIALWRYVNTGLLPEGFELKPAA

SEQ ID NO: 458273 - protein, 342 aa, unidentified
MDHFAGLDVSVKETSICIVDDTGGIVKEVKVASEPQALLKALGNPTYRFKRIGLEAGPLSQWLFSALAEAELPVVCVETRHMQAVLKAQINKTDRNDARGIAQMMRVGLYRPVHVKTLRSQKLRMLLTHRKLLQSKAIAIENDLRGTLRNFGLKVGMVGTVKFEARIQELVENLPDLAVLVEPLLIVRRALREQIVILHRRLLAIVRDDEVCRRLMTTPGVGPVVALTYRATVDVPARFRKSKSVGAVFGLTCSRYQSGEIDWSGRISRCGDEMMRVMLYEAAQSMLHSKKWSWLKAWAMQIARRRGMKKAIVALARRLAVIMHRIWVDDTEFRWTREAAVS

SEQ ID NO: 458274 - protein, 374 aa, unidentified
MSYVTSIGLDVHARSITAVAFDPATGEVRSKRFGYAPAEVAAWTLAFDSPKAVYESGVTGFHLVRALRGLGVDCIVGAVSKMHKPAADKRKKNDRNDAEFLARQLAARNIKEVWIPDEECEAARDLSRVLEDVREDLTRAKHRLTHLLIRHGYAFDEIGPDGKRKGKWTRAHWEWIRSIELSEAAARDALDFCVSEVRHIEAQKKAIEKEIADYARADRWRGRVEALRRLKGIETMTAFSLVAEAGVFSRFESARAFSSWLGLTPSEHSSGERVSRGGIIKAGNTHLRKQLVESSWHYTRATTKRKRDQRGEEVPLAIENHAARGREAPCREAGSLCKAQSSPGGGQRGHRKRALLLGMGCGLHVGRGSRIETR

SEQ ID NO: 458275 - protein, 460 aa, unidentified
MDQVPVIGIDLAVTAASELAVATGATIEASRKVASTPKGLTEGIAKAAKGRAVAIVVESTAMAWLIAAVAALRSGVDHTLYRVSGRKSAALRAFYRSHTKTDHIDARVLARMPAVDDSLLSFSLPTPAELALKRLVVARHKLTTESTKVQNRVRSMLHWAAPGILKAGGGTVSAGVVAVLSRWPDLASLAKARAATIALQGDWSTERAEEVRAAAAESVAFYEGFVDFSAVGLELEISLAQLGFLGSQVEALEERIAALHAQLYPKDRLVSVPGVGPVVAGVVRAVVGDLSRFASLASFRAYTGLVPREDSSGEVRRRGRISKAGPSVLRWALYLAADAARHVDPALADLYRRLMVERGRTHTQAVCAVASHLAGRIYAVARAGRDYVWRDLEGNEITKEQARAIAQSLRVDPETRARLRARREGGPRTPYARQPEVPQDATQPSGDKLIEAALELASKR

SEQ ID NO: 458276 - protein, 387 aa, unidentified
MPASGPRPGQVAIQISLAAIFVSLELSRSTWLITSLVPGGGDKMSKHSVRSGDVAGLLNHLAKLRDKAHARAGASFPIIAIQEAGLDGFWVHRVLERAGIESHVVDAASILTSRRRRRAKTDRIDGEALLRTLLAYKRGEPRVCAMVRAPSPEEEDRRRLCRERKTLVAERVAHVNRIKGLLFAQGICDYEPLRGDRRQRLEAVRTGDGRPLPPHLKAQIGRELDRLELLLEQLKAVEAERNALLEPANDAAPVAVQALAGLRGIGPEFTATLWSECLFRSFSNRRQVAAYAGLAPTPWQSGSVQHEQGVSKSGNPRLRSTMIQLAWLWLRHQPTSELSVWFRERVKRNGGRGKKTAIVALARKLLVALWKFSSSGVVIEGAMMKAA

SEQ ID NO: 458277 - protein, 342 aa, unidentified
MTYYAGIDVSLEYSSVCVVDGAGKIIREQRIASEPEALIAWFRGLDFELERIGLEAGPLSQWLYAAMRTAGLGVELLETRHVRDAFRAMPVKNDRNDARGIAQLMRLGWFRPVHCKSLAAQEMRALLTARKLVQSKLLDVQMSLRGLLRGFGLKVGPTTPSRFAGRIRELVEGNATLEVIAAALLVVHETLRRELAGFEKRVRSIARSDGRVRLLMSTPGVGAIVALTYVSAIDDPARFKSSKGVGAHFGLTPKKYQSGETDITGRISKIGDEGVRTALYEAGHIILTQPLKGCTALKSWAMRLAKRAGMKKAKVALARKLAVIMHRMLVDGTLFASAAVAA

SEQ ID NO: 458278 - protein, 396 aa, unidentified
MDMIAEKPDRAGAIRTDLGAIFVSLELSRAKWLVTSLLPDGGEKLSQHTVAGGDLAGLLDRLATLVSKAQARSGRVFPVIVIQEAGLDGFWIHRALEAEGIESHVVDPASIAVPRRRRRVKTDRIDGETLVRTLLAFKRGEPRVCSMVRAPTPAQEDRRRLVREYRELVSERVRAVNRIKGLLFTQGVLDYRPLRRDRRQRLAELCSGEGRPLGPYLKAEIDRLLERLELLVKQMKALIAALRALTAEAQTADAAANTNAEARIMAQLLEIRGIGPVFAAVLVTEGLFRQFDNRRQVAAYAGLAPSPWRSGTIHYEQGVSKAGNKRLRTTLIQLAWLWRRHQPTTALAAWFEDRVDHNGGRVQKVMITALARKLLVALWKYVTQGVIIEGMAMTDA

SEQ ID NO: 458279 - protein, 416 aa, unidentified
MNAVGIDVSSRKSTVAVLRPLGEVVCLPFDVTHDIAGLASLVEKLKALDGETRVVMEHTGRYYEAVEKALHEAGFFVCAVNPLLIKEYGANSLRRVKTDKADAVKIARYALDNWADLRDFTPMDAIRYDLKTLNRQFQLASKQRTASANNLIALLEQSFPGIRKCFDSPVRSDGTQKWVDFAHSFWHVDCVRKQPFPAFCERYRKWCKRHAYLFKLSNAEEVYALAKRAVVLTPKAKVVKVLVQEAANQLSSISRSVEVYRAEMDRLAAMLPEYPVVMAMYGVGKSYGPQLMAEIGDVRRFERKQALVAFAGIDPMPNQSGDKNVRSNKSSKRGSPYLRKTLFNVIRTYLQCAPQDEPVFQFLNRKRAEGKPFYVYMLAAANKFLRRYYAKLRDYFASPDTLQSVDPIPATLKASL

SEQ ID NO: 458280 - protein, 400 aa, unidentified
MTAVWAGIDSGKRAHHCVVIDTTGRLLLSRRVVNDEAALLELIAAVLVVADGDPAVWATDLNAGGAALLIALLTERGQQVLYIPGRIVHHAAQTYRGDGKTDAKDARIIADQARMRTDLQPVRGADQISTDLRMLTSRRTDLVYDRVRTINRLRATLLEFFPSLEAAFDYSKKAPLILLSGYQTPEAIRRIGAVRLAAWLKKRGCRGSTSVSAKALAAANAQHTVLRTQAMGAQLVAQLAHQIGVIDAAIAALDEQICERFDQHPDAPILLSMPGFGTVLGATFIANTGGDLRAFETVDRLASVAGLAPAPRDSGRISGNHHRPRRFNRRLMRTCYLAALSSLKNSPASRAFYDRKRAEGKNHKQALIALARRRITTLWAMLRDRTTYQEPPRPALAPAA

SEQ ID NO: 458281 - protein, 405 aa, unidentified
MSTPDEVDVWIGLDVGKEEHFADVLDDEGDSLFARSVANDEAQIEALLERAAARGTPGLVIDQPGSIAQLAIAVAARHEIPVAYVPGLVMRRAADLYPGEAKTDRRDAFVIADTARTRRRSVHWLDTHSDELLGQLRVLNGFDVDLAADLTRLTNRLRDSLVSVSPALERAIGSRLHQAGVRDLVAKFPTLTALRAAGRARIATTVKKRSPRLATKVTDAVMAALDAQTVVMPAEVAVGRVVAELAIELDRLHSRRDALAGEIEEVFLAHPFGQVLVTLPGIGPRTGARILAEIGDGSRFANGSKLASYAGLAPVTRQSGISIRGEHQSRRGNHRLKNAMFLAAFASLRSPDSKAFYDRKRNEGKKHNAAVICLARRRCDVILAMLRDGTTYQPVHPSTALPDAA

SEQ ID NO: 458282 - protein, 379 aa, unidentified
MDTHKKEHVVAVAYADTGELEVFTVRNTVKDIRKMVRKVQRQAPGEVHFCYEAGVCGFTLKRQIEALGSRCQVIAPSLVPTKPGDHIKTDRRDAKKLLGQFVAGELTEVEAPSPAQEAAREITRCREAAKENLKRVRHQLLKFLTRHGYIYRDGRHWTQKHDRWLRSLQFDLADLREVFDWYYTELQHCLQRLATLDKEVAALADREEYREAVGALRCFRGIDTLTAVTVLTEIFEFGRFPSPRKLMAYLGLVPSERTSSESRRTGPITKAGNRRVRRLLVESAWHYRHRPFVSKELKRRRQDQPQWAVDLADRAMARLHKRYWRLLDRGKAPGVVVVALARELAGFLWAVLHEQQWRAARAEAWGVPVTQEDGRRVPA

SEQ ID NO: 458283 - protein, 375 aa, unidentified
MKEKLRFLGLDVHAETIAVAIAEPDGEVRGLGTIPNRAESIRKLVKKLGPAEKLRACYEAGPTGYVVYWQLAELGIQCEVVAPTLVPVKAGDRVKTDRRDAEKLARCYRSGDLTAVWVPDEGSEALRDLVRAREAAKQDQMRARHRLSKFLLRSGQRPPTGVRPWTRPYLIWVAQLRFTQVAQEATRQDYLHEVEHMRERVARLEQAIAEAVKLASPALQQVINDLQALRGIADISAVTIAAELGQVSRFGSARQLMGYCGAVPSEDSSGKRTRRGGITKTGNAHLRRIVVEAAWSYRRPPCIWYGLRRRQESISEEAKEIAWKAQHRLHKRYMRLGAAGKNQGKIVTAVARELLGFIWAIGTRAETISTQQVAA

SEQ ID NO: 458284 - protein, 338 aa, unidentified
MNIVFLGIDLAKNVFQLCGLNQAGKPVYTKRTGRKELLQALANIPACLIGIEASTGAFYWQREFEKLGHKVKVISPQYVKPFVRGQKNDGNDAQAIAVALMQPTMQFVPPKSPEQQDIQALHRARQRIVNHRTATVCQIRGLLLDRGIPIGSAVSRARRAIPLILGDAENGLSSRMRRTIAELYDLFNDLGRRIHFFDKEIETVFRQSEACQRIAKVKGIGPKTATAVVAAIGKGTEFKNGRHFAAWLGLVPRQHSSGDRQVLMNMTKKGDRHLRTLFIHGAPAVVRVATNNNDGHMNQWVNQLKERRGFNKTTVAVANKNARIIWSMLRNDTGYQVV

SEQ ID NO: 458285 - protein, 360 aa, unidentified
MTTNTGSGHVVAGVDTHKLTHHGAVLDADTGKLLSEREFPATWAGYRRLLSWMRSHGTVLKAGLEGTGSYGSGLQRFLQAHDVTVIEVSRPNRQDRRRRGKSDPIDAINAARAVLSEAANSMPKCREGFVESVREIRMTRRSAVKARKAALHQIHGLLWCAPDDLRAKLSSYDRAALVARCARLRIPTNGALEDPTVTARKMLRRLAKRIQLLDEEIAEANHELESILTEHTPNLLAVNGVGTEAAGQMLTTAGQNIDRLKSEASLARLCGVAPIPASSGTTTRHRLHRGGDRDANSSIYLIVVNRLRWHQPTQQYVARRTQEGKTKKEIIRCLKRAVIRELYRALQADLQQPTQALDAA

SEQ ID NO: 458286 - protein, 433 aa, unidentified
MRLDPRAFVKVNVPHILSWEEVIPMPNSLLVGIDVSSCDNKVRLLDSSGYSLSKFSVSNNQPGAKTLVSKIVSAMTSYRFDSLVIGLEATSVYGEPLVHFLKQDADIGPFKPSIHVLNPKQVNAFKKAYSDLPKTDDVDAWVIAENLRFGRINQEVYMDDKVTALKKLTRARYYTARNLTREKNHFLNNLFLKFSSLTQEKVFSDRFGATSLAVVEEFLSVDEIAYMPIEELSAFVNEKGKGKFDVPEDVAKLIQKAARSSYRLPKTVNDSVNQVLAISLVAIRALKDQLKLFDKAIEEQMKIIPNTLTSVKGIGPVYAAGIIAEIGDINRFKNQAALAKFAGICWSKYQSGKYTADNTHLISSGNRYLRYYLMEAANKVRVHDPEFKRFYDLKYRETPKTPHKRALALTARKLVRLVYALLHDNRLYIPPKE

SEQ ID NO: 458287 - protein, 345 aa, unidentified
MEQVSRIGMDTSKHVFQLHGVNAAEEVVLRKKLRRKEMVAFFEKLAPTVIAIEACGASHHWARSLQSFGHTVKLIAPQLVKPYVKRGKNDAADAEALCEAMSRPTMRFVPVKTAEQQAALMLMGLREQLVASRTQLSNAIRGYATEFGLTAAKGKAHLEPLLERIQADESLPIMARELFAVQAEGYRRLQAQLDEVDAKLAAWQKADECSQRLVKIPGVGPIGAALLKMKTPAPELFKSGRQYAAWIGLTPKDHSTAGKARLGAITRAGDETLRSVLVVGATAVVQQAQRSGKASPWLTALLKRKSPKLVAVALANKMARIAWKLMVTGQSYAAKSAPAALAAAA

SEQ ID NO: 458288 - protein, 367 aa, unidentified
MSGDTVVGLDVHAESITAAILRPGSDQPEVIKLSSDLMKVRRLFRRLSGHGPVRSCYEASGAGFVLQRVLAGDGFSCDVIAPSLIPRKPGERRKFDRLDAVNLARLYRSGHLTAVHVPTEDLEAIRRLLRLRTTYHQYITATMHRISGVLRNHGFVFNEGKSTWTKKHRMWLARLRLTLQGPLATALAMELQHLEYLETELQSMDTELEGYAQSPLYRRKVEALCCLRGVKILTALTIVCEIDDVRRFASPRTLMAYFGLVPSEHSSGDRQHRGSITKAGNIHVRRLLVEAAWNNRHHAGAALILNRRRQGQPPEIVAIALKAQHRLTKKFLRLDQRKHRHVAITAVARELCGFVWAILMAVPQTQH

SEQ ID NO: 458289 - protein, 368 aa, unidentified
MYNSTTSLTYVGLDVHKDTIAVAVLRPGNEGADQQTVSNRPEAVRRLVSSWNDPGSFQVCYEAGPTGYELQRHLASLGVSCQVVAPALVPRRPGVRIKTDRRDALNLAGLYRAGELTPIRIPSPEEEAIRDLVRLREDLKQDVLRARHRLTKFLLRHGRTYEGHSWSGAHTVWLNHQEFSHAAEKSTFSHYRTALDLRLTQLAGLERELEAYLSGPPFGEMVSRLVCLRGISYLSALTIASEVVDFARFASPAEFAAFVGLVPSEYSSGKSERRGSITKTGNAHVRRVLVEAAWHYRHRPAVGANLYRRSQRQPPEVLAAAWQVQVRLCGRYQRLTKRGKRSAVAVVAVARELAEAVCAFMQPDTTAA

SEQ ID NO: 458290 - protein, 417 aa, unidentified
MIQAVIERCAGIDVGKTFIVVCMMGGPAHEEPRVEVRKFGTFNEELEKLRLWLISERCTHAVMESTGSYWKPIFNVLEESISVILTNAHDVKGRKGHKTDWKDSRWLAHLLRHGMIRPSFIPERGIRELRDLTRRRKQLTHESTGVKNRISKVLEEANIKLGSVLTDIFGVTGRAILGALLEGRLEPAEMAALAKKSAKLKIPSIIASLQNHRMTETQRFLIRQSFRQLEFLSGCIAELEEEIRRRILSVPEYRQAASLLQTIPGIREDAAASIVAEAGVRMDQFPTAKNLSSWVGLCPGNNKSADVEKPGRTTKGNAWLRSLMVECAWAASMKIGSYFRARYQRLLPRTGKERAVVAVAHSLILLIHKMLSTDTPYRKAAEETEYERSRQKYVRHHLKALARLGYIVPEVPIAATE

SEQ ID NO: 458291 - protein, 446 aa, unidentified
MYYTRCQLTTDPNKTHRRYSQLNTNQKQRIMQVSERTLIIGVDIAKVNHVARAQDFRGIELGKRLLFKNTRDGLDRLVQWIRNLQDQHSKENVILGLEPTGHYWLPLAEFLHREGIKFVLVNPYHVKKSKELDDNSPTKTDIKDARVIAQLVKDGRYSEPNLLTGIHADLRVAMVQRERLSKELIRVKGRVINWLDRFFPEYPQVFKKWDGKASIATLKQFPVPEDILKLEPEAIVTKWKEDVKRAVGIRRAKLLIEQARSSIGLTSGLTAARYELQQLLEQHELFFRQMEKMMVYIEGLVIQIPGSKEMKTIPGVGWVTVAGFLAEVGDLTGYDHPQQIIKLAGLNLKENSSGKHKGKSTITKRGRPQLRALLFRCVLPLVAKNPEFQRIHRYLTTRQINPLKKKQSLIALCGRLIRILFTLGTKRISYNPEKVLSPVHIEQLAA

SEQ ID NO: 458292 - protein, 350 aa, unidentified
MEYIAFDAHKHYTVASVERPTGEIMRERRLAHQRGAIREFLAQWTPGSPVAVETVGNWYWLVDEIEEAGMVPRLVHARKAKLMSGMINKTDKLDVRGLNRLQRTGTLPTVWIPPAEVRDQRDLPRTRMVLVRTRTRLKNRIHATLAKYALTVPDVSDLFGKQGRAVLTRQLAHLPPHTRFATDQLLEQLEVLDKQVAEFEDRMREVFKKTPALEWVMSLPGVGFILGMVILLEVGDVHRFPDAEHLAAYAGTTPRVRGSGDKIRFGQLRPDVNRYLKWAYTEAAEAICRHREHWPHRHVSQLYARVCHRKNHQKAIGAVARHLAEATYWILMKKELYQEPKRRSGASTKA

SEQ ID NO: 458293 - protein, 316 aa, unidentified
MSESLFLGIDVAKDSFDVASLPSGLSLSLPNDAKGRQQLLDQLQKHSVALIVLEATGGYERCLVAELLQRGQKVVVANPRQVRDFARGIGKLAKTDRIDAAVLAKFGQVVKPQPRQRPSEQAVNLAELVTRRRQVSDLLTAESNRLPMARHAPVRKSLLKIIRTLERQLIDLDKLIRDNIESDDGLRHKDEIMQSFKGVGPGTSSLLLSHLPELGRLNRQQIAALAGLAPWTVESGPWVGQARIWGGRAEVRSMLYMAAMTAIRWNPIIRNFYQRLRSQGKRFKVAITACMRKMLVILNTLIRNDCLWSPQTLKNA

SEQ ID NO: 458294 - protein, 452 aa, unidentified
MRFIGLDVHKDFCEVAVAEGGACWSGPRVRSTPEDLEVFGQSLSLDDQVVLEATGGALAIARILERHAGRVVMANPMAVRAIASAKAKTDRLDARTLARLLAAGFLPAVWMGDERTRLLRRLVSRHAQLVKQRTRAKNQVHAVLQRTVKGRPPASDLFGTRGRAWLGQQELPADERETVQAALRHIDFLDGELRLVDRTIAEQVLSWPEVRRIMTIPGMGAMAAAGVMAAIGDIARFPSPRHLVGYLGLDARVRKSGSAPARHGGISKQGSSEARHLLVEAAWAALRTPGPLRAFASGSGPGAAPTSPRWPWPASSPCCAGTCSPAKRTTRSPGHPSFGRRCDASSSPRARSAGSATATRCGSSPRQPSASWSANSESRPRRRTAGSSTTSRPRAKGVRVPPPGRASRRTTRPEQRGRDQPQTLLFSSRSPTPPPHREQEDAECPRRVDFHP

SEQ ID NO: 458295 - protein, 402 aa, unidentified
MNSVGIDISKGRSMVAAMRPFGEVVISSFEVHHTDSELSELAKLLKSLDGETRVVMEATGNYHAPVAQLLHDAGLYVSVVNAKLVHSYGNNDLRRVKTDRKDAVKLANYGLDRWLTLPRYIPEENTRLLLKNCYRQYRQYSKVQTVLKNNLISLLDTVFPNANRLFNSPARADGSEKWVDFVAEFWHCKCVCERSEKAFVNKYQRWCRKHGYNFSEDKAHAIYDEASGHIGVMPKAETTKLLVEQAVSQLRTTSAALAALKQEMHSLASQLPEYPVVMEMFGIGPTLGPQLMAEIGDVRRFYSKKALVAYAGIDAPPNDSGDVIGRHKSMSKVGASSLRRTLFLIMSAYLQNSPPNEPVYQFMDRKRSEGKPYRVYMMASANKFLRIYYATVKAYLESLEQI

SEQ ID NO: 458296 - protein, 340 aa, unidentified
MRRLYAGSDLHGNNNLIGIVDGEGKRIFKKRLPNEPQLILEVLKAYKEDMVGIVVESTYNWYWLVDALMDEGYKVHLANPSAIEQYSGLKHADDKHDAFWLAEMLRLGILPEGYIYPKEERPVRDLLRKRGHLVRLRTSLMISLQNILSRNLGRKMNVNDIKAVKEDRVSPLLEKNEDLALAGRVSKEAMDHLTHQISKVEWVVQKKIQLKPGYQYLPSVFGVGKILSLTIMLETGPISRFPTVGDYVSYCRKVPSQWMSNGKWKGSGNRKNGNKYLAWAYSEASEFARRFYPEARAYYQRKMHKTNAPVAHSALAHKLARAAYYVMRDQVPFRPEKLFG

SEQ ID NO: 458297 - protein, 340 aa, unidentified
MPVIRIGLDVAKNVFQAHGVDEHGQVVLRKQLRRREVLSFFAALPPCLIGIEACSASHYWARELTALGHQVRMMPARYVKPYVQRGKSDALDAAAICEAVSRPTMRFAAIKSVEQQSALTLHRAREILVKQETMLANLIRGCLGEFGIVAPLGIRRMAELVGIIRDEADSRIPPHARIAMTAVADQLGDLQRRIKEIEQAIRAWHRNNDASRRLATIPGVGVITASAIAATVATPTEFKSARHFAAFLGLTPKQHSTGGRQRLGRISKQGDGYIRRLLILGGTALVRYARGAGGTVWAKQLLARRPARVVTVALANKAARIIWALLVRGGVYRSAAPQAA

SEQ ID NO: 458298 - protein, 355 aa, unidentified
MNIVNKIDFTGQHVYVGLDVHKKSWNVSIHGAHLEHKTYSQPPDPQVLGNYLRRNFPGAYYHCVYEAGFCGFWICDRLKEQGIDCLVVNPADVPTNDKERATKSDRVDCRKLARNLRDGRVHGIYIPSKIKIEDRNLLRIHQNLVKKQTRCKNQIKSFLHFYGKAIPDDVVSSHWSRRYIQELENIPMEGPTGIISLQTLLSELIHLRGLIAKIKREIIALSRSEDYRESVQWLKTIPGISTLGAMTLLTELVDIERFACFNRLASYVGFIPNIHGSGEKERQTGLTNRRNPTLRVLLIEAAWVAVRKDPAMMMAFNRLCIRMKKTRAIVPIAKKLLRRVRFVLKNRSAYQLAVV

SEQ ID NO: 458299 - protein, 361 aa, unidentified
MFTERTSVGLDVHARSVVAAAIDGVTGEVFRARLTPGNEEVIGWVRALPGPSAVVYEAGPTGFGLSRAFTTAGIRCEIAAPSKIQRPGGDRVKTDARDAMHLAKLLRLDEVVSVAVPSLQREAARDLVRAREDVRGDLMRARHRVSKLLLRQGIVYYGGSAWTGIHLLWLRAQHFDAPGLQIAFDAEHEAVLQAEARRDRLDKAIVAMAADSEFTPVVHRLGCLRGISTLTAFGLAVEVGDWDRLTGSSIGAYLGLVPTESSSGQSRSQGSITKTGNTHARRLLVEAAWHHRKPYRTPGATMTARWELATPAARARGHAGNQRLHQRWLHFSDRKKRPVVANVAIARELAGWCWSLAVMDD

SEQ ID NO: 458300 - protein, 401 aa, unidentified
MWYVGLDWADTHHDVEVLDEAGKRVGAQRFAHSHHGLTQLKQFLLSIAAQPEHLACIVETNHGLLITFLLEAGIPVYPVNPKTVQQLRKAAGAKTDQIDAHLLAKLGRFELAELRRLEPDSPTVAELKTLTRDQDALIQTQTRLVNQLTACLKEYYPAALHLFAKVQQHSTLVFLQAYPTPQAAQAASVAEITATLRTGKHTHPRRAAPKIFEELHRPHLVASEVIVRAKSRLMLSLVKQLLVVIEEIASYDEAISSLFLTHKDHALWRSLPRAGKRLAPRMLAEWGDDRSRYADATSVQTLAGTAPVPFQSGNYAKAHKRFACVKPLRNALYQFAWQSTQQEAWARDYYQRKRAEGKTHSMVVRALANVWVRIIYRMWLNHTCYETAVFELAQRLHAQAA

SEQ ID NO: 458301 - protein, 313 aa, unidentified
MSIAQFVGIDVSKDHLDIAVRPTNEKMRFANEDESIDMLIHRIKSLKPALIVMEATGSYHRLVLGRLLAADLPAIAINPRQARDFARATGRLAKTDAIDSDVLAEFGEKIRPELRTVASDATQQLEAICTRRRQVVSMLTAEKNRIHTAPSSMRSVIKKHIQWLEKHIQQLEKDLDKEIRSSPAWREKDDLLRSCKGIGPITSHTMLACLPELGTLDRGQIAALVGVAPFNDDTGKHRGRRHVQGGRIDVRCVLYMATLSAIRSNKAIRTFHQRLIAAGKAKKVAITACMRKLLTILNAMLRTNQPWSADFAS

SEQ ID NO: 458302 - protein, 502 aa, unidentified
MNPRVTIGLDLARKTSHQAAILDTGSPGGPVLRKVNSSAASLDAALQAAGGPDGCVAVLEPTGMAWLAVAAWLVFRGCTVVRTDTRRAHDFRKVMRRDVKSDAVDAVALARLPLLGGEAARGLVMPERLRFALDQLLRLRAQLVKEATRQFQFLVSVLEAYVPELPGVLGEGEKLSSAKVLLLRRFLHPGRVVEAGVDGLTLALEQAGVRLDDASVVTRWHTVAERAWSIWGPLEGAGCCPVDFDVAQIQVDTWLGRIEESENHIRKVEDKVRAIYKEVDPDGILETVPGLGPVIAPFVLAVVGDIRRFPSAKTFVSWCGLAPRKNQTGGTDRGGQRISKAGNRLLRKYLYLAAESARRSDLDLASFYARKEAQGTHHTAIVTALAAKLARRVYAVLKRAAAGDTTGYRFTDQIGAIVDRRESRRLTGAAYPSKAARRRAEQERRRDRGATPPSTGQSSDSPRGLSNAPVPPPRNPPHPGGARPAQVTASGHSSQADSPRAG

SEQ ID NO: 458303 - protein, 309 aa, unidentified
MGTYIGIDVSKDRLDVHVLPQDEAFSVERNGKGLGELVERLKSFAPNLVAVEATGGFETTTAAAVAGAGLPLAVINPAQIRHYAQALGKRAKTDAIDAKVIARFAADVKPDIRPLADETARFLADLVTRRRQIVEMLQAERQREKRVTVRRLRKSIERLIKALEKELAELDGDIDDTLHASPVWREKEDLLASVPGVGPQTARTLIADMPELGTLDRKKIASLAGLAPYTRQSGRWKGKSMIGGGRKAVRCALFMAAMVAARHNPVLKLFRDRLIAAGKPKMVAIIAVARKLLTILNAIIRDNNPWQIA

SEQ ID NO: 458304 - protein, 395 aa, unidentified
MFIVGIDVAKRSHEVCMITSDGQTVQRPFSIRNNCTGYNLMLEKIRKHTNIKSQIVFAMESTAHYWLALFTRLRKDGYHVILLNPIQTSAMRDMFIRKIKTDAKDSFIIAELIRFGRYAESNVAQDRLLALKELCRNRFYLVDMAGDLKRKLIALIDRVFPEYEAQFDTIFCKSSVAVLKKYPTPQKLSNAHLDKLTELLWNSSNGHFGEWKARELKELARNSFGVEDCDGAYSTLILLMLDQIQSLSGKADALEKEISRLFQSFDTTVTTIPGVGPIIGAVILSEVGDISRFSSADKLAAYIGVDPSVNQSGEFQAAHAHMSKRGSPYLRRCIWMASQVAVQRDPMFRAYYEKKTAEGLKYMTIIGHVTRKMTAVVFAILRDHKVYEPVLPTAA

SEQ ID NO: 458305 - protein, 388 aa, unidentified
MLPSTHHASTEQTASYRPDLTLCASLELSGATWLVTCLLPERARMPKYSTPGGDGGVLLGLLERMRARAQQLTGHPVKIVVIQEAGLDGFWVHRLLEANGIESHVVDAASIAVPRRRRRAKTDAIDGETLLRTLLAWTRGEPRVCAMVVPPTPEEEDRRRVCRERAILLQERIRHTKRIKGLLAGQGITDFNPLHKDRRQLLDAARTGDGRPLPLQLKAEILREIELIELLLRQIADVEAAREVLAGPKTAKAPSPVVLLKQLKGIGPEIASVLYFEGLFRSFGNRRQLAAYAGLAPTPWRSGTVDQEQGISKAGNPRLRRTMIELAWLWQRHQPASALSRWFHTRVGNERGRIRRISIVALARKLLIAVWRYVTQGEVPEGAVLKAA

SEQ ID NO: 458306 - protein, 362 aa, unidentified
MSKASWLVSGVVPGVERQPLKKLEPDATALLRLIERWRNEAVRAGRPIRRIALAYEAGRDGFWLARWLIARGIEAHVIHSASVAVSRERKRAKTDRLDAAMLMRVFLGWLRGERGHCGMVAIPTMEEEDARRPNRERESLVNERSRMVNRMKSALARLGIRGFKPHLRKAPERLAGLRTAEGTGLPANIIEEFRRDMARLALVREQISSIEKARAERLERAPDTGPHAMVRLLARVIGIGIETADMLVREILSRNLRDRRALARYAGLTGSPDESGLKSREKGLAKAGNARVRRGLIQLAWRFLMFQKDSALAQWYRTRTEGPSGARKTTMIVALARKLLIALWRLVTTGEVPDGVELRPAA

SEQ ID NO: 458307 - protein, 363 aa, unidentified
MSKLLYVGMDVDKEKIVAAKLTSSAKVSDECVIANAPQAVEKYFAALTKEGEVMAAYEAGCFGFGLYHQLTDLGVAAVVAAPGLIPRKPSDRLKTDRRDARTLAFTLRAGQLTAVHVPTKQDESVRDYLRMCEDMRDDLRKCKQRILHLLLRRGIRYERGGPWTVKHKDWLATLDLGSELDRQTLDSYLARLQELESTCSQLAAEVESIAQGDRYREPVRTLSAFKGIKTLIALSFITEIGDFRRFSSAAQFMAFLGLVPSEHSSGPKHRQGGITKAGNSHLRRLLVEAAWHYRSYHPTSRVLVERRRGVDPRIISYVNRAGRRLNRKYLHLLLRGKRSQLAVTAVSRELAGFIWGAMVGQVA

SEQ ID NO: 458308 - protein, 411 aa, unidentified
MLFIGIDLSDKTFDYCISNSNGDVLTINKFDFDDDGFSDFVHKINEHESENQNCIIGIENPRSRLVDFLIQRGFNVIPTHPLSISKYRESRIPSKAKSDPMDARLIADYIREHHKSLRTISMPDDTIRELSILLEDREKLVEQKVKFSNQLTSTLKAYFPQALEAFGSITNKSALEFLSKFDTHQEVRALLAKSSQELDDVLADCGFFRTDSRERFHSAMSKRPSSISPAVIKAKIRLKNVLVGHLLLLTQQIEDYEKQIQKLMDDTPDSGIFRSLPGADYILGARLLVLYSSREFASANEAQAFWGTCPYTSSSGSKTSVGFRKGCNHFGRNTFHQLAFCSLKRSQWAKKQHAKKRKEGKRSHHALRCIANSWVKITFAMWSSKTRYDESRHLASIASHILNQPSFILGG

SEQ ID NO: 458309 - protein, 321 aa, unidentified
MKKEIVYQQVIGVGCGIDVHKDTIVATIRSSSRDYETREFSSYTSSLTELRDWCKQEGVSHIAMESTGIYWKPVFNVLEDQAFEIILVNARHVKNIPGHKTDKKDSAWLSKLLLSGLLKGSFIPPVDIRELRDLVRYKKKKTQAVASEKNRMIKILEDCNIKLSSVVSDVQGVSATKIVNSLTDGETDVDKLLLFVHGRIQADREDIKQALQGKVTAHHRFMLKMARESIEVNEALIKKLDAQIEKASAQYKVELDLLQTIDGVGKDSAIAIISEIGADMKQFPNEHHLASWSGVSPGNNESGGKKKAQEPSTATNTYKQP

SEQ ID NO: 458310 - protein, 332 aa, unidentified
MCEYIGIDISKSSLQVYLGKFDEDIEIENSLKGLKQLHAKVKKRYGKSVEVVWIYEPTGSYSMLIKRFCAEHAIACYIIKPSQSAAFAKTIKNRNKSDIVDARMLYQMHKIAPKEEIVIPHYDAQLESIQNYLRYYKTVMKERVIKTNQLEAALHREDELFIIKKLRSKIKALKAEEKEIITTMLERIKENKAYEEHFSTITSLKGIGNISGLVLFDLFTRYEDASSKEIVALCGLDPVEASSGSSLKRKSRISKQGSRLVRSTLFMPTLIAINHNPHMQMIYNRLKEKGKQSTVAQIAVMRKMIVIAFSLFKSKQMYDMNRFIQHDEQKVA

SEQ ID NO: 458311 - protein, 403 aa, unidentified
MIFVGDDWAEQHHDVYLMDESGKRLGSRRLPEGLTGIGQLHELIAQHAEEPDQVVVGIETDRGLWVGALTAAGYQVYAVNPLAVARYRDRHHLSGAKSDASDAKLLADLVRTDRHNHRPVAGDSADAEAIKVLARAHQSLVWTRTRHTNALRNALREYYPAALAAFEDLAHGDALGVLDRAPSPIQGARLPLTAIQSALKRGGRQRNIAARAREIAAALRTQQLAAPAPVAAAFAATTRATVGIIAELNRQISELETTLAEHFETHPDADIYRSLPGLGVVLGARVLGEFGDDPNRYTDAKSRKNYAGTSPLTIASGKKRAVLARHVRNRRLYDALDRWAFCALSTSPGARLFYDQRRAAENTHHQALRALGNRLVGILHGCLRHHTDYDENTAWAHRTPVAA

SEQ ID NO: 458312 - protein, 346 aa, unidentified
MEYIALDVHKNYTWARVENATGDRLYESRLAHAHGSIKNFVNRWSSGSAVAVETVGNWYWVVDEIEAGGGQPQLVNARLAKLMMGSVNKSDKLDAKGMNRLQRTGTLPTVWIAPSSVRDARELPRTRMVLSRQRTQLKNRVHATVAKYGYRVEGASDAFGKKGRRIIEELLDKLPPHTQQSLRVILDELDHVTDNLKAIENQMTEVFSPCPQTPWLKSLPGVGEILAVVIWTEIGTIERFGRAEQLASYCGLVARENSSGGKIRFGAVRRDVNVYLKWAFVEAANSAVLNAERCGYGHISRLYQRIKARRGHGKAKVAVARHLAEACFRMLNKGESYREPMSSTQR

SEQ ID NO: 458313 - protein, 322 aa, unidentified
MSAPVLGIDIAKQRFEVALLIEGKVKNKSFKNTTEGFETLAVWLTKLGISKVQACLEATGNYGEDLAIYLHEAGHSVSMVNPARIKGFARSELIRTKTDSMDAGIIARFCLAMKPEAWIPPSPAVRILRALVRRADSLIDMLTQEKNRLGTAHESVIPSIQEHIDFLKKEIKKVRKQIADIIDQNPNLRQKKDLLVSIPGIGKATIAVILGELDNLEKFNHVRELVAFIGLAPKETLSGSSIKGKPRLCKIGHARLRKALYMPALVSIQCNPVMLAFYSRLKEKNKNGKVIVCAIMRKLVHVIFGILKSGKKFDPNYKPVLA

SEQ ID NO: 458314 - protein, 355 aa, unidentified
MSQEKYIGMDVHQATISVAVMDARGKLIMECLLETKAATILECIQGLRGTLALTFEEGTSAAWLHDLLKPHVSRLVVCDPRKNALLKDGNKNDRVDAQKLAELLRTNQVKPVYHGKHGTRALKELGRSYLTITKDGTRLMNRIKSVYRSWAIPCAGTSVYTRRHRAEWLAKLVEPGVRIRAEHLYQQLDSLQPLRLEVRRQLLLESHKHAAVKLLRQVPAIGPIRAALLVALLQTPHRFRTKRQLWAYSGFAVEVHDSGEYRWVRGKLQRNRERITVRGLNDNHNKEVKSLFKAAAISASTRPGPLHDFYVARVESGMRPTMARLTLARKIAAITLTMWKKGVSFDPKQLYRQAA

SEQ ID NO: 458315 - protein, 437 aa, unidentified
MEILYPCVGGIDVHKKQVTVTARTPDPRRGTRWETTRTFRTFYGELLAMASWLVTERGVTHVSMESTGPYWWPVYSALREVGGPDLVIEVVNAAHVKAVPGRKTDVKDSQWLAQLMEVGLLRGSFLPPEQVRAMRDFTRYQTKLTEERSREKQRLLKVLEAAGIKLDNVASDTFGVSGRAMLAALVAGERDPVVLAALARGVLRNKTEDLRLALAGRFTAHHGQMVALHLARIDHLDQMLTQVTDTIGHTGDPAAGLIGPFTAQIELLMTIPGIGERVASVVISEIGVDMSRFPTAKHLAAWAGLAPGNNESAGKRRSGRRRKGNTHLCSILIEAALAASRTRTRIGARYHRLHRRFGGRQHPGAAKKAAFAVAHTLIKVIWSVLATAQPYTDLGHDFYTRRINPETHTKKLIAQLEALSGKKIIFIDDNGGEPPPA

SEQ ID NO: 458316 - protein, 338 aa, unidentified
MYYTGIDLHKKTSYLTTIDENGKIIAKGNMHNVEEAILDYFAKLERETKIVIESMGSWYWLYDLLTGNGFDVVISNPSKTKAIASAKIKNDKVDSHMLAQLLRADLIPTVYVSSLETRKLKELLRHRARLIRDTTRMKNRIHMLLMKNNCHIRVSDLFGVQGLRYLKKISLPEHHQEQLETYLSFYEELMAKVLELTKRVYSIAKGHPMAKLLMTIPGIGPIIAMSIVAEVEDISRFRSYRNLASYAGLVPSLDASAGKQRTGRITKQGSPYLRTAMIEAAQVVARLKKCRLNVFFRKRIVRSGYQKAIVATAHKMLQIVFYVLKQQTPYTEEYPACA

SEQ ID NO: 458317 - protein, 386 aa, unidentified
MQTLNNLSRSLIDLEPASTLIAIIEMSLSSWLVAGIVPGIERQPLKKLAVDESALLRLLHRWREEAEKAGCRIKRIVVAFEAGRDGFWLARWLKARSIEAHVIHAASVAVSREHRRAKTDRLDAELLKRAFLGWLRGERNHCKVVAIPTLKDEDAKRPSRERESLVGEQSRIINRMKAALIRLGIRGFNPKLKRAAGRLDSLRTPEGEPIPPNTLAELRRDMERRRLISNQIRQIEEARLKHFEQAPNDGPHAMVRLLARVIGVGIETADMLVHEVLSRNMHDRRAIARYAGLTGSPDESGRKRREKGLARSGNGRVRRGMVQLAWRFLTYQKESALAQWYRARTENARGARKPMIVALARKLLIALWRFVWQGVVPDGVVLRPAQ

SEQ ID NO: 458318 - protein, 324 aa, unidentified
MPDGRGRRVIGERWIEHSGDSLAELVDWLRQQTGDFPPSLAAAIEVPRGAVVETLLEHGFAVFSINPKQLDRFRDRYSPAGAKDDRRDAFVLADALRTDMHCFRAVRIDEPAMIRLRELSRLEDELSQEQNRAVNRLREQFHRFFPQLLQLSGCADEPWLWALFEAAPSPAKAARLSEAKIARILREHRIRRLDAAQVRAMLKTKPLTLAPGAADAAAEHALLLLPRLRLLHRQRTDLARRISALLEELACAEEGQSEHRDAAILLSLPGLGRKVAATMLSEASQAIAERDYHALRCYSGTAPVTQQSCQGRSKTRPLGRSHHR

SEQ ID NO: 458319 - protein, 396 aa, unidentified
MHKATVVSCLRVQEGGRVRREVRRWGTTTAELLALGDWLRQAGCTHVAMEATGIYWKPVWHLLEGELELLLANPAHIRNVPGRKSDVNDATWIADLLAHGLMRASLVPPGPIQELRDLTRTRKQLMREIGQHKQRIQKVLEDANVKLASVVSDVFGESGRRMLQALSAGATDAWQLAALRDGRLTASHETLAAALHGKVTAHHRFLLSQHLGTIAHLEQTVAAFETQIEALLAPFHTAVERLRTVPGISATAAHVIIAEIGLDMSRFATAGHLRSWAGLCPQLNESAGKVMSRRLRHGAPWLKTVLVQCAWAATRNKNSYLHAQFVRLRARRGPQKAIIAVAASILTVVYHLLRNQAVYRDLGALYFVRTDKERTAQRLARRIKELGYEVEIRKAA

SEQ ID NO: 458320 - protein, 478 aa, unidentified
MGKPKNINIRGLRGDQRAKELEGLDLSRVLILAIDSARDYPKALICDYFGRVLEKPFFFAVNSEDIFTLHKKVQYWVSCVKALRVFVGIEVAGCYHDAIGKALEKYGYEVSLVNSFTTASGRRMMLDFSKTDDKDLLAIAQAIIANNGVSPKRVTGFYERMQSVCRTRRQHVAEASALKAQIKELMSMVFREYQGLVNPNTLTKQKVFSSFWSPKSRLIMRYVPLPDEILSLEETTLNQLAASEGLRFSELEIKLLFQAAKRDLMSSSTELAQFKSEQVKFRLKQLEILEKQNASLEFEMEKMLVESPAILLLSIKGINIITAAEFIAEIGSIFNYTYNRQLVKLAGINPVLAQSGGKNAKAFQISRQGNPALRYIVTLIGKNLCSKACWNSYFIDYYERLHQKGKTPCQIYAAAGNKFLRIAFAMLKNQTLFLVPGYENCTSDIIGKLSCKETKKIARQALDFLSGASKQETAVASS

SEQ ID NO: 458321 - protein, 367 aa, unidentified
MTVTIVDAARPVTGGVDARLDLNVASRLVTGGVDTHLDLNVAAALDPVGGLLGVAEFPTTAAGHRELLGWLSGFGPVARVGVEGTGSYGAGLARFLRASGVEIVEVDRPNRQARRRSGKSDPLDAVEAARAALSGRASGAAKSRDGNVEAIRALVVAKRSARSAKIQALNQIRHLSFTAPEQLRQRLAGVSRHHLAAHAAGLRPATGAGADPVITATKTALRILGRRVLALDEEKARIDALLSALVTQTAPQLLAVFGVGVDTAAALLVTAGDNPGRLRSEAAWAHLCGTAPIPASSGKVTRYRLNRGGDRQANCALWGIVITRLGNDPRTKAYMTRRLAEGRSKPEVIRVLKRYVAREVYHRLPRP

SEQ ID NO: 458322 - protein, 435 aa, unidentified
MKQNLQKVHPRAAGIDVGSKSFYVSAEDQEVRVFPTFTADCQALREYLLSKGITTVAMESTGVYWVNLYGVLEEAGMEVYLVNGRDVKNVPGRKSDIKDCQWLRQLHSYGLLRKSFIPEGGIRKVRSYLRLRQDHIRASATQIHLMQKSLTQMNIRLADVINDITGASGLRIIGAILDGERDAGRLTELCVSQIKDKKRELVYKSLEGDWQEEHLFALQQAFTTWEHYNGLIRACDKAVEKQLAVMTEGKPTVEARSKRKKIRYHRPEIENLHQPLLQLTEGKDPTGIPGLTDYSFLQIVSEVGTDMSAWPTEKHFTSWLKVAPMRSSSGKMIKRVTLKRHNKAGQLFRSLAQGILTSKHLALGVFGRNIRARRGGAVAIKAIARKIACYYYRVMTKGGDFVDQGIAVYEQQLQDRKRKYLEKMAAKLNLQLVPA

SEQ ID NO: 458323 - protein, 389 aa, unidentified
MTYFVGIDIAKFEHVASILDSSSGELIVNSLLFDNNIKGFNLLLSNLSMLNKEDVVIGFESTAHYHLPLFNFLNENNWKCVLVNPIQISRFRKISIRDTKNDNIDSRVIANFLLLEHKHLLEEEFYNNELKELCLQRHFLIESSTRLKIKLTSYLDRVFPELQTTIPKGTLHTMGVRAILKKFPTAKLISDVRIDHLVNIAKKASKGRYKESMVIKIKEAAKSSIGFNSIGLALKIKQSIESLESIERQIDEVESIINSHHTIINSPLHQIKGINSIEIAYIISAIISINRFSSDKKLIAFAGLDPKVRQSGTWEAKSTRMSKRGNRLLRYALIWTANNMRKYPSKMKDYYNKKRSENKSHYNALGHCAAKLCRYIFFILNNPNVEFIN

SEQ ID NO: 458324 - protein, 364 aa, unidentified
MYYSGIDQHKRDCMITTYDAAGHRVKQQRVPNVPPQLRRYFTAFTGPHHAVVESTGFWYWLADLLDDLGVELILAHATRLKAIAAAKVKTDRLDSDLLAQLLRAGLIPKAHRIAREARGPRDLLRLRVRLVEKRISCLNSLERIREKHHITNRNALDPWYQHQVDVSEAQLALLAQQIHDLEVILHPHLIPNADIQRLLWVPGIGKVNAFTIWTEVDGIARFPSEGQFLSYCRVVPGADNSGGRTRHRSGAKAGNRYLKLAFSHASVRAIQYYPVIKAFYQKHRRRKPVIGARAIGAAELARIVYQVLTKREDFNGLFRGMPLPRTKTRQWPRLATPAAELGRGGCASGHALDWGARRRATRCI

SEQ ID NO: 458325 - protein, 477 aa, unidentified
MEEKIFKFNVDWTKSSFYCGMDVHKHEFTAAIYSEDESKTEFLKTNVFQVNSQGLEQLWNFVKKYQPDGFAMEATGIYHHVIFNFLTRRREFVRWPFRIVVVNPSDAKGLPGRPKDDKIDAINLAKYLSKGLLKNGKPIVQVLEDLKAIFRMAARLERDRTALKNRIIKTLDRAGIRPRRLYLNRDWVVDLLQHLVEYEGTLGTFLEFALKNENHPLQKHRTKIVKNIADFIPFFEFSLTHAQRVLIRQNLVELEFKTGEKSLLAIEIEQMMQDHPALRTHAQNLATIPGISPFGAVWILAETGNIKQFPKHRSFTAYCGCCPRVVSSAGKVYSAHTSRHSNPYLRTIFFNAAGVVCNLLKADSCLKDYATRIVKRKAHRTHKLAQCIVAAKISRIAYAILRDCVQFNPNHLKGLQISDLKKSDAQFTIADRKLIRRARNVLNRVREMDKLGILGTRAETLAMGLDQLLQGKKVSMI

SEQ ID NO: 458326 - protein, 338 aa, unidentified
MVYGAIDLHMRYSQIRIIDAEGQVLREQRVVTGAERLVTVFSGHGSMRILLETGTESEWVAQALEAAGHQVIVADPNYAPMYGEIRRKVKTDRRDVAALAEANRRDWYRQTHRVSASQRALRQMLRSRRQLVQMRSGTIALIRSLLRQSGYRLPPGSSERVPRQLVQLVLPADLAATIAPLGRTVSTLTTEIAALDGRLQMQADADPIVQRLQSVPGVGPVVALTFRAFVDDVARFSSAGQVSAAIGLVPREDSSAERRHRGHITKAGPRELRSLLVQAAWACWRSTASANLRAWVERLAGRRGKRIAVVALARRLSRILFALWRDQSVFTAATLAAA

SEQ ID NO: 458327 - protein, 412 aa, unidentified
MMQAIYPCVAGLDVHKETVVACVRRLDGRAQVSKQVKTFGTMTRDLLELSDWLCQQGVTHVAMESTGVYWKPVFHLLEGRFAEILLVNAQHIKHVPGRKTDVKDCEWIAQLLQCGLLRGSFVPPVEIRQLRDLTRQRSQLVSDRARVANRIQKVLEDANIKLASVATDVLGVSGRAMLEAMIHGQDDAELLADLAKRRLRAKLPELRQALSGKVTDHHRFLLRTLLEQVAHLEQMIASYSQRIEEEMVPFASTRDRLQTIPGVDQRTAECLIAELGIQMDQFPSEGHLASWAGLCSGMNESAGKKRSARTRKGSRWLRQTLVQAAWAASHTKTTYLTAQYRRLAPRRGRKRALIALAHSILGIVYHLLKNGTIYTDLGPDYFERRDVQRLTRKLVQRLERLGHKVVLEPKAA

SEQ ID NO: 458328 - protein, 360 aa, unidentified
MQTKISNNSFDGQSFFVGIDYHKKSWKVTILGEQYEHKTMSQNPSPEILASYMRRNFPGGKYKAVYEAGFSGFESCRKLQQLGVECIVIHPADVPTSQKEKLQKTDKADSRKLARTLRANEFEAIHIPDRDLEADRALVRQRFRLVKDISRTKNRVKSLLFQFGIDIPERFSDSQTRYWSSVFINWIKELPLPEESLKLTISNYIRIGEFQRKELLIVNKQIRSLSQSKTYIRNYNLLLSVPGIGLMTAMTFLTQIGDIRRFNRLDDLCNYIGLVPRMHGSGEKMVVGKMIKRGRKEIKIMLIEASWQAIRKDPAMMLKFNELSKKMHKNKAIIRIARKMLSRMRYVLLNKHEYVLSVVN

SEQ ID NO: 458329 - protein, 389 aa, unidentified
MSQPFDASRSLTALEQDSTIIAAIEMAQSKWLVAAVVPGIKRQPLKQLDADEESLLKLLHRWRKEADQAGHPIRRVVVAFEAGRDGFWLARWLRTRGVEAYVIHPNSIAVSREHRRAKTDRLDTELLLRALLGWLRGEKRHCSMVAIPTIEEEDAKRPNRERDSLVTEQTRIGNQIKAILTRFGIRRFRLKLRKAERQLKELHTAEGSLLPENTCAELFRHLARLHIVREQIRAIEKARLQKLEANCDRKKSPYAMVHLIARVVGIGVETADMLVTEVFSRQFRDRKAVARYAGLTGSPDESGKRRREKGLARAGNARVRTGMIRLAWRVLRFQEGSALAQWFQTRTADGRGNTRKTMIVALARKLLIALWRLVTTGEMSDGIVLRPAS

SEQ ID NO: 458330 - protein, 356 aa, unidentified
MEPIKTKCIGCDAHRRYSVFVVMDERGHAGKEVRVEHGRELYRHFLSTLPPGSPIALESIGNWYWMIEEMDRAGHQPILAHAKKAKLMMGLTNKTDKLDARGLALLLRNGTLPSVWIPPAELRDQRELPRMRMVFARIRTMLKNRIQSTLAKYGIQIDEVSDLFGVTGRGLLQNRLNELPQETQRSIQEHLKLLDGVLEQIEGTERRIKEVIKETPQMQLLMSLPGVGPILAIVIILEIGDIERFPSASHLASYAGTVPQVKSSGGKTYYGRVRPDVNRYLKWAFIEAANSIVVNQRRMSNRHVVELYHRIMKRKGHPKAIVALARHLAEATYWMLIKNEAYREPTSSRSISPTQK

SEQ ID NO: 458331 - protein, 374 aa, unidentified
MKTTPRFVGLDVHAATIAVAVAEPNGEVHSLGTIPNDADAVRRLVRKLGPPETLRACYEAGPCGYTLYWQLTQLGVACVVVAPTLIPVKAGDRIKTDRRDAEKLARCFRSGDLTPVWVPDTAHEALRDLVRAREAGKRDQLRARHRLQKFLLRHGRQAPAGVTPWTTRFHTWLGTVQFAHPAQEATRQDYQTEVDHARDRIARLERAIDAAIAGAPAPMRRVIDALQALRGVAQITAATIVAEVGPLTRFDRPRQLMAYTGVVPREDSSGPRIRRGQITKTGNAHLRRVVTEAAWAYQHRPQLGKTLRQRQRHLSEPIKAIAWKAQHRLHARYRRLAGRGKVKQQIVTAVGRELLGFIWAIGHYLQTEPAVRAA

SEQ ID NO: 458332 - protein, 354 aa, unidentified
MLTAIRPQDYDVFVALDVDKKSYAVSYKEHQSEKCYSLKMPAQPDNMIQFFQKRFPGKRLIYAYEAGPTGYALYDHVTSKSQDCMMVHPGNIEKAPKDRVKTNRLDSLKILSQLHGGNLKGIRVPSESYRQLRHLTTLRQQYAADQRRAKQRIEALLTFESISVPLGNGSRWSSRHIRILKELKLEAIRRFRLDSLLEDLAYARQRLLKMHRQLREFCRQNDALQKNIHLLRSIPGFGFVIPAYLLGRIGDPAHLRTVREIGSFAGVVPSERSTGDTVKKGPITHMGDPILRGLLVEGAWIAIRKDTELRQFYDRIRSRNSGDHGPRIAIVAIARKLAARAHRVLKDQRPYVVR

SEQ ID NO: 458333 - protein, 349 aa, unidentified
MLIIGCDYHPSFQQIALVDTETGELQQRRLGHREEAEQFYRALATAGAKVRVGMEASGHAGWFERLLAELNFELWMGDAAKIAAKRVRKQKTDRLDAQHILTLMVKDDFPKIWVASWGNRDVRQLLWHRHRMVQAGTRIMNQLQAAALNEGMGYKKKLWRESGRQQLESLPLAHWASRRRHDLLEVLDRINPTITELTHAIEQEAEKCPEAKRLMTHPGVGALTALAFVLIVGEAERFGCGKQIASYLGLVPEEDSSGERRRLGHISKQGNSLLRFLLVEAAQVTVRSDMRWRSRFFHLAQRRGRKIAKVAMARRLAVRLYWMWRRRWNYAQLESFGSHAGQPGNPHGV

SEQ ID NO: 458334 - protein, 428 aa, unidentified
MAGVMIGIDPHKGSHTAVALDGREKRLGQLRVRASRRQVEGLLEWAGHWPRRTWAIEGARGLGQLLSQQLIAAGERVLDVPPKLAARVRLLNTGQINKNDDNDARSVAVAALRARELPELAAEDHTMVMRVWARRYHDLGRLRTQAVCRLHTVLCELVPGGVRRQLRTSQAVELVDRIVADSPIARAKLELARELIADLQRIDTQRREAKRHTARAVDASGTSITSIYGVGPIVAGTVLGYVRDVRRFPTRDRFASYNGTAPIEVSSGDRRIYRLSRRGNRQLNHAIHLAAVTQIRHRGSEGRTYYERKIAKGMGGRAALRALKRKISDTLYEHMIDDVHARDKRIGKDPGGQSGNDAISSVAGSHPDRPALRTSHSRAKANSRTATTGGVLRSGPAPDRRRTSRSAAGVQVEPRPGPRRRGHGQDRP

SEQ ID NO: 458335 - protein, 345 aa, unidentified
MTQYKRIGIDTSKAVFTLHGIDHNDKPVLRINLRRPQLVRFFRKLPATEIVLEACGAAYHWARELSALGHQVRLIPPQYVKPFVKRGKNDRNDAGAICEAGGRPDMRFVPVKSIERQANGMMLKVRQRLLDQRTALTNALRGHAAEFGVIAARGLSRIEPLLAAIERETAIPAEAKEMFALLGEEIAHLDARVEQFDARLAAAHKANEMSQRLATIPGIGPVTGLTLALEIDPASFQSGRHLAAWAGLTPKEHSTGGRQRLGGISRAGHERLRALLVAGATSVINAAIRFGDHRVSEWLRGLLRRKPRKLAAVALANKMARIAWVVMTRGEVYRRPAGAASAVAA

SEQ ID NO: 458336 - protein, 333 aa, unidentified
MVEGTVGSHHKEGSTKMSQISTIVAGIDVAKAHLDIAIHGCKQNWQVANSLKGLLELTRLLQRHHVTRIGLEATGGYERDVVEQLRKAGFGVIVLQPLQVRAYAVVKLQRAKTDRIDAALIAAFTAEHAVVREPPDPRLAGFSGLLTCLEQIEEDMARIKVRLEHVRDPGVLRDWKADIARLKQRRTGMIVKLSTMLRQHDDLATRLKLLLSIDGIGPRTAIALLIRMPELGRLSRGEAAALVGLAPFNNDSGKRVRQRSIAGGRTRLRTSLYAAALPAAFQWNAALKRLYARLKAAGKPHKLALVACARKLLIFANTVLARGTPWLKSAAVV

SEQ ID NO: 458337 - protein, 317 aa, unidentified
MSYNIAAIDIHKKVLIVVVAAVAEEVADATGAAVELEGRKFGSGARERNHLVSWLQQRRVHEVVLESTAPYWKPVWLDLEPHLEKLHWAQAQSNRAPKGRKNDFRDAQRWGRRWLAGERMLSFVPEPEQRTWRWMTRGRLPLVRERVRLPNQVEALLEEARIKLSSVISDLLGVSGRRILEALSQGETDAVKLAELGDDRLRCTPEQLADALRGSPEPSHRALLKLHLERLKLLDQQIDQLSQRSATALKQHQDAVVRLAEVPGFGIESAQQRIAEVGVDAEAFPSAGELASWCGACPGSAVSAEENYSSRCPKGNR

SEQ ID NO: 458338 - protein, 363 aa, unidentified
MAKSMARWIGLDVHARQTLATVFEPSTGEIEQRRIEGRPRAVVDWLESVPEPFRAVYEAGPTGYVLARVAAERGLEVSVCAPGHIPRHSTDRIKTDPRDSLRLARLYAAGELKLVRVPTLEEEQLRDLVRAREDVRVDLMRVRHRLSKLCLRRELHYPGPGKAWTLRHRDWLCRLEFSDRPSQIVVADYLHGHDHLLARRDELERALAELAGDSPWAKVIGGLRCLRGIDTLSATGLCAEVGDFGRFAHPKLLSSHLGLVPSEHSSGERRRLGSITKAGSKHARRLLVEAAWHYRRPPRVSAALARRQQGQDVRAIEIAWRAQRRLHRRWQRLEVERGKRSTIVAVAAARELATFCWEIATLD

SEQ ID NO: 458339 - protein, 430 aa, unidentified
MPSKKNSSIVSVVHDICCGLDVHKKAITACLVTSNAGDGERSEVLEFETFTEDLMRLRDWLLERECPVVAMESTGPYWTPIHNILEGNFQVILVNARHMKNVPGRKTDISDSRWLAGLLRHGLLKGAFIPPKYQRQWRDLTRMRKNYIETLGDFKRRVHKLFQEANIKIDSVLSDLFGVTGRNLMELLISTESCPTFSEVERCLRGSLQEKAKEVYRSIQGYFEEHHRYLLVLLLETIEKLEKQIEGLQGRIRQVLRTSEETIDRLKEMPGVSEVSAHALLAELGPTLEAFPSPAALAAWCGLCPGNNQSGGKRFSGKIRVRKHHLKTIMVEIAWAAIKTRGCYYKAKYYALKARLGPKKAIIAVAHRILKAVYHVIKHGVPFKDLGEAYLLERNRESKIRYLRKQAALLGFELKLFVQPPMEPATGIFS

SEQ ID NO: 458340 - protein, 411 aa, unidentified
MNNILFVGIDISKRSNVATFMNCEGKVVGRLTFSNNGSGADRLVAKILSYYEKEDFEAIRIGMENTSVYSKNLVWFLYEHEALNEHKLSIIPLNAIMVANYKKSFLDMDKDDITDSFAIADFIRIRPGLLPFKLGDRQEALKIMTRSRYNYVQALSRMKSQFLTRLFLSFSEMEAGKPFYSIFSKTSLSLLEEEFTLDELAEKPIPELVEFLQEKGGGKFQNPEEIAKVLKKAASSSYRVPTMVRESLNRTMASDMEIMRILENEIHNCDKNIEKLMKSVPAILVSIPGIGPVLAAGIMSEIGDISRFQKQESLGKMAGFKWKRNQSGKKESEDKAAVLSGNKKLRYYLVEAANRVRIHDPVFEAYYRKKYAESKTHAHKRALILTARKLVRVIFYLLKENKLYKPDVGIS

SEQ ID NO: 458341 - protein, 340 aa, unidentified
MTITTVGIDLAKNVFAVHCVDQNGKTVLVKSRVTRAALPGLIAGLPPCVIGMEACSGAHYWARLFRQYGHEPRLMAAKFVSPYRIAGKSGKNDAADAQAICEAVRRPHMRFVPVKDESQQAMQCLHRTRQGFIEEKTATYNRLRGLISEFGVIAPQSTDALRHIVFEQKNSLPLQVQQCVDDLLEHVARIEDNIAEYDRILSRMAKTDHRSQRLMELKGVGPTTACALVASIGNAHDFKNGRQLAAWLGLTPSQYSSGGKSKLGRITKAGDSYLRTLLVQGARSVLIGAEKRTDLFSRWVCSLVERRGYWRAVVAIAAKNARLCWASLHYGDDFRLYSAS

SEQ ID NO: 458342 - protein, 377 aa, unidentified
MSKIRFLGLDVHADSITVAIADPGREVSLYGRIPNQLDAVRRMVKKLSTGFELRACYEAGPTGYVLFWQLSLLGVKCEVIAPSLVPTKAGDKVKTDRRDALKLAKNYRNGELTPVWVPDAAHEALRDLVRTREDARADQQRARQRLGKFLLRHGKRPEVRMANWSAKHLEWVKRKVHFDQPALEATLQDYVREVEHASERISRLEKDIIEAVQNTAPVIRAVVEALQALRGVALITAASIVAELGMLSRFDSPRQLMGYSGLVPSEDSSGNRIKRGAITKTGNAHLRRVIVEAAWAYQFRPWVGGYLAKRQKGLDAEVIEIAWKAQHRLHSRYKKLLAVGKNKPQIVTAVDREMLGFIWAIAVKVEAKYRVPQKAAA

SEQ ID NO: 458343 - protein, 338 aa, unidentified
METYAGIDLHSSNNYIGVIDSENRRLYTKRHENRLDHILKALNPFKETMVGVVVESTYNWYWVVDGLQENGYAVHLANPAAIQQYDGLKYTDDQWDSVWLANMLRLNILPEGFIYPKEDRATRDLLRRRLLFVGQRTAHILSLQSMITRNRGLNYPGSSVKKFRDRFIDKLFNSPHLRFTAKKNMATIRFLEETIKDIEAEVKSYAKLKKEFEMLLTIPGIGDILGMTIMMEVGDIKRFEQVGNYSSYCRCVESKRLSNGKVKGKNNKKNGNRYLSWAYIEAANLSRIFCPFAMKFYQRKLARSNNVLATKALANKLSKASYFIMRDQVPYEPEKLFK

SEQ ID NO: 458344 - protein, 425 aa, unidentified
MSEKIVVGIDVSKAFSDICILSPNNDIIKRLKISNDINGMKSLIYVLEKVEDEYEDRAIIIMEATAHYHQILANFFRKHNYEVIVINPIQSGALKNINIRKIKSDKTDAYNIALLYRIKNYNETITHSDTVNSIKKLCRQHKELTDEIVEHINRLIAFLDISFPDFKKVFTDLQGKTPLSLLEKYPTIQEVLSPKNKQDIIQLIKENSHKSSSYAEVKYEKLLKAAEKSIEVCIVSLSSAVLIQTTVRVIFSLQEALKAIDNEIKRLSLLDEKFHKEIVLLQSIPGVGEYTACVVLSELGDISNFSKPKELVAFFGLDPGVTQSGTYNRKNNKISKRGSPHVRSILHMLAKSNVYPNRNREYLNPVMRAYFEKKIAEKPYKVVMCAIMRKMVQIIFAVLRNQKSFELRTPEEHQKLIREKSKLVA

SEQ ID NO: 458345 - protein, 382 aa, unidentified
MNYFLGIDIAKTNHVASLIDKEGNIVIRTIKFTNSNEGFKKLLTTIQDKLDDLSNIDVAMEATGHYWLALYFALVDNNFNVSVYNPYQIKSYRGAYNNRKQKNDIIDSIIIADFLRVFGSKESKLPEDDLMSLKQLTRFRSNIVDNISSLKVQVIGILDKVFPEYKGIFCDVFGSTSKQLLLKYPTPEEILKTSSTKLTNLLSKHSKGRFNKENVKQLKQIAKNSFGIKFTTNACSFEIKQLINQIIFLEEQIDEVEIQIEEIYNKLDSHLLSVPGVGKTLAPVILAEIGDINNFDKPSKLIAFAGIDPSENQSGNKLSSNDKTSKRGSPYLRHAIYTASLVAISNEPELRAYYDKKKSEGKHHFVALAGIRVVCNVLYTTN

SEQ ID NO: 458346 - protein, 394 aa, unidentified
MKLIGIDIGKNKHFFCVMDQQTGEIISQPVSFSNDKEGFDFLVQKIKSYPKDSILIGMEDTGHYHFALLKYLLDLQYTVALINPKTTDFNRKMQGGITKNDKLDTINICDVLDTPERKKQYRITKVNSFDLYEQKQLTRHHHNLKEEENVYKNRLQKCIDIVFPEFNKLFNSKYGIVYMNILKMFGSAENIANTDIRTIRKCFEIEGRGNRISLTPERLKECARSSIGISSSAEVIQIKHLTAQIELIEEQLTEIDKKIEEFSIQNNSPILSIPGISHFSGTSILAELGDISNYSKPSQIIKFAGVAPLHYESSQFNAQHTAITKKGSKYLRKALYQIILPVIRHNPVFNKYYQLKISQGKGHRCAQGHCVRKLLRIIYHLLKTNQQFDPQLLR

SEQ ID NO: 458347 - protein, 347 aa, unidentified
MRLYTQEHRHYCGIDLHARFMYICILSRSGEPVLHKNMIAAPEPFLKAIAPFRDDLVVAVECIFTWYWLADLCAREDIPFVLGHALYMKAIHGGKAKNDKIDSRKIAGLLRSGMIPQAYVYPAKMRATRDLCRRRCHFVRKRAELIGHIRNTISQYNLPVTELKFERLDGFDEILDLFSDPDVRQNIQTDLMLIRHFSKEIKRLDKHILSQAKNHDPDAYHILRTFYGIGPILALVILYEIHDIRRFPRVQEFASYSRLVKCAKESAGKRMGYSGKKIGNAHLKWAFSETAVFFLRRNPAGQKYKARLVSKYGKAKALSILAHKIGRTVYYMLQRRTAFNMEKFLSA

SEQ ID NO: 458348 - protein, 348 aa, unidentified
MRFYHGQHQYYCGVDLHARTLYLCVLDAQGTIVLHEDLTCERQAFLQAVAPFRSDLVVCAECIFCWYWLADLCAEHDITFILAHALYLKAIHGAKAKNDRVDSHKLAVLLRGGVIPQAYVYTPAMRPTRDLLRRRLYFARKRAELLAHIQNTFHQYNLPRPANGRMISASHRQSIAACFNDSAVRRNVVADLQLCEFYDPLIKDLEKTIEQLARYHDPHSLLLLRTIPGIGKILGLTILYEIQTIERFPRVQDFSSYSRLVKAEKSSAGKRLGTTGAKIGSAHLKWAFSEAAVCFLHRNPQGLQYIKRLRRRYGKGKSLSILAAKLGRATYFMLKQQRAFDMNRFFRD

SEQ ID NO: 458349 - protein, 352 aa, unidentified
MQCIAFDSHKHYTWALVQDEKGKVLREQRIDHARGALRGFLEEFEAGSPVAVETIGNWYWITDEIEAAGMVPQLVNARRAKLMSGSINKTDRLDARGLNRLQRSGTLPTVWIPPRELRDARELPRTRMVLVRQRTRLKNRIQANLAKYGLKTQGVSDLFGVRGRRILAKCLDDLPAETRYATHALIEEFDHLQVRIKDLEGRVAELFGEINALDLIRTLPGIAVILGVVILTEVGDVERFPSASHLASYAGKTPRVHASGGHIRHGHTRPDVNHYLKWAYAEAANVVMMHRRRHPRRHVSRLYERVKRRRGHQKAVGAVGRHLAEATYWMLKKGEPYKDPGLKQEVESKRAA

SEQ ID NO: 458350 - protein, 389 aa, unidentified
MIIGIDIAKRNHEATAIDDAGQILGRITFANSNAGAAKLLDFIARLKSEDEKVVFGMEATGHYWLAIYSYLVERDFDVCVINPIQSDSLRNLFIRKTKNDQRDSFIIAEIIRFGRYTETQLSDENTLALRQLCRYRTSLVDQTTELKLQAIAVLDQIFPEYETLFANIFGVSSKALLMEYTTPDDMLSVSAEKLAQVIDKTSRGRFKLEKAKEIQEKARNSFGITIAIDAFAFQLRQLIEQIKFIEEHIKEIEDHIKTYFDTLDSCLPTIPGIGMITAAIIESEIGDINRFAGPEKLVAFVGIDPSVKQSGDFIGSQNRMSKRGSPHLRRAIWQAAVRAVQVDPVLKAFFEKKRSEGKAYGTAIGAVARKLTYIIFVIMRDKKTYVPMA

SEQ ID NO: 458351 - protein, 318 aa, unidentified
MKSEIVHIGVDVSKEKLDVYNPITGEVSELPNDAAGFREVRAMARRGKAVVCCEPTGGCELDMVLFLQRFGVPVAYCDGYRVRHYALSTGEFSKNDRVDARMIARFADCTPVRTLAKKDLAHLELRRRWKLYQTLVDIHVVLAQKASSEQVAEMRSMLRAESARMERKAAKALRSCVELAKGDERMSYLLGRFVEIDGVAEKTAIAVIAGVPEIGSIGDAALSKLVGLVPMDNQSGANDHAKKIRGGRKDVRRALYLATLPAVQHNHILAAYYKEVKKRIPSKRAAKWAFVPVMRKLIHLMNRLARDPEFRLQKKQSA

SEQ ID NO: 458352 - protein, 323 aa, unidentified
MNAPIYCGIDVAKRNFVIGFSHQKKTKTETNNAKGIQHTLDYLSQFNVALITLEATGGLEIPVAKALARAGYRVFIANPLKASEFAKSQTRAKTDAKDAVNLAFYGLTCELKGEVEHQLYVPLSEQEEQLEALVVRRRQLVDMRVAELNRLQQSHETQLDNIQQHIEILDKLIAELDKDIDDQSKHFSDKADLISDIKGVGKNCVAVMMSSLPELGKLSSKRIASLVGVIPHPQESGQWKGKSFCYGGRAIVRNALYMAALSAIRFEPVFKAFYTRLVAKGKAKKVAIMACMRKLLTIMNALVRRNEKWDATRYLSTESVGQN

SEQ ID NO: 458353 - protein, 321 aa, unidentified
METWVGIDISKDTFDAAWIMDGKKNHLKLENSSNGFKRLLNEVPAESRFAMEATGEYHLNCARYLSSRGNPVAVLNPFAVKMHMQSDLRRCKNDRADAYSIAKFAAEKNTDCWTCPTDDEIRLKHLDAVIDNLQKQIRQSKNILHSLTQVNLRDDQAVSIIKKTISSLEALMEKARNRQLEMVETGKKEEIALACSIPGIGLETSLKFFTHVGNIERFGSSRSLISWIGLTPRNAQSGTSIHKNGSISRMGCTRLRGQFYMCAVVAIKYNPDCRAFYDRLKESGKPSKVALIAVANKLLRQLYAVLTKKEAYVPNFCTKAS

SEQ ID NO: 458354 - protein, 315 aa, unidentified
MNDNGREVFVGVDVCKATLDVRIEPHRELAQFGNDAQGIEALCARLSPIKPTLIVMEATGGLEVAVAVELGARGLPVVVVNPRQVRDFAKATGQLAKTARLDAAVLCAFARAIRPAVRAPKDDLIRELDDRVTRRRQLVEMRVQEALRAHTASKTQLKSVKAHIAWLDKRIAEIESDLGKRLRDSELWRAKEDILLTIPGVGEITSRSMLSGCPELGTLNRHEIAKLIGVAPLNSDSGTMRGQRHIWGGRAAVRSVLYMATISAMRCNAKIKAFAIRLKAAGKPPKVVIVACMRKLLTIMNTMIKNATPWTPTSG

SEQ ID NO: 458355 - protein, 406 aa, unidentified
MKQIVSVGIDVSKGKSTVCAMIHPNTIIKESFEVLHTVEEMSMLADYIGSLDGEIRIVMESTGHYHLPVAQFLYQKGFFVCVENAYIIRQFSRIMLHGAKTDPPDAKKLAKYGLAYWSELKPYKFHPSCYTELSLLSKQYQTYIKLLIAAKQNVIHLMDEMLPGFKEALDTASSVQFSKVKYVDFAKEFYHVDMIKSMGKEIFRENYKQWCKEKGYRFQSEKADELFHLAEDGIPTLPTEFPSTRLCMEVATEQVSQLGYALEQILSQMQNLAKTLPEYQTIRQMGGMGEKLCVRFIADIGDVRRFHNGKALVAYAGIDAPPYQSGQYTGTKRRISKRGNSALRKNGYEVMKSLKSHPPKTDTRVYDFIIKKENEGKSKKQAKIAGLNKFLQIYYARVMEIYKNIV

SEQ ID NO: 458356 - protein, 409 aa, unidentified
MERLLERCAGLDVHKRTVAACVRVPGPGGKRVHHVHTFGTTAADLLALGDWLATHEVTHVAMETTGVYWKPVYAVLEERFTCVLVNAAHVKQVPGRKTDVADCAWIAQLVEHGLVRGSFVPPRPIRDLRDLTRYRTTLTHERVRHANRLHKVLEDAGLKLATVASDILGVSGRAMLGALVAGTTDPAVLAELARGRLRTKLPALRAALAGRFRGHHAFLVSQMLAHLDYLEEAIATVTTQIEEVLRPFAAVVERLDTIPGISRRVAEVVVAEIGTDMTAFPSDRHLASWAALCPGHHESAGRQKSGRTRKGNRWLRAALVQAALGAIGTRDCALAARYRRLVRHTGHNKAVVAVAHALLVTIYHVVARETAYTEQGAAYFEARHAQRVTQRAVRALERQGYRVVLERAA

SEQ ID NO: 458357 - protein, 343 aa, unidentified
MDITTIGIDLAKSVYQLHGVDAVGNVVLEKRVRRAAFLGVLEKLPPCLIGMEACATSHYWAREIRALGHDVRLIPPTYVKPYVLRQKNDAADAAAICEAVGRPHMRTVPIKSEEQQGVLVLHRARDLLMRQRTMILNAIRAHLAEFGIVAAQGPRKVTELVARLRNGEDIDVPPIARQSLLALAAQLECLAHEVHGLERELMVWHRTNASSQRLETIPGVGIITATALAASVPDPGVFKSGRQFAAFLGLVPRQNSSGGKNRLGRISKMGNGYLRKLMVVGATSVIRRAKNNDSSTGPWLRALLERKPARVVTVAVANKTARTAWAMMSRGEVYRRSTALEAV

SEQ ID NO: 458358 - protein, 354 aa, unidentified
MSQTPIAVTAVVGIDIGKNSFHIVGHDERGAIVLRQKWSRGQVEARFANLPPCLVGMEACVGAHHLSRKLNSLGHDARLMPAKYVRPYSKGQKNDFRDAEAIAEAVQRPTMKFVATKTADQLDLQALHRVRERLVSQRTGIINQIRAFLLERGIAVRQGQRFLRAELPRILATPADVLSPRMARVIEGLAGDWRRLDERIEGLSSEIETIARQDSGCERLMSVPGIGPIISSAMVAAIGAGDAFSKGRDFAAWLGLVPRQMSTGDRTILGRISKRGNRYLRVLFVQAAWVVLIKPKSWGRHGLKPWIEGAMKRLHRNVLAIALANKLARIAWSVLARGRDFEVRKIDEVANLSA

SEQ ID NO: 458359 - protein, 320 aa, unidentified
MDAVLGIDIAKAKFDVALLRADGKIRRKSCLNTAAGFRELSAWLARQGTPTVHASLEATGTYGDALAHYLYDAGHVVSVLNPAVTHAYAASHLTRAKTDRIDADLIARYTATQQPAAWTPAPREVRELQALIRRLGALQEMKTQETNRLEAGPGAEAVRTSLETIIATLTAEIKAVQRQIRDHMHQHPGLRDQRDLLTSIPGIGEATAAVLLAELFDKRYSSARQAAAFAGVVPRICESGTLKARGRLVKIGPGRLRKALYFPALAALRFNPTLRALETRLRAAGKPTMVIVGAAMRKLIHLAFGVLKSGRAYDASYAQP

SEQ ID NO: 458360 - protein, 409 aa, unidentified
MLLVGDDWAEAHHDIEIEDESGRRLARGRLPEGLAGISRFHELVADHLDPDSEPSEVLVGIETDRGPWVQALVAAGYSVYAINPFQVSRYRDRHAASGAKSDPGDAHVLAEIVRLDRAHHRPIAGDSDIAEHVKAAARAHQSMIWSRQRQVNTLRSTLREFYPAALIAFGDLASADALAVLAAAPSPEQGRRLTQRRVETLLAQAGRKRNITAKATEIRAALNTDQLAARPGVVGAYAASVSALVAVITVMVTQTEVLAGQVEQGFGQHPDVEIYRSQPGLGTILGARVLAEFGDNPDRYADAKGRKNYSGMSPITKASGTKRVVLARHARNRRLADALYQQAFCALSSSPGARAFYDRQRDRGATHHQALRALGNRLVGILHGCLRHHTIYNEDTAWPTLTRNEQQAA

SEQ ID NO: 458361 - protein, 323 aa, unidentified
MQGKVSFQEDAMPVVYAGVDVSKEWLDVHLHPLGESRRFSNDKTGIRQLKRLLAGHQPKSIVMEATGKFHRPAHRSLWLDGFAVAVVDPLRARMFARACGYLAKTDRLDARFLALPAESLRPPADTPPSPHVEALQELVNARSAAKCDITALQNRSKTATTALLRGELNRLVRRLEQHVERLDKEIERRVGEDPQLYRKAEILTSIPGIGRVTAPALMAGMGELGTCSGKQAAMLAGLAPIANDSGARTGRRSIRAGRPAPRRALYMAALSACRYNPALARFADTLKAAGKPAKVILVAVMRKLLVLANCLLSQDRIWTPTPP

SEQ ID NO: 458362 - protein, 358 aa, unidentified
MNLNTATKAGQIIGTMNGLQVIGLDIAKNVFQLHSVDMSTGEIINIQIKRAKVQEYFVNKPPCLIAIEACGGAHHWAREFTAMGHSVRLLHAKIVRPFVAGNKTDATDARAIWLTVQQPGVKFVGIKSTEQQATLTLHRQREMMMKMCIMQTNALRGLLYEFGATFAQGRQALFKDVEKVLEGLADQLPQMVRDSLREQVARIKSVIEDIKAIEKRLKVQLRQDRQMQRIFQIPGVGLLTATAAIATMGEASAFKSGREFCAWLGLVPSQTGTGGRVRLGNISKRGDTYLRTLIIHGARSVLAHTKEPGPWLGALKGRRPASVVIVAQAAKMARAIWAVTAKQEDYQRGYCSVKPKAA

SEQ ID NO: 458363 - protein, 459 aa, unidentified
MCKPVEIDSEEDGPVIARAAAIDVAKASGMVCTRVPHASKPGRKVTKVWEVDAATGAIVELAGYLAALGIERVVLEATGDYWRCWYYLLSAAGLECWLVNARDVKNAPGRPKTDKLDAVWLCKLNEKNMVRRSFVPAEPMRQVRGWTRDRFDLVADRTRVRQRVEKLLEDALLKMSVVITDIFGVSGRAIMAALIGGQRDPAKLVALAVPRIIKNKRAALTQALTGRFTGHHAARLEMLLAQHDQLTALIDQATAQIDQAITALPPAPASDSTSGPGTPAGDPSGPGTEAASDAYLSAVQRLCEIPGIGPEIARSIIGEIGLDVTGVFGTAQRLCSWAKVSPRTVQSGATKRSGKTGKGNFYLKSGLGQAATGAAKTGTFLGERYRRLVKRMPKAKAKTAIARSILVIVFELLADPAKRFQDLGPGHYAKHMDTGRRTTKLTDELRALGWSVTLTPLAA

SEQ ID NO: 458364 - protein, 364 aa, unidentified
MESVRFVGLDVHADSIAIAVAEPGRGEPSTVATIPNDTPMLLKRLRKLGHVRCCYEAGPTGFGLYRDLTAAGIECIVVAPSLVPAKPGDRVKTDRRDAVRLARFLRSGDLTEVRVPDAATEAMRDLERARDAAKRAERTARHQLGKFLLRHGRRFPGKSAWTQKHLDWIRTQHFEHEAQQRVLEDYLRTVEDLGERVERHTKSIVELVESWSLKPLVKALQALRGVNIIAAVVIAAELGDLTRFETAPKLMGYLGLVPSENSSGETRQQGPITRAGNAYARRILVEAAWAYRFPARKSAAIRARSQGVAEDVLRIAWRAQERLCTRYRRLMARGKNKNRIVIAIARELAGFIWDIGRQPKLLAA

SEQ ID NO: 458365 - protein, 412 aa, unidentified
MSSRIAGIDVHKRVLMVAVAEVSVSLEDMEFQCRRFGTTRKELEHLGAWLEQQGVREVVMESTAQYWRPVWLELEGRFQQYLAQAWSNRAPHGRKTDFKDAQRLVRRHVSGELTWSFVPPAQQRQVRTLTRRRVQLVHDRVRLQNQLEALLEEMRIKLSSLVTDLLGASGRRILTALAEGISDPETLAELGDARLKCTREQWQDAFPGPIPQVSRKLLALWLEQLALLDRQIEELFQLAAAAMQDWQDVLGRLVEVPGIRVLAAQQIVAEAGPDAAAFPSAAQFVSWFGACPGRNESAGENHSGRCPKGNRYLRRTLCPAAQAAVQTKNSHFQAVFRRLLPRLGYSKAIWAVARHMGVVIWHILHNQARYEERGQLSTPQAIKRRFQYLAKQLREIGYTVEIKPPVATPPPA

SEQ ID NO: 458366 - protein, 399 aa, unidentified
MMTPDDIDVWVGLDVGKSAHHAHALDHDGNTLYDKPLKQDEKAIRTMLGKLSKHGRVLLVVDQPNTIGSLPLTVARNMGIAVAYLPGTAMRRTAQLLPGDAKTDRRDAHVIAWAALKLPETLRDAGPDDETLAALKLLAGHDEDLAHESTRHVNRLRSLLQTHPAFERALKGERITRDATLALLERYGGPMGVKRAGIEDVKDWAKSNGLRAGRIIDDMFKAIGEQTVTVPGTLMAETIIPSIAHDIKTIRGRRREVDRQVEKLLEDHPLLTVLTSMPGIGVRTASNILLGIGGDIANFKSSAHLAAYAGISPVTGQSGTSIKGERPSRRGNKRLKNALWQTAFVASTKHPPSVAYYKRKREQGKHHNAAIICLARRRCDVIYSMLKNGTLYQEPALVA

SEQ ID NO: 458367 - protein, 407 aa, unidentified
MENDNRIGQKNLYLGIDIGKDSHYVSQMDGAGKMLIKGMKVENNRQSFEGLDRLLTREKGRLQIGFEPTGHYWKPLYGFLKGRGYHLKMVNSYHTKLHKEVIDNSRRKTDSKDSVVISDLLRIGRSFKSLEVAGVYLDLRKVTVAREKMVKELIRAKIRLITVLDEYLPEYEKCFCDIAGMTSLGLLEKYGLNGLRESEETPLVEDILKLSRKKIGSAKAGEIWRLFQSSIGNSDGLAGAEIEIKLWLTQIKMWQGQIKEINRMLKGLLAKTEEARWLLSIKGVGSITASIILGQTGSFKNYSNYKKIEKLAGLDLVENSSGKHIGQKAMSKRGRDLLRYGLYRVGIVAIAKNAEIKALYEEKLRQGKKKMVALTSVIIKLLRIMFSLVKNRQEYDGRKLLLAGATT

SEQ ID NO: 458368 - protein, 411 aa, unidentified
MKSLYRRIAGLDVHRMLYVLTVLIELEDGTHVKHQRSFGGFKRDRRALVAWLLELGVEHVVMESTGIYWKSIYAALEQAGIPAHVINARHARNVPGRKTDISDSEWLAQLGRFGLVKPSFIPPQDLRELRLVARYREKLAQTLGGEKNRLHKILDDAGIKLGAVVADIGGVSAQAMIEGLIAGTPVEQLPDLARGVMRSKRESLEAALDGDLSPRHRLVLGHIQTHIRHLEAELASLDRTLIDAMAPYATYWHLLQTLPGIDQIAAALILVEIGTDLSVFGDVAHFASWAALCPGNHESAGKRKTGKTRKGNHALRYLLCEAANAARRTNSALRDKYQSLVGRKGHKKAIIAVAHQMIRTIFILFTRRVPYRDPGIDYQALVVEKNAPRWIQALKKYGYWPTSSAAPAPAQ

SEQ ID NO: 458369 - protein, 393 aa, unidentified
MICVGIDVAKDKHDCFILSSEGEVLADVFTIQNNAEGFDMLLQTIRRCARPEDKIKVGLEATGHYSYNILGFLLDKGLDTYVINPLHTNLYRKSLSLRKTKTDRVDARTIAAMLMSDVDLKSYTDTAYHNEELKSLTRYRFDKVRERAKLKQSVSRLVTILFPELEKLVPSLHLASVYALLIEFPGAKQVAGAHLTHLKATLSDASKGRYGRDMAVTLRDAARCSVGSVMPAKSLELQHTIRLIRELDAEIEDIETAIQSMMDEMQSPITTIPGIGVRMGAMILAEIGDFSRFNSPDKILAYAGMSPSTYQSGQLSLSGPYSHMEKRGSRYLRYALYNATKYVCLWDPAFAAYLAKKRGEGKHYNVALSHAAKKLVRLICALEKSQQSYRNAA

SEQ ID NO: 458370 - protein, 355 aa, unidentified
MNSVRYVGLDVHRDTISVAVLDESGRLIMQSVLATKASAILDFIHGMRSIVHATFEEGTHAAWLYDLLASKVAKLVVCNPRKNALLKLGSKSDAIDALKLAELLRAGMLSPVYHGERSALEVQQLARSYTMLTEDTTRVMNRLKAVFRGQAVSCAGKKLYAKRHRDGYLAELGTGGLRRRAECLYQEFDALQQLRHVTKRELIVECRKHAATKWLQSVPFLGPVRAAVLIGRVQTPHRFRTKRQFWAYCGLALETRDSGEYRMVNGQVERRKKPVLIRGLNWNHNHAMKGVFKGAATSASICDGVFREFYLGLLNKGMLPEMARLTLARKIAAITLKIWKKGEAFDSEKMKIQAA

SEQ ID NO: 458371 - protein, 379 aa, unidentified
MEIITRNEKILYIGIDVHKDTYSLCSFDFHKNELSDEMTIKATTKAVIKYLEAIKKKHREEILFACGYEAGPTGYGLCRGLQKAGYGCVVMAPTTMSNPDGKRRVKTDRIDARAIARILAYKSYSQVHLPSEEMEALKEYTRARDAKKRMFKKAKQELLSFLLRNGKTYSESGNYWTEKFFKWVKTVQFSEKWMQEAFNEYLAEVYSLKAKIELMDMKIREIAELEIIKDKVDKLVCFSGIDVTTAVETAVEIQDFTRFATAAQFVSYLGLCPGEDSSGKTKNMLSLTKAGNCRVRALFCESAKAIKRTNPYGQKSKRILERQKNASPEIVAYADKATKRIRTKMRHLEERGKNYNVSSAAGARELACFVWGMMNGKIA

SEQ ID NO: 458372 - protein, 406 aa, unidentified
METVCERCCGLDVHKKSVTACAITPEGKEVKTYGTVTDELVSLVSWLREKGCTHVAMESTGVFWKPIYNLLELAEIETLVVNAQHMKAVPGRKTDVKDAEWIADLLRHGLLKGSYIPDREQRELRELVRYRRSLIDERTRESNRIQKVLEGANIKLSSVASDVLGKSGRAMIEAVIADVDDPKALAGLAKGALRSKRDRLEPALKGLIGAHQRMLLSAQLEHIDFLDCQIAELDAEIARRTRPFEECLELLDTIPGVGRRGAEEIVAWTGVDMSRFPDAGHLSSWAGVSSGNNESAGKRRSGRTRKGNPALRATVVSAARAAARTKNTYLSAQYHRIAARRGANRAAVAVAHTILVIAYHILKRREPYVDLGPDYFSKRKEGAIARRAMATLETLGYKVQIEKVAD

SEQ ID NO: 458373 - protein, 353 aa, unidentified
MRIVCALDVHRRQITYAIVDVRSGGLSRGRITPATRESVREWLARFDSLHDVHFALEGTTGWRFVAEEVARAGHRAHLADPAETAVKRGRKRRAKTDRADCDLLLRLLSARELPESWIPPVQILELRTRVRLRKTLVDERTAWQQRLQAQLFHQGVPPGLRPRTRAGREALAKVELSPAGRELVSLALRMIDRIERELEPLDRALSLYARRQPGCRELIARLYGVGPVTATAIVAELGDARRFGCSDDAVRHCGLDVTVHQSDRKRAPGHLSHEGPELLRWALFEAAQQACRSASPDYEYYRQVAQRIDHNRACLSVARKLCRRAYHILRELGDEALAPIETPDREEVIAAAA

SEQ ID NO: 458374 - protein, 344 aa, unidentified
MSKHSVRGGDFAGLMQRFAQLQEKARRRTGQSFRIIVVQEAGLDGFWIHRALQNEGIESHVVDAASIATSRRRRRAKTDKIDGETLVRVLLAYKRGEPRVCAMVKAPTPGEEDRRHLCRERKALTAERVRHVNRIKGLLFSQGISGYQPLRRDRRQRLEELQTGDGRAFPQHLKALINRELDRLELLLKQIKTVEAARDALLAVGQTAKPAPAALLLDIRGIGPEFAAILWSEGLFRHFENRRQIAAYAGLAPTPWQSGAVDREQGVSKAGNPRLRTTLIQLAWLWLRNQPRSALSVWFHERVSRNGGRLRKTTIVALARKLLVALWKYVTAGVVIEGVTMKVA

SEQ ID NO: 458375 - protein, 323 aa, unidentified
MMAEPAEIQSVLGLDVSRNTVTLCDGRTRHTVTIANDADALRTALLPYQGTATLAVCEATGGHEDTLLGVLLELAIPAHRADPAKVKAYIKSFGKRAKNDPIDARWLSRYGRDRAATLPRWQPVDLTQQKLELLVARRLDLVAMRVQEQNRLKAPRSRLIADNIRDHLAELERHIEALNAEIGALIGESRDLALRAEQLRSVPGVGPVLAPLLLAVIPELGTLNRRQVASLAGVAPHPKDSGKASWHRSTTGGRRQIRPALFIAALAACRGDNPLAAAYKALLKAAKPKRVALTAIMRKIITIANARVRDAVRHQNEIMQINA

SEQ ID NO: 458376 - protein, 349 aa, unidentified
MVADELDYVVGVDTHRDEHTLALVETASGAVLAQRTVASNGRGYAQALRFAQQQADAARLWAVEGAGHYGAGLARYLSERGETVLEVGRSPRGERRLRGKDDQLDAVRAARAALGSEPLPRPRSGERREALRLLLLARRSAVDVRREALVQLRSVIVTAPDRLREELRGLPVQRLLERCSRLRRSTTATADEVAVRLVLRSLARRVEAATLEADELEGELLGHVRVLAPQLLDEPGVGPIVAAQLLVTWSHRGRVRSEAAFARLAGVAPLPASSGQTTRHRLSRGGDRQLNRALHTVVLHRRQHDPATQEYIARRIAEGKSRRDATRLLKRYLARRLYRLLQSEEPLLA

SEQ ID NO: 458377 - protein, 324 aa, unidentified
METISYIGIDVAKSKFDVCVFNGDYSKSLYKSFSNDINGYFELFSYISSINDVKNIRIGFEATSTYMVGLQKYFDSLKIKYVLINPKKIHHYIKYKHKNSKTDKQDSFFIAEYVSTLSDDSFVSSHSEMKQLFKSYHSFVRFLTKTETHLKALGDSVKASQFSSDKMKNELESMLSQTRKLRNHAIADFANSVKSVMPEYDLLKSDLIGVSDMTLLAVLPLIYDDSEKYSIKQIQSYFGLNPVQFESGSSVSKHERVSKAGNSYARSMLYMSALSSITHNTELKMKYERLVSRGKPKKVALIAIASHVLRAIITRLNHYKSLNK

SEQ ID NO: 458378 - protein, 317 aa, unidentified
MEQMEFSRKIAGVDVGKSHLDVAVHGLEDLTRVSNTTAGHEELAGWLKARGVGRVGLEATGGYERAVRLALEAAGFEVVVHQPLEVRRFAQLKRRRAKNDRLDAQLIAAATAQVEAVRSAQDPRLVELAERMTAYEQITDQLVELKTFLEHVTLKDIGTALRTQVRALEALKLRLASQILTAIKAHPDLLARYRLLVSLPGVGPIVAATLLIRMPELGGMRRGQAASLIGVAPFDRDSGQWKGLRFISGGRARPRRMLYLAALVAKRFDPGLRAFGETLRARGKPPKVVTVAIMRKLIEAANLVLQRGQPWVKAMPA

SEQ ID NO: 458379 - protein, 314 aa, unidentified
MSTQSAFVGIDISKDRLDVFIRPQGTSFSEPYTDHGVRSLVERIVKIDPEMVLFEATGGYETQIVAALAHVKVPVVVINPRQVRDFAKATGRLAKTDHIDAQVLARFAEAIRPEPRLLADEDQKELAALMSRHCQLVEMIAMEKNRMHTTTPIVRGYLEAHISWLQTQLKNVDNHLDDFIGKSPVFQRKVEIVRSVPGVGPALSKALVSYLPELGTITRQEIAALVGVAPFNSDSGKRKGKRIIWGGRKHVRSILYMGALVATKYNPAIRAFYQRLLAAGKLKKVALTACMRKMLTILNAMVRTGTPWRENFNT

SEQ ID NO: 458380 - protein, 369 aa, unidentified
MKQNNTCPKSSKRKRIRKGSFTIGMDLGDKTSHYYVVDSEGEMVRESTVATTKKGMKQRFGSLPRCRMAIEVGTHSPWVSRLLSSLGHEVIVANARQVKLISASTRKSDRLDARTLARLARLDPELLRPIRHRSEKAQGDLMQIRVRAALVDTRTGLINTARGMAKSMGERLASCDADQMGVEKLAGLSSVVVEALRPLMESVEMLTQQIKARDQKLEQLARSEYPETELLRQVSGVGLLIALAFVLTLEDPNRFSKSRDVGCYLGFRPRRSESGQSRPQLGISKEGDVYLRKLLVQGAHCILSERSPDTDLKRWGRKLAGQGNKNAKKRALVAVARKLAVLLHHLWVSGEVYEPLLNSNRQEKLKAAA

SEQ ID NO: 458381 - protein, 416 aa, unidentified
MQVLYPRCCGLDVHKRSITACCLWFNHARQRQEETRQFGTQTTELRRLSAWLREHEVKHLVMEATGSYWRPVWNLLETEGFELTLANPQHMKAVPGRKTDTKDAQWSADLFQHGLIAPSFVPTQTMRHLRDLTRTKTKVIQDHTRVVNRIEAVLEDTNIKLSSVVSDIMGVSAQAMLQSLLNGERDTAKLAELAQGRMRSKVPQLKEALEGNLQPHHEFVLKRLFMQSRFLQQQQRALSHEIEHRLNEEMRQAIALWDTIPGVDENIAMTMVAEIGIRTEQFADGPHLASWTAMCPGNHESAGKRKSGKTRKGNRWLRGALTQAAWAASHTKGTYLSALFRRISARRGAKRAIVAVGHSILISAFYMWKNKQPYHEVGDSYQDRIKPEKTATRLLKRLAKLGYVVTLAEVPVPAAP

SEQ ID NO: 458382 - protein, 440 aa, unidentified
MSKLIQFEQIHAHGAGIDVGAKEIFVSIDGEQVVSFKTFTEDYHTCCRYLKENGITAVAMESTGVYWMSLYSILEDSGIRVCLVHPRETQQVKGRKSDVKDSQWIQKLFSAGLLRESIVAEGALKELRMLVRERLDLIEMGSTYINKMQKYLELMNIKLKNVISQIHGASGLRVIKAIIDGERDEEKLLRLCDIRIRRDKAEDVKKSLRGNYTPQYLLLLKENLRLWEEHQQSIATIEKEIEKLLNRMCADKLDIPVDSPAKPTRHHNPDIKDLHGKMVHLYGGINLTTIAGINDVTMLRLLGETGSDLSRFPTVKHFVSWLGLSAKNKQSGKMKKRVKSRSNNAGEIFRQSAQSLLNSKYNAIGSFIRRLKGRKGAPIAIKAGARKIAEAYYNAIMKGMDYVEQGVAKYMEQLKKRELYALDKIAKKYNYVIVENQSFT

SEQ ID NO: 458383 - protein, 311 aa, unidentified
MTVHNVVGIDVAKDKVDVCFLESGESLTVKEEEYGNLVERLVEYAPDLVVLEATGGYEKKLTIRFADAGLPFFVVNPTRVRAYAKALGILAKTDDIDAYVIARFGQDAKLEQRPRSSGQDDEMQCFLARRRQLVGMCVSERNRLKQSGIPAIRLDIKEHIAHLMKQLEQVDAKLDAAIRENPVWSEREELLSSVPGVGPQTTRVLLFELPELGELGRGQLASLVGVAPMNRDSGQFRGERHIFGGRSYVRCALYMACLTAIRVNPPIRVYYKRLRESGKKPKVAIVACMRKLLIVMNTMVKKKMKFNPNFS

SEQ ID NO: 458384 - protein, 331 aa, unidentified
MGNVTTVGIDLAKNVFSLHGVDANGAVVLRKTVSRARLMEAVAQQPACLIGLEACSGAHEWARRFQALGHTVKLMAPRFVAPYRKNGKNDGNDAEAICEAVSRPSMRFVPIKTLEQQAVLCLHRVRQGFIEERTATINRLRGLLAEFGFVLPQKAAEVRRRATESLDQLPLRAACAVRDLREHLRVLDERVKEYERSIEAHARDHEGAKLAQQRLGIGPMTASAIVASVGDVREFKNGRQFSAWLGLVPRQHSTGGKQRLGHITGRGDPYLRTLLVMGARSVLQRASSQSDPFSRWALAVRVRRGYHRACIAVAAKNARVVWAMLNQHACA

SEQ ID NO: 458385 - protein, 343 aa, unidentified
MDHFAGLDVSVKETSVCIVDDTGKIVREVKVASEPEALLAVLKNPAYHFKRIGLEAGPLSQWLFSALAEAELPVVCVETRHMQAVLKAQINKTDRNDARGIAQMMRVGLYRPVHVKTLRSQKLRMLLTHRKLLQSKAIAIENDLRGTLRNFGLKVGMVGTVKFEARIKELVENLPDLAVLVEPLLIVRRALREQIVVLHRRLLAIVRDDEVCRRLMTTPGVGPVVALTYRATVDVPARFRKSKAVGAVFGLTCSKYQSGEIDRSGRISRCGDEMMRVMLYEAAQSIMWSKKWSWLKAWAMQIARRRGMKKAIVALARRLAVIMHRIWVDGTEFRWTREQAATA

SEQ ID NO: 458386 - protein, 421 aa, unidentified
MLEETHDDEQLIERVAALDVGKAEVVCCVRVPGPGGRGRRQEVATYSTMTRSLTLLAERLLELGVTRVVMEATSDYWKPPFYLLEAHGLDPWLVNAKDVKHLPGRPKTDKLDAVWLCKVAERQMIRPSFVPPPPIRRLRDLTRYRIDLVGTCTAEKQRVEKLLEDAQIKLSVVASDIFGVSGRDMMAALVAGERDPKTLAALARRRLKAKIPQLEEAFTGHFTDHHAFLLAKMLSRVDAISADIADIDARIEELITPFAQAVARLDQIPGVGPTAAAVILAEIGADMTRFPTPGHLTSWARFAPGVKESAGKKKGAGGTGHGNPYLARILGEAAIGASRTNTFLGERYRRLARRRGKKKAMVAVGRSILTIVWHLLSNPTAEFCDLGTDFYDNRLGTERRKREHIRQLEALGYRVTLEPAA

SEQ ID NO: 458387 - protein, 342 aa, unidentified
MNIPVRIGMDTSKSVFQLHGVDENEVVVVRRQFRRAEMIRYFERLPPVLVAIESCGSSHHWGRLLQSFGHEVKLIPPQYVKAYVKRGKNDAADAEALCEAVTRPSMRFVPVKSKERQAACMLMTVRERLVSVKSQLSNAFRSYAAEFGIVGPAGRQNVAALIKRVLEDDSLPEMARDLFRLQADEYAAVQARLARIEAKLMKWHREDDISRRIATIPGVGPIGSSMLSMKAPPPETFRSGRDFAAWLGLTPKDHSTGGRQRLGGITKAGDSILRSTLIVGATALLRHVRKGRHKPTPWLASLLERKPPKLVAVALANKFARIAWRLMISGGVYNQPVATMPT

SEQ ID NO: 458388 - protein, 416 aa, unidentified
MDTMYERCCGLDIHKKTIEACFRSGKKKTHMSFGTTSAELRKLTMWLVENDCQSVAMESTGSYWKPIFNILELSGTDMKIIVVNARHMKNVPGRKTDVNDAEWIAELLQYGLLRPSFIPDREQRELRELSRYRKSLVEERAREINRLQKMLEGGNIKLTSVVSEVTGYSSRRLLDRLLRSDEPMTEDVISGLVHTSLAGKSKELETALDGLLSELQKELLIKVLDHIDDMSRRIADLDDFCRKQMKKYEDALDKLDEIPGIARRTAETILIETGLDMSRFPTAKHFARWAGLAPGNNESAGKRSSGRTTKGNPTLKSTLIQSAKVAARKKDSFFKARYQKIAARRGANRASVAVAHSMLIAIYHILKSGERFKDLGEDYYNQFNKEKKKKYYLKKLTKLGVNLKEATLSISIQAAT

SEQ ID NO: 458389 - protein, 311 aa, unidentified
MAAPRYLGLDVAKATVELASEPAGLTGQFATDAAGLRALVARCQAEPVTLIVLEATGGYEAPVAAALATAGLPVAIVNPRHVRAFAQALGRLAKTDRLDAQVLALFAAHIRPTPRPLPDEATQELEALLARRRQLLEMLHAERQRLPRARGREVRRNLRTHIRWLEQSVIDADAGLETLIQASPLWRVQDALLQSVPGVGPTLARTLLGLVPELGHLDRHQIAALVGVAPLARDSGTLRGRRTCWGGRPAVRTVLYMAALTAARYNPVLRTCYQRLRTAGKPAKVALTAVARKLVVLLNAMLRDQRPWRYA

SEQ ID NO: 458390 - protein, 414 aa, unidentified
MLKIVYRVCCGMDVHKSFVVACIASANEQGVTTYKSKRFSTFTGDLRRCAVWLSENNCRDVCMESTGKYWIPIYNILERTCNIVLAHPKYVKAIRGKKTDKRDAKWIADIFKHDLVAGSFIPPADIRQLRDLFRYRRKLTNFATGEKNRAQNCLTVSNFKLDDVFSDVFGKAASAITARILKNPSEKITDVSGFRTKRMKATDEEILAAVDGEMCAEQAEKLRIIRTHMDSLELCKLNLESLILSTAEKYLPQLNLVMTAPGIQSFAAIGIISEIGVDMSVFPTSKHLCSWAGLTPQNNESAGKKKTTRISRAGAYIKPLLVQCALCAVRAKQFPEVRNRYLALKKRRGHKKAIIAIARMLLTVIYNMLKKNEPYNPELYRKDDRPPAHREVSMEEAIFILQRQGYLVTAPPTT

SEQ ID NO: 458391 - protein, 349 aa, unidentified
MVADELDYVIGVDTHLDEHVLAIIAARSGAVVAQHSIQASARGYAAALRFAADEANGARVWAIEGTGSYGAGLARFLAGRKETVLEISRTPRAERRLRGKDDSLDATRTARAALASETLALPRSGERREALRLLLVARRSAVDVRREALGQLRGVIVTAPDKLREELRVLPTGRLLKRCSRLRRSSKVGADELATRLVLRSLARRIEAATLEAAELERELLGHLRALAPALLDEPGVGPIVAAQLIVAWSHPGRVRSEAAFARLAGVAPLPASSGKTTRHRLSRGGDRQLNRALHTVVLHRRQHDPATKDYISKRIAEGKSRRDATRLLKRYLARHLYRLLQTREPLLA

SEQ ID NO: 458392 - protein, 357 aa, unidentified
MDHFAGLDVSVKQTSICIVDDTGRIVREAKVTSEPEALLAVLKNLAFHFKRIGLEAGPLSQWLYSALAEAGLPVICVETRHMRAVLKAQINKTDRNDARGIAQMMRVGLYRPVHVKTLRSQKLRMLLTHRKLLQSKAIAIDNDLRGTLRNFGLKVGMVGTVRFEARIRELVENLADLAALIEPLLIVRRTLREQFCILHRRLLAIVRDDEVCRRLMTTPGVGPVVSLTYRATVDVPARFRKSKSVGAVFGLTCSKYQSGEVDWSGRISRCGDEMMRVMLYEAAQSMLRSKKWSWLKAWAMQIARRCGMKKSGSEHAALQEMVMAQGLGDADRQALRDEKGDRGAGAPVGRDHAPHVG

SEQ ID NO: 458393 - protein, 347 aa, unidentified
MRFYTKQHKFYCGIDLHAKKMYLCILDEAGQIRLHRNITTARDVFLGAIEPFREDMVVAVECMFTWYWIADLCTAEGIPFVLGHALYMKAIHGGKAKNDKIDSHKIAVLLKGGMIPMAYTYPATMRATRDLLRRRNHLMRKRAELYAHIQNTRSQYNLPDALGCIAKPQNRNGIVERFEDPSVQKMINADLAVIEAYDPIIAKMERDIISMANHHDPVAYALLKSIPGIGKILGLVILYEIETIKRFPSVQDFVSYSRLVKCSKESNGKKSGTSGKKIGNAHLKWAFSEAAVLFLKCNDPGKRYLDRLTSKHGKGKALSILAHKLGRAVYFMLKNKKPFDQDTFLGL

SEQ ID NO: 458394 - protein, 415 aa, unidentified
MEVFCGIDWAEDHHDIALAGRDGQLLARRRISDDAAGLAALLGLLAEHGDSAGDPVPVAIETPRGLLTACLRATGRQVHPINPMAVARYRDRHSIAGRKSDHGDAVVLANILRTDLHAHRPLPADSELAQAIAVLARAQQDAVRERTCAHNKLRSHLREYFPGFLGAFAEARGGIMRPEARAILAAAPAPAAAARLTLSQLRSLLRKAGRSRGTGAEATRLRDAFRAEQMRQPPLAGQAMGRQALALLRRLDAACASAGDLEQAVIASFDQHPDAGIITSFPGLGSLTGARVLAETGDDRSRFADAKGLKAYAGAAPITRASGKTLAVLHRRVNKPAPRRGRLHLGLRRPHRLTRRPRPLRPAQDRRRPARRRTTQPLRAPPRLPPPLPAHRPALRRDHRLPGTKPDNTQGGLDN

SEQ ID NO: 458395 - protein, 387 aa, unidentified
MPQLNDLSRSLVALDQDSTIIAVVELSQSSWLVAGVLPGIERQPQKKLEPSAERLLGLLHRWRDEAVRAGKKITRIALAFEAGRDGFWLARWLNARGVEAHVIHPSSVAVSREHRRAKTDRLDTELLKRGFLGWLRGERGHCSMARVPTIAEEDAKRPNRERECLVGERTRIVNRMKATLARLGVRNFKPTLRKAAERLATVHTPEGTPLPRNVLAELQRDMARLGFVVSQIREIEQARQKRLEQETETGPHAMVRQVARVIGIGIETADMLVHEVLSRPMRDRKAVARYAGLTGSPDESGARRREQGLARAGNARVRRGMIQLAWRFLRFQKESALAQWYRARTADSRLGTRKTMIVALARKLLIALWRFVTTGETLDGVILRPAG

SEQ ID NO: 458396 - protein, 454 aa, unidentified
MCLEDRPVLEPNAAGIDIGAREIFVAVPPGRDEHPVRACATFTEDLEQLADWLVACGVTTVAMESTGVYWIPLYDILESRNLKVCLVNARHMKNVPGRRTDWHECQWLQYLHSVGLLRGAFRPEADVTAVRTIMRHRTELVQMSSQHVLHMHKALTQMNLQIHHVIDDITGLTGLAIVDAILAGQRDPVELAKLRNWRIKADEETMRKSLVGNWRDEHLFTLRQSRELYRTYQQQMVKCDQQIEKLVGGFEPRVDPEEKPLPPDRKRYRGAKKRAKKNGQPDTGFNLRTEAYKLFGVDVTQIPGLETMALPLFGEVGRDMSKWPTADHFASWQGLCPDNDISGGRVLWKGTRKVRNRAGQMFRQAAYSLHHSLTPMGDYLRRMKTRLGPAAATTATAHKIAVIFYTIVKNQVEYDETIWATRDVKRQQRIEARLKRQANQLGYQLVRLEEKPAA

SEQ ID NO: 458397 - protein, 343 aa, unidentified
MDQYIGLDVSLKDTAISIREDGKRIWRGKGASDPKLLAQVIRKHAPHAKRVVFETGPLSTWFYHALMAEGIPAICIEARHAQKILHETLNKTDANDADGLAQMAEAGFYKAVRVKAFDSMLTRTLVAARNQLLSISTQLSNQIRGMMKTFGLIVSNGKGRVFDGKVRELLAGNDALAAIILPLLDAWRGIRKRAADLDRQLLAVARQSQPTKLLMTIPGIGAVTAVSYVAAIEDPENFKTSRSVGAWLGLTTRRYQSGEVDYDGHISRRGDSHLRGLLYEAATVLLTRTRPGNESRLRSWGLKLRERLGFKRTAVAVARKLAVIMHSMLRTGEVFNASAGAAA

SEQ ID NO: 458398 - protein, 366 aa, unidentified
MKKISTVQVFGNEILKEQKLTIGLDLGDRWSFYCVLHEAGKILLEQKVATTPEAMKQTFGKIPRSLIAMETGTHSPWVSRLLTELGHEVIVAHAQKVELITKSNRKDDRHDARTLARLARIDRELLGPVRHRSAKAQIHLTVIRARAELVSARTALVNAARGLVKSYGQRLPKRGTYQVSRELATGLSAELRDVLGPLLKEVESLNERIQEYDERMEKIAKEEYPEVSLLKQVKGVGTQISLTYVLTIEDPYRFPKSRAVGCFLGLRPGRRNSGESEPQKGISKEGDRYLRTMMVQGAHYILGPFGEDSDLRRWGLKLAERGGKNAKKRAVVAVARKLAVLLHRLWVSGEVYEPLRNSQKAMRAVA

SEQ ID NO: 458399 - protein, 404 aa, unidentified
MNKPNNEVSLLPQVDKAAGLDMHKDKIVCFISDKDGQDQHQEEFRTFTEDLFYIRDTLLRYKVTHCLMESTGVYWISLYAILTEAGINVTVANAQHIKQIPKRKTDRKDARWLCTLMLHGLVRNSFIPTSRQQSLRELCRNRLFYKQGQSKIKNRMIKILERGNIKIRSVASSISTQTTMTIIRLLASGNTDIEVLVNCCKGRLKSKKEEMRKALQGKLAGVDTHMLQMLVADLDHSQKQIETIEVRIEEITNEHYKEIAGCLLSISGIGLPSAQIIISEIGDDMSSFPTADHLTSWCGLAPGNNESAGKRKNTAVKKGNKYLRVAMIAVAWGAVRMKDSYWKALFGQLRKRMKTQKAIVAVARRLLKVIYKVIKQKEIYQEKGIAHFMDLQQKRYSFQRANVQ

SEQ ID NO: 458400 - protein, 370 aa, unidentified
MQATMRGGEVSMLYVGVDAHKQFCQAAVVEESGDVLGEYRFENSEEGITGLASRLDAFGKPVKVAVESTANLWIQVYDRLEASGFQVVLSNPAKTRVIAEARIKTDKVDAKILAQLLRADMLPLCYVPSVEERGRRQLIRERMSLVKARTEVKNRVQSLLHRCGFRCPYGDLFSKRGLEWLRGLNFNDVDVVVLKSGLALLDALDEQVAALESHVAASAVVDERVRLLMTMPGIDYFAASLLVSEICDIGRFRSDKALVCWAGLAQSLHQSGKVTQIGRITRQGNSCVRWVLVQCAQTARLHDERLRGFYEGYARRKGHGKAVVAVAHEMLRIVYFMLKRMEPYRGEDRRLTGVKVKRLERKANFSLHAP

SEQ ID NO: 458401 - protein, 385 aa, unidentified
MTFAATVPSIIPAHFDIFAGLDVDKKSMATTFIDHGTLFKSLRLPYSSTQLLNYVDKHFPGQRIAFAYEAGPTGFGLHDDLVAQNRTCLVVAPSMVATAPGNRVKTNRLDSKKLSVQLRGGELRGIHVPGRSYRELRHLVQLRDTQTRQLTATKCRIKALLLYEGIAFPETSERWNAQAIAGLRTLPCSSEVRFKLDHLIGTLYFHFNSAAVVQKRIRQFCQNDPELRQSISLLTSLPGVGWITAAHAVARLGDWRQIKNVRQIAGFLGLVSSEHSTGDKENRGAITRSGDSRLRNKLVQCAWVAINKDPELRAFYRSVFVRQPKKVAARKAIVAVARKLTIRMYVVLKEQRPYIIRPDSSIAPLTAEETVGPRERLDGAQNEQR

SEQ ID NO: 458402 - protein, 425 aa, unidentified
MTPDWFSLPKGSVVVAMDVMFERVAGLDIGKKSVTVCVRTPGVGGRRRSETRTFRTMTRSLVVMADWLVEQGVTLAAMESTSTYWKPVFYCLEERMECWLLNAGHMKAVPGRKTDVKDAEWIAQLLEHGLVRPSFVPPPPIRRLRLLTRYRTQLIGDRTRDAGRLEKMLEDASIKVSSVASSVTTVSARAMLAALIAGEADPAVLADLAKGKMRAKIPDLVEALTGHFDANHAQLASAMLGRLDRVEAALAGLDEVIDAATQPWAHQIELLQTIPGVGLKVAQVIIAETGGDMAQFPSAAHLAAWAGVAPAIHESAGRRSPAGARHGNKWLTSMLVEAAGSASRSKNTYLAAQQARLASRRGAKRAQVAVAHSILVSAYYMLDRDEPYRDLGPDWLQRRHEQAHTRRLVAQLERLGHTVVLDPVA

SEQ ID NO: 458403 - protein, 345 aa, unidentified
MEEFIGLDVSKEETSFCVVDKAGKVLSSGKTFSDPEALFCTLKEKTLCPGRIVLETGTLSNWLARGLRAHGLPVDIIDARQAHAVMKLQHNKTDANDARLLAEIARTGFCRPVSISSEEAQHKRILLKSRQHLIRLRRDTENTVRGLLCALGIRFPTGSGKLLKRVREALQDKPGLSIMIEPLLDTIENARQQTERLDIQVTQQAKHSQQVQLLMSIPGVGPLSALGFVATIDDATRFKKSRDVGAYLGLTSKRYQSGEMDYSGRISKKGDGMLRSFLFEAANSLLTCVRKAHPLKDWARRLRRRSSHKKACVALARKLAVIMHKMLITGETFRWPETGVGTTMA

SEQ ID NO: 458404 - protein, 347 aa, unidentified
MKYYTSTTKFNCGIDLHTKQMYICVMDREGNILVHKNIRGNDFAFFLKLVAPYVHDLTVVCECCYNWYWLADACMDADIEFVLAHALYLKHIHGGKNKNDKLDSEKLAHLLRTNLIPPSYVYPRERRPMRGLLRQRMSYVWERSTLLGHLQMNQQSEGIDPVPKGGHNRDVWEERVLEQYTDPLHALAVKCDMELIRSYDRRIEIIDQRLADLARRVHGRDYGLIKTVPGIGRILALTILFEVDRIDRFPTVKDFCSYSRLVKGSVASAGKVKGLCGGKMGNAYLRWAFGQAAVICKRNHPLLTPYAEKLVSKHGKFKGNAILANKLGRAVYFMLQKGTAFDAELMV

SEQ ID NO: 458405 - protein, 401 aa, unidentified
MTATHTTNSTVSHAPVLYLALDLGTRDWKLAFTVGLGQKPRLKTITARSTLSLVLEIKAAKRRFGLPEDAPVICCYEAGRDGFWLHRFLLDQGVQNQVVDSSSIEVNRRQRRAKSDRLDAVKLVQMLIRWHNGEHKVWSVVHAPTVAEEDARQLHREMIKLKAERTAQANSINGLLAGLGLCVIVDETLPTQLENLRQWDGAKLPPQLHQRLLRELQRWQLIDRQLRELDAQRMAKIRDDQTPHVEKVRRLLNLKGIGENGAWLLVYEFFAWRIIKNRRELGSLAGLTPTPYSSGESEREQGISKAGNRRVRWMMTELAWGWLRYQPQSELSQWYQRRFGRGNRRLRKVGIMALARKLLIALWKYLEGGEAPAGAEEVGWDNKPRFRAVKTRRRKELSPTG

SEQ ID NO: 458406 - protein, 335 aa, unidentified
MSKAVNYVGIDVGSKELVVALKPSAFDKVDINTFENNTSGHKKLLKLITKYKRHAKVCMEATGVYHFELALLLAKCKSVKVMVVNPKAMHHFATSMLQRAKTDRYDAQMILEYLMRMNFLEWKAPEKDAVSLQRTSRRIAQLKKTLSQEQARLSASEYQGVDAKVIRKSISGVISMLKKQINTLEQHCLTLISSNKKMSEHMKILVSFVGIADVSAIQIMAELVMMPDGLTADQWVACAGLDPRPLESGVSVDKPRRISKRGNKYIRAALYMPALVAIKHDQNIHAYYENLLSRGKKKMQAIIAVMRKLLMCIWGALHNKENWNGEKFYKIPNQG

SEQ ID NO: 458407 - protein, 368 aa, unidentified
MNEHITIVGLDVHKATVVAAILPPTATRPTQTVTIENCPKAIERLVRRVAGEGRLVLVQEAGPCGYQVQRQMTEMGKKCVVVAPGLTPVRPGDRVKTDRRDAEKLARLYRAGELTEVHVPSCAEEAARDLVRIREDALEDRLRARHRLNKFLLRQGRVYRETKAWGVAHRAWLRRQRFEWQPLQQTFEGNLRAVEEAEARLESLDQQVRDLAQSGPYRMAVHYLRSLKGLDTLGALTLAVETLDFGRFERAPAYMSLTGLVSSEHSSGGRERRGSITKAGNAHLRRILVEAAWSYRLKNTVSPALAERRRSCPPEVIQIARKAQDRLHRKFWRLVSRGKPSQVAAVAVARELAGFVWAIAQQVPAAAT

SEQ ID NO: 458408 - protein, 356 aa, unidentified
MIAMKYYTSTTEFNCGIDLHARQMYICVMDRSGKKLVHTNIRNNDFEYFLKLVAPYRHDLTVCAECMFGWYWLADACQAANIHFVLAHALYLKAIHGGKNKNDRIDSEKITHLLRTNLIPPGYVYPAAKRPLRALLRQRLLYVWNRSELLSRIQSHQLAHNRPTTRQTPYNREPWEKHLLAQEPDPVRQLALQNDLALIGHYDNQLASLEKELLQLTKQTAGRDFTLLKTTPGIGDYLGLTILHEIGDIARFPSVKDFLSYCRLVKGTVASAGKIKGLRGAKLGNPYLRWAFGEAAIIAKRDALLGPLAQRLETRLNNKFKANTVLAIKLARAVYFMLKTKTVFDPERLVAALSHN

SEQ ID NO: 458409 - protein, 385 aa, unidentified
MQASNVNAPIASHSDTIFVSIELSQRCWLVTMHSPDKNRFSRHNLDGGDAVGLLGLIERIRARASQALGSTPRVVSCYEAGYDGFWLHRWLEAAGITNFVFDPASIAVDQRARRAKTDRIDGELLLRTLMAYCRGEPRVVRIVRVPTPEQEDARRATRERERLIKEQTAHTNRIKALLRLWGLAAGNLRRRDWMLWLERQRDRNSEPVRPQLMAEIRREHARLMLVCEQLKELSRASKAEPVSAAAAEMAQRSTTLQRLKALGPVFTGTLAGEVFYKDFHNRRQVAAYVGLAPSPWRSGQTNREQGISKAGNPRARAKAIELAWLWLEHQPDSALSRWFHARTGQGRGRIRRIAIVALARKLIVALWRFLTTGLVPEGAVLKAAV

SEQ ID NO: 458410 - protein, 349 aa, unidentified
MGEVSTIGVDIAKSVFQVHGVDADGTVVIRRRVGRAKVLEFFSKLRPCLVGMEACATAHHWARELKKLGHDARLMPPTYVKAYLKRGKNDAADAAAICEAVTRPSMRFVPIKSVEQQSSLMLHRTRDLLIRQRTQLINALRAHLAELGLVAAKGREGLCQLVTVVTECGDERLPSNARFACQAIVGQLHAVQTQISGLDKRITQTHRANPDSKRLDAIPGFGVILSTAVVATMTDPKAFKTGREFAAWIGLVPRQNSTGGKDRLGSISKQVDRYLRRLLVVGAISIVRTARMWPDKYPWLIELLGRRPAKVVAVALANKMARVAWAVLAKGETYRAPTRLSNAAITAAA

SEQ ID NO: 458411 - protein, 386 aa, unidentified
MPKPNDLSRSLTAFEQNSTLIAVIEMSLSSWLVSGIVPGIKRHPLKKLDTEKEALLKLLHRWRDEAVKAGCKITRITVAFEAGRDGFWLARWLRTQGIEAYVIHPNSVAVSREHRRAKTDRLDTELLKRAFLGWLRGEPDHCSMAAIPTLAEEDARRPNRERENLVGQRTRIINRMKACLVRFGIRNFKPTLRKASEQLEALNTPEGTPLPPNTLAEMRRDMARLRFVIDQIKEIEAARLKQLKQAPKEGSQAMVLLLARVIGVGIETADMLVHEILSRNLRDQRAVARYAGLTGAPDESGKKRKEKGLAKAGNARVRRGMIQLAWRFLQFQKDSALAQWYRTVTKDARGAIRKTMIVALARKLLIALWRMVTTGQMPENVALRAA

SEQ ID NO: 458412 - protein, 342 aa, unidentified
MKNISVLGIDLAKTIFQIHGANARGKKVFSKRISRQKLATFVANLPPCLIGMEACGGAHYWARRFTEMGHEVKLMSPQYVKPYVKTNKNDANDAEACAEAVTRPSMRFVPIKSIAQQDINLIHRVRERLIKQRIQLTNQTRGLLLEYGIIIAQGEASFKRRLPEILADESVLSPEANQIFQELYSEYWVIAQQLKAYDLKLKTLSKDHPLCQRLETIPGIGKVTSTALIAAVGKAEVFTQSRQLSGWLGLVPKQHSSGHAIRLGGISKRGDRYLRSLLIHGARSVVQRVGNKKAPYYAWIQQLLNRVGFNKTVVAVANKNARIVWALLHGETSFEAAFGRVA

SEQ ID NO: 458413 - protein, 452 aa, unidentified
MPGSKKSGRSSGRLSTINPDAAGIDVGSTFHVVAVPGDRDDKPVRTFRTFSGDLHRLADWLEETGIKTVAMESTGVYWIPVFEILEARGFEVLLVNARDVKNVPGRKTDVNDAQWLQQLHQHGLLRGSFRPRDGVVRLRAYLRHRERMVDYAAAHIQHMQKALMQMNVQLHHVVSDITGVTGMRIIRAIVSGIQAPETLAEFRDVRCAASEETIREALTGNYRPEHVFALRQALELYDFHQVKIAECDTEIEAVLHTLNEERTTPEQPLPSVRHAKGRNEPGFDARPALYTLLGGDLTQIHGFGPYTVLRLVAECGDDMRKWPTAKHFTSWLCLAPGNKISGGRLLSSKTRRSSNRAAALLRIVAVNVGKTQTALGAFYRRLAARTGKAKAVTATARKLAILFYKALRFGMTYVDSGASYYEERYRQRVIQNLHRRARDLGFTLVADSAANG

SEQ ID NO: 458414 - protein, 344 aa, unidentified
MNYYAGIDVSLESSSVCIVDATGEIVKEARVESHPDALVKFFKAFGLPLTVIGLEAGPLSQWLYAGLTKAGFVTTLMETRHVNAALSATTVKTDRRDARGISQLLRMGWFRPVHAKSTGSQEVRALLVARKQIQHKLKDIELSLRGILRGFGLKVGKVTEKTFEARIRELVTSHPMLEEIAEAMLAARAALLEQFKKLHKAVLKIVRHDEVCRRLMTTPSVGAIVAITYKSALDDPGRIKKSRNAGPLFGLTPKRYQSGETDITGGISRVGDEMVRTALYEAANVLLSRVTRFSALKRWGMEVAKRRGLKRAKVAVARKLAVILHRMWIDGSTFRWTKTQATHA

SEQ ID NO: 458415 - protein, 347 aa, unidentified
MDHIGIDVHKMESPICILGAGDELIERRVRTTPERFADVLGDRPRARILLEASTESEWVARCLEGLGHEVIVADPNFAPMDAARSRRIKTDRRDARALAEACRLRAYRPAHRLSDAQRHVRGRLTVRDALVRTRTGYISVIRALLRQHGWRVPTGSAEGFIRRVLALSLPGRLLSELAPLLAVMRQVNQQLAYSDARIAAVARADERVERLQTVPSVGPVTAAAFVATLDDAGRFARAHQVEAYLGLVPREWSSGEGQRRGRITKAGHRRVRSRLVQAAVSIRRLRHPTTTALREWTERLAARRGRFIAVVALARRLAGILYALLRDGTQYQPARARLTPSTSAVAA

SEQ ID NO: 458416 - protein, 344 aa, unidentified
MILKQVAGIDVAQKELVVSLGRMAQDLTVEVFDYKVFTNNEKGFKALTKWAEKQVKNDIKIRYVMEATGVYHESLAYYLTNNNLEVSIVLPNKISNFFRTLDVNTITDKTASQAIARFGLERKLEVWKKPKKIFRELKQLTRERDQIISDRTLLKNQLHAEQAEAYPNHSSIVRLNKRIKLIDKQDMEIKAEIAGIVKTDPELVKKLDIITTIPGVGKLTAVVVLAETNGFELIRNKKQLVSYSGLDVKLKDSGTSVKSKPRISKKGNRHIRKAMHMPALSAMRFNEQHKALFVRLVSRHGIKMKAAVAVQRKILELIYVIFKTSVPFNKDYIHQTEIKEVEAL

SEQ ID NO: 458417 - protein, 359 aa, unidentified
MRGQRNEISFRGQKIYIGIDVHLKSWSVTVLSETSVLKKFSQNPDPEALYGFLKKSYPEAEYHSVYEAGFCGFWIHERLTALGIDNIVVNPGDVPTKSSEKLRKSDAVDSSKLARSLRANELKGIYTPDSASLEMRSLIRLKNSITKDTTRQKNRIKSQLRYLGIGIPQEFLEPFSNWSKRFVAWLKEVETLTPSGRQALDIQIRHLEELRRQKLEMTRALRTLAKTDRFREPLRLIMTVPGFGQATGMAFLSEICDIARFRNAEQLAAYIGMIPMCHSSGEKDGTGDITVRRHAVMRCNLIEAAWVAVRQDPAMNLFFTEQCKRMPKSKAIVKVARKLVNRLYFVLKHQTDYVNSVMS

SEQ ID NO: 458418 - protein, 320 aa, unidentified
MRNAVGLDISQNTFDAAAIVNGQRKQALFDNSINGFENFKDWLDGFDCELHICMEATGNYFEDVADYIGQFYTVSVINPYKISEYGKSRFHRTKTDKQDARLIAEYCHTAMPKDLPARQKISIGHYRLKRLLALYEQLKTQKTAQKNRLKVAKDEFVRKIHQAQIQELDQHIQQAEAEIQAITNDNQDLKTVSESLQTIPSIGKLTAAILTNYLLSGDFKTANQFTAFAGLNPQQRESGTSVKGRSSMTRYGNRRLKAALFMPAMVALNRDYFHDFVKRLKAKNKPKMLILGALMRKLLVVAYHVYKTQKPYNPERYKPE

SEQ ID NO: 458419 - protein, 360 aa, unidentified
MTDGMTSVALDAACIELQGAIVAGFDVHRRQITFDALDTRTGEVLRGKIDSTPAAVEQWVARFPGREVHVAVEACTGWLFVARALERCGAVTHLAEPIETSALRGRKRRAKTDRADARWLRQLLLEGRLPESWMPPEHVRQWRSRARLRNTLASERTSWVQRIRATLYHHGIAGAPDDLRTLAGREFLAGLELPVDARERIRVALEMIDLLELQIAEIERELRALARRQPGCRALMDKIYGIGELTSLVTLCELGDVSRLHASRQAVRLAGIDIGVHRSDRTARLGKLTRQGSPDLRWALYEAAQSACRKTSPDHADHRALKDRGLSHTRASLTIARKLARRSYHVLRELGPDALQPITD

SEQ ID NO: 458420 - protein, 400 aa, unidentified
MISVGIDVSKGKSTVCILKPYGEIMCSPFEMLHGEKELNALDDLLNKLDGEIRIVMEATGIYHLPILTFFHEKGYFVSVINPFAMKKYAKDNSIRGAKTDKLDSIMIANYGIEKWFKLQRYKGDEEIYAELKLLGRRYRHYMELHVKALQELTHILDYVMPGIKKMFNSWNEANGKDKLSDFVEQFWHFDLITAMSLEKFTEEYLDWAKEKKYHRSRSKAEAVYELASNGISTLSSGTPSTKMLVQEAISVLRTVDSSLFLILTRMQELAKTLPEYSTVREMGGVGDVLAVKLIAEIGDIRRLHSAKALIAWAGIDPPPYESGQFIGSKRKITKRGSSTIRKVGYEVMRVLKSHPAPKDDAVYNYILKKESEGKSKKHAKIAGLNKFLRIYYARVMAVYQ

SEQ ID NO: 458421 - protein, 345 aa, unidentified
MKHYAGLDVSVKETSVCIVDEVGDICREVKVASHPEDLAQLLKDPAWRFARVGLEAGPLSQWLFSGMVEAGLPAICIETRHAKAFLKAQVNKSDRNDARGIAQMMRVNLFRPVHVKTLASQKHRALLTARKLLQEKAHSIENDIRGLLRNFGLKVGAVGAVKFDERIRELVEDVPELADIMGPLLTSRKQLRGAFMTLHRKLLSIVRDHAVCRRLMTIPGVGPVVSLAFSSTIDVPARFKKSKAVGPALGLTPVLNQSGESHRVGRISLCGDDMMRHLLYEAAQVMLTRVLKWSWLKAWAMNIARRRGRQKAIVALARRLAVIMHRMWIDGTEFRWTREAAPAAI

SEQ ID NO: 458422 - protein, 311 aa, unidentified
MASEKVYVGVDIAKATLAVRFLDQQFECPNTDPGHGALIDRLRASAKPVHLVCEATGGYERALVRAANQANLPVSVVNPRQVRDYARARNRLAKTDRIDAAILADYGATIQPAATPAPTGQQLALAELMSARQDLLVRQKAEGNRLEHLTLPALIRDTKTELRRLEKRLKNLEAMIEAQVQADTLMTKKAARMEEVVGVGRITVLTLLALMPELGQLHPGQAAALAGVAPYARDSGQYRGQRHIRGGRPAVRRVLYMAAVAASQHNQILQTHYQQLVARGKPAKVALTAIMRKLIVLLNRLLQDPNFVLVG

SEQ ID NO: 458423 - protein, 336 aa, unidentified
MQDKVMKFTETIGIDVSKHTIDAYIHTAKKHKCFKNNNSDFTKMIKWVKDNTGFPLSEHLYAFEHTGLYSFALSVFFTEKDISYLLIPGLELKRSLGIARGKDDMIDAKAIALYAYRRRDEIKPYKLPSKHLLEIRRLLSLRDKLVKQRAGFKATNKEIKDHLSKKDNATYFKVHENMITHLSKEIADVEKQLRSIINNDMKLNELFKLITSIKGVGEQTALFMIAYTNAFTMFDNARKFASYAGIAPFPYKSGISVHGRTKVNQFANKKFKSLLSNCATSALNCNAEIRLYYERRIREGKDKMSTINILRNKILGRIFAVVQRGTPYVDTFAYAA

SEQ ID NO: 458424 - protein, 464 aa, unidentified
MTTRKILWRNRKERKEWARRLQSEDPGLEVVHPHAAGIDVGNSAHYVAVRPDRDPEPVRRFDCFTGDLHRLADWLQSCGVKTVAMQSTGVYWIPLYEILEERGFEVYLVNARHTKNLPGRKSDVQESQWLLKLHTYGLLSNSFHPPAEIRVLRTYWRQRGEHVAGGATCILRMQKALTQMNVQLANVISDISGLTGQTIIRTIVAGERDPLTLAALSDPRVHASQEEIAKSLEGNWRPELLFVLQQEVDMYDIYQKRITECDQRLQKHLASLTHPLQVQPPTQKPTTKKPAAKNAPRFDLSSELQRVTGVDLTRIDGIDVMVAQTLLSEVGLDMGRWKTESHFASWLGLCPDNRISGDKVLSRGTRRVVNRAATALRQAANTLLRSRSYLGAQYRRLRTKLGAPKAITAMAHRLARLVYRMLKYGQAYVDKGTEYYEERFRQQQIQLLRKRAAKLGLQVAEIHA

SEQ ID NO: 458425 - protein, 347 aa, unidentified
MLADEVDYVIGVDTHRDEHAVAVIDQVGTIVLEAVAAANEPAFARLLERLDLAAPRPRAWAIEGSGSYGAGLARYLSDRGERVLEVHRLTRDRRSHAKTDAIDAVRAARTALSRELQATPRTGGAREALRVLVATRRSAVNSRRVALQQLRAFVVTAPDQLRRELAALPEARLLARCARLRIHAQHDHADRALRLALRTCAQRALHARDETDMLDKEITGLVDELAPGIRDEPGVGPISAAQLLLAWSHPGRIRSEAAFARIAGAAPIPATTGQTVRHRLDRGGDRQLNRALHTIVLTRKQRRDPATIAYIERRIAEGKTPREATRCLKRYTARRLYRRLNNITTSP

SEQ ID NO: 458426 - protein, 318 aa, unidentified
MKIKNNQQEINVGVDTGKHQLDIFIRPLNISFNVTNDEDGIKKAIKDIKKHHPTRIIIEATGRLEHAFIHACSKAKLPFVVANPLHIKKFAGAIGQLAKSDPLDAKLIAHYGDAIKPAFSQLKPDTMRLMSDLLSRRRQLMTLQTMEKNRLQIMPKETQGMIKPILTAIKKQLEKIDQKLLKLIENDPDYQAKNNILQSMQGVGNVLAICLLSDMPELGYISNKQAAALVGVAPINRESGRYQGQRKIRGGRPQIRTIMYMAMMSAIQCNPIFKTTYQRLIHQGKSKKTAIIACMRKMIVILNSMLRDGVFWDPNFAK

SEQ ID NO: 458427 - protein, 457 aa, unidentified
MNKRREKNQRRKHVVEMAMVNPFAAGIDISVSEFVVAIPDGILSDRVRTFGTMTSDLKDLSAWLKECGITSVAMESTNVYWKPLFSHLLAEGFDLCLANAKVARNISGRKTDENDAMWIQKLHTCGLLPSSYLPEGEQEALRTLVRFRRSLVQDSSRFTNHIQKSLELMNIKFHTIISDIMGKSGRAVLDAIVNGERNPEAFLPLLSSRMKASRETIIKSLEGTWQKEHLFTLSMSYDLWKNFQLQVEKVDVEIETYLQRYEAKTNDGLVEEIREEQIHPAKDKKKVKNHPQTNVREYLRRIHRVDVLAIYGLSDIGGLELLSETGTNLRNKWPTDSHFVSWLNLCPKTKISGGKVLSSKLQKKKTNQASQAFRQAANSIQRSDHWLGDYFRRMKAKGGNKYAIVATANKMARIYYRMVTKKVEFVPLDLKQYQSQYQQAKISYLERKLQTLKNQAA

SEQ ID NO: 458428 - protein, 459 aa, unidentified
MPDCALSTFTRLVCCCWAPVGGDGVVIAIRSGRLMVDQVLERPAALDVHKEQVTACVRTPGEGGRREQVVREFKATVRGLLGLRDWLAELGVTTVAMEATGVYWRPVWAVLEDEFELLLCNAAHVKNVPGRKTDVGDAVWLCQLLEFGLLRASFVPPKAVRELRELTRRRRTLVRERAQEANRLHKTLQDTGIKLDCVASDILGVSGRLMLDALIAGQRDPAVLADLAKGRLRVKIADLQEAMEGCRFSAQHALLIGGILRHIDFLDAEITALGDAIEAHMAADREREDSERPFELAVQVACSLDGIQARTAQMLIGEFGTDMSRFPTDAHFASWAAQCPGNHQSAGKRRSGRSRKGPKWLDGALHDAAMGAIRVKDGHFARKYRRIKARSGHKVAIGAVKHAIVIALYHMLKNGEMYRPPTPHPDAERKQRERTTKRLIAQLERLGHSVTLQEGAAAI

SEQ ID NO: 458429 - protein, 405 aa, unidentified
MSEPHSRFLKNGVLTNFVSHRRSGNPNLPINGMSRSTEWERLLPMKKTTHHLIAEVRRSASKVGMTIGIDLGDVWSHYCTLNEDGEVVGRGRFRTSPSGVEKWFTDLPPVRIAMEAGTHSIWISEQLQELGHEVIVANVRELRAISHSDRKSDQVDAEKLARYARLDPKILRPIAHRTVAQQEALTLIRARNLVVRLRTASVNAVRGLAKPCGYRLPASSTLCFAKRSLAVLPRGLVQALGPVLEQIAEMTVKIKQYDSVIKGLTETEYPETQALIQVYGVGQLTALTYVLTLGSKERFQRSRDVGCYLGLRPKRSQSGDRDPQLGITKAGNIYLRTLLVECANHVLGPHGRDSTLRQWGLHLASRGGKQSRNRAIVAVARKLAVLLHRIWITQQPYIPFYGVAA

SEQ ID NO: 458430 - protein, 391 aa, unidentified
MVCVGIDVAKDKHDCCILDSDGTVRADCFTIPNNMDGFKQLLQTIRDCTKKSDKIKVGLEATGHYSYNILGFLLDNGLPTYVINPLHTNLYRKSLSLRKTKTDRVDARTIATMLLSDVDLKSYTDIAYHNEDLKSLTRYRFDKVQERAKLKQSVSRLATILFPELEGLVSSIHGTSIYALLSEYPGAKQISEVHLTKLTNLLTTASKGRYGKEKAIQIREAARTSIGSVMPAKSLELKHTIKLIQELASEIDEIEDSIQKIIDELNPPILSIPGMGVNSAAVILAEIGDFSNFSSPDKILAYAGCSPSTYQSGKLTNCYAHMEKRGSRYLRHALYNATKYVCYWNPVFAEYLAKKRAEGKHYNVALSHAMKKLVRLIYALQKSGKTYLTAA

SEQ ID NO: 458431 - protein, 362 aa, unidentified
MTSMPQDHLDRYCIIGIDTHKDVHVAVALDQLGRRLEELHIPTSTVGYTQLENWAIALGSVKAFAIEGTGSYGAGLTRFLSDRGHRVVEINRPDRATRHRLGKSDPIDAEMAARSVLCGVASGTPKDSRGNVEMIRMLKMAKDSGVRARTQSINQIKAILITAPAELRESLAGLPVGVLLDRCAAFRPGKLTSTTAVAKHTLRLLARRNFGLRVEIAELGQQIRTLADVAAPQLIKVFGIGPDNAARFLMTAGENPDRLRSEAAFAALCGSNPIPASSGKTNRHRLNRGGDRQANAALHRVVVIRLRWHEPTRAYMSRRLAEGKTKAEVIRCLKRYVAREIYNVLCPRNTDANTQTTLVQAA

SEQ ID NO: 458432 - protein, 344 aa, unidentified
MDHYAGIDVSLECSSVCVVDSNGKMVRETKVASEPAALIGWFGALGFGLARIGLEAGPLSQWLYAAMKEADLAVELLETRHVSDAFKAMPVKSDRNDARKIAQLMRLGWFRPVHCKSITAQEIRAMLTARKLVQGKLLDLENSLRGILRGFGLKVGNTTRNGFAGRIEELVKGHSNLQTIGQALLRARAVLLAEFNGFEKRVRAMSRLHDKATLLMSTPAVGPIVSLTFACAIDDPSRFTSSKQVGPYLGLTPKKYQSGQTDYTGRISKHGDASVREALYEAAHIMLTKPIKGCSELKSWAMRIARRAGTNKAKVALARKLAVIMLRMLKDNVPFNPAAKAATA

SEQ ID NO: 458433 - protein, 421 aa, unidentified
MRGLRAKGMRMVKEGTLIATVDIGVTSNTGYCTTLDGISTKSFRFDNTREGFEKFWWMTVASKNRCGCDEVLVGYESTGPYAEPLVHYLAKKQVKIVQVNPLHTKKMKEVNDNSPLKTDDKDPRVIADVIRLGRALTIVVPEGDAASLRRLNNARERHVGEQTALLNQLQQLVYLIFPEFKTVLKNMKCKTAQHILKRYTTPERIGTLSKEALGEEMRKRSMGKFGIKEAGSLIGLARETVGIKEGLSGIFMDIRHLLLQLEAEVLFISEIEGEMRATLERIPCSAKLLSIKGLGIVSVAGLIGEVGDFSKFSTQSEITKLAGLDLYEISSGKRKGQRRISKRGRSLLRKILFYAAIQMIRKNGIMYEYYARLTGRGMERMRALIAVSRKLLRIIHAIVRDNRDYVGQYQAPPRRVIKMAA

SEQ ID NO: 458434 - protein, 359 aa, unidentified
MRRHIWAGLDVGAETTSFCVINDTGEVLQEGSCSTSLMSVDREIRWLRRRKFATVGLEAATGTHLARGLRSRGYNVDMYEARQLSKFLRVRRNKTDANDAIGIAEVGRLGQTLVGKVHLKSLECQSLQSRLTIRQHLIRQRVGVVSLLCRQLEHYGGRISRSSLSKRNFSLRVQAEITKLFGRTPNPLTDELRRLLGAAESLLAYQRTVDQDLYHAAAEIEVCRRFMAIPGVGCLTALTFYAAVSEPGRFERSSDIGSYFGLTPRIHQSGLTCRLGRISKMGNRAARNALVCAAKGFMRWGNDDDPLRKWAGDIELRRGQRKARIAVARKLGIIMLAMWKRGEEYQPMRHHAQPETGRA

SEQ ID NO: 458435 - protein, 337 aa, unidentified
MQITTIGLDIAKHVFHLVVCDGRGKVVKKKRLRRGQLLSYFAQLPPMLIGMEGCASAHYWARELTAQGQRVDLLPAQYVKGYVRGNKNDYNDALAIAEAVRGPEMRRVPIKTAAQQDIQALHRLREGQIKMRTAHANRIRGLLAEYGIIVPQGLNSLRRRIPEVLEDGDNGLSPLFRELLAQSYAQLCALDDEVQAYDRRVQAHSRSDEDCRRLQTIPGYGPMVASVYAGYVGDGRGYRRGRDVSASVGVVPRQHSTGGKATLLGISKRGDRYVRCLLVHGARSVVRAAAHKDDPLSRWINQLRERRGVNKATVALANKMARIGWAVIRTGRDYRPV

SEQ ID NO: 458436 - protein, 338 aa, unidentified
MKLYGAIDLHSNNNVTVLIDEHDQVVYQKRLPNDLPLIAQQLSGYRDALQGIVVESTFNWYWLVDGLMDQGHRVHLANTAAIQQYEGLKYTDDHSDARWLAHILRLGILPQGYIYPKEERAVRDLLRKRGQMVRQRTTNLLSIQNLITRNTGGSIRSNRIKTLDAEQVDDLLPNPDLALAVKANLAMIKCAAEQIDILERTVTERIKLRAAFSFLKTVPGIGQILALTIMLETGEIKRFSTVGDYASYCRCVGSQKLSNGKNKGSGNTKNGNKYLAWAFVEAANFAIRYNARIKSFYQRKKAKSHGVVAIKAVAHKLCRACYYIVKDQVAFDVAKAFA

SEQ ID NO: 458437 - protein, 315 aa, unidentified
MPTPVTLLNRFIGCDVGKTEIVVFDQSTGRLQSIANQSEAIEAFAAGLDETCFLVCEATGGYESLLLDALVRAGRAVHRADARKVKAFIRSFGILGKSDAIDARALASYASERQASVPLWQPPEPDRRALQALVLTRRDLVASRTAWLGRRAAPGVHHANEVIDAVIATFDEQIAIIERRIEVLIETCQPLARDNAVLRSIPGIGPKTAAALIALMPELGSLDRRKAAALAGLAPHPRQSGSANLYRRVRGGRPDVKRTLFMAALAARNTKSDLAAFFLRLVQAGKKPILAITALMRKIIVIANAKLRDAHAQLS

SEQ ID NO: 458438 - protein, 366 aa, unidentified
MASEYVGIDLHRRRSVIVRLTPDGEVLEQVRIDNDPVALALEIAKAGPNPDAVLEATYGWYWAVDVLEASGAHVRLAHPLAIKAYAHRRVKNDSIDARTLADLARMNRVPEAWIAPPEIRELRELVRYRAKLVALRSGLKAQVHSVLAKHGVRVPMTDLFGLAGNRLLDELSFPAPYAMRISSLRELIGIYHSQVARFDAEIRTLLAEHPGYRAIQAVPGVGPILGAVFVAEIGDVTRFSSAPQVCSWAGLTPRHRESDTVVHRGAITKQGPRLVRWAAVEAVQKLRTSTKQHRDFRRIARRRGKNIARVAVARKLLTLVYYGLRDEEVRCLPRPKEAARPASGSSQGARSRSRMTPDPRRGRHGD

SEQ ID NO: 458439 - protein, 406 aa, unidentified
MAMRKREDSPEVFPNAAGIDIGGSSHWVAVPRATSDEPVREFGTMTDDLNAMADWLLACGVDTVALESTGVYWIPVYEVLEQRGLTVWLVDARQMKYVPGRKSDVMDCQWLQKLMSLGLLRAAWRPDGEVCVVRAVVRQREVLLTEQASWVLRMQKALVQMNLQLTEVLTDVMGVTGQAIIRAIMAGERDPKVLAQHRHGRVKASAAEIERALTGNWRDEHLFVLGQAVTMFDSLAQRILECDAKIEALLAPLGRHEIELGGPGKQRSKNAPQFDARAALARWAGVDLTRINGLSVATVMTILSEIGPDLSRFANVKHFCSWLGLCPGTKISGGKVLSARTRRSANRVRQALKLAAMSLSRNDSALGAFYQGQQRYEEQQQQRSLAALKRRAKALGFRLEPETPAP

SEQ ID NO: 458440 - protein, 321 aa, unidentified
MRIIGCDLHAAQQTIAMLDRETGEIVERTLRHDGTAVRDFYAALPPPVVVGIEATGSMGWFLRLMEELGVTCSVGDPAKVRKVETRRQKHDRRDAALLLELLTEDRFPAIWMPPAELCDLRALLRHRDQWVRIRARVKNALQGLALAHGVRRGAGLWTREGQATLAALSLAPHAGHRRSELQALNDHLSEQIDALDQQVGEQARARPQARRLMTHPGVGPVTALATEVFLGDPSRFADAKALASYVGMIPSEYSSGARQRLGSLTKQGNPMLRFLWCEAAIHAVRRDAALGRFYRRKLQQKGLGKARVAVARKLGIRLWIL

SEQ ID NO: 458441 - protein, 326 aa, unidentified
MQSQVNYTGIDISKLFFDVAFLTCQGKYEHHKFSNDQAGFKRLLKVLPDNAHIVMEASGPYYLPLACFVSAQSMAVSVVNPLVIRRFSQMRMSRAKTDKKDSMLIAEYGRSEKPGLWQVPEQHVISLQHMEALLSNLNKERTALLSQLESFAFSGMLDKELKSIIIKELKHKEDLIKKVNKAMSALADRHYFDMLNNLQSIPGMGRKTAMSLIVLSGGFTRFEDYRKLSSYIGICPRLFESGTSVKGKARICKMGMSHIRALLYVCSWSACRYNKACRELYQRLVAKGKAKKLALIAVANKLLKQAFAIGTQKTKYDENYSNISCF

SEQ ID NO: 458442 - protein, 359 aa, unidentified
MTTTMTYVGLDVHARSTHAAAIDVASGELRRARFGGGSDDVIDWLQALPQPVKGCYEAGPTGFVLYRAARAVGLPLQVVAPSKTPRAPGDRIKSDRKDAELLARLLLAGQLKPVSVPTPAFEAARHLARAREQVRGDLMRCRHRVSKLLLLHGRVYEASAWTKTHRRWLEAQRFDEAATELAYLDTLAAVDGLVARKAALDERLSRLACEGEWWPTVARLRCFRGIDTLSAFVLCLEVGDWTRFSQPAKLSSWLGLVPSLDQSGESRRQGAITKTGSGYARRLLVEAAWHYLPQPSVGPALAERRAGQPDHVIQIALRAQRRLHRLYHRLRVRGKPGNVTTVAVARELACFLWAAAVAE

SEQ ID NO: 458443 - protein, 331 aa, unidentified
MRHCGMDVHLRSTTVETLDVDTGEVARRVLRTERETLRRWLSAEPPMRVVLEAGSSSHWVAETVEQLGHEVVVVDPRRTSAVAVAGGCKKTDALDGSALAWLSSKGALVPSYRSSPAMRDWRRLLTTRQRIVRSRGDLVRTVRSALAAQGIVLPIRRAATFVARVRELPEALPLAGLLQLIDAFDKQIALANREVLARAHADPTVRRLMTVDGVGPLVASAFRVVVEDARRFHSGRQVAAYIGLTPVVHNSGSRERLGSISKCGDKLLRTLLIEAALVLLNRTRKRSRLQDWGWQVRARIGHRKAAVAVARKLCAVLWAMWKRETEFNRMK

SEQ ID NO: 458444 - protein, 355 aa, unidentified
MNDTKYIGLDVHQATISAAVLDAAGKLAMEAVLETKAETILQFMQGLRGNLQVTLEEGTCAAWLHDLLKPHVAHVLVCDPRKNALIKAGNKSDRIDARKLADLLYLNKLNPVYHGETAIRALREVARSYLALTRDTTRVMNRLKALYRGWAIPCAGQRVYAPRYRSEWLAKISEVGVRRRAEIYYQQLDALRSLREQSRRELLAEGRKHRAMKLLRQIPSIGPIRAVLLIALMQTPHRFRTKRQLWAYCGLALKTSTSGEYQIVQGQLKRSRKFLAVRGLNVNHNHDLKNIFKGAATRAAAVRGPFQEFHAGLLARGMKPTMARLTLARKIAAITLIVWKKGVSFDAEHLKQQAA

SEQ ID NO: 458445 - protein, 409 aa, unidentified
MERQVERCGGLDVHKETVAACVRVGGRTGQAEQHVQTFGTTVGELLVLRDWLAAHGVTHVAMESTGVYWKPVFYTLESDFTCLLVNAAHIKQVPGRKTDVKDCVWIAQLLEHGLLRGSFVPPAPIRDLRDLTRYRKAVIQDRTRVANRLHKALEEAGIKLAAVASDILGVSGRAMLAALVQGTTDPAVLADLARGRLRGKLPALRQALANRFRPHHAFVLGQLLTHLDYLDEAIATLSTEIERVMAPLAEPLRRLDTIPGINQRTAEVILAEIGPDMRVFPSARHLASWAALCPGHHESGGKHKSGKTRKGNRWLRTALIEAAAGASRAKHSALQARFRRVLRHRGPKKAVVAVAHALLRMVYHVLADGTVYREAGADSYDRHHSQRVTRRALQALERQGYRVTLEPAA

SEQ ID NO: 458446 - protein, 420 aa, unidentified
MSISKLALDASSQDYINKKTVTYPVLIFFGGGSMYFIGIDISKYKHNCFIATEAVQVKAFQFENNRLGFDLFLKTLKSLDQSQEIRIGLESTGHYGMNLKQFICASGYTYLEFNPYLTHQFSKAMSLRKTKTDKVDAKTISSMLGPVDYKTLHTSFYHINELKQIVRYRETKMKLRSKTLVELTNILDRTFPEFKAFFNHRLAGSAMHILKRLKSRSRIAKMKPSDYEAIRSYSKGKFTYVKFQKLKLLASNSVGYETASDTLLMLETIHTYEHLSSIIETVEEKIIEIMKDIPQTLTSIPGLSLISAANIIAEIGDFKNFSNPAQVISFAGLDSSVNQSGMMETRGHLVKRGSGLLRMTLWQVTFSALKYIPTLYDYYLKKKVEGKHHKVALTHCTRKLTRTIFNLGLNHLVFDQSQFR

SEQ ID NO: 458447 - protein, 354 aa, unidentified
MTSTKYIGMDVHTESISIAVRNSVGKVVMECVIETKASTILQFIAGLSGDLRLTFEEGTWATWLYDLLKPHVTEVLVCNTRKNASRNGSKSDRIDARKLSEQLYMNNIKSVYHGEHGLRTLKELARSYLTISKDLTRVMNRLKALYRSWGIPCAGKEVYAPRHRAEWLAKISEVGVRRRAEHYYQQLDVLRPLHQEARRDLLLEAKKHKPWKLLRLIPGIGPIRAAIVIAVMQTPHRSRTKRHLWTYSGLALETHDSAQYRVAEGQLERSRKPATVRGLNKDYNHDLKDIFKGAAMRASTAAGPRPDFYEALLAKGRKPTMARLTLARKIAAITLIVWKKEVRFDANYLKPQAA

SEQ ID NO: 458448 - protein, 392 aa, unidentified
MVVSVGIDVSKDKHDCFIVSSDGEVLADVFTIPNTLDGFTCLLQRIRECTTPQDKIKVGLEATGHYSYNLLGFLLDNGLATYVLNPLRTNLYRKSLSLRKTKTDRVDARTIAFMLLSDAGLKPYTDTAYHNEELKSLTRYRFDKVKERAKLKSSISRLVCILFPELEKLVPTLHIASAYALLEEFPGAKQIASAHLTRLKALLESASKGHYKRDMALEIRDAARNSIGSRRPAKSLELQHTIRLIRELDVEIDEIEEQIQSIMDELHSPITTIPGLGFRMAAMILAEVGDFTRFDSPDKLLAYAGMSPSTYQSGQLKNCYPHMEKRGSRYLRYALYNATKYVCHWDPTFAAYLAKKRNEGKHYNIALSHAAKKLVRLIFAMEKSRAAYRLTA

SEQ ID NO: 458449 - protein, 339 aa, unidentified
MSLSDYLNFVGIDIAAATFTAAWCTEAGWHHATFEQRTTDYGRLVHQLRQIAAPEQTLVVMEVTGTYWLALAWFLHDRGLVVSIVNPTQANLFARLEMQHAKTDRIDAYLLAEFARQRQPAAWTPPPTICEQLQQRLHQRDDLLGIKTQETNRLHALRKNPRAEATVLERLERHIAFLQTEIDVLDGELEDLLNSAHDWTDAAHRLFTIPGMGKIAVAWILVATQAFAYCDTPEQAAAFAGLVPYRRESGSSRRGHRPVGRGGHAALRKTLYMSTLSAARINPCIKSLYNRLLARGKPNKVARIASARKLIHIAWAVVVKERDFDPSFALRSDLVPFEA

SEQ ID NO: 458450 - protein, 342 aa, unidentified
MGEVSTIGLDIAKSIFQIHGVDADGVVMIRKRIRRAKLLEFFAALPACLVGIEACPTAHYWSRRLQILGHTVKLMPPSYVKAYLKRSKNDANDAAAICEAVTRPSMRFVATKSEEQQSGLMLHRSRQLLVCQRTMLSNAIRGHMAELGIICAKGRNGTAELLRIIADEHDDRIPAVARLSLDVLARQYTVVRAEIVAIEKRIHAWHRSCEESRRLEEIPGVGPIVATALVAAVGDWKEFTSGRSLAAWIGLVPRQHSSGGKERLGRISKQGNRHLRWLLVAGAMAVIRYARQHGTKRLWLARLMERRPIKVAAVALANKIARMAWAMMVRGERFKEPKLLPA

SEQ ID NO: 458451 - protein, 329 aa, unidentified
MHVIGVDVSKAKLDCALIVQVEPMKRRQKVVSNDPQGWAKLLEWACQNAHCEPGELKLVLEPTSSYHEAVAHYAHDRGARVWIINPKQMRDFAKGLGVRSKTDALDCSVLAQFGLKAQAPDWIPAPLPLRELHSLLRRLEDLQQTLQAELNRVEAAQARQAPALVMDSLQSSVSFLEQQIKRLNAQIDQHIDGHPQLKADYELLRSVPAVGPSSARVMLVKLRGRAFDSAAQASGFLGLRPVHWESGSSVHKLPRLGPHGDRLARRILYMAALTAKRTNPDARALYERLVAAGKKPMLALCAVMRKLVHLCFGVLKHQRPYIPQFAASG

SEQ ID NO: 458452 - protein, 365 aa, unidentified
MQKISTMQTSGKNIFEGQLTIGVDLGDRFSAYCVLNEAGEIVLEHKLATTPEAMKQVFGSMPRCRIAMETGTHSPWVSRLLTALGHEVIVGHAQKVRLITKSRRKDDRLDARTLARLARIDPELLSPVKHRSAQAQLHLAEIRARAELVSARTALVNAVRGLVKSYGERLRKCGTQQFRQETISGLSAGLREALEPLMREVESLSERIQEYDRRIAKMAKQTYPETALLKQVKGVGDLIATAYVLTIEDPHRFRKSRDAGCFVGLQPGRRDSGDSEPQMRISKEGDEYLRTLLVQGAHYILGPFGEDSDLRRWGQKLSARGGKNAKKRAVVAVARKLAVLLHRLWVSGEVYEPLRNSQKAMSTAA

SEQ ID NO: 458453 - protein, 324 aa, unidentified
MEHYAGIDVSLEQSSVCVVDATGGIVREAKVASEPEALIAWFRGLGLEVARVGLEAGPLSQWLYAAMREAGLAVELLETRQVRDAFKAMPVKTDRKDARGIAQLMRLGWFRPVHCKSVPAQETRALLTARKLLQTKRLDVEMSLRGVLRGFGLKVGPTTPRSFAARIRELVEGHPTLTAVAEALLAAREALGEQLRGLEKHLRDRAREDERTRRLMTTPGVGVIVALTFVAAVDDPGRFRSSKAAGAHFGLTPRKYQSGETDVTGRISKIGDAGVRTALYEAANIILTRPAKGSALKSWAARLAVRAGMRKAKVALARKLAVTC

SEQ ID NO: 458454 - protein, 409 aa, unidentified
MEQMIQRCAGLDVHKAVVVATVRVPDGHGGRTVQTETFSTTTTSLLALHDWLQAYGVTHIAMESTGVYWKPVYYALEDGFTLLLVNARHVKNVPGRKTDVKDSEWLAQLLECGLLRASFVPPPPIRDLRDLTRYRRKQIAERGREVQRLHQTLEDAGIKLATVATDVMGVSGRAMIDALIAGTTDPVTLAELARGRLRRKLPALREALRGRFRPHHAFLVGQILAKIDFLDEAMVELTREIDGVLVPFEATLARLDTIPGVNRTTATTIIAETGGDMRQFPSAGNLCSWAGLCPGQNESAGKRRSGRRRKGNPYLCHALVESALAVTRAKNTALQARYRRIVRHAGHKKAAMAVAHHILEIAYFVQRDAVAYVELGPDYFDQRRREHAVQRHVKQLQALGYRVTIEEAA

SEQ ID NO: 458455 - protein, 470 aa, unidentified
MFDTEDVGVFLGLDVAKTTHHGNGLTPAGKKVFDKQLPNSAPKLRAVFDKPTAKFGTILVIVGQPASIGALPLTVARDAGCKVAYLPGLAMRQIADLYPGEAKTDAKDAAVIADAARTLPHALRSLEPDEITAELTVLVGFDQDSPPRPPHQQPHTRPAHPVPPRPRTRPGPPSRPPGRHLAAGTLRIPSRAAESRQPQARRGHPTQGPRMAARLTDEVFDALDEQTVVVPGTGTLDVVIPSLARSLGAVHEQRRALEAQIEALLEAYPPSVVLTSMPVVAVRAAAVLLVTVGDGTSFPNAARLASYAGLVHTTKSSGTSIHGERAPRGGNRQLKRAMFLSAFAALHDPASRTYYDKCRARGKTHTQALLRLARHRISVLFAMLCDGTFYEPRVPRALATGSSTHISLLCRPPTPRPPRHPDGQLLPGPGRAARRPLRRPAHRPAPRARHAPRSAASQPGGRQPRQPRER

SEQ ID NO: 458456 - protein, 341 aa, unidentified
MSDYSYFCGIDLAKNHFSIHAVDSNGKVILHKSVTRSKLLPTIANMPPMCIGLEACGGAHYWARTLNKLGHDARIMAVKYVVPHRTKGKNDLNDAVAICQAVQHSSTRFVPVKSPEQQAILSVHRMREHWVRERTALMNRIRALLSEFGLIIPVGRSSLMKQVPLILEDAENELPHLARTVIADAYHHLAALNQRIADTEQVFDAFAKVSDNVQRIMKVRGIGPQTATAILASIGNGSQFDKSRDFSAWLGLVPKQYSTGGKPRLGRITKHGDKYLRTLLVHGARTVIANLGDKQDRLSQWCRGVLERRGMNRAIVALAAKNARIIWSLLHNQTEYENYAA

SEQ ID NO: 458457 - protein, 374 aa, unidentified
MLSARPAGACRPPSDQQKELAITTIAQLQRPRVTVGVDTHLDVHVAHAKDQLGRRMATVSIPTTPAGYQDLLAWARGLGEVQAWGVEGTGCYGAALTRFLGDQGQVVLEVNRPDRQARRRHGKSDPVDAEAAARSVQAGEVTTVPKAGNATVEMIRSLRVARQTAIKARTQAINALKALLVTAPAQLREQLRGRSAAMLVRQAAALEPGPLVTPTAAAKLALRCLACRYQALHAEVATLDTELDRLVAKAAPGLVALFGIGPDSAGALLVAAGDNPDRLRSDAAFSMLCGSSPIEASSGKTRRHRLNRGGDRQANAALYRIVVVRLRWHQPTKDYMARRLTEGKTTKEIIRCLKRYVAREMFTLLNQTVPTPAT

SEQ ID NO: 458458 - protein, 416 aa, unidentified
MNGKSPGTFARFIGIDLHKHYLVVGGVNAGQEVVLPPRRVNLENWLKWAEANLKPTDAVVLEATTNAWEIYDQVVPLVGRAVVANPVQVKWIASARVKTDRVDVGRLASLLAAGLVPEVWVPPVEVRELRSLLAHRRRLVKMQAMIRNRLHSMIHRHNLTLPKGEVFSHEHRSWWLGLEISRTENLRIRQDLATLEHLVPQIAEIDTELNRLSTCVPWAEQVPYLLQLPGFGLITTMTLLAAIGDITRFESARKLVGYSGLGAGVHASGQTHHSGRITKQGRAELRWVLVEAAWVAATTHAHWKREFERLSRRMSPKKAIVAVAHKLLVVVWHVLAKQTADTEANPEMVASKLIGWSGRLGEEGRGGLTTRRFVRYHLMKLKLGDDLKGVRQGRTTRLLASPEEVLALRPELKSVC

SEQ ID NO: 458459 - protein, 480 aa, unidentified
MNIKAKKTKKQVNPENFTRNFLSDDEISKKIQVVEKELKASTWRELETKGKFVKNDKISFISEEMLIVGCDIGSETHYIRAIDLRGRELSKGAFEFSNSEGGFESAKAWMLNLVVTNGKNQIVLGLEPTGHYWFALAAWMVSKGISVVQVNPYAVKQSKEIEDNSQHKDDRKDPKIIANLVKDGNYGMPYLPTEIYADMRRLSMFRDQLVKDRIRNINRLHREMKIYFPEYMDAFGKIDGAFTLEVLQVAPIPTDIIELGADGLRNIWRAAKLRGRGYSRADKIINYAHISIGLRDGENAGRESVKWFAMQIVKLDEQLAEIEETLHSRCMEIPHAENVLEIKGIGENILAGILSEMGDITRFDDAKEIQKLSGLGLVACSSGKHKGQTKISHRGRKRLRYWLFQAAKSAVSHADEYKQLHVYYTTRAENPLKKMQSLIVIACKILRVIYTILKTGRKYDPKRLLQDIKRPDHLQKQSAA

SEQ ID NO: 458460 - protein, 387 aa, unidentified
MPRPNDLSRSLVPFDQDATLVAVIELSQSSWLIAGTVPGVERQPLKKITPDEVALLRLLYRWRDEAIRGGRTVERIAVAFEAGRDGFWLARWLTRHGVEAYVIHATSVAISREHKRAKTDRLDSAMLMRVFLGWLRGERGHCGMVAVPTIEEEDARRPSRERENLVGERTRIVNRMKAALTRLGIRGFKPELRKAPQRLDGLRTPEELPIPPNTLDEMRRDLARLAVLREQIATIEQARLERLEQAPPTEPHAMVRLLASVVGVGIETADMLVQELLSRNLRDRRAVARYAGLTGSPDESGSKRREKGLAKSGNARVRRGLIQLAWRFLMFQKDSALAQWFRNRTEGARGARKTTMIVALARKLLIALWRLVTTGEVPQGVVLRQRA

SEQ ID NO: 458461 - protein, 443 aa, unidentified
MARKRSQQRFELIHPHCAGIDIGSREHWVAVDRKHEQPVRSFRTFTDDLVNLADWLATLKIEVVAMEATGVYWIPLFELLDSRGFKVYLVNSRSTRQISGRKSDVLDCQWIWQLMSHGLLRGAFRPADAICSVRALVRQRATKVRDQAQALNRLQKALSQMNIQLANVISDISGVTGMRILRAIIKGERDPQTLAQLMDRRIKADKETIARSLHGNWRLEHLHALEQEIECYDFLEQQIQACDKAISQALMQLPEREQAPQPSRKVLRSPHRSATEQAALHQAVWRVMGVDLTAIPTVGVDTALVIASEIGPDLSRFPTGQHFCSWLGLAPPTRISGGRQLAGSSPKVLNRAAQALKQAASNARNDKSFIGASHRARLTRMDASCAIKATAHQLARLIYAMLTKGQPYVEQGIEAFEERSKDRQLRALLRKARKLGMDLVKAA

SEQ ID NO: 458462 - protein, 428 aa, unidentified
MSNQELIRRKQYCQIVKEITGSDQYMVVGIDVGKDNHHAFMGTATGKSLFRKLIFENNLEGFSKLLKTSDLIKTRNNLSKVVYGLEPTGNYHKPLARHLIRCNSNVVLVSGEAVNKNRSLLDGRWDKHDTKCAANIADLVSRGRCLYYDSPSPGIIELRSLLSLRKRLKKEEHSFRMRIRNNLLAQYFPELDRFYSACESESLAIVKWCLEPDQIAGMAFEPFFQMVTRTRRGSAQLLRLRKIHQQAIESVGCPMGSAAAFEAQLLVDKLEQVRQQLKDTEAAIKDVALEFDEYRYLLTIPGFGLYISSSVIAAIANPFRFKNRKQLLRMAGYDLCAKRSGKTSDNAVPVISKKGNSNLRYALFQAAKIASGRTEIFRNYFAKMLRGRERERGIITKMRVKLAAKMLIIAWTLMKNKEPFDPAYLTIE

SEQ ID NO: 458463 - protein, 370 aa, unidentified
MRFIGIDLHTNRFTCCYRDEHSSVTNLKDRVIETFGLNAEGLTSFYGTLNKDTYVLVEATITTFSFVRLFKDLVREVVIANTYELKQVSLARCNTDKIDADKLCRILKAQVLSGELLVSKVTMPPKEIQDLRSLFTTYRLYLKQNTQRKNRIHSLLKEQLHGFTQEEIFSKKDREQIRAISPGTAMHYQVNQLLNMLERGEADVNELKDEILLRAAPFMEQIDILTSMKGVSVFIAIAILADIIDVSRFHNSKAFTSYLRSAPRVSNSNTSVSILGTNKKGRKLAATLLTQSLNHVLGSSQKLNRWYERLCEYKKAGLVRTGLRRRVFAEIFQMLKKGEYHYGRDPKNHSAKMAQYWHFLEKKEIMKKTA

SEQ ID NO: 458464 - protein, 346 aa, unidentified
MKYVGIDLHKKTISICVVNQERKQLDHKRFLCAAPDVIVNYFRKLGDFQAVVEATASYEWLVRLLEPLAKRIVLAHPKKLRVIAESTRKSDKIDARLLAEFLALDMIPQAYRPTPRQREHRVLVRQRYYLQRRITSIRNKIRRILSNYNADRESLFTAEGLEYLSTVKLSSSDRFAVEQLRKEFEFQHGQLKELETTLKQFIAEAPAAEAEARALLQSIPGVGPVTTEVVLSELADPQRFRAAKCAVAYAGLAPGQRESAGKRKDLHIERTGSKMLRWVLVEAAWQLVRRTGRWRVTFERLSGRIGRKKAIVAIARRLLCVMMALLKSGQPYRHAYEPALAGGKAQ

SEQ ID NO: 458465 - protein, 365 aa, unidentified
MWEAPVEIYRTSVGLDVHARSVVACGLDRSTGEVFERRLTPNHREILEWIRGLPDPAAVTYEAGPTGFGLARALGAAGIECVVAAPSKLQRPAGDRVKTDARDARHLARLLHLGEITTVTVPSVEQEAARDLVRAREDCRGDLMAARHRVSKLLLRQGIVYCGGHAWTTRHERWLQSHRFDTPGLQLAYDTAFDAMLATLDRRDRLDKAITEMAADSVFTPVVTRLGCIRGIAALTAFGLATEIGDWHRLDGRTIGAYLGLVPTESSSGATRSQGGVTKTGNSHARRLLVEAAWHHRTRYRPGADLRRRWDAASPAARARGQAANRRLHARWVHFDERKKRSVVANAAIARELAGWCWSLAVLDD

SEQ ID NO: 458466 - protein, 354 aa, unidentified
MKRTTKYVALDVHQATTLASVREESGRVIARSILPTDGPALTEFFRGMRGAIHVAIEEGTQAQWLHDLLAPHVDRLIVCDRRGQPRQGNKDDRHDADALSEQLRRGGLRAAYHGGGTGAGLKELTRCYQNLVEDPTRVMLRLKAVFRARAIPTPGRAVYRPARRAEWLAQLPPGGARVRAEALWAELDALVALRPQAKTAMLATAAREPRWAVLRTIPCFGPVRVALLLATMQTPWRFRTKRQLWAYAGLAVVTRSSADYGLVDGQAVRRRRAPLTRGLNRNHHRLLKHVFKSAATAARARPGPLQDLHRALVARGLREPLADVTLARKLAALTLRLWKKGERYDPTQLTPQAR

SEQ ID NO: 458467 - protein, 362 aa, unidentified
MQIIGCDLHARQQTLAMLDTGTGEVVNRTLRHEGNSVREFYSALPGPVRVGIEATGSMKWFLQLMEELGIDCQVGHPATIRAAEPRRQKHDQRDAELLLKLLVEKRFPSIWQPSKELLDLRGLLLHRHQWVRMRTRIQNALQAIALANGLRRGSSLWSESGQRDIASLPLATHTAHRRSELQAMYARFEAEIEKLNEQVLEQAGQRPTAELLMSHPGVGPITALATDVFLGDPKRFNDGKALASYIGIIPRENSSGGRQRLGGLSKQGNPLLRFLWCEAAAHAVRRDPELGRFYRRKLVQKGLGKARVAAARKLGIRLWIMLRDQIDYNEFCRRGQMQQKSGDACAGMPGARYGAKSHRLID

SEQ ID NO: 458468 - protein, 370 aa, unidentified
MSENAITYVGLDVHKKSIAVALLPAAGGAPLEWQEANEIPAIHRLVRKLRREGGSEVACCYEAGPTGYALWRQLTALGVRCTVIAPSLIPVKPGVRVKTDRRDARKLAELFRAGLLTEVHPPSESDEALRDFCRCRDDVRDDLLRARHRMSKFLLRRHCIFTGSKHHWGTRHMHWLEQLRFDDGASQATFNSYFLAIQQIEERMARLDAHLAEFGAQEPYREPVAWLRCFRGIDTVTAVSLVAELHDFRRFRSARALMAYLGLVPSEHSSGESERRGSITKSGNRHVRRLLVEAAWHNRHRPGLSAPLRKRREGQPDRILAIADRAQQRLSRRFARMVARGKPSPKTVVAMARELVGYIWATLTLTTAPA

SEQ ID NO: 458469 - protein, 355 aa, unidentified
MKGEVQNKKVLVRGKEVFIGVDVHKESWLVTARTEGEEVFHGGIPSQYHALQRLFDYFKDCKVKVAYEAGPCGFWLYDRLTEDGIETIVVPPSLIPIESGNKVKTDKRDSRKLAKLLESDMLKRVYVLTEEDRVDRELLRTRRQIVEHRNDVARQIKSKLLFYGIRSPFAPRYGWGRNYLQWLRGLELPREGLRACFESLIELYEYLSDQLMKMNQRVKELSQSSKYRQRLKFLCSVPGIGTLIGMEILVELQEVERFKRADELASYIGLTPSEFSTGQYVRQGRITRCGNKRVRTCLVESSWILITKDPLMRLKYNRLKSMKGAKRAIIAIARKLIIRIRRILLNNEPYVVGGC

SEQ ID NO: 458470 - protein, 343 aa, unidentified
MNITTVGLDLAKSVFHVVCFNEHFKEVKKRMLRRNQVLQFFTQLPPCRVGMEACASSHYWGRELRALGHDVKLIPPQYVKPYLRGNKNDYNDARAIAEAVTRPSMPFVAIKTVAEQDMQAIHRMRAQCIRDRTALSNSTRGLLGEYGIVLSTGLATLRNSIHGLLEDADNGLSDRFRNLLARRHEQLVELDKHITFYTNELELLSQQDDACQRLQTIPGFGPIVSSAFRCAIGDGRTYAHGRDASASLGLVPRQHSSGGKNVLLGISKRGDRYLRSQLVHGARAVVVQAARKDDPLSRWINRIREERGWNKAVVAMANKMARIGWAILRYNTDYQPVLAPSTR

SEQ ID NO: 458471 - protein, 313 aa, unidentified
MLEKVRIVNDADRLTDVIARAGEAPEVVLEATYGWYWAVDALQAVGARVHLAHPLGVKAFAYRRVKNDVRDAIDLADLLRMGRLAEAWIAPPATRELRELVRHRAKLVALRSHAKAEVHAVLAKCGVQVLMSDLFGLAGTDLLDRLDLPAAYAARIASLRRLIDLINFEIDVFARLVRTRLAGHPGYAAVQHIPGVGPTLGAVFVAEIGDVGRFTTAAQLTCWAGLTPRHHESDTTVHRGRITKQGCRLVRWAAVESVQIVPKTTTIGQFRDRVAARRGRNIGVVAAARRQLEYVYYALRDHHVRALTHTTAA

SEQ ID NO: 458472 - protein, 342 aa, unidentified
MEFAVTIGLDLGKSVFQIHGVDAGGAVVIQRRLTRGRLLAFFAKQPACLVGMEACAAAHHWGRELQKLGHRVRLMPPRYVKPYVKRQKNDAADAEAICEAVTRPNMRFVEIKTCEQQGILVLHRVRLMLTRQRVQLSNAIRGHMAEYGLVAPVGRNGLQRLIAVIDDPDDARVPAVARASLAPLVRQLRLVNDQVLENDRLVRASARSTELGHRLMEVPGVGPVLASAMVATVADPTAFKSGRDLAAWIGLVPRQNSSGGKEKLGGITKQGDRYLRQLLVAGALAVIRYAQRHGTRRPWLMHLLARRTPKIAAVALANKMARMIWAMMVTGERYREPKVPAA

SEQ ID NO: 458473 - protein, 348 aa, unidentified
MSKNGQYVGLDVSLNETSICVIDDAGKTVWRGKTDSTPRAIATAVTQHAPRAVRVGLESGQLSNWLFHELKHMGLPVICVDARHAKAALSLKVNKTDANDALGLAQIMRVGWYREVMVKGLDCQALRALLVARAQIVSQITTLKNCVRGILKNFGRVLPKGLRSQFAERVRMAIDGHPVLGAIIEPTLKVLEAMRVQLLVYDRAITRRARDDETARQLMSAPGVGTVVAIAYMTAIEDPARFRRSSSVAAYLGMTPRRYQSGEIDHGGRISKCGDGMVRSLLFEAAKVLLSRSARPSVLKTWGKTIGKRIGAKKATMAVARKLAVILHRMWTTGTTFKWDAQVPPRHA

SEQ ID NO: 458474 - protein, 343 aa, unidentified
MQIRSVGIDLGKTTFHLVALGTSGKVLVKKKFSQKQLLAFTANMQTSLIGLEACSGAHFLGRALRQQGHEVRLIAAQFVKPFVKSNKNDFVDAEAIAEAVERKNMRFVPIKTDDQLDLQAMHRIRDRLVSRRTAVINQIRAFLLERGMVFAQKPAKLKAAMADVLENAENALTPMMRNMIGILWDEWKTVEQQIDELTDRLEQIAASDAGCCRIRQIPGIGPIVATAIVAAIGNGSAFRKGRDFAAWLGLVPRQYSTGGKAKLLGISKRGNTYLRKVLIHGARAAAMRIKRDRAPIGAWMDALEARAPRNVLVVAMANKLARIAWAVLSTGEDYRPAASTAAA

SEQ ID NO: 458475 - protein, 339 aa, unidentified
MRLYAAFDLHSNNSYLGIVDENGKRTFKRRLRNNPEMIRETLQPFKADIVGITVESTYNWYWLVDVLMDEGYRVHLANPCKIQQYSGLKHSDDEDDAFWLAEMLRLKILPEGYIYPKEQRPLRDLLRKRAHLVRLRTSLIVSLQNILARNVGAKMKTSSLKALKEDRVTPLLAGNDDISLAGKVSKDAIDALTKQIGAIEVAVEKKIKLKKPYDLLLSMPGVGRVLALTIMMETGPIQRFVKVGNYVSYCRKVPAGRFSNDKKKGNGNRKNGNKYLSWAYSEAAELARRFDSEARHYYDRKRSRTNAPIAYSALAHKLSRAAYHIMRDKVPFMPEKAFA

SEQ ID NO: 458476 - protein, 428 aa, unidentified
MNVLNERIIRITPTTIIVGIDAAKEIHWARITDYRGVDLAKPVKVHNSIEGFESLLAKIEKLRAKHGCDQVITGMEPSGHYWRVLGWYLKLHDSKPVLVGVNPYHTKQAKELNDNSQTKSDPKDALVVAHLIREGRYFDTYLPEDEYAELRQLNTERQRIMKQISRANNILIALLDEYFPEYATVWGNVTCPTSLELLRVYTFPSDIVSAPRDKLLKDIRMASGGTEGDKLMEKMIKASSRSVGVKEGLRTVRLRMLNLIDELHYFEEKKDAIEAELESAMDTLQLGKVLQSMSGVGSIISAAFLGEVGDISRFDNWKQVRSLAGLNLVENSSGKHKGKTKVSKRGRPYLRHMLYLAGECGCRCNPEMHKFYRYLRDRKNNPLSGHQAFVATGLKIMRILFHLAKTGEMYDPDKALGAVRLQQIASPA

SEQ ID NO: 458477 - protein, 536 aa, unidentified
MGRLANRHYGSSFHAAAVADISLAVIHKRAKRPRRHTAERSELVNNCAAGHNRSGGRPALARSRSLPLYPKRVTERLPAEPVALALTSNRKPPQEGHYIGSMDSRVKRRNNQQKTMNDSEQWQQHRAFGALDWASQKHSVIVVNQTGKVIEDFEIEHSALGWKNFRERLQAYGPIPFAIETSQGAAVEQLLEAGMMVYPLNPKSAQAYRERKAPSGVKDDRLDAWSFADALRVDGQGWKALRPEEPLIKELRLLCRDEVALIEQRTAFIQQLRHALAEYYPAALEAFKDWTSVSAWMFLQRFPTPESLAQAGKRKWQNFLHSRRLWGSEEGPRRMEIFAHALEFAGTAPTVKAKSLLALSLVQMLFAVEKQLAVYRHRIEELFARHPDHDLFGSLPGAGPKLAPRLLSEIGEDRGRFDGDPQALQCLGGTAPVTKRSGKKRKYCHVHQRWACDKHLRHAIHLFAEQSLSRCVWAELYYQHHRQKNCSHANALRRLGHRWLKIIHKMWLDRTPYNAEFHHRNQVKHGSWIFQLQPDQ

SEQ ID NO: 458478 - protein, 363 aa, unidentified
MLYIGIDQHRKQLTVSVRDESGNTVLRRQVSTQWQKVREFFAEIRERSTSEGGYLVLLEVCGFNHWLLQLLTEYGCREAIVVQPEEQDRHKTDRRDAATLSEVLWVNRARLMQGFPACGLRRIQVAGPEEQADRRVTGLRHDIGRELTRTINRVKAVLRRHNVEQECPTKGLNTKAGRRWLVCLPLSPVERMEVNHQLARADLLRQQLKQLQAEIIRRQERNRAAQIISTIPGAAAYSSLGLACRVGDVRRFKHPRSLANYWGLTPGSRNSGEARQRLGSITKAGSTLARFLLAQLVLHVLREDPRMRSWFRGIKRRRGSKIARVAVMRRLATIIWHMLTKNEGYVCGGPPQAHLKHKPSAGG

SEQ ID NO: 458479 - protein, 323 aa, unidentified
MYKVIGIDVSKRKFDSTFLRQSNKWANKTYKNELEGILKFYKELPEGDCIFVMEATSSYYLKLAYFLSEKGEKVAIVNPLKIRRFAQMRFERVKTDKADARIIAQYGMSEELKLWEPLERELIDIRQICSVMEKLIKDRTMWYNKKEALENDPRHSHIAMNEINEMLAFLYDKHSKLEKALNILIQANYGAENEIIRSIPGIGPKTAIMLLSLTDGFKRFSNYKEFISYVGMSPRIYDSGTIKGRARICKIGMGRARQLLYMAARAASKYNKACKELYERLLAKGKAKKLALIAVANKMIKQAFALISKNEFYSENYSSKLGI

SEQ ID NO: 458480 - protein, 306 aa, unidentified
MLSARPARVPSPPRHREETAIISIPHPTAPQLTIGVDTHLDVHVAHAADQLGRRVATVQVPTTPTGYQHLLAWARGLGQPVAWGVEGTGSYGAALARFLAANHQVVVEVNRPDRTARRRHGKTDPVDAQAAAKAVQAGDATVVPKAGTGQVEMIRSLRVARQTAMRARTQTINALKALLVTAPATLREQLRGLSVTRLVRAAADLEPGPITSPLAAAMLALRTLAGRHQALSAEIDSLTSELDRLTATAAPSLVALFGVGQDSAAALLVAAGDNPGRLRSDAAFAALCGACPVQASSGKTVRHRLM

SEQ ID NO: 458481 - protein, 460 aa, unidentified
MAQKRKNAPGKGRKGQPYSLNPIQPNAAGIDRGSREHCVAGPPLPDGSPNVKHFGTTTPELLRLAGWLDQQKIATVAMESTGVYWIPLFEILDSRGFDVQLINARQISHVPGRKTDMIDCQWIQLLHACGLLRGSFRPGDDICRLRALIRERNSIVDQRSDWVRRMQKSLDQMNICVHHAVSDITGLTGMAIIRAIVSGERDPRALASLRDCRCRKSEDKIAEELTGNWRPEHLFNLGQALKVYDQLCGVIADYDAEILKYVNSLQPPDSKEPSAPPPASRAKATKFSKLGQEPMRQALYRMSGSDLTTIDGVGVDTAAVIMSELGPDLSVFPDEGHFVSYLRLAPNISISAGKKVPGKFRAVTSTRVCNALRMAATSLRNSKTALGAYYRRISRRKGKSVAVFATARKLAQLVYRLIRYGQAYVDTGSEVYEARFNRRRLASYAKALKEMGYKIEPLAA

SEQ ID NO: 458482 - protein, 315 aa, unidentified
MNTIPSSSQPVHIGIDVAKDSLQVDLAGKSTRFANTAGGHRLLAAALPSAAFVVMEATGSYHLALLRFLQQSGIPAAVVNPARAKSFAKARGTLAKTDPVDAAMLSDFGRAFQPPATSPREPQHESLGELSSVRTAVLSEITLWRNLLEHQQSKEARCHSRARLRQAAASLAKVDRQIAALMEQSPEIAPVATVLRECKGVGIVTATILVTQMPELGKINRREAASLAGLAPYARDSGKSEGKRMTRAGRPRVKQALYLASLSAVRYHPALKDSYKELRAKGKPAKVALVAIARRLLVILNAKLKEHYAKAAMSA

SEQ ID NO: 458483 - protein, 382 aa, unidentified
MTTQQECIAAAVSLEGEILIEPFKFSNDYDGFYLLLSKLAPLDQHSIIIGLESTAHYGDNLVRFLICKDFKVCVLNPIMTSSMRKNNVRKMKTDKVDTLVIAKTLMMQDSLRFSTLEDLDYIELKELGRFRQKTMKQRTRLKIQLTSYMDQVFPELQYFFKSGLHQKAVYALLKEAPMPKDIASLHLTHLSNLLVKSSHGHFTKDMARELRVLAQRSVGLNDSSLSIQITQTIAQIELLDSQLFETELELANLVTCLHSVLMTIPGIGTVNGGMILGEIGDIHRFSTLGKLLAFAGLDPTVYQSGNFQAKRTHMSKRGSRVLRYALMNAAHNVVKNNATFKAYYDTKRAEGRTHYNALGHCAGKLVRVIWKMLTDEVEFNLE

SEQ ID NO: 458484 - protein, 407 aa, unidentified
MDIASEIHYARAFNNRGIEVGKLIRFTNSEEGFIAFETWAEELKVKYNKNQVIVGMEPTGHYWFNFAQHLKDHGIKIVLVNPFHVKRSKELDDNNPTKNDRKDPKTIAMLVKDGRYMVPYIPEGIYSELRTAMETRWQIVKQLNTIRNRVKRWISIYFPEFNTVFGDWEGKAALIALKEFPTPARVVEIGVEGIVSYWKKEKIRAVGKRRAVELIEAAKKSIGIREGLAAANNELLTLLEDYEMKIKQYERIMALIEQLTLQIPGMEEILKIKGVGLTTAAGFIAEVGDISRFEHPKQIQKLAGLSLKENSSGKHKGKTTISKRGRRRLRALLFQGIMPIVATNEEFGELHRYYTTRDKNPLKKKQSLILLCCKLIRIFYALLTKKVAYDPQKMMSDIKRPILQEVA

SEQ ID NO: 458485 - protein, 459 aa, unidentified
MSKVSKNKKKQAFQKGAGKKLERFEIIHQHSAGIDVGSMLMVVCYTDGDGTIRLQEFNSFTTSLYLLAELLQQAGVEKVAMEATGDYWKALYGILESCGMEMVLVNPHHYKNVAAQKTDINDAQWLHQLLAHGLLRNSHIASELHRELRGYLHERDIYKQQKSDTLNRIQKILTMMNIKFQHLISDIEGVAGMKLLRAISYGISDPEQLLNSINFKNLKADPDELLSSLQGDYQQRYINILSQSLKTYDFLKEQMLVYETYIEQTLKKLLTLEQDEIASIGKKTSHVRKNQYRFNLNGYLTAIFGTDLSQVEGLDEINLLTILAVTGTDMKKWPTAGHFISWLNLSPRPKISGGKIIGYERRISNNPATQAFRMAANSLWQSKGPIGQQYRRLAATKGSAKAIKAVARKIAVIFYNMVLKKEAYDATKIQPNIELQTAKKIARLQKEAAKYGLIIQKAA

SEQ ID NO: 458486 - protein, 320 aa, unidentified
MDQTEYVGVDVAKDKFDVATFINNRYKHSVYPNDAKGHAEFAAWLTKNSTSPWVCMEATGHYSEGIADFLLKKSIKVSVVNPYQIKNFAKASLARNKNDIIDGRVIREFCKCMQPRVYVTTSEAQKQLKGLMKLLDMLKGQLVQLNNQLHSLHEGMATDLLIKWIKNLEKEVSLVEQKMTALINEEPMLNRNMRLITSIKGIGKLTAFRVLALMPDVSSFQTTKQFAAYIGITPKQHQSGKLFGKTTISRLGDSRLRKALYMAALVAKRHNKGLSAFVTRLQNNGKTPKTIVCAVMRKLAHIIFGVLKSKLPFNENLSCV

SEQ ID NO: 458487 - protein, 408 aa, unidentified
MGRAAEVVAPSSSIRTDGGCPVVQVNDLSRSLAAFDPISTLVVVVEMSKASWLVSSVVPGVERQPLKKLEPDATAVLRLIERWRNEAVRVGRPISRIALAYEAGRDGFWLARWLIARGIEAHVIHSASVAVSRERKRAKTDRLDAAMLMRVFLGWLRGERGHCGMVAIPTMEEEDARRPNRERESLVNERSRIINRMKSALARLGIRGFKPHLRKAPERLAGLRTAEGTGLPTNIIEEFRRDMARLALVREQISSIEKTRAERLERAPDTGPHAMVRLLARVIGIGIETADMLVREILSRKLRDRRALARYAGLTGSPDESGLKSREKGLAKAGNARVRRGLIQLAWRFLMFQKDSALARWYRTRTEGPSGARKTTMIVALARKLLIALWRLVTTGEVPDGVELRTAA

SEQ ID NO: 458488 - protein, 309 aa, unidentified
MTAVGIDVSKSVLDVVVDGQSAVRRFPNTSAGVARLVRQLSQYEAVRIVVEATGGYEEAVLGACAQAGMWIARVNPRQARDFARATGQLAKTDGIDARMLAEMATVFHARLRRYEPREAWQDELRAWLRRRHQVMDAIQRQRQHMDMALPAIRTLANKTTVTLRKELTAIDNAMQTLLNAHVTPALQSAKGLGPIFQATALALLPELGHLSRQQIAKLVGVAPLNRDSGQTQGKRHIYGGRSPMRIALYMATLSAVRWDPRMREHYQQLRQRGKVAKVALVACMRKLLTIVNARRRDELRLATRCTQLA

SEQ ID NO: 458489 - protein, 476 aa, unidentified
MIYSVGIDLHKGQHRVHCLDEKAQPCDAFSFQTAPEGLAALEQRIFRDGSNPIVVFEPAGLTWLMVAAYLRSCHPECRVVRAKGQRVAALRRYLRGPVKSDRIDAFTLAKMPFIDPERLDEVYLAPAQTHALQRLTRQRKRLEDQITTHKKRIGSIVDGYLPGVRQSFSHPWSAQVRAFLHSQINPFAVIRAGEEALHRFLTRAKPGNREGGTESHLVYRACQNVLDLQKLCAAAGTLNEDFFVDLQDEIDRELRLMEAEEAETKALDRRIEDLYRELHPSDNLRTIPGVGEHTAPVFVANIGDPTRFPGQSEFANWTGVVPAARQSSGVESKGLRMTKAGPAIVKWALYQAGQIGRRWDPQLASVYYRQMVYHGKNHKQAMGAVMSHIAARVFTVFREDRPYELKDPEGKSISKLAAQELIMAKYQVPEDIRQARRKSKGRKAPGLREKRGTVAGREHEAAIAPQPATSLPSPVT

SEQ ID NO: 458490 - protein, 343 aa, unidentified
MRHYAGLDVSVKETSVCIVDESGKVCRETKVPSHPEDLARALHDRAWCLERVGLEAGPLSQWLFSGLAATGLPVVCIETRHTKAFLQAQVNKSDRNDARGIAQMMRVNLFRPVHVKTLTSQKRRALLTARKLLQEKALAVDNDIRGLLRNFGLKVGPIGASRFETRTRELVDGMAELAEIIDPLLEARRKLRELFAVLHRKLLVIVRDDTVCRRLMTVPGVGPVVSMAFTATIDVPARFKSSKAVGAALGLTPILNQSGESKRLGRVSLCGDGMTRTLLYEAAQVMLTRTTKWSWLKAWAMKVAARRGIQKAIVALARRLAVILHRIWVSGTDFRWTREVQSP

SEQ ID NO: 458491 - protein, 421 aa, unidentified
MQSATSTTLPETPLNDVTAGIDWAVDDHAACIVDGRGREIARVMVEHTTTGLRDLVIFLAKHGVDEVAIERPDGPIIDVLLEAELTVVVISPNQVKNLRGRYGSAGNKDDRFDAFVLADTLRTDRARLRRLEPDTQATTALRRACRTRKDLVAHRVAAANQLRAHLSIVFPGAVGLFADLDSEISLAFIARFDTQERADWLSPARLGKWLASVGYSGRTDPAVLHAHLTQAPRGLTGPAATAEAGSTHAMIALLTTLVEQIKILGRQIGDQLDAHADGHIFTSLPRSGRVRAARLLAEIGDCRAKYPTPESLACLAGVAPSTRQSGKMRVVGFRWACDKQLRDAVTDFAGGSRHANLWAADLYDRSRARGHDHAHAVRILARAWLYVIWHCWQDNAAYDPDKHHALQRVLTNRRATQNQAA

SEQ ID NO: 458492 - protein, 363 aa, unidentified
MLFAGCDAHKRYSVFALADNDGPVGRPVRVEHDRALYRCFLKELPPGTSIAVETIGSWYWMIDEMESAGHNPILTHARKAKLMMGQVNKTDKLDAAGLALLLRNGTLPGVWIPPGELQDQRELPRMRMALVRMRTTLKNRIQATLAKYAIEIDEASDVFGKRGREILALRLAELPPQTRLSVEMELTLLDQLEDQIRKSEEQIRAVVAETPAIKLLMTLPGVGPILGIVIALEIGDVERFGGADRLASYAGTVPRIASSGGKTRYGRTRSDVNQYLKWAFFEAANAISARQKSWPDRHVVRLYLRIRERKGHGKAVGAVARHLAEAAFWVLKKNEAYRDPQSSSTSSTREETRFSHEDRKLDH

SEQ ID NO: 458493 - protein, 426 aa, unidentified
MEEEKISMEIVNPHAAGVDVGSRSHWVAVGQQEKDIREFGVFNQDLFEMADWLHEKQVKTIAMESTGTYWQNLYAVLISKGFHVILCNGKFTKNIKGKKTDVKDCQWIQKLHSLGLLSSSFLPEGKTEELRTYYRQRANLLHQTASTSRKMQKNLRLLNLRLDVVVKDICGLTGLLIIRAICNGETNPQQLAALRHGNCRKSEEEIAKALQSNGRKDYLFALRQELDTYDHLQKKIQQCDEEIEKMLDQIINPDDNKRQHHNEPKPHKRINKNTPGNIDLNLKSYQMFEGADLLAIEGVSFSTVLALMSEVGVEGIRKFPSAKHFCSWLRLAPNNKISGGKVLSSKVPKGSNRLKIALRNAANAIGNLKESTPLRDFFQRINFRKGRVSAISATARKLAVIIWNMVVKGTPYNNPAGYLILDQNLC

SEQ ID NO: 458494 - protein, 341 aa, unidentified
MNVLYYIGLDIHKKTISYCVKKIDGTIVQEGKIAAERRVLQMWMLGLPGPWYGAMEATIFTGWVYDFLKPHAVDLKVAHPAMLKAITAAKKKNDRADAEKIADLLRVNLLPECYMLSEELRELRRILRYRNMIVRTAVKMKNKLSGLLMETGATYSKKRLHGRKYFAELLERVEDVPESVKGLLKLSRSNLEMFEAVQKKLIKTLREDKLIRDRVQRLMSIKGVGEVMALTWVLEIGEFSRFQSAHQAISYCGLCSAQKESAGKEKRAPISKKRNKHLQTMLIETAKLAPRWNPHLVEVHEKELTRGNPNRATLAVARKLVEYMLAVERRGTDFESPKQAA

SEQ ID NO: 458495 - protein, 419 aa, unidentified
MSFKILKNNCCGLDVHKTWIYACIGITDSFKRTEYKQARFSSFTKGLQELCLWLAKYNCIDVCMESTGKYWIPVFNVLEKNNIFVTLSHPKYTKPQKGNKTDHKDAKWICDLYMCGMVKPSFIPPADIRQLRDLVRYRFKLTCMITGEKNRAHNCLTVSNLKLDDVFSDIFGKSSRSITEQILQHPGEVFDVAPFVDSRCKTPIEEIQAAVDGAISHEQAVKLRQCLKHIDELEMHKAEIEREIFRLSQKYESVLDLIRTIPGFDKNPLTAIQVLSEIGADMSVFPTAKNLVSWAGCCPRNDQSSRKIKSTRISRAGSYFKPVLVQIANALIKSKKHPEFTTRYRRIKARRGHKKAIIAICRMILTAIWHILTDLKPYTAKGFLEPRPVSKEKVLTASQALNLLKQRGYVIKDEPIFIS

SEQ ID NO: 458496 - protein, 309 aa, unidentified
MEITVGIDVSKARLDVHVHPANESFAVSNDAAGLDELKARLAPIEPVRVGLEASGGHERLAVAMLAAAGLPVIVLNPAQVRHYALAIGQRAKTDPIDARLIALFLEAAKPEVRALPDAQSDELSALMARRRQLLDMLTAEKARRQQARPGRVRTSLAHIVTTLQDELRKLDRDINTTVRGTPVWRDKEDLLASVPGVGPVTARTLLAEMPELGSFTPKQVAAMAGLAPFTRQSGKWRGRSFIGGGRGTVRTALFMAALVAAHHNPVLKTFYRRLLATGKPKLVALIAVARKLIIILNAIIRDQKPWQPA

SEQ ID NO: 458497 - protein, 354 aa, unidentified
MPHNTSRLEAVATIGIDIGKNTFHLIGLDRNGAIVLRQKLSRRQIEARLANTPPCLIGMEACVGAHHLSRQLKAYGHDARLMPARYVRPYSKGQKNDFRDAEAIAEAVLRPTMKFVAIKTVEQLDLQALHRVRERLVCQRTSVINQIRAFLLERGIAVRQGPSALRSEIPIVLSMTDKLSPRMIQMIEDLCADWRYLDERIETVSDEIKTLSEQDEGAKRLMTVPGIGPIISTATVAAIGNGDAFSKGRDFGAWLGLVPRQMSTGGRTVLGPISKRGNRYLRMLFVQAAHAVLLHPQCWERHGLKSWIAAAARRLNRFKLAIALANKLARIAWGVLHGGRSFEVRSMKPAAQCL

SEQ ID NO: 458498 - protein, 327 aa, unidentified
MTASPLGLDVSKLKFNACLVRQGGKLRHKVFANNAEGFAQLSDWLKQQAVTQVHACLEATGTYGDSLATYLHAQAHLVSIVNPAAIKAYAQSHLSRTKTDRVDAALIAGFCAERKPPAWHPPAPEVQELQALVRRLESLTEMHTAEENRLSSGLSVKSVRESVEVLLAHLSAQIKKTEALIRDHIESHPKLKRQRELLDSIPGIGETTAAVLLAEVADFSQYGSARQVAATAFLVPRERQSGSSVRGRPRLSKIGNARLRKALYFPAITALRCSAFFQSWAEGLRQRGKCKMSVIGAAMRKLIHLAYGVLKTGQPFDPEWTRKEKTA

SEQ ID NO: 458499 - protein, 350 aa, unidentified
MARKSNATAVTIGIDPGKNTFHLIGLDARGAIVLREKVARDRVVARLANVPPCLIGIEAGMGTHYVTRELLAVGHDVRQVPPVYAKPFRQAHKNDFRDAHAIAEAVQRPTTRCVPAKTDEQLDLQALHRVRYRLVGQRTAIINQIRSFLLEHGITVRQRLHWLRHALPDILAQRTDVLSPRMIRILADLAQDWRRLDERIDAVTGEIEALSKNTDACQHLMTIPGIGPIISSAVVAAIGNGTAFTRGRDFAAWLGLVPKQMSTGDRTILGRITKRGNRYLRMLFMQAARVVLVWPSKWMKHSFGPWLAAAAQRLHHNVLATALANKLARIAWSVLAQHRAYEPRVGAGAA

SEQ ID NO: 458500 - protein, 401 aa, unidentified
MSASDKRIWVGIDAGKGHHWAVAVDIAGETLFSTKVINDEAQILTLIETARERAEEVRWAVDISGRASTLLLALLIAHGQHVVYVPGRTVNRMSGAYRGEGKTDAKDARVIADQARMRPKGFARLNTPPELVTTLQVLTNYRADLIADRVRLINRLRDLLVGICPALERAFDYSAAKGPVVMLTEYRTPTALRRIGVKRLTTWLERRKVRGADAIAAKAVQAAQSQMAELPGEKRAAKLVCDLAHQLLALDERIKDNDREIRETFRTDERAEIIESMPGMGPILGAEFVAIVGDLSGYQDAGRLASHAGLAPVARDSGRRTGNYHRPKRYHRRLRYVFYMAAQTAMMRPGPSRDYYLKKRGEGLLHTQALLSLARRRVDVLWAMLRDKRLFTSAPPVTQGA

SEQ ID NO: 458501 - protein, 345 aa, unidentified
MNYIGVDCHITSLDFAVVNEKGHTTQSAKVETSVKEFMKFVKNVPKPRRIFIEEGELASWLLEASLTFGEELIITDPKTNKWIGKSGQKDDAIDAEKLAQLARGRYIKEIYHPVNNRRRFKELVYAYHDTVKSQTRIKNKTKAKFRREGIRCSGATVYSEKYRKEWRKKLPGNKVVHIIVNELWSQLDQIQNAKEGLKRNIRIHGKQYPEIKRFRNVPGIGLLHASTISAIIETPHRFANKKKLWMYAGIGLAERRSGEKVYSRRLTREYNRLLKNALKQASEAAIYSKDNQFRRQYLRLTIEKGIPSHKAKLTVARSLLAALYGMWKKGEAYDPEIDNKRGNKK

SEQ ID NO: 458502 - protein, 301 aa, unidentified
MPAAANSSAGFKRLNKWLKRHQDRQVHACLEATGRYGEDLALQLYGRGHKVSVVTPLRIKRYAASKLQRNKTDREDAKVIADFCATQHPLLWTPPAAEVQELQALVRRLGSLIEDRTRETNRLKSGPVSERVCRSIERHLTFLDEQITALETDIQEHIDHHPELRRQATLLESIPGIGAKTAARLLGEMPDVSLFDSAAQLSAYAGLSPRQEQSGTSVHKRSRLAKTGKRELRTALYMPALAALRFNPIIQTLVERLAARGKHKMVIVGAAMRKLLHLAYGVLKTGLPFDPNYAQHSQFAA

SEQ ID NO: 458503 - protein, 468 aa, unidentified
MLRNAVGLDPEAKGFASAYVKAGEEKVKIKSFLSGQEDLGRFISWVKKQGDVIIAIEGSNGQSKPIEKALRAEGIVFYSFKPADVSKFRKAVLGQNKNNKRDAESVARYAMALESQDKLEKYQRVFFPDEELRMLTRGYEQKSKAATMEVNRLWKLTRAASVDLYLTLGGKHPENEIRENIIQKQSILQLLSEKPDLLEWEGLSEEEFLLAMGSRNYKGRMELIKELEKITKTFEPQSAVLSYLIKNSAEQVLSLRRQMREIRQLLDTITQENEAVQLLRGYKGISTITATTLTAEIIDIRRFSTDDNLASYSGLCRKEYSTGERSGEATNSVFNRRLKDAFINAAKNFVRFNPESHLSGYCRNLIKGGMKVTEAYKRVARALARTFFRRLTSLHQADREDEGADEMKMRESDMANGNSNRSDNNHSSNISSFSLAHNKGKGPKKSSERHSCLIGGEKAGLSVGKERA

SEQ ID NO: 458504 - protein, 348 aa, unidentified
MQIVGALDVHRRQITFKTLDLVSGESRRGRISPAARGPLREWLEQFGGVEGEFVLEGTTGWRFVVEELERAGHVARLADPAETAARRGRKQRAKTDDGDCELQLRLLLGGELPEAWIPPAHIVELRTRVRLRKTLVDQRTAWLQRLQAQLFHQGVPPGLKPRTTAGRRELATLELSPAGRDVVELCLRMLDQLDRELAPIDSALRSFARQQPGCRALTGQLYGVGAVTATAILAELGDARRFTSSDDAVRHSGLDVTVWQSDRKRASGHLSHQGPALLRWALFEAAQCAARRSSPDHAYYLQVAKRIDHNRACLSVARKLCRRAHHTLRELGDDALAPTRTRLVDSAA

SEQ ID NO: 458505 - protein, 351 aa, unidentified
MILIGVDFHPSVQQVAYVDTETGETCERRLNHSDGEAERFYRDLERRQVRVRVGIEATGHARWFERLLAELKFELWIGDAAKIKAARVRKQKTDRQDALLLLKLLIEDRFPRIWVPTPENRDLRQLIWHRHRLVQMRTRAMNQLQARPLNEGVRRKKTLWSKAGRQQLESLKLAPWATRRRQDLLDLVDGLNGTIAELTAAIEQEAHKRPEVLRLMTHPGVGPITALAFVLVIESPDRFACGKKIGSYLGLIPEEDSSADRRRLGHITKQGNSLVRYLLTEAAQAAVRYDPDWRRRYIHLSKRRERAIAKVAMARRLAVSLYWMWRKGYDYQQHLKFGSYAGELELGHGVK

SEQ ID NO: 458506 - protein, 315 aa, unidentified
MLTAGLEIGSRELVLFTSGTWSRFSNDAGGHRKLVRYLGKRGAVRVCLEATGRYHLDVALALHRSPQVQLYVLNPWAARRFAEAGLRRAKTDRVDAAALAEYAERMPLREWAPPTPTTLHVQAITRRMQQLADRKSSEGSRLHALLASRALPQVVVQSVRDELSHLDAQLAALQLEAREVVRGDGHLDQLLQRLLTIPGIGERSALYLVGELAPLGGDMSVRQLVAHAGLDPRPIDSGSSVHKPRRISKRGNARLRRILYLTALVAARFDERFGAFYAALQQRQKTKRAALVAVMRKQLHGIWGVWRSGTDYDGD

SEQ ID NO: 458507 - protein, 453 aa, unidentified
MSPPLHEPPRLRTVGIDLAISAVQVAQVFDDGRPVGKPIRFRLTPADMKRFIAAVKAGVTGEVRITAVMEPTGMAWFPVAAWLQRAGVTVIRVKGQRVKALRKYLREHVKSDAADAHVLGAMPGFGGRGLDPVHVPAPEQHALQRLTKQRHRYQELVCSARRRVLDLIRWACPALEATLPETTTQLTLAILAELLDPRKVVAIRRDVLARFLSRHASGNHPKSGPFIDGLVDKLKAAAEETIELHGDSVDFAALQFEVAQEVEHVRLWERHMGEIERHVEKIYEIVHPSNALRSIPGIGPTLAPVLIGALGDAKRFRNEDHIRGFCGMFPAQSSSGGLDKPGQRITKSGNDRVKRALYIAADVARKIDPDLAAVYWRLMVKKGHHHKQALCAVATRLVNRIYRVLKTGEPYVLRDQHGAVITVPEAKRIVIAEFTVPIEVRQSRRKHLIQRPT

SEQ ID NO: 458508 - protein, 372 aa, unidentified
METSMWCRMLAGKQLGRLGRLESDHKEVSMNKFYYIGLDIHKRVIAYCIKALDGRLIGQGKIDADRKSVGEWVQGLPGPWVGAMEATIFTGWIYDFLKPHAVDLKVAHPEMLKAITAAKKKNDRADAEMIADLLRVNLLPECHMLSEEIRELRRILRYRNHVVRTAVKMQNKMAGLLMEVGASYSKRRLHGKKYFNSLLERVEEIPPSVKELLKLSRASFEMFRAVQKRLVEALRTNSLIRDRVQRLMTIQGIGEVTALTWALEIGDPWRFSSIRQAISYCGLCSAQHESAGKEQRGPISKKRNKHLQTMLIEAAKIAPLWNPQLAAVHELELKKGNRNRATLAVARRLVAYMMSVDKNETDFVLREEENAA

SEQ ID NO: 458509 - protein, 461 aa, unidentified
MRKARKVAGRRGKKRVDVTANLEILHPHAAGIDVGNAQHYAAVPVGRDPQPVQTFGSFTADLHRLGQWLRACQIETVVMPATGVYWIALYEVLESYGFKVYVVNAKHTKTLPGRKTDVWECQWLQKLHTFGLLNNSFLPPEEIRVLRTYLRQRENLVAGAGTCIQQMQKVLTQMNVQLANVLSDLSGKSGLEILKAILSGERDPYRLAALADPRVQASRKEIAQSLEGHWREDLLFVLRQVHDLYFFHLDNIAECDRRIEAHLQTLQSKVDLASQPLPQPTSLPRRKHIPQTNLQEELYRIAGVDLTRIDGIQVQTAQVVLSETGVNMTHWEDEHHFASWLGLSPNHQITGGKVIRRGTKKVLNRATTALRLAAQTLHHSQSYLGAKYRRLRAKLGAPKAITAMAHQLARLIYRLLRFGTEYHDKGMEHYQRQYRKNQIEWLKRQAAQLNMQLIPNTGVAG

SEQ ID NO: 458510 - protein, 369 aa, unidentified
MDECITYIGLDVHKETIAVALAEGSGRGEVCAHGQISNTPAALSRLSVKLSRPGSVLRFCYEAGPCGYGIQRQLAAAGHDCVVVAPSLIPRKPGDRIKTDRRDAINLAKLHRADALTTVWIPDPAHEAMRDLVRARLAAVRSLRQARQQLSGFLLRHGRHYSRPAWTLMHRRWLAGLRFEQPAHHIVLEDCIATIEAATARRDRLTAQIEVMLADWALAPVVHALQSLRGLALVAAATVIAELGDITRFTNPRQLMAYLGLVPSEHSSGGTRRQGGVTKAGNSTARRMLIEAAWSYRFPARISREQLLRQEALPKPIRDTAWKAQVRLCGRYRKLSRAGKPATTVTTAIARELAGFVWAIACQLPRPTN

SEQ ID NO: 458511 - protein, 316 aa, unidentified
MGGQEDYVGVDVSKERLDIAVRPSGEFFSEANDKRAMGGLVKRLKVLNCTRIVVEATGGYETLMVAALCAAGLPVVVVNPRWVRDFAKGIGWLEKTDHIDAKLLALYAERAELKVQQLPDEATRQLRELCARRMDLLEMIDAERNRLEHATSAVRREITGHIDYLRKRLKRIERDIDGAVRGSELWRHQNQLMDSVPGVGPTLRASALAWLPELGQLNRKEAGKLVGIAPLPDDSGKTRGYRRIAGGRGPLRKVLFMATMGAMLHNPHLRAYYDRLRARGKQHKVALVATMRKLLLILNAIIKTNTPWSESCLTNL

SEQ ID NO: 458512 - protein, 350 aa, unidentified
MSKKLESTIAVIGIDIGKNSFHIVGHDERGAIVLRQKWSRGQMEARFANIPPCLVGMEACVGAHHLSRKLNSLGHSARLMPAKYVRPYSKGQKNDFRDAEAIAEAVQRPTMKFVATKTADQLDLQALHRVRERLVSQRTGIINQIRAFLLERGIAVRQGQRFLRAELPCILATPPEVLSPRIVRMIEDLAGDWRRLDERVEGLSNEIEAIARQDAGCERLMSVPGIGPIISSAMVAAIGTGDVFTKGRDFAAWLGLVPKQISTGDRTILGKISRRGNRYLRVLFVQAAWVVLVKVKPTRWGYGLKRWIEAAKKRLHHNVLAIALANKLARIAWSVLARGRAFEASELPAV

SEQ ID NO: 458513 - protein, 395 aa, unidentified
MSAEGEAIRSNDYRKDTTVKAPSTRPAAVLGLDVGKSSHWACLIDRDGEVLASAPVRNREAELDALFASAPAGTLVVVDQFRNIGSLAVRRARAAGLGVAHLPGLAASRAAGLFAGEAKTDERDAAVIARTALGVPDSLSGVPGRGEALEAARALSSQRDHVVACATRDKNRLRAVLLESCPALEAAVDLSDRRWLERLAGFGGAWGIARSGAGGPRAEAAGEAAAASTAPPPALVEAENRQVRFLAARISEALDEAGALEAETAALLEGDETYACLLTVPGIGPRTAAQLAVSVDIGRFPDHDHLASYCGIAPRVRSSGTSVRSVRASRRGDARLKSLLIFSCNSLVRSSGRYGEYYRACRARGMGHGRALKAVARKRLRAIYAVMRDRVPYRE

SEQ ID NO: 458514 - protein, 315 aa, unidentified
MIIGIDISKQTFDVAWMSAEQGHHQSYDYNEKGIGALLKDAPSTAHYVMEATGVYHTRLALMLYQSGRQVSVVNPLVIKRFAQMQLSRVKSDKADAELIRSYGEQHAVSPWSPASTDVIELQQAHGWLDDLIRERTRLQNRQEAHAHQATASAYVKKQMKTQLRHLDKQIKDCEHHLEVIVKKSFADVYARLLTIPSIGSKTAIELIVVTDGFYRFEDVKALCAYIGVSPTTFRSGTSVKGKGGIAKMGQGRMRQLLYLCSWTARSCNPACRELYLRLKATGKPPKVISIAIAHKLLRQAFAVATKGTPYSESYA

SEQ ID NO: 458515 - protein, 319 aa, unidentified
MNKVSHDKVIGIDVSRDWLDIHCLPDGQRLRLPNTEIGHNRLVDLARPVGALVCFEATGGQEWRLWSVLDGAGVMTRQLPPAQIKAFAASRGTRAKTDRIDAELIAWFMMFRPDAGRNLPHEKLRLLRGLVSKRGQIVETRKRLLAQIKAHGKLGSADMFETMDAELKDLLDRQIAELEARIEQTIISDDELATTADILRSVPGVGPVASTMLIAEMPELGQITGEQAAALTGLAPIAHDSGAMRGKRAIGGGRRLLRHVIFQAALVASHHNPVLKAFADRLRAAGKPHKVVITAVARKLVTIVNALCKSRQKWVTQPA

SEQ ID NO: 458516 - protein, 353 aa, unidentified
MNKFYKSKTDGTVFKNMFVGMDVHKNYLQVAVLDEKGKVVSNSRVDNNLIKVNEFFDTLHPGNNTKVVMESSGMWYNIYESLRKKNLDVRLSNPTKTRAIASAKIKTDKLDAVKLADLLRGGYIAECYIPTRGTMELRELVRHKAALVRMRTKLKNKIHSIIAMNGTSISYVGTTFTKGHIEKLKELNDYRINGYLRIIESLNDEINAVSKKIILLAQEDEMAKLLMTVPGIGYYSALLIVSEVGDINRFPDSHHLCSYAGLIPSTHSSGGITYHGSITKTGSKYLRWIMLECLHAHIRNDKNSNVTQFYHRISKKKGNSKAAVAAASKLLKIVYWVMKENRTYHNNKSKYNV

SEQ ID NO: 458517 - protein, 583 aa, unidentified
MSRARSWVTSSRKTSPWAGRGESQHHARIRLPQEPPDRIDLVRVLRAALSGRMAEAQPTSGDRRAACDRRVEADLADSDAPLTRALSSRGRQKLRTRSTSSMVKSRSSGASPRTAFPASRLTATVRPAASERPGDLDRQQDVAPRLKRRGAPVSERSAGPSRGGGRNTKGVPMQYFVGLDWAAHEHAVCVVDERGKVVTQFTVAHTAEGMTELVARLSKLATPSELRLAIERPTGLIVDTLVESKFAVVPIHPNVVKASRPRYSAAQGKTDLGDAYLLADLLRTDGHRFRVLTPLSDQTKALRSQVRVRDDFVHQRVAIANQLRCLLEQYWPGVVEMFPDIDVPISLAFLDEYPTPQAAAGLGEKRMARFLARNSYRGRRPAREFVERLRSAPSSVCRQLEADTKGTMLRAFVAVLRPLVEQIATLNTAIEQAVEAHADAKVVTPLFRQGRICAAQILAELGDDRARFSSSEQLAGEGGMAPITRESGKHRAVSFRWACNMRLRTAFAMLADTTRHTMPWARAVYQRARDRGHKHAHALRILGRAWCRVIWTCWQKREAYDPAKHRAAVPFTLNLNLDEQEAA

SEQ ID NO: 458518 - protein, 392 aa, unidentified
MKFVGIDIASEQHFVGAVDGEGMVLVKPTAFAEDAAGYEKLLALLGKPEDCLVAMEATGHYWQNLFALLAAHGFGVSLLNPLRTRRFAEGDLERTKTDAIDALGMARFAQQKRPLVTRLPDAATQELRELVRLRDRLVQDFGDRVRQLHRIVDLGFPEFTRHVRTLDSELATALLHEYPTATAFVDASPHRLAKLKYDGVHKVGKELARALIDAAKVSVGRHHAEVYRVQARYACEDINVLRRRIRQLGGDIERTLDSHEVGKLLTTIDGIGPQTAARLIAELGDPADFRDGAALASYVGVVPALKHSGKHTPARAALTPVGNARLRAALWMPTLTAVRKNPWLAAYYQRLRAAGKLPKVALVAAMRKLLQAVHSVARNRKPFVPRLQEITP

SEQ ID NO: 458519 - protein, 423 aa, unidentified
MQNESTPGARGPVFCGVDTHADSHWLCVLDWRGRKVLSRRFPADAAGYEALAGAIAAAGEPACVAMEGTSSYGAGLTRHLASLGMPVREALSPARMQRRRPGQGKCDESDAERAARAAMSGSKLGTPKSQDGWVDGVRCMLAARSGAVKARTSAINTARSLLTTAPEGLRSRFRGMAGPRLMEELPSVRAALGALADLWAAARDAALDMERAIEASLEENCPALLAMYGCGPVSAAKLAVAAGDNPGRLRSEASFAAICGACPIPASSGKTVRHRLNRGGDRQANSALHEIARQRVMRDPETAEYAERARARGKSDREVMRCLKRYVAREAYRALMRPHEIRRPEDASELVAARRAARVSQVRAASILGTSEKYISMLERGQRELKPIRRAYEAWVEAGLPLDWDRQAFEAERKMNSKKHLAK

SEQ ID NO: 458520 - protein, 426 aa, unidentified
MAVPPESASQPVRRFGACTADLETVVAWLQQCGVTTVAMESTGVYWIPLFELLEARGFTVVLADAREVQRAPGRLKTDVQDCQWLQRLHTYGLLAAAFRPPEQICVLRSYLRQRSMLVTYTSQHIQHMQKALTQMNLKLQHVVSDVTSVTGMAILKAILAGERDPLTLARLRDRHCQHSEADIARSLQGNWRTEHLFALQQAVELYEFYHRQIAACDRQIEGQLQTFPDHSGGKPLPAAPRKPKRRRNEHHFDARLPLFRATGVDLTAIEGINEHTALVLLSEIGTDMSRWSTEKHFAAWLGLCPLHKISGGKVLSRKVRPSANRAAVALRLAASCLHHSQSALGAFFRRLKARLGTPKAIVATAHKLARLVYRLLKHGEAYVAQGMADYEHAYRDRVVKNLIRKAKELGYQLLPTNTRTAPDAAA

SEQ ID NO: 458521 - protein, 456 aa, unidentified
MQTFYLGIDASKGYADFIILNNQKKVVVDSFQLDDTFEGHCFLYELLLNLLADHPESTIYAAIESTGGYENNWYNALLAFQGSLTLQTARLNPLGVYHNSKADMKRNVTDKISAQNVAEYIIAHSEKVSYQSQDYLASLRKQWGFVKMLTKQSTQLLNQLESLLYSANPEIMTYCKDGVPAWILKLLIKYPTATNLAKAKVTSVARIPYVSSDKAEIIVQNAKKSVASATDEITQHLVAATVKQIMHLKETIKTQTEIMAKACSVPEVELLKTFIGIKDFSAIGLMLNIQSVKRFKTVKKLASFFGLHPAVKISGDGVSVVRMSKKGRTEPRQILYMVAMTAITQNPLISEIYQEHVQKGMKKMAAIGLCMHKILRIIYGMLKNNSPFNPETDRRNREKSVQKRKSTKENKIRRYQDYDPNAPISRRQKIKRMEQEPSQSDNGAECGILAPVPFPT

SEQ ID NO: 458522 - protein, 326 aa, unidentified
MHQLWLAFTSMSQTNKNIIYAGIDVAKQTLALDWPGGRCQLANEAGGHGGVVKLLGKSAQPVHVIVEASGGYEQALVSALHTAQLRVSVVEPGRIRAFARAKGLRAKTDPIDAGVLRAFGEAIQPEPALRPTPEQLRLAELVTRRSQLIDSLVAESNRSAHYRDPLLRRQASAYRRLLQRQIEQCEQAITQLIAADRAMQQRSQRLQQVKGVGAVTAAILLADMPELGSLRDETAAALAGVAPYNDDSGPVRGIRRIRGGRASVRRALYMAALSAVRHDPVLQRFYQRLRNAGKKPLVALVAVMRKLIILLNRLLKNPALVLQHAT

SEQ ID NO: 458523 - protein, 357 aa, unidentified
MTTQIVTTVVGGVDTHKDLHVAAVVDEHDRVLGTEFFPTTRHGYKQLVQWLRSFGHIARIGVECTGTYGAGLLRYLNAQDIEVLEVTGPDQDLRRRKGKDDTLDAVNAAHAAFARVRAVTPKTRDGLVESLRVLKVSRKTAVAARRVALQMIRMNIVSAPDELRDQLRILTRMKLIRMLAAWRPDLTRYRDVTGAYKIALKSLARRYLELTDEIADLDVMIKNIVDYLAPDLIAKPAVGYESAAQLLVTAGDNPERLSSEAAFAALCGVSPIPASSGKTHRHRLNRGGDRQANSALHIIAIGRLRTDPRTQDYVAKKLSEGHSKMEALRCVKRYLAREMFYALKARTEVINQTQIAA

SEQ ID NO: 458524 - protein, 345 aa, unidentified
MSEQQVVIGVDAHKRTHTLVAADALGRQLGERTVAATSDGHMLALEWAAQWPVRRFAVEDCRHVTRRLEGDLLRAGERLVRVPTKLMSGARRSSREGGKSDPIDALAVARAALREPDLPAAQLDGPQRQLRLLVDHRDDLVRERTRVQSRLRWHLHEIDPGLEVRSRGLRSRCVVDAVERHLEGFEGTVVEIARELVERVRQLNRRARELEQQITILVARIAPSLLGIAGCGALSAAKIVGETAGASRFRSRSAYARWNGTAPQPVWSGNTTRFRLSRGGNRQVNSALHRIAVTQARLDSPGREYIAQRMESGKTRTEALRLLRRRLSDVVFRTLLADETGLALT

SEQ ID NO: 458525 - protein, 392 aa, unidentified
MVCVGIDVAKNKHDCFILSSEGEVLADVFTIANNRDGFETLLQRIRSCTQPSDNIKVGLEATGHYSYNILGFLLDNGLPTFVLNPLHTNLYRKSHSLRKTKTDRIDARTIAAMLMSDVDLKSYTDTAYHNEELKSLTRYRFDKVKERAKLKTSVSRLVNILFPELETLASSLHTASVYALLSEFPGAKQIADAHLTHLKTVLSNASNGRFGRQKALEIRDAAKRSVGSMMPAKSLELRHTIRLIHELDREIEEIEAQISALMETISSPITSIPGVGIRMGAMILAEIGDFSRFDSPDKILAFAGLSPSTYQSGNMNATGAYAHMEKRGSRYLRYALFNAAKYVCQWEPSFAAYLSKKLAEGKHYNVAISHAAKKLVRLIFALQTSGQMYLPA

SEQ ID NO: 458526 - protein, 361 aa, unidentified
MSGTMTYVGFDVHARSTHAAAIDVMTGELTRMRFGPGVDAPVEWLQTLSWPVRACYEAGPTGYGLYRAAIAVGVGMQVIAPGLTPRGKSDRVKTDRKDAELLARCLIAGSLHPVKVPAPAVEAGRELTRAHDACRRDLMNARHRVSKMLLRHGRVYPEPSTWTQAHRRWLSAQQFPEPMSAFTFADLIATVDGLTARKKMLAEQIGVLATDPAWWPTVARLRAFRGVDTLTALAIHLELGADWARFEKPTRVGSWLGLTPSRSQSGESDRHGQITKTGSTLARRLLVESAWHYAREPRIGATLQNRQAGQPDHILQISNRAQQRLYHLYTTMKARGKHHNVTTVAVARELSCFLWAAATAP

SEQ ID NO: 458527 - protein, 321 aa, unidentified
MTKNKNYIGIDISKLTFDVSILDEKDKYKHYKFTNDLDGFKKLSQLLNYESDVCVMEASGVYYLKLATYLFSIKISVCVINPLVIRRFSQMRMIRAKTDKKDSSVIADYGKTETPDLWRPEENYVLEIKQMQAYVEQLNKSRTSLIRQREAFKYNTVYASEMNKSLDNMIDVLENQIALMENKMVELVNQNHKDLFERLNSIPGIGRKTSMLLIVISGGFTKFENAKQLCSYIGISPRVFESGTSVKGRSKICKMGMSRIRAMLYVCSWSAKKNNKACKELYDRLVEKGKSKKLALIAVVNKLLKQVFAIATKNEYYLEIN

SEQ ID NO: 458528 - protein, 428 aa, unidentified
MHCTQNEKIAQVSNESIVVGIDISSEKHCARAFTSRGIELTRKAFTFANTGEGFEEFDRWLEDQMDNSRLTKAIIGFEPTGHYWFNLADYLDEQNVQYVLVAPQHVKHTKELDDNTQRKDDWKDPRVIAKLVIDGRYFFAYRPQGKYAELREAFTRRCEIMEQLIETKNRLNRWFDINFPEYKTVYRKVDASTGMMILRKAPLPKDIVTLGVDGVNQIWRNAKQKGTGIKRAQTLVNAAQGSIGAKETSQATRISLWQLLDVYEIAEKQLHEIDELISSILAEMPDAQKMLGIKGVGQFTVAGFLSEVGDIRRFTDPRQIQKYAGLAIVADNDSGKHEGRTKLSQRGRKRLRWVLFRAALSLVKSNPQFYQLHQYFTGRQENPLKKIQSIVAVSTKLIRVVFGMIKNDRPYDPEKMMSDIHRPMKTVA

SEQ ID NO: 458529 - protein, 416 aa, unidentified
MKIVRPICCGMDVHKNIIVATIGITNKKTRITEYIQETFSTLNPDLLNLKQWLINHKCFDACMESTGKYWIPIFNILEDEINIYLTHPKYVKAIKGKKTDKKDSKWICDLFKHDLIKFSFIPPKEIRALREISRYRYKLVGMRSSERNRYQNCMTVSNIGIGSVFSDPFGKSAQAIMKEVLESDIIEDEKILKCIHGSCKNKDKILDSIKHCNIETDQRFKMNESMTHIEELQVHIDNCEIEIMKRAAPMFDQFMHITQLPGISTLSAILIISEIGVDMKQFESDKQLTCWAGLAPANNESANKKKSVRISKAGQYLKPLLVQCALGAIKDKEGYFGIKYSRIKKRRGHKKAIIAIARMMLVSIYHMILTGETFNPSDYESFRNPKPPIKQQDLTEESAIEFLKKSGFDVSKLTKQ

SEQ ID NO: 458530 - protein, 335 aa, unidentified
MAADWKGEPMKEQQFVGIDIGLRDLAMSSWPSQQRLQVANDDCGRARMSEWLTAMSPQFVVLEASGGLEATLAAEIHAAGLRVAVVNPRQAREFARSLGRLAKTDRVDAQVLAQFGQSAAQSGRLRETRVADAAETELKELLARRRQLIAELVAETNRKPRAGKLVRKSIVQNIKWLKRLVEQVNNQLQDAVKASSLWQTRVNLLMTVPGVGPQVAMVLTAELPELGQLNRRQIAALAGVAPHAHDSGQFRGQRRIWGGRASVRCALYMAALVGSRRNQILRACYQRLLSKGKARKQALVACMRKLLVILNAMVKHDRAWQLPQQQFSPCPPNHA

SEQ ID NO: 458531 - protein, 285 aa, unidentified
MLYLGIDQHARQITISLRDDGGDVLQARQVSTQPDKINAFFRQLTRERLHDGESFVAVLEVCGFNDWLIRLLHEYHCHKVILIQPDQRKKCKTDRRDAAALSELLWVNRDRLLQGKPVRGLRQVDIARGTDQENRRLTTLRKDAGQARTRLVNRVRHILRRHNLQWQMPTKKFPTKAGIAWLKQLALPEIDRLEMNHLLADLERVQGRRKELEQVIAQRCGVSEEAVLLSSMPGVSYFTAVSLACRVGRVERFPRARSLANYWGLTPGCRNSGENTPPTIWPTPV

SEQ ID NO: 458532 - protein, 343 aa, unidentified
MKLQALGIDLAKNVFHLVGLDSSGQVVIRKRCSRRQVLAFTANVEVQVIGMEACSGAHFLGRALREQGHDVRLMPAQYVKPYVQTNKSDYIDAEAIAEAVQRPRMRFVPIKTEEQLDLQALHRVRERWVMRRTAVVNQIRSLLLERGLTLAKGRRHLEQALPRILEDAELKLSGSFRVLLAQLQQELEQLVARIEKMDAEIQREAHENEACQRLTAIPGVGPVTATALIGAIGNASTFRRGRDLSAWMGIVPGEYSTGGKQKLLGISKRGNKYLRRLFVQGARSVLQHREKQVPALSRWLAELLGRTHQNVVIVALANKLVRMAWAVLCKNECYRAPVLPATP

SEQ ID NO: 458533 - protein, 320 aa, unidentified
MSASSAVVGIDVAKAHVDVSVLGAQLNAQRFDNQAEAHSALTAALKLLDVALVVMEATGGYETELACALQAAGLAVAVVNPRQARDFAKSMGRLAKTDAVDARMLAEFAAVLLRREDLARFLRPLADPQQQWLAALVTRRRQLLAMMLSERQRLQITPKGLHPSIEAIVAAIKAQLDEIEGQMVGHVREHFGELDRLLQSASGIGPVASATLIAELPELGRLNRREIAALVGIAPMANDSGSSKGRRRIQGGRFDVRRVLYMAALTASRRNPIVKAFYERLIAAGKLPKVALVACMRKLLTTLNAMVRTNKPWDNSLHGA

SEQ ID NO: 458534 - protein, 524 aa, unidentified
MAASNDKTTRKHIHSEGTYSSEEIRHLTLDDGTRVVTSPTTDIRRPVCAGIDVHKEILMAAVCRTDPTTLSAVFYVRQFTSSNSDVRRMAEWFKSYGVQDVCMESTGKYWIPVYDILEHNGLKPVLTHPKYVKQARGRKTDFRDAIHIANLFRMDLVVASFIPPADIRDLRELCRYRLKLTYMRTSEKNRYQNSMTVSKIRLDSVFTDPFGKSASSIMSYLINSDPGQVSDEAILKLIDRRVKAPREDILDSIHGYEFIGIQRDKLRIIQVHLDDINKCIALIDEKLDYYRQKYAAVIGHLTTMVGITEASALYILGEIGTDMSVWKDSASLASWAGLSPANNERANKKKSTKVGNGGHYLKPLLVQCALAAVKSTKKNPYFYCKYQTLKKRRGHKKAIIAIARKMLVAIYHMIRDDADFLPTDHAKTVTCCNHETKGLNLDNILTFLGEHGADAETLRLVKSQCSNPGAADGAGQKTGTIPSNKKQSRSSAKTTVVPQQDAGRKRNTSPKTKLPNTSASTATA

SEQ ID NO: 458535 - protein, 391 aa, unidentified
MIYVGIDVAKDKHDCFIVNSGGTVLFKVFTIANNLDGFNNLYQKIESVMKDVTKVKVGLEATGHYSYNLLGYLIDKGLTTFVINPLHTNLYRKSLSLRQTKTDKVDARTIASMLMSDVNLKSYSNISYHNEELKSLTRYRFNKVEERSKLKSSVSRPVCILFPELEKLVPKLHMASVYAMLSEFPGAKHLADAHLTRLTGLLSVSSMGRYGKEKAITFREAARTSIGSNMPAKSLELKHTIKLIQELTTEIDEIEKEIKIIMDKINPSILSIPGINYRMGAMIIAEIGDFSRFDSPDKILAYSGFSPSTYQSGQLDGACSHIEKRGSRYLRYALYNAAKYVCHWDPTFAEYLAKKRAEGKHYNVAISHAVKKLVRVIYYLEKTKQRYVKAA

SEQ ID NO: 458536 - protein, 341 aa, unidentified
MKLIRVGVDLAKSVFQIHGVDRSERTTWRRRLRREDWIDALRERLEPGGEVGMEACGGAHHWARELQKLGYRVKLIAPQFVKPYVKSNKHDAADAEAICEAMARPGMRFVPVKSVEQQDIQAMHRVRASLVEQRSAKANQIRGLVAEYGLVAPRELLHLRRALPRWLEDEGNGLTTRFRWLLRGLQEELIGLDQRIAELDREIEEIARSEPAAKRLMQLRGVGPIIATAMIATVGDARQFRNGRQMSASIGLTPKQHSSGGKERMLGISKRGDAYLRSLLIHGARAVIRTARAKDDPLSRWVIRIADRRHPNVAAVALANKTTRIAWAMLSREKNYQPAIL

SEQ ID NO: 458537 - protein, 351 aa, unidentified
MLIIGVDYHPSDQYIAFADTETGECGEQRLNHNDGEAEKFYRELQHRAVRVRVGMEATGYSRWFERLLAELEIELWIGDAAEIKTRRVRKQKTDPNDARLLLKLLLEENFPRIWVPSPENRDLRQLLWHRHRMVQMRTRIMNQLQALAMNEGQRWKKKLWSEQGRAQLEKLPLAPWASRRRNDLLELLGRMNPTIEELTGTIEREARKRSEAARLMTHPGVGPITALAFVLIIGTPERFPRGKQIGSYVGLIPAEDSSAGHQRLGRITKQGSTLLRFLLVEAAQAAARCDADWRRRYLHLAMRRERNIAKVALARRLAVRLYWMWRNGWEYGQLVKFGSNAGQLGTGHGVN

SEQ ID NO: 458538 - protein, 323 aa, unidentified
MAQVRSWAGLDVHAAKVLAATMDSRSGELTVRRLPGATEEVVRFCAGLPGPVRVAYEAGPTGFGLARALEAAGVGCVVAAPGKIERPATDRVKTDRRDAERVLRLLMIGGLHPVRVPTLSEEALRDLVRAREDVRGDLMRARHRLSKLLLRHDVRFDGTGGTWTQRHRQWLGAVDLGQRGAQVTLHDYIGAIDALLVRRDSLEATSFARAAHVMSFLGLVPSEHSSGQTRRQGQITKSGSGHGRRLLVEAAWHYRRPPAKGQPLKRRQADQPAHVLAISWQAQQRLHRTWQRLDHERGKRRTIVAVAVARELAGFCWAVANAD

SEQ ID NO: 458539 - protein, 343 aa, unidentified
MSEAIIIGLDIAKHVFHVHGADERGRAIFRKRISRGKLLGFFASQPSCTVALEACGGAHHWARQLTQLGHEVRLIPPAYVKPFVKRQKNDAIDAEAICEAAQRPSMRFVAVKSEQQQAAGLVFRTRDLLVRQRTQLINAIRGHLTEYGWIAPKGPSHVAMLADLLEEKMARSLPEAARAMFLLMLDLLAGLEGKIADLDKEIARRAREDEVSRRLMTVPGVGPISATAIAALAPPAETFVKGRDFAAWLGLTPLQRSTGGKRKLGATSKMGERTLRRLLIIGSSAVVLQASKRGAPRGSWLEQMLARKPRMLVTVALANKMARIIWALLVKQENYRAPVAAQA

SEQ ID NO: 458540 - protein, 496 aa, unidentified
MGCCALEGGDAVSAIPIRNLMNCAAQPFRWRQQEELEMNPKRSKSRHGRKMPMVHPNAAAIDVGATMHMAAVRADRTPEPVRSFGTFTADLHRLVDWFTQCGVETVVMESTSVYWIPVFELLDARGFTVFLVNARDAKHVPGRKTDVSDAQWLQRLHSYGLLRASFRPKGQIAELRSYVRQRERLLEYAASHIQHMQKALTEMNLQLHHVVADITGATGLRIIRAILAGERDPEALAALRHYSCHSSAETIAKALTGSYRAEHLFALEQALALYTAYREKASACDVRIEAVLKELSIHRGRDHGAVPPPRRRHRTDQVNALAFDVRAALFALLGKDITAIDGLGAYLSLKLIAECGDDLSSWPSAKHFTSWLGLAPSNKVSGGKMLSSRTRRSGGRAAALLRLAAVAVGRTDTALGAFYRRLSSRIGKAKAVTATARKVAVLFYNAVRHGMEYVDPGASSYETRYRTRVVNNLHRRAKAFGFVLQPLEPKAGAAVS

SEQ ID NO: 458541 - protein, 312 aa, unidentified
MTEHCYGGIDVSKDRLDVMVLPDRKSFSVDNNAAGYTELVKRLRGLSIAAIGIEPSGGYERAVIRALLAADLSVRRINPNKLRQFGRARGVLAKNDRLDARLIAEYVAIMPTRVVQRDPATEQLAEVVTMRRQLCDEHVAVENQTAHLEDAMLRRLNKRRLARLAADILLLDRRMAQIVASNANLTRRYELLTSMQGVGPTLAFTLVALLPELGQMSRKQIAALVGLAPYDFDSGRLKGHRCIYGGRLPVRNVLYMAALSACRYNPALKVFHHRLAATNKKPKVIIVAVMRKMITTLNAMLRDNVAWQPKSA

SEQ ID NO: 458542 - protein, 402 aa, unidentified
MKEDSKGQTRGKARKAGNESRPGAQEIQTVLKAHEQRFAGSGNGDTGRKAPEVRFVGIDLGDKKSVCCFLDREGTIVAEEKFSTTREECAELFSKIPTLRIALEVGTHSPWVSEQLKSYGHEVIVANPRKMESIHKNKRKNDKVDARTLARLVRADPELLYPIRHRGAEARNDLVMIRARDALVSVRTDLICCVRGLVKSSGSRLPKCSAESFHKKAKDMLPEVLRPSLAPLLVQIGSLTTRIHKYDLAVSRLAQKKYPETSLLQQVNGVGDLTSVAYVLTLEKPERFAKSRDVGPYLGLIPRQDESGESSKQLGITKTGDRMVRRLMVGSAHYILGPFGKDCDLRQFGLKLAARGGKNAKKRAVVAVARKLGVLLHRLWLTGETYEPLRQKTSETIGLSSK

SEQ ID NO: 458543 - protein, 346 aa, unidentified
MHLNAAGIDVGADTHWVAVPCDRDERPVQRFGAFTADLYALAEWLRQCQIETVVMESTGVYWIALFEVLEERGFDVRLVDAHYARQVPGRKTDVEDCQWLQELHTYGLLRSAFRPEDQVCVLRSYLRQRSMLVAMASRAVQHMQKALEQMNLKLTEVVSDINGKTGMEILRAILAGERDPQRLASHRDRRCKHDQATIAKALEGHWRAEHLFALQQALEQYEFIQQQLRACETQIEACLQTFVTHVEVEPPQTTPARTRRSRQRQAPSFDVHKYLDAMTGVDLTQIDGIDALTALKVISEIGLDMTRWPTGQHFASWLGLGPGNKLSGGKRYRMRSKPTANRAASA

SEQ ID NO: 458544 - protein, 350 aa, unidentified
MQLHTIGIDLGKTVFHLVGLNPCGEVVVRKKFSRKQLLHFTANLKVKLIGMEACGGSHFLGRALREQGHEVRLMPAQYVKPYVKTNKSDYIDAEAIAEAVERPKMRFVPIKSDDQLDLQSLHRVRERWVMRRTAVINQIRGLLLERGITLRQGRRHVDEALPGILEDASAKLSGAVRLLLAQLKLELDHLQMRIDEADAVIQKIAGENEACRRLVVIPGIGPVTATAIIAAIGNGAAFKKGRGFSAWLGIVPGEYTTGGKQKLLGISKRGNSYLRRLFVQGARAVLQQSAKQSSGLRAWLDQLTTRTHSNVAAVALANKLARMAWAVLAKNEPYRPPMLAGAATAGLACR

SEQ ID NO: 458545 - protein, 355 aa, unidentified
MKSCFENKNLFVGIDVHKKRWVVTVRTYDLELKTFSMSPSAEELDRFLSANYSGALCHIVYECCFAGFWIYDYFNSNGYDIIVTPTNRIYRDGSIVKTDVIDSRKLAFQHSRELLRGVKVPSIQIREYKYIFRIYDKEKMREGQILRQIKAILEQKNHPMKWEKWNKQFVEKLKTISFHDKIFNLKFSQLIKEYEYVKDQIKDSEKRIKDIAEDDQLSIKIKRLEKIKGIGIISAVRLVVYLFDRDDRFIYGEKLVHYLGLTPGEKSSGEEVIRQRTGLIGNRQLRAIIMQLAWVAVRKDGNLLDKFERVYKRSGCKQKAIVAVARKLMMKVHAVIKKEEEYEINIITSDRGKAA

SEQ ID NO: 458546 - protein, 401 aa, unidentified
MRSIAMDVHRSFAQIAIVEDGLCRDEGRIGVRPEDLRAWAATLEPDDEIALEATTNSDAIATMLRPLVGRVVVSNPRKTRAIAEAKVKTDKVDARILAQLLAADFLPETWVPDDRTRMLRRVVMRRTHLVKQRTRVKNQVHAILARNLVSTCPHADLFSGVGRRWLAAQALPVDEQRSVDALVRQLDFHGDELTAVERDIAVEAIDDPVIARLMTVPGIDVTVAVAVVAAVGDFSRFSSPDRLVSYLGLNPRVRQSGNGPAVHGRITKAGPAQARGMLVEAAFAAARTPGPLRAFYRRVNQRRGFQVATVATARKLTVLCWHLVTNDEDYAFARPSLNAHKRRKLELAAGDPSRRGPVAGPSRDYHIKQLRDREKALVEHAERAYEVTVAHWQPKRPTGNG

SEQ ID NO: 458547 - protein, 387 aa, unidentified
MQSVTSATAVATTVRAKDITLFASLELSKSKWVVTINSPGSEKFSKHVIEGGDGACLLDLLSRSRAKAEQRYGVGVKATVIQEAGLDGFWIHRLLLADGIESHVVDPASIAVARRHRRAKTDAIDGETLLRTLMAWARGERRVCSMVLAPSPEEEDRRRLTRERGTLLKERIQHTNRIRGLLSGQGVRDYNPLRRNRFERLEALRTGDGRELPAMLKAEIRRELDRIALATTQLAAVERARDALIRTDAEEPNNPAALLLKLKGLGPEFASLLWLESLFRSFGNRRQVAAYAGLAPSPWQSGGVERDQGISKSGNRRLRKTMIELAWFWLRHQPDSALSRWFQARVGAGKGRIRRIAIVALARKLLVALWRYTTQGVVPEGAVFKAA

SEQ ID NO: 458548 - protein, 370 aa, unidentified
MGNRSMFVGLDVHKETIDVSIAEGERQGEVRHYGVIASDLEPLDKVVRALRAPDRTLHFVYEAGPCGFGIYRHLTKRGEDCVVVSPSMIPKRSGDRVKTDRRDSQMLARLHRAGELRAIYVPDDTDEAMRDLVRAREDAVVVGTQAKYRLKAFLLRQGRRYPGREGWTLPYRRWLTDLSFPSAAQHITLQEYRDAIAETEQRIDRLTEQLRQLAPTWRWAPMVAALQALRGVSFVTAVALVAELGDLTRFRHPRELMAYLGLVPSEHSSGPTVRRGAITKAGNPHVRRLLAESAWAYQGIPRIGRQHAYRQEALPKVVCDIAWKAQLRLTTRFRRLVARGKAKPKVATAIARELSGFVWAIAREVSPTPR

SEQ ID NO: 458549 - protein, 355 aa, unidentified
MDSEKYIGLDVHQATIVVAVMESSGKLVMESILETKAVTILQFFAGLRGTLSVTFEEGTWSAWLYDLLQPHVDQLVVCNPRKNALLKDGNKSDRIDARKLAELLRGNQLKPVYHGETGVRMLRELSRSYLTIVKDLSRVMNRLKALYRSWAIPCAGRDVYYGRHRAEWLAKIREAGVRRRAERLYEQLDMLRHLRQQARRELLAESRKHAITAKLRQIPYLGPIRSALAVALIQTPHRFRPKRQLWAYSGLALETRISAEYRYVDGQVRRSKKLLSIRGLNKDHNHDLKGLFKGAATMASVRPGPFQDFYQAALAKGIKPTMARLTLARKMAAITLTLWKKGENFDAEKLKSQAA

SEQ ID NO: 458550 - protein, 302 aa, unidentified
MQTIVRVGVDLAKNVLQVHAVDAQGKTITNRAIQRSKFLEWCVQLPARCLVVMEACGGAHHWCRHLIRMGFDARMIAAALVSPYRMQGKSGKNDANDAAAICEAASRPQMRFVQVKTLDQQGMLCVHRLREGFKEERTACINRIRGLLAEFGIVLAQSPRVLRAHLHDILEDASNEVAGTARIALQRAFMHWQELDEHIHWCEQRITAHNKQDEQVQRAASIKGLGPLTASAIVATVGDFKQFKNGAQFAAWLGLTPRQHSSGGKSNLGGVTKRGDSYLRSLLVQGAKAAVLTGKHNQDPIS

SEQ ID NO: 458551 - protein, 457 aa, unidentified
MKKKGKRTAGIEEAHPFAGMSKVNPNAAGVDIGAVEIVACVAGDESTQIVKAFGNYTVDLQAIGRWLKEYDIKTVAMESTGVYWIPLFEELERQGFECLLISSRSLRRVPGRKSDIIDAQWIQTLHNYGLLESSFRPQAELVALRTMLRHRGQLLEHRAPHIQHIQKALLQMNVQLSQALSDVTGETGQAIIRAIVAGERDPQKLAALRDRNCKKSEEEIGKALTGTWREEHLFIVKQSLEMYDFYTRQIEACDAEIDRMYALTRLDWKADDLPPLPRKKRNSHSKNAPQNTADIRQHLKRISGVDISVVDGFGVSLAQTVIMEVGTDMSKFPDEKHFCSWLGLAPKHEISGAKVLKNKTLKTKNRAGQAFRMAAHSVKKADCVFGASYRRLRARLGPAQATVATAHAIARVVYRMLKYKVEYEPLSVNEYEKKYEEQQIKYMKKKASKLGFQLVPA

SEQ ID NO: 458552 - protein, 405 aa, unidentified
MTIAVHRPEAQPAVRVDLSAIFISLELSQSKWLITSLSPGGGEKLSKFSLPASDVAGMLTRFAELQRKAEARTGRAFPLVVIQEAGLDGFWVHRVLEAEGIESHVVDPASIAVSRRKRRVKTDRIDGEMLVRALLAYKRGDPRVCAMVRAPTPEEEDRRRVSRERKSLTIERTRHVNRIKGLLFGQGVHGYRPLRQDRRKRLDELQTGDGRPLPAQLKAQICRELDRLELVILQIKACEEARDALLAAPHPAATTYTNNLVSAVEPSSPAPSVPVMLLQLKGIGPEIASVLWHEGLSRQFDNRRQVASYAGLAPSHWQSGKVDHDQGVSKAGNPRLRTTLIQLAWLWVRHQPSSALTGWFKARVAQNGGRLKKTTIVALARKLLVALWKYVNAGVVIEGTVVKAA

SEQ ID NO: 458553 - protein, 462 aa, unidentified
MARRKRKNTSSSDALPPQLATVNLHAAGIDVGAEEHWAAVPPCDDPQPVRRFGANTADLEALADWLWGCEVTTVALESTGVYWIPLFELLETRGFQVLLVDPSKLPRSGRPKTDVHDCQWLQRLHTYGLLSACFRPEEQVVVLRSYLRQRATLLADAARDIQHMQKALTQMHIKLQHVVSDITGVTGLAIIRAILAGERDPLQLARWRDPRCKQDEAAIAAALHGTWRVEHLFVLQQALERYEFQHRQLAACDARIAAHVETFADQSHGAPLPPKRGQRRRHRNRPAFDPREPLYRMTGVDLTRIEGIDETTALIVISAIGLDMSKWPSEKHCTSWLGVSPQRRISGGKVLSSRTRPTTNRAAAALRLAAASLHHSQSALGAYFRRMKRRLGTSKAITATAHKLARLLYSMLKHGTASVAQGLEAYEQQYRERVVKNLSRKARKLGYALVKPGEATVETSLA

SEQ ID NO: 458554 - protein, 388 aa, unidentified
MLLDHPSDGPAAIRTQFDAIFVSLELSRSTWLITSLSPGQGEKMSRHSVKAGAVAELMKLFAELNGKAQVRTGLSYPIITIQEAGLDGFWLHRVLKQEGIESHVVDPASIATPRRKRRAKTDRLDGETLLRALLAYKRGEPRVCAMVAVPSPEEEDRRRLCRERQTLIAERIEHVNRIMGLLFAQGISDYAPVRRDRRARLMVLRTGDGRELPPHLKAQIGRELDRLELLLDQIAAVEREQDALLVASKPAGAKSAPHPVTMLLALKSLGPNFTAVIWTEAFYRQFANRRQVAAYAGLAATPWCSGSIAREQGVSKAGNPRLRTTMIQLAWLWVRHQPQSALTMWFKAHSQRGRKRAIVALARKLLVALWKYVTQGVVIEGAVMKSAA

SEQ ID NO: 458555 - protein, 423 aa, unidentified
MMKLKYSICCGLDVHKNVIVATIVITNADGISEYKQKSFSTFNSDIRKFHSWLIENNCYHVCMESTGKYWIPIFNYLENDIEVCLTHPKYVKAIKGKKTDKKDSKWIADLYKFDLVRCSFIPPKDFRQLREIARYRFKLVCMKSSEKNRIQNCMTVSNVGIANVLSDPFGKTATEIMSYLLTHTSDSIDEKAVRKLIKKGAKAKSGEIIEAIRGYNIESDQAKKLELARNHLEYLDGMIIQSEVELYVRMKPYYKFVELVSTMPGMTELSSTIVLAETGVDMGIFDDAKHLCSWCGLSPTNNESAGKKRSVQISKAGDYLKPMMVQCALAAIKSKKQPYFAIKYGRVKKRRGHKKAIIAIARMMIVCIYHMVSEEKPFTPTDYEEIMSPKNQTERVILNENNVFAYLERLGYDSSKLVKRNDN

SEQ ID NO: 458556 - protein, 373 aa, unidentified
MPRYSTAFGMDVHLRSTTVCALDAETGEAVTRRFRGNPWGEVAEWMSGFPGPSLAAYESGYLGFAPQRELSGLGVDCVVAAVSKVPRSAADLSSKNDRNDAARMAKAILSHDISPVWVPSPEIEGLRDLAGAHDAATARLAAAKQRLLAFLARRGYAYGGTTPAGNPRKYWTYGFLRWLDGIHPDDDGGIRALAALRNEVEAADETREAFLAEYRAAVAAGPLSAEVEALQSIKGCGFALAAAFASEVGDFSRFRSGRQVTAYFGLAPKQRSSADSVRLGGISGAGNALVRKLAVEGSWCYAQAGHQPKLMPKGSGVPLEIRMHGRKGSERLLRRREEMLERGMPQAKANAATAAELVRWLWALGAMCREAGE

SEQ ID NO: 458557 - protein, 336 aa, unidentified
MNEITRIAIDTSKSVFTLHGTDANGRAMLRRNLRRHDMAPFFARCPAMEVVLEACAGSHHWGRVLAGLGHKVRLIPPQYVKPFVKRGKNDRNDAEAISEAAARPDMREVTVKSADQQANAMLLSVRELLVRQRTQLVNALRGHAAEFGHISRLGREGVAKVLADVAEDAQLPTPAKDALALLGCEIGRLDARLAEIEARLVAQHQQTPTSKMLAEVPGIGPIGALSLVLRVDFTQFKSGRHFASWLGLTPREHSTGGKTRLGGISRAGDERLRQLLVLGATAVLRQAKPGKASAWLIALLARRPRKLAAVALANKMARIVWAMMTSGEAYRQPATA

SEQ ID NO: 458558 - protein, 345 aa, unidentified
MSTTIGVDVAKSVFEVAVSNRPGRIVKRHRLSRGQFARFLATRAPATVVMEACGMAHFWGRQAVASGHRVVLLPPHAVRPYVPRNKTDRADATALLEAARNATIHPVPVKSVTQQALTGLHRLRSTWLATRTARINIVRGLLREFGVTIPVGARQVVPRIAALLAGPDDTVPAVLHPALAAVISELRELDVRLRTVEQQLTAIAAAMPAVERLRTIPGIGLLTATGLVAFVGDARRFPTARHFASYLGLTPREHSSGLRRRLGAISKRGDTYLRMLLIHGARAVLCHAKKAITPARLQRWALHLERLRGHNKAAVALANKLARIAWAVWTSGTEFRVAHLTPTPA

SEQ ID NO: 458559 - protein, 351 aa, unidentified
MKEYIALDSHKRYSIIERENCASRDAVQCRIEHSRGSIQHYLSQCEPGTPVAVEAVGNWYWIVQEIEDAKQVPQLVHPRKAKLMMGMINKTDKLDVHGLNRLQRNGTLPTVWIAPGELRDLRELTRTRITVARQRTRLKNRISSTFSKYGLTVEEYSDMYGKKARNELNKLVEQLPPQTKYVTEALLQQLDFVEEQIDGMEKRLQELVKITPTIQLLMTLPGVGFILATAIAWEVGEISRFACAPRLAAYAGTTPRVHASGDKIRYGQVRSDVNHYLKWAFAEAGNSVALHAKRSPTRHVSQLYSRIRDRKGHAKAVGAVSRHLAEAVFYIMSKQESYVDPALKRSSSREV

SEQ ID NO: 458560 - protein, 347 aa, unidentified
MYPFYLGIDLHLKRTYLVLMSAEGEVIDKQRLKNSDISSYITENVPKETYAVMEATRNWPYFYDLLEKHVDRVELAHAKKVRMIAEAAVKTDQIDASVLAHLARLNFLPIAYTAPKEIRDLRQHLRYREWLIDERRRAKNRIHAVLAGYNLASPVTDLFGCSGREWLREMVEKELRPVSRRVVFETLEMINQLDAQTKELRNNIPLPEDLKPKAELLMSMPGIGKLIAAVILAEIGDISRFNSPKALCNWAGLTPRVHKSDEVVRHGRISKQGSRYLRTAMVSAAMTACRISPRWYGVYEHLSRRIGRRGAKVAVGRRLLTVVYYMLKRNQPYEEDYEQRRLVEQGA

SEQ ID NO: 458561 - protein, 459 aa, unidentified
MNGKRSKKASSEQPEWSLNLDVVHPNAAGIDIGNESHYVAVPPNRDPEPVRQFACFTEDLRRMAAWLKSCAIDTVAMQSTGVYWLPVYEMLTEEGLRVFLVNARHTKNLPGRKTDVQECQWLLQLHTFGLLNNSFRPPEEICVLRAYWRQRAQHVASASACIQRMQKVLTEMNVQLANVISDISGVTGMAILQAILKGERNRYQLAALADSRIQATREEIARSLEGNWRKELLFILQQEFNLYQTYQQQIAECDIALQAHLQTLEDKIEPDSQLPPAKANKKARGNAPTGFDLRGELYRISGVDLTQIDGINIMCAQTIIAEVGADMTRFPSEAHFASFLGLCPDNQITGGKVFRRGTRHVQNRAATALRMAATSLWRSKTYLGAKFRRLRARLGAPKAITAMAHMLARLLYRMLRYGEHYVDKGMKFYEDKYRQHQIRSIERTAKDLGFTLTFTPATA

SEQ ID NO: 458562 - protein, 312 aa, unidentified
MAVHTIGIDVSKEFIDAHRLPDNAARRFANTRRGVSELIGWMGVELVTRIVFEATGRYHAALERYLGAAGYPFVKVNPRQAKRFGEALGARAKTDRMDAAMLARMGMALDLDPGSARPENLLVLSQLLTARRALIKDRTAAKNRAEGLALDILRKQNLARRKRIELDIEALDRAIKDHIESESNLRARRDILVSIAGIAEVTAAMLISDMPELGSCDHRQIASLAGLAPMTQESGAWRGRSSIRGGRHEVRQALYMPALVAMRKNPDLKAIYTRLIEKGKPFKVAITAVMRKLLVLANALLRDGRKWAPEAP

SEQ ID NO: 458563 - protein, 340 aa, unidentified
MLMISIVNFHYKLMQNQTIVGIDISNLTLDICIRKDNQNQTFIIKNEVKAILGFFRSYQKHELLIAMENTGRYNWPLYEALAQLHQHRVFVVSPLHIKKSIGLVRGKSDKADALRIALFMEKHHRELHQWKPSPVSIEKMKILLTERSYRMKVKRQLLSQKTDYPRMKKTGLNKTLSVMNKKMADLANEQIKLIESAIQDLIHTDEQLAKQAALIRSVPGVGKVLSWMMLAKTAGFTTITEPRKMACYSGVVPFDHQSGTSIRGRSKVSVYADKAIKSVLHLAAMSAIRLKNDLGEYFQRKVAGGKNKMSVLNAVRNKIIHRIFAVIKNQIPYQNLLRVS

SEQ ID NO: 458564 - protein, 346 aa, unidentified
MEHYVGIDVSLELSSVCVVDGRGKIVKEAKVASEPEALVCFFNELGFPVDRIGFEAGPLSQWLHAGLTQAGFETVLLETRHVKAALSAMTVKTDRKDACGLAQLLRMGWFQPVHAKSIGSQEIRALLVARKQLLGRLLDVELSIRGILRGFGLKVGQVTRKTFEARIRELVTGHTTLERIAEAMLSARATLQAQYAKLHKAVLAIVGEDAVCRRLITVPGVGPVVAVTFKSAVDDPSRIAKSKAVGALFGLTPKKYQSGEKDVTGGITRTGDEMVRTALYEAANVLLSRITRFSKLKRWGMDVAKRRGSKRAKVALARKIGVILHRMWIDGTTYRWAEAKPIAAQA

SEQ ID NO: 458565 - protein, 346 aa, unidentified
MENIALDVHKHYTWARVENPEGKQLYENRLAHAHGTIKNFVRRWTPGSLVAVETVGNWYWVVDEIEAGGGKPQLVNARLAKLMMGSVNKSDKLDAKGMNRLQRTGTLPTVWIPSSAVRDARELPRTRMVLSEQRTQLKNRVHATLSKYGYVVDELSDAFGKRGRQIIKELLTQLPPHTRQALQHVLDQLDHVRENLKAIEADMISTFAPCPQTTWLKTLPGVGEILAVVIGTEIGSIERFARAEQLASYSGLVAREHSSGGKFHYGAVRRDVNVYLKWAFVEAANSSILNRERCGYHHISRLYQRIKARRGHNRAKVAVARHLSEASFWMLKKGELYREPVLSTQR

SEQ ID NO: 458566 - protein, 429 aa, unidentified
MGARELWVDVGPSNDFEPVRRFETFTADLYAMADWLVSRGIKTVAMESTGVYWIPACQILERRGVEVFLVNAAYTKNVSGRKTDMLDCQWLRTLHSYGLLPASFRPTAEIGVLRTYLRHRQMLIEYAAGHIQHIQKALGQMNLQLAHVVSDITGATGMRIIRAILDGQRDRWKLAELRDPRTKASTAIIAKSLEGNYRAEHLFSLRQAVELLDYYQRQIQDCDRQISDQLQAMESRIDTAQQPLKPARSRQSKKRNQPHFDCRGEAYRISGVDLTQIDGISESAALTLISEVGVDMNRWWTEKHFASWLTLCPNNKLSGGRVLQRSTRKSASRARDTLRLCAQSLLRSSSALGAYCRRMCQRLGEPKGITAAAHKLALLVYRMLRFGRDYVDIGQDQYHCKYKDRMLKQLARRAKDFGFQLVPSPQEVP

SEQ ID NO: 458567 - protein, 310 aa, unidentified
MEPLFVGIDVAKTHLDVHLRPTDETFRVPHDEPGLTALVTRLQPHTPALIVLEATGGYEVTVAAALATAALPVAVVNPRQIRDFARATGQLAKTDRLDARAIARFAEAVRPPVRPLADAQTRVLTDLMARRRQLVEMLGAETNRRRLAQAPPLLRSLEAHIAWLRQALRDLERDLDTTVRSTPLWREAEDLLRSVPGIGDITARTLLAELPELGHLDRRQIAALAGLAPISRDSGALRGRRMIAGGRSVVRTALYMATLTAMRRNSRIAPFYQRLRAAGRPAKLALTAAMRKLLTILNAVLRDRRPWQPT

SEQ ID NO: 458568 - protein, 373 aa, unidentified
MSKVSKFVGLDVHKATIAVAVARGDGAAESLGTIPNDPDAVVKLVRRLGAEDGLWCYEAGPCGYELQRLLSELGVNCIVVAPSLIPTKPGDRVKTDRRDALKLTRLLRSGDLTAVWVPDAAQEAFRDLTRARQAAQEDLTRVKHRLTKLLLRLGVRAPATAWSKAYRRWLDALTLPQPVQQVVLDETRLAVAQAEQRVERLTAAITESASQVAQAAPIGAWQSLRGIRLTTAAMLAAEIGDVTRFRAPRQLMAYAGIVPSEHSSGGSQRRGRITKTGNAHLRFALVEAAWHYRHGPRLSKALKARQQGQPAEVLAIAERAQRRLNSRYRHLVARKTKQQAVVAVARELLGFIWAIAWAVHPDQRLRPAQRQAA

SEQ ID NO: 458569 - protein, 323 aa, unidentified
MSSKANRKRRSFIGIDVSKKLLEVAVHQSDYHFSCPNDPKKFPSLISELISLRPARILLEATGGLERPLLQALSAFGLPVVVVNPRQVRDFAKALGLLAKTDRLDARVLAHFAASVQPPLRPLKSQDDTELDALMGRRTQLTDILTAEKNRRGSAATKTARDDIEEHIEWLEQRIKELDEKLKQQLERSPVWQQKDKILQSVKGIGFVTSMSLLADCPELGQLNRHQIAKLAGVAPLNRDSGQLRGSRHIWGGRAQLRSKLYMATLAAIRSNPVIKAFYQRLITRNKLKKVAIVACMRKLLTIINVMVRENQLWNVQAQPVSA

SEQ ID NO: 458570 - protein, 355 aa, unidentified
MNVLHYIGFDVHKKSISYCVKTAAGEIVEEGNLPAERNAIRQWAAHRTQPWHGGMEATLFSAWIYDTLKPYATQLQMGHPARMKAITSGKKKSDKIDARTIADLLRCNLFPACYVLAPDIRDLRRLLRYRNMVVQQSVRMQNKIAGLLMETGAPFNKVKLHGKKYFANLLKTLEEVPDSVKDLLRMSRAAMEMFDATQKRLVKQLLAHPELEPRIERLASIRGVGEITALTWALEIADPHRFPSIGDALSYCGLTTAFRSSAGKEQRGPISKQRNAWLQTALIEAAKLAPRWNPQLAAVYARELEHSHHNCATLEVARKLVAYLLAVDKSGQPFQVRIPPATSNTPPATVLAPAA

SEQ ID NO: 458571 - protein, 339 aa, unidentified
MFMIGIDPHKGSHTAAAVDRNETVIDTIRVDADGHQRARLLAWAARFEPRTWAVEGATGMGALLAQQLVAAGEHVVDVPPKLSSRVRLLERGRIDKTDPNDARSAAIVGWRTPALNVVVGLDEHRVVLRLLADRDHQVTANRTRTICRLHALLCLLIEGGTSRSLTVDRAEQLLASIHIDGPITRERVIAARQLLDEIRVLDTARTELRKRTNDAVIASATTVTNIHGIGPLTAAIIIGRVGDVRRFPTSGHFARHNGTAPIEASSGPRKRHRLNPRGDRQLNHAIHMAAVTQVGHDTPGRVYYLRKQAEAKTRKEAMRALKRHISDAVYQRLITDTRH

SEQ ID NO: 458572 - protein, 356 aa, unidentified
MSLKSNELSFKDEKIYAGFDVHAKSWKVTILTEHLLHKTFVMPPSPEKLYEYLTRNFPGAVYYSAYEAGFCGLWIHRRLTSLGVNSMVINPADIPTTQKEIAQKDDLRDSLKIAKHLRNGSLTGIYIPQESTLSERTMVRMRSQMVKDLNRCRCRVKSWLYFQGIEYPPQFSKAKSHWSRACITWLEKISLSDTTARNTLNLLLSEVKELRKLLLEINFHIRRLSKSKKYEEPFRILMSIPGITTAMNILTEVEEINRFKNFDSFCSYVGLIPSTGSSGEKEIVRGITCRGHRLRTFIVESAWIAARLDPALSKSYSQYCRRMEPNKAIIRIARKLLSRIYSMLKNKQLYETGKMA

SEQ ID NO: 458573 - protein, 344 aa, unidentified
MTEYKRIGIDTSKAVFTLHGIDQTDRPLLRINLRRAQMVPFFAKLPPTQIAMEACGGAHYWARELIKLGHKVRLIPPQYVKPYVKRGKNDRNDAEAICEAAGRPGKNFVPVKSVTQQAQGMVLKVRESLVGQRTLLANTLRGHAAEFGVIAGKGLSKIGPLLTAIEQTAIPSEAKDMASLLGKQIADLDCKIKEIEVNLAAAHKANAVSRRLATIPGVGPVIALTLATEIDPEAFESGRHLAAWAGLTPKEKSTAGKQRMGGISRAGNKRLRVLLVSGATSVINAAVKPGSKQMTDWLRALLQRKPRKLAAVALANKMLRVAWVLMARGEVYRRPATLTGGAAA

SEQ ID NO: 458574 - protein, 342 aa, unidentified
MEGAVSIVMGLDQHRAQITAEWLDTDSGELHRRRVSPADRAGVRAFATRFAGQELDVALEATTGWRFAAEELAAAGARVHLAEPAEAAALRGTKRRAKTDRADAKHLRELLGTGRLPESWIPPEHLLELRARVRLRHTLVDQRREWQQRMQAVLYHHGVPARAWLLGVESRKWLAGLDLAPDAREQLTTALALIDAIETQLVPLDARLRDYAKRQPGCRALMHHFGIGPLTSVTIVAELGDARRFSNSGQAVRFAGLDITVHQSDARRSPGRLSRQGPAALRWALFEAAQCARRPASPDHDYYLQTAARLGGNRACLAVARKLLKRSFHTLRELGDEAISPV

SEQ ID NO: 458575 - protein, 337 aa, unidentified
MNEVSTPVVGIDVSKSKIDIALLVKGKLKSKALPNSQNGFAELRKWLKNQGVELDEVHVCMESTGVYSEPLALALVDLGMKVSVANPASVKGFAQGLIIRNKNDKADAAVIARYCAAMSPALWQPPSREQRQLRAWNEHLASLKEVRQQQANRIEAFEFAGQTQVAAQAKTHLDWLDNEIKQLAKDIDDHIDRHPDLRRDAELIESIPGLARVTAGKVLGRVGDLRRFGSAKELAAYIGLTPRQRQSGSSIRGRTSISRMGCRDLRAALYMPAVSAMRRNPILNEFAARLKATGMPMMAVITAVMRKLVHQMYGVIRSGKPFDPNYLDKKLAIQDGI

SEQ ID NO: 458576 - protein, 355 aa, unidentified
MSGAYEGRQIVGMDLHRRRSVLVRMTDTGERLETVRISNDPQYLAQVMARAGEAPEVVLEAAYGWYWAADTLAELGAHVHLAHPLGVKMFSYRRVKNDQRDATDLADLLRMGRLPEAWIAPPATRELRGWVRHRAKLVGLRSSLKCQVHGVLAHAGIWVPMSDLFGVAGQQLLAELSAGTRLSVESRSRLDSALRVIAALEFEIELFTKLVNGRLRTDPAYRAIQAIPGVGPVPAAVFVAEIGDIGRFHRPQQLASWAGLTPKHHESDTTIHRGRITKQGSRLVRWAAVEAVQRVSGHTRLGQHRDRVAARRGRNIGVVAAARELLTLVFYGLRDHHIRALDTPAPPPAADRSAA

SEQ ID NO: 458577 - protein, 522 aa, unidentified
MVAALFFCSEKNNGPTPMERLCKGRRPGRAELNSPWKISMKPKQQEKNKKAICRPTQNNWHAMNRKQRRELTRKLQSEDLSLEVVHPDAAGIDIGNESHYVAVPPTRDSQSVRRFGCTTSELKEMAVWLKQCAIRTIALQSTGVYWIAVYDILEEAGFEVYLVNARETKNLPGRKSDVQESQWLMKLHTYGLLRNSFRPSQEIRTMRTYWRQRNDLVRSAGRHIQRMQKALTQMNIQLANVLSDVSGMTGQAIVKAILAGERDPYELAALRNWRVKASEEEIARSLEGNWQEDLLFVLQQEQDGYEFCQRQMAECDQRLQQYLQQLEDRSHGAGLPEEKRKERLRKKKKGNAPQFDLRAELFRVTGTDLTQIDGIDVTTTMTILSEAGWDMSKWKTEHHFVSWLRLCPDNRISGDKIIGKGRLPTNNRVTNALRMAASTLRLSNTYLGAQFRRLRTKLGAPVAIKAMAAKLARLVYRMLRYGMTFIDRGAEFYDAQHRKLQINYLKRKAANFGFQIIEAPAV

SEQ ID NO: 458578 - protein, 376 aa, unidentified
MKKYSKFIGLDVHKADISVGIANADRGEAGYYGTIENKAHSYIKVAKKLSKNGEEILFCYEAGPCGYEVYRQLIKAGYDCVVIAPSLIPKKAGDRVKTDRRDAVSLARLLRAGELTPIWVPDEEQEAMRDLTRAREDMKAMERQSRQRLGGFLLRHGKVYPGRSKWTKTYFRWLESLRFETAAQQIVFQEYIDIVKDAQRRVAAMEEEMRKALTVWTLKPVVEGLMALRGVDLIAAMTIIAEIGDITRFESPRQLMAHLGLVPSEHSSGERQKRGGITKTGNGHARRVLVETSWSYRLPARKTAHLRRKAEKASKTVQEIAWKAQKRLCSRYWYLIHKGKLPVESCTAVARELVGFIWAIACEVTGKGAATAAMNS

SEQ ID NO: 458579 - protein, 394 aa, unidentified
MPKLFVGIDVAKDTSSAQGIDSNGKGQFSLTFTMDSEGFKQLLKVIAEHSRELAEVRAAVESTACYHINLYSFLTAKGIPTVVINPLLIANFAKLSLRKTKTDKKDAMSIAQFLLVHRETINQLSLSQDLQDFRDIARERESVGNLLTSHKVEIKRLLQSTFPELERIGNLSTRVMREFIGAFPSARLVKMAKLKDIQKILQRKGVETRLTYTAEDLIEAAKHSVATISPAKELILQGKIRTLQHLQERYEEMTKILTEYCKASLLEDFEIMTSIEGINNRTATSFLAEIGCISNYASYKNLIAFAGIDPTVYQSGKFEGASRISKRGNRHLRRVIWIMTTCVIQHNAIFRAYYMKKRSEGQAFKKAVFATAHKLIRVIFAMLTQRTMFKEVCA

SEQ ID NO: 458580 - protein, 346 aa, unidentified
MKYFAGLDVSLEETAICVVDETGGIVKEARFASEPDALVVALEGMGLVFERVGLEACSLTAWLHDALRGAGLPAICIETRQANAAMKTMPNKTDRNDARALAQIMRTGWFRPVHVKSRQCRLWRSLLVARRTILNEMRTIENVVRAIMREAGIKLGTPSRAAFADRVRAMVGDDTLVMPLVAPLLTVLATMLDQFSRLTKQVLDLVRKEEVCRRLMSVPGVGPITALAFRATIDRPDRFRRSRDVGAHLGLTPARYQSGETDIQGKISRCGDELARTALYEAAHTLLVRSRKWSSLRAWGMKIAKHRGIARARVAVARKLAVILHRMWSDSSPFRWGKEADVGIAA

SEQ ID NO: 458581 - protein, 378 aa, unidentified
MATTRSVLRHELTAKSGDLYMSLDLGDKRWHISIGDGRCGLSHYSVGAGQTEELADCIAKARARLHSSRKAIVHSCYEAGRDGWWLHRWLTEVGVDSIVVDPASIEVNRRVRRAKTDRLDADKLVAMLVRHHSGERVWSVLREPSPEDEDARRTHRELQRLTHERVAHTNRIGSLLVLHNLRPNVVIGGRYWSVWWERHRAQVPSSLAAELEREVMRLQLVKQQVRAIEATRSQELLEGKQPLVAQLTRLRAIGAKGAWVLVKEMFGWRTFANRRELAGSLGLVPTPYASGDSQLEQGISKAGNRRVRGLLVELAWGWLRLQPSSALAQWFDRRFASGGKRLRRIGIVALARRLAIALWRYLKNGEIPAGAQLKPAGA

SEQ ID NO: 458582 - protein, 301 aa, unidentified
MKQGTQLDFSGQTIFVGIDVHKKSWKVSLRSTHMELKTFSQEPSPKALSGHLQQNYPSADYRLVYEAGFCGFGYQRQFSELGMSCIVVNPADVPLTDKEKQRKSDTVDCRKLSKTLSEGALKGIFVPGIEQQDDRGIIRVYQQMIKDQTRYKNRIKGWLNFQDQSVTVDTDKYWSNHYICLLKALCLPSSARINLDILLQGYQQTRIMVLTATREVRALSRQPRYQQIIKLIRTIPGIGEITALLFVTEIGDIERFDSLDALCGYIGLVPDMHSSGDQKSYWGSLKELIINYGRSLSRPLG

SEQ ID NO: 458583 - protein, 410 aa, unidentified
MEIVYERCCGIDVHKKSVVACLIAPGPTGAPSKQVRTFGTMTADVLELSEWLTSAAVTHVAMESTGVYWKPIWNLLEGSFGLVLANARHIKAVPGRKTDVRDCEWIADLLRHGLLRGSFVPDRDQRELRELTRYRTSLVRERTSEANRLQKTLEGANIKLAAVATDILGVSGRAMLAALVDGATDTVAMAELAKGRLREKIPQLEQALAGGFGPHQRFLVAQQLAHLDFIDAAIARVSTEVVERVREDEPAIAHLDTIPGVGRYVAEALVAEIGTDMTRFPSANHLASWAGMCPGNNESAGKRRSGKTRKGSPWLRSLLIQAAHAAARKRGTYLSALYRRLAARRGKSRAAVAVGHAILVIAYHLLQRGTDYQDLGPWYFEQRDRDAEQRRLVHRLERLGYKVSLEPSAA

SEQ ID NO: 458584 - protein, 367 aa, unidentified
MKKISTVVARQSKNFREQKLTIGLDLGDRSSWYCVLDEGGEVLLEQRLGTTPKAMKEVFGEMPRSRMALETGMHSPWVSRLLSELGHEVIVAHARNVRLIGESRRKDDRFDARTLARLARIDPQLLAPVQHRSAQAQAHLMVIRARAGLVRTRTSLINTARGLTKSYGERLRGCSPRNLNAEKARQLSPELQAALEPLLGAIESLSQRIYEYNQQIAKIATNSYPRVARLKQVKGVGTLIALTYMLTLEDPQRFRKSRDVGCYVGLQPGRRNSGQSEPQLHISKEGDPYLRTLLVQGAHHILGPFGADSDLRRWGLKLVERGGKNGKKRAVIATARKLAVLLHRLWVSGEAYEPLRNSRPVRLLAAA

SEQ ID NO: 458585 - protein, 462 aa, unidentified
MPGREERETWEKSRRQLEGLPVIRRGVAGIDLGSEQHWVCAPTLDRSGREVARFGATTAELIRMAEWLKARQVESVAMESTGVYWIAPHEVLEAQGLQVLLVDTRQLAQVPGRDKKSDPTDCEWIQRLHSCGLLRGSFRPEEAVCMLRTLVRDKANLVAESGDWLRRMQKSLDQMNVRVHRAVSDIDGVTGMAILRAIAGGERDAQKLASLRDRRCSKTQQEIAEQLSGHWREDHLFSLQQALKMYDAVQERIAAYEQEILGKLGAMEREEPHEPTAPPLQNASKARTIKKRGQEAKRQALYRMSGVDMTQIDAIGVETVEVVVSEYGSDLSRFPTEKHFVSHVTLAPRVPTSGGKPVKKKKRNSASTRVAAALRMAALSLRHSQTALGAYYRRIAQRRGGDIAVFAAARKLATLIYRLLRWGQPYVDEGTAAFENRYRQRRIHRLEATAKELGYQLTPVPA

SEQ ID NO: 458586 - protein, 353 aa, unidentified
MKARTTAETARLAVIGVDIGKEVFHLVAFDTDGKIAFRKKIRRLSFADTFEQLPPCIVGMEACLSAHFVSRKLRALGHEPRIIPALYVKPFLKGQKNDYNDAEAIAEAALRPNLRIVQEKSQDQLDLQASHRVRSRLVSRRTATINQIRAFLIEQGIAVRSGPRALRNSLFAILENRKDEISPRMASLIVGLYEDWCRLDERIETITSEIEELSRVEAKCRRLMSVPGIGPVISTGIVAAIGTGEAFERGRDFGAWLGLVPRQHSTGGRSILGRISKRGSKYLRTLLIQAAKVLLMRPHNWPRFSFGAWLKTASERLHRNKLAVALANKLARIAWSVLRNDKPFDTHLEAAAI

SEQ ID NO: 458587 - protein, 347 aa, unidentified
MNITRIGLDLAKNVLQVHGVDERGKALLRKRLKRGEVVAFFARLSPCLIGMEACGSAHHWARELAALGHTVRLMAPQFVKPYVKANKSDARDAEAICEAVGRPSMRFVPVKTLEQQSVLSLHRARQGFVAARTAQANQIRGLLSEFGIVIAKGIRQIEGRVPEILEEAENGLCGMNRALFQRLFEHFRQLDRQVKQLEEQIHAWHREQVDSRRLAGIPGIGPLTASALTAAIGNAREFANARQLAAWLGLVPRQASSGGKDRLLGISKRGDVYLRTLLIHGARSVLRRTRACPDAAQGWLAQLVDRRNPNVAAVALANKNARIVWALLAHGREYQPGYVGARLPTAA

SEQ ID NO: 458588 - protein, 356 aa, unidentified
MPTQVTKKIDFTGKQLFIGLDVHKKSWSVTILVDGTEHRTFTQPPDPESLSAYLQRMFPGGDYNSAYEAGFCGYGIHRRLNGLGINNIVINAADIPTSQKDKLQKRDPVDSRKIAKSLEKGSLHGIHIFDRELEELRSLNRTRFYLMRDLRRSKTRIKSFLQYYGELIPVEFDNNQWTLKFVSWLKQVKMQTMSGQDAFSNLISSYEYHRSQLLTLSRQIRVRIREYDRELYTLLKSVSGIGPLTASALITELGDINRFTNIDHLGSYVGLIPRIRESGETTHTGGITFRCNSFLRTLLIESSWQAIRMDPALMQYYHSHLVNNKGHKVVIKVARKLLNRIRYVMKNRQPYITGVA

SEQ ID NO: 458589 - protein, 429 aa, unidentified
MNYTQNEKIEQVTDSTMVVGVDIGSQIHYARAFDNRGRELTKRIFSFHNDLEGFNFFNLWVETLKTENKKTAVLIGCEPTGHYWFAFAKYVNDHQKRLVMVNPFSVKKIKELDDNSPKKTDSKDPKTIAKLVVDGRYSIPYMPEGIYAEIRDLVYSRDRIMKQHNISANRIQRWLAIHFPEYLGLYTRFDAISGLAVLEKAPLPKDVIALGVNGIRKIWHDKKMRGRGVTEDRAKTLVEAAHNSVGLDGGIGTKSELYMLLEEHRLWTSQLEAVNKVLEEMILKVPHVEKLLAIKGVGSITIAGFIAEVGDIRRFDSPKQIQKYAGLELVENSSGKHKGRTRISKRGRRKLRKILYQVMVPLLARNKEFRGIYDYYVTRVKNPLKRRQAMVAVSCKLIRVFYAVLTKGVEYDRFKMMSDIHRKSDIIAA

SEQ ID NO: 458590 - protein, 399 aa, unidentified
MFCGWDWGSTLHGVCLLDEDGATIKTWMVKHTEEDLSALFTELAQLGEPGLMPVAIERGEGLVVGLIARAGHPVLMVEPTAFKAARPRWGAAGAKSDAADAFMLADYARTDGHRLRRVEPLAQATRELAALVRARTSLVEARTAASNQLWAALAEHWPGAALVFQKLTSQIALAFLADYPTPQAAALLGEGRMRQFCRRHSYRGGKSPAELMSRLRAAPASANPIAEKVLEAIVRSQVAQIGLLNVEIRGLERKTADALAAHPKTALLKTLPRVATVSLAALIAEIGPLLERCENPEQVAAMCGAAPVTRASGKSRTVGFRYTANKPARVAITSFADNSRHSSAWAGDCYRRARARGARHPHAVRILARGWVRVIWACWTTDTPYDPARHRGEQRLAAA

SEQ ID NO: 458591 - protein, 321 aa, unidentified
MNKDKEIYGIDVSKNVLDVYSQRSGHLQFTNNEKGFKGLLKILPKKGLAVMEATGYYHYRLAQYLHKGGVAVSVVNPLSVKRFIQMKLSKVKTDKSDAKAICEYGMFNEVPLYNALSDVQAECLQLFRLLDNYLKQRTATKNKLKGEESLGKPSKVVYSSLKRNIRHLNKEIEAIEARLLELVKQDQQEQLTLLKSIPGMGVKTALFLIVVTDGFNKFDNAKQLCSYVGITPIIRQSGSSVRGKSRISKVGNRKLRNLLFLCAFSACKHNKACRELYERIVAKGKSKKLALIAVSNKLLKQAFAIAKSGLPYDENFVSKLS

SEQ ID NO: 458592 - protein, 462 aa, unidentified
MKSSSKIIKSQAEQSNTNSLPALFPDTAGIDIGSKSHFVAVPADRDISPVREFSAFTGGLLEMVEWLKQCAIKTVIMESTGVFWIPAFELLEGNGFDVKLVNARHVKNVSAHKTDVLDCQWLQQLGTFGLLKSAFRPADMILPLRAYLRHRDMLIKVASTHVQHMQKALTQMNLHLHNAVSDITGVTGMTIIRKIVAGETDPKILASFRDTRCRNPEEVIEASLVGNYRKEHLFSLSQALDLYDFYTKKITECDEQIQAEAKKFEAKCDKNRVEALARKAANGKPRKLKKHEYNFDLTSELVRITGVDLTKIPSIGASTALSIVSEIGLDMTQWKSAKHFASWLGLCPGNKVSGGKRLSGKSKPCKNRVATALRVAANTLYQSQCAFGAFLRRMKGRLGSPKALTALAHKLAKLIYMMLRYGTEYVEKGVEFYEEMYRARREISLRKKAKEMGYELVATATA

SEQ ID NO: 458593 - protein, 408 aa, unidentified
MRIIGLDIHRAFAEAVAWKDGKLSRAGRVIMRREPLEEFAKQLSKSDIVVVEATGNAASVAAVIGPHVSRVVIANPKQVRLIAHAKIKTDKIDAGVLAQLYASGFLPEVWIADETTQALRRQVTRRNQIVRQRSRLKNIIQSILHAHLIPSCPHQDLCGPKGRAWLSEQILPGDERLAVERHLREFDRLTDDLKVIERDHAQSALADDRAKRLITIPGIDMVVALALIAAIGDIERFARPEQLVGYLGLNPSVRRSGPGPAYHGRITKQGRGHARGMLVEGGWAAARSPGPLRSFFLRVQSRRGQHVAAVATARKLAILIWHLLTKNESYLWARPALHARKLRDLELRAGHKPARGQKGTTFAYNLKSQRDQERRWVEQAEAAYARFVAGWNVRGPKARTGAADEGRQ

SEQ ID NO: 458594 - protein, 420 aa, unidentified
MSFKIFRKNCCGLDVHKTWIYACIGITDTNGRTTYKQTRFSSFSKGLKELSTWLAKYQCTEVCMESTGKYWIPVFNVLEKEDVSVILSHPKYTKPQKGNKTDRKDAKWICDLFMCDMVKPSFIPPADIRHLRDLVRYRFKLICMITGEKNRAQNCLTVSNLKLDDVFSDVFGKSSRSITEYILKHPGDLFDVTPFVDRRCKTPIEEIQAAVDGAISPEQAVKLRQCLNHIDELEKHLEEIEQEILRLSDKYQAALDLIRTVPGFDKNPMTAIQVLSEIGGDMSVFPSAKHLVSWAGCCPRNDQSNKKIKSTRISRAGSYFKPVLVQVANGLLRSKKHLEITDRYKRIKARRGHKKAIIAICRMLLTAIWHILSDLKPYTAEGFRESRPVNESKVLTTSQALNLLKQRGYIIKDDLAPAMN

SEQ ID NO: 458595 - protein, 347 aa, unidentified
MTIVENPDAVIGGVDTHAEVHVAAAVNHVGGVLGVESFRTTKTGYRQLVSWLRSHGELTLVGVEGTGSYGVGVARYLARAGIDVVEVDRPNRQMRHRKGKSDQVDAVAAARAALSGTATGLPKTRDGNVEAIRVLMIARRSAVDTRIETLNQLRHMVFTATPEIRAKFTGLTPVALTNKACGLRPRDGGDPVRYVTLVTIRALGQRVQYLREETKRLNRLLRPLLRQTAPTLLEVYGVGFDTAAKLLVAAGDNPERIRSEAAWAHLCGVAPIPASSGKTARHRLNRGGNRQANSALYRIMLSRLRHDQATRDYVARRLSEGKTMGEIGRILKRYIAREVYKHLPRPA

SEQ ID NO: 458596 - protein, 320 aa, unidentified
MSEQPVVVGIDVAKAHVDVAVLGAPTAAGRFDNDGAGHMALIEALSPLAPALVVLEATGGYEAPLACSLQAAGLAVAVVNPRQARDYARSFGQLAKTDRIDAAGLAEFAAALLVRPDLGRYLKPLATAEQQDLVALVNRRRQLLTMLGMEAQRLAAARPAVRHSIQTLIRAIRKQLDEVDGTMARHVTKHFAELAELLRSASGIGAVASATLIADLPELGHLSRRQVCALVGVAPYACESGSMRGRRRIRGGRFELRRTLYMATLAAITHNPVIRAHYRRLLDAGKLKKVALVACMRKLLTILNAMVRTHTPFQTDYRKA

SEQ ID NO: 458597 - protein, 293 aa, unidentified
MNAYYVGLDVHKASICIAVLNAEGKVVIESVVETSAATIIDFLKGLHGHVEVTFEEGTHAAWLYDVLHQTKATVIVCDPRKNRLLQDGNKSDKVDARKLAQLLRAGLLSLVYHGEHGVRDLTELVRSYEYLVEDSTRIMNRIKALYRSRAISCAGTDVYKVKQREAWLTKLQGSGVRERAEWLYSELDHLSGLRRDSRKALVTERRRHPASKLLSKVPTLGPVRVAQLISAVVTPHRFRGKRQFWSYCGLAVVTRSSGDHQLVGAQVRRKKRAPETRGLTQSHNHCGSSKHSV

SEQ ID NO: 458598 - protein, 351 aa, unidentified
MLIIGVDYHPSFQEIAFLDQDTGECGERRLNHGDGEAEKFYRDLQQKGVRVRVGMEATGYSRWFERLLSELSVEVWIGDAAKIKTKRVRKQKTGRQDAQLLLKLLLENNFPRVWAPSPENRDLRQLLWHRHRLVQMRTRIMNQLQALAMNEGTRWKKRLWSEQGRSQLEKIRLAPWASRRRQDLLGLLDRMNPTIAELTAAVEQEAKKRPEVLRLMTHPGVGPITALAFVIIIMTPDRFPCGKQIGSYVGLIPCEDSSAGRQRLGHISKQGNALLRFLLVEAAQAAVRYDPDWRRRYLHLAMRRERRIAKVAMARKVAVRLYWMWRNGWEYSQSVEFGSHAGQLATGHGVK

SEQ ID NO: 458599 - protein, 403 aa, unidentified
MDEIRKRYIGLDVHKHYLIALGVDENLEVVLPARRVELSNLEAWMKKTLTRQDAVVLEMTTNTWQLYDELAEYAGSVTVVHPPHVALITRSQVMNDKIAASILARLLAKGLLVGIWVPPQEIRELRGLVAQRQKMTHLATQAKNRLHAVIQRHHLKPPEGNPFAKSKNGWWQALPLGKLEKMNLQSDLETLQFAEQQEERLRAEMTGIAAENEEIGRLLHLAGFGVITAVTVWAAIGDIRRFAEAKNLVGYAGLGTRVHDSGLTTRTGKITKAGRRDLRVALVEAAHVVANSHPHWKAELARLQPRLGYNKAIVAIARKLLVTVWHVLARKVADRFAEPEKVSQKLLRFAYEVGKENRPGRQTAAQFARERLDVLGIGQELTSIAWGSKKPIPLPPSALLKKK

SEQ ID NO: 458600 - protein, 356 aa, unidentified
MSQKLNSEIATLGIDIGKNSFHIVGQDQRGALVLRQKWSRGQVEARLANLPPCLIGMEACVGAHHLSRKLQALGHDARLMPAKYVRPYSKGEKNDYRDAEAIAEAVQRPTMKFVATKTAVQLDLQALHRVRERLVSQRTGIINQIRAFLLERGIAVRQGLHFLRAELPGILAKRTDVLSPRMLRVIEDLCGDWRRLDERIEGLSDEIAALARQDKGCERLMTVPGIGPIISSAIVAAIGSGDAFSKGRDFGAWLGLVPKQMSTGDRTILGSISRRGNRYLRTLFVQAAWVVLVKITPEGWERYGLKSWIEAAKQRLHRNVLAIALANKLARIAWAVLHKGRAFECVKTNATSARAA

SEQ ID NO: 458601 - protein, 359 aa, unidentified
MLVERTSVGLDVHARSVVAAAIDGVTGELRQARLTPSHDHIQSWIGGLEGPVAVAYEAGPTGFGLYRALTAAGVRCVVVAPSKLQRPSGDRVKTDAKDAVHLARLLRIGEITAVSVPSVAQEAARDLVRAREDCRADLMRARHRLSKLLLRQGIVYSDGVAWTNRHDAWLRRQRFDNPLTTMTFESDHDTVLAVTARRDRLDKAITELAADSEFTPVVRRLCCLRGVSTLTGFGLAVEIGDWRRFTGNSIGSFVGLVPSEHSSGASRVQGSITKTGNTHARRLLVEAAWHHRTHYRPGKIMHERWELAPAAARQRGEAGNRRLHERWIQFNLRKKKPAVANVAIARELAGWCWSLAVLE

SEQ ID NO: 458602 - protein, 425 aa, unidentified
MNTGPNTGSEAPAFAALIGIDWADEKHDICLLASEANQSEPGIIANTPEAIQAWAQGLQQRFGNRPVAICLEQSRGPLIYALMNYAFITLYPVNPNQAAQYRKAFAPSGAKDDPVDAELLLDMLCRHRERLTPWNPDDVQTRKIRGLAEERRHTVNLRSNCAQRITARLKSYFPQIPAWFDNDLTSVLVCDFLLRWPTATAAKNAKSATLRAFFYGHNCRSQALIDQRLNAIAHAVPLTEDAGVVEPAMLTVQTLARTIRDLTSAIAIFDKQIAEAFAAHPDAPIFDSFPGAGKVMAPRLLAAYGSDRNRWTKPEDMQSFSGIAPVTERSGKSTWVHRRWQCPKFYLQTFFEYAQHSIPFSAWAGAYYQQEIAKGKSRNTVIRSLAFKWIRIQLACWQTHTPYNEARYLQTLIKRGSPLAKIVTV

SEQ ID NO: 458603 - protein, 421 aa, unidentified
MSDDRCRLGSDDVVIGLDLASAEHQAVVVTAAGKRLTRFRMPHTRAGLEELLRRTTPAALGRPGGARVFAFEATGHLWEAVAYVLRARGEPYVVVNPLATFRVREARQLSREKTDLTDAEQIAELCRTGLVTRTQLEARPYLALRRAWGEYARLREERARLKVLVAHQLYGLFPEFLRVWADLLQPGALAVLRTGLTHAAMAALPLTEFVAQARAHGAGHRLWRDTLAQVHRAAAQTMACPDGLDVLAREVQRAVARIDMLTAHMTAVAAEIDSMLAELEEVPSLRPIPGLGWTSVAGLLAPVGAITKYHHGRQLIKLAGTNPSRRDSGQTVGHGQRMSHRGRAGLREVLYLATISCLQHNPRIRAHDDRLIQRPDRPLPKMQALGACMNKLLLYAFAVMHRREAFQLDHDWPRPTMARVA

SEQ ID NO: 458604 - protein, 627 aa, unidentified
MDQSRAAPVHVGVGIDTARYGHHVAFLGEDRQEVSKDFSFLESGQGYTELEAALRKISQRYGGAVHFDVRIDAAGQYATNLEAFLRRLDLAMTLSVGEPKRNRDYKNVHYPKRKSDAVDSRACARFAIVERPKTSAEIPQAMGQLREVNRVLNAHSKQTTRLLNQLHNLLARVFPELATLIDRLSAQWVLELLAKYPSAKRIAAARSLSAIAHIDEQRAKEIQDLARTTTASLHGAVAEALVVAGVEAVRHSQQTERKIEKLLEQAYDALGEGGHQQLITITGIGKKTAAALAAKIISIDRFEPPAQLVSYFGVFPEENTSGVDKHGKPVPKGTMQMSKKGNDLVRGLLWMACQSGIQSNPALRALYRRHRAASKRGDVALGHCMRKMLHLVFAVWKTNEPFNPTHYRWETPAHKDQDANSAEPVDSAAGCTPSACAANELAIATNELATRNTSDSAATHHGRSSGQQKKTAGRKEAMPPGKAVTAATNELATRKLSAASGPSKPAQLAAGAVLQPGGAIWVDFAHLRAQITMEQVLSKLGVLDRLRGQGPQRRGPCPIHGGEGNAGRPFSVHLSKNIFRCLHPACSTQGNTLDLWAAARHLPLREAAIDLARTFQLQLAPAKSATH

SEQ ID NO: 458605 - protein, 336 aa, unidentified
MTYFGGLDVSVKETAVCVVDDAGKIVCEQKVPTEPGDIVTLLFSIGEDYGRIGIEAGPLSQWLVNELTAAGLPMVCVETRHMKALLTAQQINKSDRNDARGIAQMMRVGLFKPVHVKTQFAQEQRMLLTSRKLLQRKLLDVECDLRGTLRNFGLKVGVVATGKFEARILEPLLVVRRVMRQQFIVLDKMLLDTVRHDPVCRRLMTAPGVGVVVALTYRATVDQPQRFVHSRAVGVHVGLTPRRYQSGEIDYDGSVSKSGDTMLRTMLYEAAQSLLVHPGKWSWLKAWGLRVAQRRGMRRAIVAVARRLAVVLHRMWVDDTEFRWSNTTTAVVPQAV

SEQ ID NO: 458606 - protein, 411 aa, unidentified
MDKIYDKCCGIDVHKKLIVACFRKGSKQELRNFGATTRELLELANWLQNGGCEMVAMESTASYWKPLYNILESSELKAMVVNASHMKAVPGRKTDTKDAEWIAELLQHGLLKASYIPDKQQRELRELVRYRKSLVSERTRELNRLQKMLEGANIKLSGTVSDINCMSARNILEYLLTGEFFDEAKYDEMYKQKIIAHNLKASKEQLIDDLNGVMTPLQRRMMKELLSHLDELNVHINNLEDEIDNFMKPEEKQATQAIQDVTGIGKNSSQAIISVIGTDMSRFPTAGHLAAWAGLCPGNNESAQKRKTGKMRKGNALLRSTLVVCAHSATRNKNSYFYAQFMRISSHRGKKRAYVAVAHSMLIAIYHILKDGVVFKDLGADYYNQFNKERKINAYLKKLKALGWEVPVVAA

SEQ ID NO: 458607 - protein, 428 aa, unidentified
MKSASSTPTDTTGVTRNGTLPEVPPNDVTSGIDWARDDHAVCVVDGRGREIAQTMVDHTAAGLRDLVAFLGRHGAGEVAIERPDGPVVDTLLAAGLVVVVISPNQVKNLRGRYGSAGNKDDRFDAFVLADTLRTDRARLRPLVPDTEATVALRRACRARKDLVSHRVAVTNQLRAHLRNVFPGAVGLFKDLDSAISLAFLSRFTTQTQADWLSAKRMGDWLAKQGYSGKVDPAVLHARLVTAPRGITGADAQAQVHITRALIAVLATLLQQIKSLSTQIDQQLAAHADAHIFTSLPRSGRVRAARLLAEIGDCRARFPTPESLACLAGAAPSTRQSGKSRVVGFRWACDKQLRDAVTDFASDTRHANPWAADLYNRARSRGHDHPHAVRILARAWLHIIWHCWQDRLAYNPENHRALQRVLANHNEVA

SEQ ID NO: 458608 - protein, 391 aa, unidentified
MSMYFVGIDISKYKHDCCIISAVDQQIVSKFTITNDKDGFEQLPISLNSLSNPEDIKIGFESTAHYALNLELFLENANHSFMEVNPVLIKEYKKSTTLRRTKTDSVDCESIARWLMTVEYKPHSKGFYHAYSLKSLTRLRDRLIRQRSFYLVKITNVLDHTFPEFKPFFNERLSKTAIYLLENYGSAEKMAHMNSASYDKLRCISRGKFSIQQFLHLKELAANTVGVNNSIFDIELNSLLTLYNSLCKEIKNLEAEITRLIEEVHPHYMSIPGIGPISAAVIYAEYGDISNFSNPSQMLAFAGIEPGINDSGTESHGGRMVKHGSSQLRYVLLNACLPLIRFDLTFATYYAKKRAEGKKHRVAITHVAKKLIRVIYALERQDVDFNAQKIR

SEQ ID NO: 458609 - protein, 392 aa, unidentified
MSKVIMIGCDLHDRSMLIRFAVGTEEPQQQLYTNDAAGRRQMIKRLLGLAQKRGASAVVFAYEASGLGFGLCDELHEAGIECHVLSPTHLPKTPKAAKQKTDAKDAQMILEQLRGHVLAGNKLPVVWTPPQRLRDDRELVRARVDVADELTRVKVKIGSMLKRYPLKIASPTRSRWTKKFVAHVRKKILPEMDTAVATKLECMFDRYEAFLAEQNKLDKGIDQLAKTDRYKRAYAKLRQLSGVGRLVAMTFLTEMGDLTRFENRREIAAYLGLCPSSHESGETNNRKGRITRQGPSRLRKVLCQAAWTSISRSESAAADYHRIKQGQSKRTKKAIVALMRKLGIKMWHIALGCGVSSELSGRGGPHAVETSARAQQREPFATPSPRPLGCAG

SEQ ID NO: 458610 - protein, 395 aa, unidentified
MKVNELQVAVDVGAHMHRVAVGDGAGQLLEEFDLAHTAAGFAGFFTRIERLRGRGKAAVSVAMEGYNGWARPLDAEVLAHGWKLYNVNNLKLARYKEIFPAPAKTDAIDARRILELFHLRSDLALARGVLQQIVALTQEAERLKRLTRRRRQLVNEKVRVVNRMHSDLQAVCPGLLAITTDVDNLWFLSLLRAREDIRKLARVRPGSLRALEGVGRTYCAKIQAWQREALFSHEVEWAGPMIVADATRVLALKNEIGTLDQAIEPLTDACENARRLRTMPGFGRICSAELAGEIGAIERFGSEASLALYLGMAVLDNSSGTHTGTKRSRQVNRRAKAAMMIAVVRHMEQVPRSRAYYDKKRAQGKTHNQAVRALGRQLVRVIWSMLKHQRDYELR

SEQ ID NO: 458611 - protein, 429 aa, unidentified
MNYTQNEKIMQVTNETLVVGMDIGSEYHYARAFDNRGLEYSKAPLKVSNNYDGFKSLQGWIEGLKAETKKTKVIVGMEPTGHYWFNLGDYLKENEINIVLVNPHHVKKSKELDDNLQSKNDRKDPKVIAGLVNSGRYTYPYIPEGVYAELRILSNTRLTNTVDLNRVKNRINRWLSIYFPEYSDVYSQVDAVSGIKLLKEAALPSEIIRLGVEGINAIWRRAKLRGVGKKKAQAVYEAAKRSIGKKTSGASASFELKCLLEDYEIKKAREEELIKRIEELLIEVKYAENLLEIKGVGIKTVAGFIAEVGDIRRFSSPKQLQKLAGLAIVDNSSGKHNGKTKISKRGRKRLRHLLFEAALSLVGKNEAFKALHQYYLTRENNPLKKMQSLMAIACKVIRIFYAMLKNGTHFDEAKMLSDIKRPAEHRQAA

SEQ ID NO: 458612 - protein, 378 aa, unidentified
MPSETTIHVAIELSVSSWLVATRPPGAEKSRLHHIEGGDTTALLALIAELRTRASTKLGKPAEVVCCFEAGRDGFWLHRALTMHGVAAYVLEPTSILVNRRARRAKTDRLDAEGMLRVLAAWLAGDRQVCSMVRVPTPEEEDAKRPHREREHLVQERLRIENRIEALLFTQGIRKRPSLRSWERDVAELRTGDGRALPSLLRVELDRLRRRLVLALELIREVEAERAEALAVTADDEMTQKIAALQRIRGIGTNFAAVLVREVLYRSFANRRQLASYVGIAPMPYQSGGMDHDRSISRAGNPRARTTLIQLSWLWLRYQPGSALAAWFRERVGTLQGRTRRIAIVAMARKLLIALWRYVETGVMPDGVEIRAQADVTA

SEQ ID NO: 458613 - protein, 370 aa, unidentified
MHQSSTLYVGLDVHKESIAVAYVAKAHDAEVVYLGAIGTRQCDIDTLIRKLQAKSKHLVFVYEAGPCGYWLYRYLTKKGYVCWVIAPSLIPKRAGDRVKTDRRDAVQLARLMRSGDLTPVYVPAVEDEAIRDLSRAREDVLRDLKAAQLRLKAFLLRHDIRYTGRATWGPAHLRWLSEVVCPTPAQQIVFQEYLRAVSEHTERLQRLEQELKDQVHTWRLAAVVDALQALRGVQFTVAVTTVAELGDLTRFDNPRQLMAYLGLTPSESSSGERRRQGSITKAGNTHARRALVEGAWAYRYPAKVSRHIPLRLEQQPKAIQDISWKAQVRLCKRYRKLTARGKHANQVVVAIARELVAFMWAIAKEVPVIL

SEQ ID NO: 458614 - protein, 403 aa, unidentified
MNAVGIDVSKGKSTVVALAPGGKFLSRPFDVLHTKSGIKELVSFVRTLDGDTRIVMEHTGRYYEPLLQWLAASDLFVTAVNPKLIKDFGNNTLRKVKTDKADAKKIARYALDNWCDLRQHTGMDTTRTQLKTLNRQFAFCVKQKTACKNNLIALIDQVYPGANTYFESPARADGSQKWVDYVLTFWHVDYVCSMTLSTFTERYRKWCHRHGYNFQPEKPRMLWEKAKDLIAILPMDKTTKTLVQTSIAQLNVLSKTVEALRTQMIALAGQLPEYPVVIDMNGVGPTLASQLIAEIGDITRFPRRGSLTAFAGVDPGAKQSGTMQVKSNKTSKAGSPHLRRALFQIVSGLLMRAPDDPVYNFMDKKRSEGKPYYVYMTAGANKFLRIYYGRVNEYLASCPKDHE

SEQ ID NO: 458615 - protein, 373 aa, unidentified
MKWTRLFSERSRRARMVVVFRATIHHKEASPMAQQMSVLGIDIAKQVFHVVGMDDRGHVVLRKRLARSTVLTFIVNLPPLRIGMEACGSAHYWARQFREQGHDVRLIAPQLVKAYVKSPKNDARDAEAICEAVTRPTMRCVPIKRVEQQDLQALHRVRERLIKARTALVNEIRGLLSEYGIILPQRITKFRALIVDQRHKEQAKLTTLSAEIFQHLYEEFLTLEKRLAYDDEKLAAIGQAHPECQRLQTIPGIGPVSATALIAAIGDVTQFKNGRQLAAWLGLVPREHSTGGKPRLLGISKRGDRYLRKLLIHGARATLCWGHTKGDDRSQWLRALIARRGNNRAAVALANKNARMVWALLAHTQAYQVRTVV

SEQ ID NO: 458616 - protein, 427 aa, unidentified
MYRIAGIDVHKKKLAVVVTDVEVHGEYQFERCWFAANPEQLRLLSQWLAEHQVEEVVMESTALYWKPVWGTLERYWQPICQKREGAGPTSGILHLAQAQSNRGPRGRKKDFRDAERLVKRLVADELKLSFVPDTEQRLWRTLTRRRYQLTRARVQLQNQLEALLEEAHLKLSSLVSDLFGVSARRMLQAIANGETNPDALAGLADRRLRATPAQLCDALGACAELHPVYRRLIKMMLDELKVIEEHTAELNQELATLLRPHQDAVERLAEVPGLGVDSAQQILAEVGATAATFASDKNLCSWVGICPGDEESAGESSSHRSPQGNRQMRRLLNQAANAAVKSKGSIFEIVYRRLVPRLGHNQTIGAVAHRLCRLIWLILRKGVRYEERGPTVSQRSRQNRTSKMIKELRKLGYRVEFFNAQPSIATL

SEQ ID NO: 458617 - protein, 374 aa, unidentified
MYVCILSQEGEILLHRNMNAAPEAFLKAVAPYREGLVVAVECIFTWSWLADLCAQEGIPFVLGHALYMKAIHGGKVKNDKIDAQKIAALLRGGMLPKAYVYPAQRRATRDVLRRRTHLMRTRAELLGHVHNTNSQYNLPEIAKKIAYKANRDGVAERFEDASVQKTIEVALALITYDDELLKELELCILKTARHHDPQTLYLLQTVPGIGKILSLVLLYEIHRIDRFPSVQEFASYCRLVKGSKESGGKRLGTSGKQIGNAHLTWAFSEAATLFLRNNPQGQKLLARLEKKHDKGKALSPLAPKLGRAVYFMLKRTVAFDMNLFLQSSGSRAAEPGASLDAYGRSLKRACCPYFFTASWNAKARRGHCSLSLMR

SEQ ID NO: 458618 - protein, 370 aa, unidentified
MEKKFAYSIGVDLHKDSMTIVVLDANGVLAERKSISTKCKNKVREFFSSYGLQSQVAVESVGFYQWFWELVRPVVGKMYLADPAGVRACAGRKSKTDRNDAHLLALLVYDGRIPCAYVPEEPVRSLRELVRLRHSLARNLASSRKSLRWVSLKTNLPGPKEFSSDRAQKWILAQEDKFSAAAQIACRFHLDRIINFERHVADIERVIEKRILEFPELARQYSLLKSVPGIGKISAATIIVETGEITRFGKPDELSSYAGLCPKVSQSGETVHHGHISKMGPPVLRWVLQQSAWVAVREDENIRKVFNRIRRTAGKKKAATAIARKLLIYGWSVCRIGSPFKWPEKDVTKREVIQDKGIAKEDLSGWYCQL

SEQ ID NO: 458619 - protein, 369 aa, unidentified
MGHHTEAFVGIDTSKSSNAIAIADGGRGGEVRYLGDFPATEAAIRKLVAKLAAKYRDLMFCYEAGPTGYGLYRLLKSLGHECLVVAPSLVPKKAGDRVKTNRRDAVSLAKLLRAGELTAVWERHEAMRDLSRARQAVKKDLQGKRQQISSLMLRLGRIYPGKTTWGPAHMKWLMAQKLEHREQRITFEELLDGIRQESERVERLEKAIREAVPEWSLAEVVAALQAMRGIDLIAAVGVLAEIGDLSRFQNPRELMGYLGLVPSESSTGDKVKRGGITKAGNGRARRILVEAAWSYRYPPRVSREKQPKVEAAPRRVREIAWKAQTRLCGRFRSLERKGKRRTVIATAVARELSAFIWAINCELMAHRQA

SEQ ID NO: 458620 - protein, 340 aa, unidentified
MKLYAGIDLHSNNSYVVLLDEVDKVVYQKRLCNDAEVILKALAPYFERIVGVVVESTYNWYWLVDHLQAANYSVHLANTTAIQQYSGLKHTDDKSDAIWLAKLLRLKLLPEGYVYPKEERGLRELLRRRLILVRQQTMSVLGIQAMINRYVNIKINSKKIKGCKNKEAEILNLITDDNVRIAAQSQLKVLHCIMEQITLLEKNILEKIKNETGFISLKEMPGIGPILAMTILLETGKIDRFKKPGNYSSYCRCVESKCISNAKKKGQNNRKNGNAYLGWAFVEAANAAIRHYEPIKKFYQRKLAKTKRVIAIKTIANKLSKACYFILRDKVEFDMKKLFN

SEQ ID NO: 458621 - protein, 427 aa, unidentified
MSTLFVGIDVSSKTNAVFAMDFEENKYLSSSFGNNQPGADDLVNQIAACMQNHKNLDTLLIVLESTSVYSVHISSFLASSEVLMPYKPYVFCVNPKATANYRKSYIGMEKTDPTDAYLIADFARVGRTKKLEPWHGGQFIALKRLTRHRMHLSECITREKTYMVSNLYLKFSELQLLEGEGRPFSNLYGATSSAVLTEFLSPQEIIDMPEEDLLSFLAQKSRNRICDLSKTSELLRKAARDSYRLDKCMYEPLNISLASSFNCIQAYQKEIRLIEQAIDKCIKGMNPNALTILQSIPGIGPVWASGILSEIGDITAFHSSDALAKYAGLYWPKGDSGDFTSEDNQMSRAGNPYLRYYLGEAANSVRKHIPEYADFYARKYAEVTRHQHKRALALTSRKFVRLVFGLLAKNQLYTGEKLDTEYHTESN

SEQ ID NO: 458622 - protein, 333 aa, unidentified
MDRETGEVGERRLLHREEAERFYQGLKQGGMAVRVGMEASGHSRWFEGLLQELQFELWIGNAAEIRTKRVRKQKTDRQDAQLLLRLMLEDRFPRIWVPDAANRDLRQLLWHRHRLVQMRTRVMNQLHVVALNEGLRRKKALWRPAGRKELESFLLAPWASRRRQDLLDLLDQLTPKIQELTRALEEEVEKRPVTRQLMTHPGVGPLTALAFELVIGTPERFHCGKQVASYVGLVPTEESSGDRRRLGHISKQGNVLLRFLLVEAAQVTVRSQAEWRSKFFHLALRRGRKIAKVAMARKLAVHLYWMWRQGCDYGQFEKFGSHAGVPGNPDGVQ

SEQ ID NO: 458623 - protein, 359 aa, unidentified
MKKGYHLPKPDKMKVLLKQTVGIDVAQNELVVSLGRMDEQISIEVYAYKVFPNTRKGFSSLVSWVNKQTSITTEVRYVMEATGVYHESLAYYLCSIKKQVSIVLPNKISNYARTLDIKTITDKSASQAISRFGLERQLEVWQPPLKIFNDLRQLCREREQLVHERTMLKNQLHAERTSETSSESSVKRTKKRIALIDSQEKEIREEIAILIKGDEVLLEKMNMVSSIPGIGNLTAVTIIAETNGFELIKNKRQLVSYAGLDVREKTSGTSVKSKPRISKRGNRNLRKVMHFPALAAIRTDERFRDIFLRIVSRHGIKMKAIVAIQRKLLELTYILWKSNAYYDSEYERKIISSEVITLP

SEQ ID NO: 458624 - protein, 409 aa, unidentified
MRVVHERCAGLDVHKKEIYGCALVLDEKGKRHQEIRRFGAVTADLLRLADWLKGHRITHVAMEATGVYWRPVWAVLEGQFELLLVNPHHVKALPGRKTDAKDCEWLADLLQHGLLRGSFVPPTEIQDLRDLTRYRAELTQAQSRIASRIQKVLEQANIKLSSVASDTLGVSGRLMIEAIIDGEDNPQRLADLAKRKLRQRIPDLQVALAGRVRDHHRFLLKEHLSEWKALSERIFRVEQEIQRRIVPFERAVTLWMTIPGVDHVTACCLIAEIGVNMDQFPSAHHLASWAGICPGHNESGGKRISGKTRDGNHWLKRSVCQAAWAASRKKTSYLSAQSKRLAPRRGIKRALIAVAHSILIIAYKMLKTGKSYQDLGGDYFDRINKAQLQTHLLRRLKGLGLTVTVQHAV

SEQ ID NO: 458625 - protein, 377 aa, unidentified
MRISPHSPLHGCQGLVRILSPKRLIKGLRLGNLDLFTSKSKAMKVQHIIGADLSKKTIDLFSHECHSHISIKNDPEGFKQMTKWMSGQNINSSEVMIVMEHTGLYSFHFEGFLHQKGIAFSKVSALQIKRSLGIARGKSDKIDAKRIARYGYEKRDILTIEPQTSKELQRLQLLTATRERLVRHKAAMICAIKEYQNIGLSEKDPIMVCQTRMVRQFEKEIEKIEEQIDVLTESNSSIKQNQDLLLSIKGVGKVLSLETIIKTRNFSRFKNARKFACYCGTAPFPCESGTSLKMKTKVDSHADKRMKTLLDLSAKTAIQHDKELRDYYLKRLEKGKSKMSTINIVRNKILYRMFAVIKRQTPFVESYLETFLAVCKP

SEQ ID NO: 458626 - protein, 419 aa, unidentified
MKNSKTKNMKTVNERTLIVAIDIGKSVHHGYFRGPNGQDIKPFPFYNGQKSYQEFWLKILKFKQEKNLTQIVVGFESTGPYAEPLMNFLATKPVKLVQINPMHTKRLKELTWNSPNKTDTKDPRVIADIISLGHALTVVVPKGPAAELRRLTQARQRASKNCTALVNQLHHLVFVIFPEYTQVMKKITSKSSLYLLKHYTSPEEIVKCGFDNLHVALKRVSLGRLKNGQAKALFEAARDTTGIDEGKESLLAEIRHLISCIERELQFMDHLEDQMSQYLKQIPYSQSILSIKGIGEVTAAGLIGEVGDFRHFTTISEIMKLAGLNLYEISSGKHFGQRHISKRGRAYLRKLLFFSALNTIRTNGIMHARYLVMVERGMPKMKAVVAISRKLLRIIFAVVRNHTTYMQNYNSLNYLKLAA

SEQ ID NO: 458627 - protein, 325 aa, unidentified
MNNLSKSKLDGKISMFVGMDLHKNYLQIAVMNDKGNVLENSRINNDVKQVGRFFDENIKKSNEKVRVVMESSSVWYNIYSYLSEEKHLNVVLSNPIKTRAIASAKIKTDKLDAAKLANLLRGGYIAECYVPDRRIMDLRELVRHRAALVRMRTKLKNKIHSIVLMKGIQISSKHCSFTHLYNEELKELNDYRINGYLHLIESLDSEIKDVSKKILVLAKEDEMASLLMTIPGIGYYSALLIVSEIGDINRFPDSYHLCSYAGLVPSTHSSGGITYHGSITKRGSKYLRWIMLECAHAHIRTNKNSMFICWVGTINTQLWWNNISW

SEQ ID NO: 458628 - protein, 323 aa, unidentified
MTVHLGIDIASKKFDAAELCDGNYRCKTFENTPAGFKALCRWLQASSIQDIHVCLEATGNYGTALATFLYEKNLKVSVVNPARIKGFAASELTRTKTDKADSRLIARFCKAMQPEQWKPVPAPVRKLQALVRRIGALNGMLRMECNRRENADIDTQDSVERMINHLKMEIEAIRREIKDHINNDPELKRQDDLLQSVPGIGAISSSLVLSFMAGKEFRKAKEVTAFLGLNPSHHQSGTSVRGKTRMSKMGDARLRCALYMPALVALKYNPDIRAFGQRLLLAGKPRMLVVGAVMRKLIHILFGVLKSGTAFSSRIEVKADVNQ

SEQ ID NO: 458629 - protein, 387 aa, unidentified
MQKPHDNSKASPAAFTQDSTLIAVIELSLSNWLVAGLIPGVSREPLKKLEPNPEDLLKLLHGWRDEAIKAGRPITRIAVAYETGRDSFWLARWLRKRGIDAHVIHATSVAVSREHRRAKTDRLDTAMLKRGFLGWLRGERGHCTVAIVPTMEEEDAKRPHRERDGLVHEQTRVINRMKSALIQFGVRNFNPKLRKASVKLETVRTPEGKSLPPNTIAALRRDMERLRIIKEQIKAIEQARLQQLEQKPEALANRMVYLLVRIYGLGLETADLLVHELLSRTLRDRKAVARYAGLTGSPDESGSKRREKGLSRSGNARVRKIMIQLAWRMVKFQPDSALVQWFKQRTENAKKSRKPMIVALARKLIIALWRYANDGVIPEGFRLHSAA

SEQ ID NO: 458630 - protein, 349 aa, unidentified
MVTAIGIDPHKATHVATAVDGNGAHLADLRVKARDSGHVELIGWARREFPGERLWAVEDERNMAGRLLRDLLAAGERVVTVPAHLAVEYRKRGRKRGKSDKIDALAVARTALREQLHQFHLDQASRDIKSLSDYRTALTEERTRAQNRLRDLLHQLDPDLAASIPSSGLTRYVWLDMITNQYTGQSGVPVSIVLDLTQTCRDLTIKINKLAKQLSGLLATVAQPLIGLPGCGEITAAVIVGEVAGVQRFRSSEALASYAGIAPLDASSGQDNSHHRLNRGGNRRLNWAIHMIAITQLRLHQPARDYYDRRIRQGSTRKVAIRALKRLIIRRIFDLLRRATATTLTTATT

SEQ ID NO: 458631 - protein, 407 aa, unidentified
MLFVGDDWAEDHHDVELQDERGRVLARARLPEGIAGITRLHALIGQFAGPDTEPGEVVIGIETDRGLWVTALRAAGYAVYAINPRQVARYRDRHGTSGAKSDKADAHTLADMVRTDSHQLRAVAGDSAEAEAIKVAARAHQTLIWERTRHLLRLRAALREYFPAALEAFGDLAAADTLELLARAPDPASAARLTTGQITAALTRARRRGIPARASAIRAALQAGHLHQPQPVADAYAATVRSLTVVIAALNGEIATMERQVTACFRGHPDAAIYLSQPGIADVLGARELGEFGDDPHRYASAKARKNYAATSPVTRQSGKKKIVLARFIRNDRLADALHQQAQSALRASPGARAYYDEQRDRGLDHEAALRALSNRLVGILHGCLKTRTLYDEATAWSHRVKLPGAA

SEQ ID NO: 458632 - protein, 338 aa, unidentified
MKLYAGIDLHSNNHVVVVSDEDGKQVYRKRLSNDLEKTLSALAPYQPEIEGVAVESTYNWYWLVDGLMDHGYRLHLVNTAAVRQYEGLKYADDNTDAYWLSNLLRLGILPEGYIFPREDRAVRDLSRKRCQLVQMCTANLLSIENIAARNLGYKLSANRIKALLPEDVERIFPQPEVALAVDTNRVVVRSLSEQIARLEKAMLAQARKRPEYRHLLTAPGIGKILALTILLETGDIGRFPGPGHYASYCRCVSSARISNNKSKGKGNTKNGNKHLAWAFVEAANFATRYNDRIKAYYQRKLHNTHPVVARKTVAHKMARACFYMMRDRLDFDIDKAFK

SEQ ID NO: 458633 - protein, 337 aa, unidentified
MFMQVYGIDLSMEKFDVNFIDAKGEERNREVKNKLISISKFLSSVAEDGILCAEHTGAYGDLLVYLCNQAEVPIALVPGYTIKHSLGLLKGKSDPLDSSRIREYGERFSDKLVFSEYDEESMVELKQLYTLRSQLVKARKSLLTSDKGRYHLPMQSLNVHKHLHSVLSNMDTEIVGVDEEIEALIKANQDLNENYELVKSIKGVGPVIATDLLIKTGNFMNIDTARKAASYAGVCPFPNTSGKMVGRSKTSQFADKKLKSLLYMGAKAAVKHNKEYGLYYQKKKLEGKHHFLIMNNVSNKMLRTIYSVVKNKTPYSQDYICLDPRERNINSSTKKVA

SEQ ID NO: 458634 - protein, 326 aa, unidentified
MGAVVNQIPSSFASPLFVGIDVSGPFLDVAYHESSETFRLPNAPEGFAELIHRLLPLKPQLIVLEATGKLERAVLQALCQAGLPAVAVNSKWVRDFARSTGQLAKTDRLDARVIAHFGATIKPEIRPLTDEQTQQLQALILRRAQLIEMLTAEQNRRKRAHKSALPSIDEFIRFITQRIKDADRDIDAFLHANELWRKTEALLRSTPGIGKTTAAALIAFLPELGSLNARQIASLVGLAPFNSDSGAHRGERHIKGGRHIVRRALYMACVAAQRANPNIKAFCDRLRAKGKKTKVAFVAGMRKLLTQLNAMMRDRTPWNLSHHDHL

SEQ ID NO: 458635 - protein, 373 aa, unidentified
MSQYSTLYVGLDVHKDTIVIAAVGNGDEQAVVDLGTISTRHYAIDKLLKKLQGMASELRLVYEAGPTGYWLQRLIETKGHRCQIISPSLLPKAAGDRVKTDRRDARSLAMALKMGAVDGIHIPTVGDEAIRDVSRAWQQARVDARKTKQRIKMFLLRHDVRYTGQARWSAPHRRWLSEQRMSNPASQIVLQELIETLGQHERRSERLEKTLKDIVHDWRFGPVVQALQAFRGIQFLTALTMIAELGDLNRFDHPKKLMAYVGLVPGERSSGQTRKLGPITRCGNSHVRTLLVESAWSYHYSPKVSRQISQRQEGIDPDILEIAWEAQTRLHRRYMKLKSRGMHQNKVITAVARELIGFIWAAAQQVPLAPEAA

SEQ ID NO: 458636 - protein, 339 aa, unidentified
MNITTVGLDLAKNVFHVVCLNKHNKEVKKRMLRRNQVRQFFAQLPACTVAMEACATSHYWGRELIALGHNVKLIPPQHVKPMVLGNKNDYNDACAIAETVNRPKITFVAVKTTEEHDMQAIHRMRSQCLRDRTALSNSTRGLLGEYGISFSKGLAVLRRKIPELLEDADNGLSLRFRNLLARRYEQLVEIDEHIAFYTKELELLSKQDDACQRLQTIPGFGPIVASAFRSTIGDGRAYSRGRHAAASLGLVPRQYSTGGKNVLLGISKRGDKYLRKLLVHGARTVVLHAANRDDPLSLWINRIHERRGYNKAAVAMANKMARMGWAVLMYNTSYEPTLV

SEQ ID NO: 458637 - protein, 310 aa, unidentified
MNIGIDVSKSRLDVAVRPTSEQFSVTNDEAGHKELRKRLAKLKPERIVLEPTGGYESRVVQELLSAKLPVVVVNARQVRNFAQALGRLAKTDRIDADVLAHFGESIRPEIRSFPDADRLELEALVNRRRQLVDMRAGEARRKQTAPTHVHANIDHVIEFLDKQIDAIDDDLQKLIKKTPAWREADELLQSVPGVGPVLSSTLTALVPELGTLNRKQIAALVGVAPFNNDSGKGEGKRTTWGGRAPVRAVLYMAASIARRFNPVIASMYDRLTQAGKVPMVALVACMRKLLTILNAMTRDNRVWTPKLAAG

SEQ ID NO: 458638 - protein, 316 aa, unidentified
MNTSDQNEINIGIDTSQSTLDIYVRPQGNIQSYENNPEGIRSAIRFIKQFKPIRVLIEATGRLEMAFFCAAHKADLPVCVCNPIQVRKFAQATGRMAKTDKLDAQDIAHFGEALKPALTELKPEKLRLLSDLLTVRSQCLDMSTMQKNRLKRMPKTVHKSIRNILNTITKEIDSIDQQLDRLIAETPQWQDRVDQLTSVKGVGKVLAYTLLSDLPELGRLNRKQIAALVGIAPMNRDSGRHKGKRYIRGGRHKVRTVLFVSMMSAIQCHPKLKPMYQRLVAAGKPKKVAIVACMRKQLIILNTMVKNGTYWNENMI

SEQ ID NO: 458639 - protein, 423 aa, unidentified
MAAREKVGEPEFVAFVGIDWADQKHVWCLQAANSSKREGGELEHKPEVVEAWVSELCRRFGHGPIAVAVEQVKGALVYMLGKYECLHLYPVPSTMSASMRQALYPSGAKDDPRDADLLLQNRDKLRRLTPDNEVTRRVQNLVEERRKLVEEKTAQLNRLTGYLKVYFPQMLEWFAKLDTKLACELLERWPSLEELQAAAPAEVRKFFRQHRGRHPELTEWRLQGIGQAMSAIRDGAVIEAKGMVVQVIARVLRTLLEGIAALDGKITEAAEAHPDFFIFQSFPGAGAALAPRLLAALGSQRDRYASAEEVQKYSGIAPVTERSGKKKWVHFRWACPKFLRQSFHEWAGHSIAQSVWARAYDQQQRQRGKDHHAAVRALAFKWIRIVFRCWQDGAVYDENRYLATLAKRGSPLIPVSAAAATGL

SEQ ID NO: 458640 - protein, 343 aa, unidentified
MRYIGIDLHTTQITVCYRDENGFEEYKMFPIDLVNKFIETLDSSDRVAYEATGNSLFLYKKLITTIHEDNIIVVNTSRFKLISKSVKKTDKNDSKLLAEYLSKDMLPKARLKDEISSGIYALIETRDNLVRGTTSFKNQIHNIFVHYGIKLKAKDVSNEKNLNKLLELYKFDDIAMFNLELAKKAILQNQALSAEIEIKLIELKDQMTQINNLTSICGIGVKSAMGIKAVIGDVENFENEDKLVAYAGLCPRVHNSNETVSHGGITKMGNKLIRKLLVQCAWVSVRHNPKMKTQYEQLRKRKPAGIAIIAIARKLLVQIYYTLKYNWYFTDTSNTVREIKVFA

SEQ ID NO: 458641 - protein, 352 aa, unidentified
MQYVGIDWAYRRAAWCALSDGGAISGEGMVPADEDGLARLVLTVGPEIRACVEMMSGAIWVRDQLAAAGWRVQIAHARKVRDVAPLACKTDKVDARVLAELCRRDLVPALWLPSLEDRALRERLRRRMHLVRLRTSARNRIFGLLTQWGLRLSLKRLRAPDAMELLAARGVEETWRRSIAEALAVIDLLDARIAPLDAELRPLAAADPRVLLLRTIPGLGDLLGLTFAAEIGDIARFSAPRKLIGYAGLAPKITQSGERSRTGALSKAGSRTLRWAAVEAAHQSWRPTNPWHQLYADITRRAGKNPAKSAVARKVLIAAWHVLSREQPFKPARPRNTDSTTVPASSRCFLAA

SEQ ID NO: 458642 - protein, 341 aa, unidentified
MSDYSYFCGIDLAKNHFSLHAVDQNGKVILHKSVTRSKLLTTIANMPLMRIGVEACGGAHYWARTLNKLGHEARIMAVKYVVPYRTKGKNDLNDAVAICEAVQRPSTRFVPIKSPDQQAILSVHRMREHWVRERTALMNRMRALLSEFGLIIPVGRSSLMKHVPLMLEDAENELPHLARTVIADAYHHLGELNQRIADTEQVFDSFAKVSANVQRVMKVRGIGPQTATAILASIGNGSQFDKSRDFSAWLGLVPKQYSTGGKPRLGRITKHGDKYLRTLLVHGARTVIANLGDKQDKLSQWCRGVLERRGMNRAIVALAAKNARIIWSLLHNQTEYENYAA

SEQ ID NO: 458643 - protein, 430 aa, unidentified
MKSNTQNAKIEAITEKTLVLGIDVGSETHYARAFDHRGIEYSKKPFKFSNTEAGFVTFKEWILDLKEKHEKDKVVPGMEPTGHYWFNLGKFLQDNEMKPVLVNPHHVKKSKELDDNNPTKNDRKDPKVIAGLVREGRYMIPYLPDGVYADLRTVSNIRFQLQAELTRIQNRISRWFNIYFPEYKTVYGKPDAKSGMLILKQAPLPEDILTLGIDGVNQIWRDAKMRAVGKARAKTLIEAAEHSVGSKEGAISARMEIRMLLEDYESRNIRLQEIMTLIEELVNQIPMAEKLLEIKGVGIKTVSGFLAEVGDISRFNNPKELQKLAGLALVENSSGKHNGRTTISRRGRKRLRYLLFEVAMSLVAKNPEFRELHTYYTTRRLNPLKKMQSLMAVAAKLIRVFYVMLTKGVDYDPKKMVGDIKRPAVYLQAA

SEQ ID NO: 458644 - protein, 396 aa, unidentified
MGGFIWGYESGSSRQLILRRQVSIVPNIIFGKTLVRRRLAMEKGKRLDFTGQTVFVGLDVHKRSWSVSVYTEHGEYKTFTQPPEPEKLVCFLRRHFPAASYRVVYEAGFFGFWIYEELAERGVECVVVNPADVPTKDKEQRVKRDGVDCRKLARCLRAGEIEGIYVPSRGRLEDRSLLRARLSMGCKLRRCKNQIKALLYFYGIGVPEELEGRCWSIRFIRWLEGVRMRSRAGQMALRVLIEEFRHLRSIIVSLDREIRQLARSEAYRESVRLLRTVPGIGTFFSMLLLTELCEIGRFPSIDELSSYVGLVPDVHASGEREYVVGVTKRRRAYLRWLLIEASWVAVRKDPVLMMAFKEYCRRMKKTRAIVKIARKLLNRIRYVLKNRSEYVAGVIE

SEQ ID NO: 458645 - protein, 401 aa, unidentified
MNAVGIDVSKGKSMVCVMRPFGEVVLEPFEVLHTAQNLHDLAEKLKALDGETRVVLEATGNYHKPVAFVLHDAGLFVSVVNPVLIHDYDNNSLRRVKTDRKDAVKIANYTLDKWTRLRQYLPEDDTRLALKNCYRQYQQAVAIRTMLKNNLISSLDLTFPDANKLFTSPAKSNGCEKWVDFIGNFWHSECISSLSANAFAKKYLKWCQKHGYVFTRSKSDEIYACAVNSASLPKSPTSKLLIQQQVAQLKAVSQSVAAFRQEMLRLSQQLPEFDTVMEMYGVGPSLGPQLMAEIGDVRRFSSKKSLIAFAGIEPQPNDSGKVVGNDKGISKVGSAVLRRTLFLIMTVILQTQPQDEPVFQFMNKKRSEGKPYKVYMMASANKFLRIYYARVKAVMDSERSQ

SEQ ID NO: 458646 - protein, 328 aa, unidentified
MSKNVFYVGIDVGSRELWASIAEQKPRPFAHSKAGLENLCRWARRQAGERLLHLCLEASGVYSISVATGLFGLPQTEVSVVNAAQIKAFAKAQLRRCKNDRVDAEVIRAFAESQHPLCWQPASKTQRQLAELVQLADQLQAQLQQWRNRRHAHHYLADLPELIGKTQKAMMCSLKRQLEKVEREITAFSAADPVLAQQVALLSTIPGIAQRSAIQILAYGQNWLTERSAKALIAHSGLAPHSRQSGTSLNASGAIDKRGNRRLRKALYMPTLVAIQHNPKLKPFYQRLCQRSKPKMVAIVACMKKLLLIIRAILRNKIPFNYTKSALT

SEQ ID NO: 458647 - protein, 345 aa, unidentified
MQSMYYIGLDVHKRTISYCVKDGSGKIHAEGMIPATRFDLDRWMKTLPQPWTAAMEATVFTGWIYDHLLPHAAALKVAHPLMLRAIAAAKKKNDRIDANKICDCLRCDFLPECYMASTAIRERRRTLRYRNLLVRQMVQMKNKISGLLMEAGVSYNKQRLHKACYFRELLATNPDIDEGLCALLRVCRETVVRLQKTESAVVRSLERDALLVERVERLMSIPAVGPITALTWALEIGDVQRFSSIKKAISYCGLCGAEKSSGPTVQRTPLSKQRNKHLQTTLIEAAKMAPRNSPDLAMLYDREKQKGNANRATLAVARKLVAYLVAVDRRQKEFLVVEKENCAAA

SEQ ID NO: 458648 - protein, 320 aa, unidentified
MTSRGAEKMNNDTIGVDVSKDHLDAHRLADGASRRFANDKCGRKAFVKWFAQTPVQRVVFEPTGPYHRAFERALGAAGVPFVKVNPRQARRFAEAIGKLAKTDRLDAAMLARMGAMLELKSRPPQSEALLELKELHLAREALVKDRTAAKNRGKVLAAPLLKRHNAQRLEQIKRQITAIEAAILQQVQADPDLAQRFAILTSIPGVSAITAFALLIEMPELGALEPGQAASLAGLAPVARQSGRWTGRAFIRGGRANVRQAIYMPALVATRFNPDMKAKYKQMIVAGKPAKVALTAVMRKLILLANALLKANRSWAPKPA

SEQ ID NO: 458649 - protein, 344 aa, unidentified
MSAEYDGTQVVGIDLHRRRSVLVRMTEAGERLDSVRIDNDPMTLAAEIAKAGEHPQVVLEATYGWYWAVDVLQDAGAEVHLAHPLGVKGFAYRRVKNDVRDAADLADLLRMGRLPEGWIAPPEVRQLRELVRHRAKLVAWRSAMKASVHAVLAKQGLHLGMTDLFGVGGRKLRAGAPLDAAYRLRVNALLRLIDAMDFEIRAVAGPLRVGLAGHAGFRAIQAVPGVGPMLAAIFVAEIGDVARFAGPAQLASWAGLTPKHRESDTVVHRGPITKQGSALVRWAAVEAAQGARNAGWLDEARTRIAERRGRNIATVAVARKLLTLVYYGLRDGHIRALDRAKAVA

SEQ ID NO: 458650 - protein, 378 aa, unidentified
MQPTQRVDRRTALDVSLELAGKAWKVAATDGQRRHPAVFVVDGDPRWARLQALLRRLRELQARWKLPRACPVHVIYEAGQDGFWIARALEAEGIQVIVVDAASVPVARHARRAKTDRLDALKLLEALRGWLRGERGELRVLHRPSEQAEARRLLARERGLLQKEVGQHRDRARKLLLLHGCTEEVDAGLADRLMAGKVRCADGSRLPEELWSWLMRELERMELARQQLGSLEKTLLQQLPEAVQRCVAQLAQLRGLGWVGAMRLVLELFWRDFANRRQVGACVGLVPQPYDSGNSHVDQGISKQGNRRVRSLLIEIAWFWVRYQKGSELAQWFAKRTANGNKRSKRVAIVAVARRLAIALWRYLRDGVIPAGAQLKAA

SEQ ID NO: 458651 - protein, 352 aa, unidentified
MPRRLWVGLDVGVETTNVCVIDASGSVLHEKVCPTIAKSIHREIVSLGCRRWGTVGLESGTGFGLARDLQTLGYTVEIYEARQLSKFLRVRRNKTDAGDALGIAHAGRIASPLVSRVHLKSLECQSIACRLKIRRYFVKARMDAVSIVRRQLELFGVRIAPGSPATFHARVEKALRTTFGASLDPLAGDLRHLLDHIEALGTYKIGLDRELKQFALDNAVCRRLMEIPGVGPICALSFYAVVGEPGRFRRASDIGPYLGLTPRLHQSGMVQRSGRISRMGNAIARGLLIQASLRFMKCCDPQSRFRAWTSEIEGRRGKGKSRVALARKLATVMIAMWKKDTPFDPQLILAPR

SEQ ID NO: 458652 - protein, 283 aa, unidentified
MDIQGTSVGLDVHALSVVAHAVDEETGKVSKARLCPDHGEVLGWLHQLRAPVRVTYETGPTGFGLARAINEAGMECVVAAPSTLQRPAGDRVKTDARDAAHLARLLRLGEITAVTVPEREIEAVRDLVRAREDARVDLMRVRHRLSNCFCGRGSSIFGGTPCTCAHEKWLRRQRFDDAHLKAAFDHGFDAVLAATAARDRLDEQITEVAASPRFADPVNRLGCLRGISALTGLALTVEIGDWSRFTGSSIGAFVGLVPCEYSTGTSRVQGSITKAGNTHVHGC

SEQ ID NO: 458653 - protein, 311 aa, unidentified
MTEKQYIGIDISKTKLDVCAPWWATTKTFKNSPKGLQKLFRAIKSKPISCHLVCEATGGYEGLLLLTAWKHDVTISRVNPRKVRHLAIAMGFLAKTDPIDAFVITESGKMLKPKPTPEPTKTAQQLGVIVRRREFLMRQLTREKNAKEKASDTFILQDINASIASLSKRLAHFDEAIAKLIDADEVLREKRRRMEQVTGIGPGTSRLLLAALPELGSISDKEVSALVGLAPMNCDSGTRRGKRIIQGGRANVRRGLYMPALCAARHNPTLKAFYDRLCSAGKAHHVALTAVMRKLICLLNRILADPDFNPA

SEQ ID NO: 458654 - protein, 350 aa, unidentified
MTVNHYIGFDVHKRSVSYCVKIADGTIVEEGKLGATHEALRQWAEKRQEPWRGALEATLFSGWIYDTLNPFAAELQMGHPAMMKAIGASKKKNDKLDARKIADLVRCNLLSACYVAPVEIRELRQMLRYRSLVVAQAVRMKNKMSGLLMEVGAEYNKQQLHGKKYFTELLRTVTEVPESVKDLLRLSRGALEMFETTQQQLLARLEKDPLLAQRVIVLKSIRGVGEVTALTWALEVSDPHRFSSVARAVSYCGLTSALISSADKQQRAPISKQRNAHLQTVLIEAAKLAPRWNPQLAAVHARELERGNRNRATLAVARKPVAYLLALDKSGHPFQVTSQSPAKTEIEKAA

SEQ ID NO: 458655 - protein, 342 aa, unidentified
MSIVTIGLDLAKHAFQVHGVDATDRVVVRRQLRRDGVESFFAGLPPCLVGMEACATAHYWARRLMALGHEVRLIPPTRVKAYVQRGKKNDATDAAAIAEAVTRPHMAFVPVKSEDQQAVLMLHRTRDLLVRQRTMLINALRAHLAEFGIIAAQGRRKVNDLIAGLSDAEIPALARTALHELAAQIETCDQRIAAMEKEICRWHKTSEPSSNLATIPGIGPITASLIAATVTDPSAFKNGRQMAAWLGLVPRQNSSGGKDRLGRITKTGDRSIRRLLVIGATCVIRYARTKAPGEASWLVNLLDRKPARVVTVALANKMARIAWAVLTRGEVYHKTFPIPAGV

SEQ ID NO: 458656 - protein, 347 aa, unidentified
MLYAGLDLSRQRLDVHVLDDEGRTVEVTAVRPDTDALRTLVAVIARHGQEVTAAVESMNGARFVHDTLELAGWDVEIADAVKVKGLAPLAAKTDRIDAWVLAELTRRDLVPAIWLPDPTVRAERERARFRLHLVRHRTALKNRIHATLIAFGHPVPVSDLFGLAGRQLLASLHVPEPWTTTLARSLRFVDELDAQIAECEAELRAIGAEHPDVELLRTVPGIGWVLGYTIASEIGDITRFGSPKKLAGYTGLCPLVRQSGGRDDRGPLAKNGPKYLRWALIEAATHAARHPAYKERYERNKRRLGRQRGSKVARVDIARELATAIWHMLTKREPFAPGRPHVAPLVA

SEQ ID NO: 458657 - protein, 456 aa, unidentified
MNQFFLGIDASKGYCDFVMLNAKKQPVIENFQLDDTFDGHARLYKLLHSFNKDNPEAAIYAAVESTGGYENNWFQSLLTFQASLPVKTAHLNPLGVSHNSKADLKRNITDKISAKNVAEYMIAHPEKVSYQHQDSLASLRKQWGFITMLTKQSTQLLNQLESLVYNANPEILTYCKDGSPQWVLKLLTSYPTALRLSRAKVKVLARIPYISLDRAKQLIATAKKSVASASDKITEQLIVATVKQIIHLKKTIKVQSEALANECQIPEVALLKTFTGIGDYSAIGLMLQIQSVNRFLTSKKLSSFFGIHPEYKKSGDGTYKYRMSKKGRKEGRRILFIVALSAVQSNPLIRDVYQQAVERGMEKMSAMGLCMHKILRILYGMLKHNKAFDPQIDLKNRQKKPPQKRKIGHDKNRRYQDFDSKAPISRRQKMRRKERKQSQNVDNVEYGIIEASVPVN

SEQ ID NO: 458658 - protein, 468 aa, unidentified
MPKARKSQPKKSSSRRKSKKATVLERINLNAAGIDVGAYEHYVAVPEDRADPPVRRFEAFTSDLYQIADWLKECGIKTVAMESTGVYWIPLFQVLEERGFEVKLVNARQVKNVSGRKTDIVDCQWLQQLHTYGLLSGAFRPEQDISVLRAYLRHRDNLIRIITTHIQHIQKALVQMNILLHNVISDITGVTGMRIIRAILKGERDSVKLANMKDHRIKSSVHQIAKSLEGDYRQEHLFVLKQAVELYDFYRELIEECDRVILSHMEKFQPRVDLELKPLPPSKSSHKKPQRNEPTVDWRTALYTMTGVDLTSIPGINASIAETVISEIGLDMSAWATEKKFSAWLGLSPQNRISGGKILSRSSRKFINRAAQALRMAANSLTNSKSALGAFLRRLRSRLGPAKAIAATAHKLARIVYHMLKFGQEYVDAGEKYYEQMYRNRVVKSLQKRAQSLGYALVPFQQLTEVVS

SEQ ID NO: 458659 - protein, 456 aa, unidentified
MPQRRKKSRKIKSPKGLPKHLRHININAAGIDVGSDRHVVAVPEGRDAVSVREFGTFTADLQAIADWLEKCGVTTVAMESTGVYWIPLFEVLEQRGFEVKLVDARHVKNVSGRKSDVLDCQWIQQLHTYGLLAGAYRPPDEICTLRGYMRQREILVQAASMHVQHMQKALQQMNVLLHNVVSDITGLTGMTILKAIIAGERDPKRLAENRHENCRNSKETIAKSLEGNFREEHLFALKQALELYEIYQCKIAECEKAIVAQLEKQPDVTDDEPPDGGKRVPTRDCIRGDMDVREKMFKLTGVDLFNIPGLGADKLLTLISEVGVDMTPWKTGKHFTSWLSLCPGTKISGGKILSKRTKRNANRAAQAFRMAAASLTRSQNALGAFYRRVRSRSTAIQAVTATAHKIARIYYAMLTTRKPYMEAGLHAYEERYKQRRIAALRKQARSLGFELSACAG

SEQ ID NO: 458660 - protein, 321 aa, unidentified
MRCFERDIDFAIHERGKNYRQFKHIRVENSIDGFRKMRKWLRESGIKVTDVVIAMEHTGIYSAALTEWCFGKKIAFVMLHPRDVKNACSRGRDKTDKVDSQFIADYVYTMREKLSPSNPEPAIIRKLRQLCNERKIAIRTRTAYLNIIKTLTDKASLKRTEDFIKALNKQIKTIEKAMVSTVESDPEVSKNYNLVCSVPGIGMINAVATIVATSNFTRFQNARQYAKFSCISPMSFTSGTSVKGGDHVSRVGHGELKALLTEAAKSTIVHDSGIKAYYNRKREQGKSFGCVLNAVKFKLICRMFAVVKRQTPYVNTEKFRN

SEQ ID NO: 458661 - protein, 323 aa, unidentified
MSNFVGVDIAKNTFDIATHLPNGKHKTKAKLANDSKGFKEFDAWLNKQVEPTALIVMEATSVYHLELAEFVYNKGYRVCVVNPATTHAYADSELRRIKTDKSDAKLIADFAREKAEKLQLWAPEPLKYRQLKAMVRRLDDLQEMEQMELNRLDVSDEKVKDSINSVLRHIEKEIVETHKAIKKHIDDDPDMRQMRDLIVTIDGIGQKTLERLLAELGDLRKYDDPRKLVAAAGLNPKLQDSGKFKGRTVISRIGSARVRAGLYMPGLVALKHNKAIIAMKDRLKANGKAPKQIICAAMRKLLHFVYAVLKSGQPFDPKIALAR

SEQ ID NO: 458662 - protein, 386 aa, unidentified
MMTMTRTIESTATAPSCSTCLLLAFELGERVWKLGFTTGLGQRPRMRQVPAGATDRVLDEIVRAKRRLKRPADTPVISCYEAGREGWWLHRWLVAQGVTNHVVDSSSIEVNRRARRAKTDRLDLGGLLNLLARFVLGDARVWRVVREPSVAEEDARQLHRSWESVQQDRSRLINRLKGLLTTQGVRLRIDEEFPQRLAAARLWDGTPVPPELQQRALRVWAQLALLNQQRDELAGGRAALVPDANTPMDRYVRTLPTLRGIGPVGTWVLATEIFGWRAIRNRRELGALVGLVPAPYQSGDTNRDQGITRAGNRHVRRLMVQLAWSWVHYQPTSALTQWYRRRFGGGSKRLRRIGIVALARKLLIALWRYVEHGEIPEGAIVQSHAT

SEQ ID NO: 458663 - protein, 408 aa, unidentified
MKRYYMGVDWGDRLHQVYVGDEEGKKVREIKVQESPEGLAEIGRWLDERRAEGIELWAAIEKPAGRIVDFLLDHGVEVYPVNPKSLDRVRDRYRMSDSKSDAFDAYVLAEFLRTDQAHLRALRPNSEKAQELKMLSRDQRRVVRHKTRLLHQLTTTLKEYYPRPLEVFEDLETEIALDFLKQYPTPAHLSALKRKEFNRFATKQHHLSKQRCEQLWEKLQKPQLAVPDHVVRAKAQWVEVLIEQLRASIKAMKIYNHKVESFFASSPAAQVAKTLPGAKSGTLVAAIWAELGDAQGRWQSSRHLQAEAGAVPVTQASGKSRVVHFRFACNKHLRHTMYWFSFVSLNHSQWAKLYYRGQRDKGHSHHQALRALGAKWLKIIFVMWRDHKPYDENFHLANIALQKMRQAA

SEQ ID NO: 458664 - protein, 402 aa, unidentified
MNCVGIDVSKGKSMIAVMRPFGEVVVSPFEVRHTANELSELAGLLKSLDGETRVVMESTGNYHAPVAWLLHDAGLYVSVVNAMLVHDYGNNSLRRAKTDKKDAVKLANYGLDHWLTLPRYVPEEDTRLMLKTCYRQYQQYSKVQTMLKNNLISLLDTAFPDANRLFTSPPRADGSEKWVDFVATFWHCECVCGLSKKAFTAKYQKWCRKHGYNFSQDKALDIYASACGRFGVMPKTNTAKLLVEQAISQLQTTSAALAALKQEMQSLAASLPEYPVVMEMFGVGPTLGPQLIAEIGDVRRFHSKKALVAFAGIDAPPYQSGQIDVRSRSISKRGSASLRRTLFLVMGVLLQCAPMDEPVYQFMNKKRSEGKPYRVYMMASANKFLRIYYASVKAYLDSLEHD

SEQ ID NO: 458665 - protein, 337 aa, unidentified
MKYSGIDLHSNNSLIVVTDESDRTLVSRRVPNSLPAVLAVLEPYRGELVGVVVEATYNWYWIVDGLQAAGYRMHLANPAAIKRYEGLKRSGDEEDAAYLAQLLRLGLLPEGYICPKEQRAVRDLARKRMQLVRSRTQHILAVENIQARESGARMKAEQIKRLEAKGVEAMGLAPEVKLAMQANLAVIGTLTQQIDRLERRLHERVRLREEFGLLKTAPGIGETLATTIMLETGAVSRFARVGNFSSYCRCVDSERISNGKKKGEGNVKNGNAYLAWAFVEAAQFARRFCPEAKRFYERKRARTNTVVATKALAHKLARACYHVLREHKPFDVRRCFG

SEQ ID NO: 458666 - protein, 343 aa, unidentified
MEYYVGLDVSLKQTSICVVNQTGSIVQEGVVDSDPEAIASFVRSRAPGTVRIGIETGPTTTWLWTELKRLGLPVICIDARHAKAVLKMQINKSDRNDAAGIARIMQTGWFKEVRVKDLDSHAVKALLASRALLVKIKRDLENQVRGLLKNLGLVIGRAKFNVFAVRAEGLIENRPELVAAVRPLLEARKAIERQVEDLDRKVHKLARRDVQVRRFMTVPGVGPITALCFKATIDDPTRFKRSRSVGAYIGLTTRRHASGEIDWSGRISKCGDAMLRMYLFEAAGVLLTRVPKWSGLKAWGAKLVKRSGLRKAKVAVARKLAVILHRMWIDGTEFNWSMKKAAA

SEQ ID NO: 458667 - protein, 339 aa, unidentified
MQVSTLGIDLAKNVFQLHGVDNSGKTVLRKRLTRNAFLPFLAQLSPCLIGMEACASAHHFARRLMQYGHQVRLMPPSYVKPYVKRDKTDARDAEAICEAVARPNMRFVAVKSETQQAILALHTERDLLIRERVASTNSLRAMLAEFGVVMETGLSALYKTLPVILEDGENALTALTRRSAARQLAHLRELEHQIAEVERELNAWFHSQEACRRLEKVPGVGMLTATYMVAAVGDGSQFTSSKQFAAWVGLTPKEHSSGGKQWLGPISKRGDRYFRYLLIHGARALAAVIERHRDKQTWFYSLLKRKPFNVAVVAQAGRTARILWSMLRGGSEYREVAPV

SEQ ID NO: 458668 - protein, 464 aa, unidentified
MPKRPAPPILPRVPCPQAPAPAAPTRPLGGVGYLGLDVSQAEVTACLLLPDGREAVRRWTVPNSQPGAEALATRVALLAAEQQLAGVAIGMEATNLYWWHLACVLRESALLAGLWHEVYVLNPTLVAGLKRAYPAGGKTDCRDAFFIAERLRVGRLPAPFQVDVLYAPLQRLTRFRAHLAQSLAREKNYFLSFLWLKFSAFGQEEPFGDPFGATSSLVLDQYAVEDLVQWPVDDLAIFLQRQGRGGFDDPAAVAAALTKAARDSYRLDNVLAEPVSLVLATTMATIRTLQAQLKAVDATIARELASIPEVRRTIRSIPGLGPVWTAGLVAEIGNIHRFAADGALAKYAGLVWHPYESGAFQAQDTSMSKAGNAYLRYYLVEAANSVRLHCAEYQTFSAAKLAQSPKHDHKRAVVLTARKLVRLVDALLRAGALYQPQDRKEGQTSPHAARPQPQRRARLAAAAG

SEQ ID NO: 458669 - protein, 334 aa, unidentified
MDIAKNVFQIHGIDAAEKVVVRKQLRRGQVMKFFAALSPCLVGMEACATAHYWARELTKLGHEVRLMPARDVKAYVKRNKNDAADAAAICEAVRRPTMRFVGVKSAEQQGRLMQHRTRDLLLRQRTQLINALRGHMGELGMVAAQGREGLKTLLAIVAKGADEHLPVDARASLIVLATQLEALQTMIRAIEKRIVAQHRASEASKRLATIPGIGVLGASAITATVTDPSAFRSGRDFAAWIGLVPRQDSTGGKQKLGPISKQGDRYLRRLLVIGAHSVLRRAKQSPQNYPWLTQLLARRPFKVVAVALANKMARVAWALLARGSTYRVPQLAAA

SEQ ID NO: 458670 - protein, 440 aa, unidentified
MKTKKAKAFPIIYPNAAGIDISSKEHYVAVNPDASSEPIKSFGCFTEDLKTLVGWLKECKVDTVAMEATGIYWISLYLMLEEAGFDVVLVTAKHVKNVRGKKTDVSDAEWIRQLHSCGLLSASFQPDSFTRKLRTYMRHRKNLIEMAATHIRMMHKAFEQMNIKIQHVITDITGKSGQEIIKAIISGERDPQKLAAHCDGRIRANKKESIIKSLEGVWKEEHIFELEQSFTLFHTYHQKIKECDLQIENHLRQKSGINNISNEKIKAKSNKNNLNFEAKEILTQITGTDLSEIFGITETNAVEIISEVGLNMEKWPTVKHFTSWLNLAPNNKISGGKILSSHIPKKKNHAGQIFKMAAFAVQRSKNWLAMFFQRIKSKRGTQRAVVATARKIAAIFYKLLRNKEKFNPIPIEKYMDGFKEYQIKRLKRQAQNLGFQLING

SEQ ID NO: 458671 - protein, 483 aa, unidentified
MIDDVLEKLNVENGAEVMPLYDYGVGIDTHKNFIQVCVLVRQGSMIKRYESEHPTAWKCLVDAGEWARRVIKEKSMPTIEPDPLRYTIESTSTYHLPVLRAFQGKPSVVNPVLAGSSRRKTDRLDARLLSYQSMTGLWPESFVVSSVIQEFRLLVKQRDYHLREGTAITNRINNYILRFGHTLGSYQSVRGIENRALLEDMCNADFVYADDILDTQAGRFVCPDGLPDEVKKIILKMYSEYDYHYEQANCYQKLAVGYAKKILWETDDGYIKGDILIKNLLTVPSVGEATVLLWLSEIVTPLRFKTAPQLAAYCGCDPSLKISAGKVTSQTRRKGNAKLHNQLMIVSGACINRHSEPFGQWGYALSKKHAKGGYKKASGAVARRIAVSMYYVHKHNEPFSYDKYNFYKVDVPDVQLSDMGLPKRVENLLNANALLNSKVIVEMYLVGKIYEIPGFGKKAAQEINSWIQTNKIHFNSKGGSIDG

SEQ ID NO: 458672 - protein, 343 aa, unidentified
MQTVTTIGFDIAKSVFQVHGVDAGGQVVIRRQLKRRFVLAFFQKLPPCLVGIEACASSHHWSRELQALGHAVRLMPPAYVKPYVKRQKNDAADAEAICEAVSRANMRFVPTKTPEQQSCLMLHRTRHLFIRQRTAVINSIRAHLAEFGIVTPVGRKGVTELLHVVADPRDKRVPEVARACLAALGTQLLALKEQILEFDRMILAWHRSNQTSKRLHYIPGVGPMLATALVASVADPRTFRSGRNFSAWIGLVPKQHSSGGKDRLGSISKQGDRYLRSLFVAGALAVIRYAKIHGTEHRPWLAALLGRRPTKVAAIALANKIARMAWAMMARGERYKQPVALAR

SEQ ID NO: 458673 - protein, 439 aa, unidentified
MRITYERVAGMDVHKKTVVVTRMRVTEEQRIEWETQTFGTTTPELLQLHDWLAEWACSHVALESTGDYWKPVYNLLEETFTVWVVNAQHVKRVPGRKTDATDSEWLAELLLHGLLKASFIPPKPQRALRELTRYRTRLIQERSRTVNRVQKLLEGANIKLASVVTDVQGVSARAMLAEIAAGNTDAEALADLARGRLRNKLVELEKALTGRVEAQHRFLLSQQLEHIDFLDEQVAEIEAEIERRLGMMGKLPDASTGEGAEAAPPPDEGTPTHWQAAVDLLDTIPGINPQAAQIILAEIGIDMAQFPTDGHLSRWAGVAPGNNESGGKRYSGRTTKGNRTLKSILVQCAYAAIRTKDSFFKARYQRLVARRGKKRAIMAIAHSMLKAIWHMLSTGEVYRDLGVEYYNQRNKEVKVAYHTRQLEKLTGATVQIALGGATT

SEQ ID NO: 458674 - protein, 407 aa, unidentified
MEVIYPRSAGLDVHKDMVAVCVRIAEGQEVKRHPRRFGTSTRELFRLRDWLSSHAVTHVAMESTGVYWKPVWHILEEAFTLILGNSKHMKNVPGRKSDQSDASWIADLCAHGLIRSSFVPPAPIQVLRGLTRTRTQLMHERGRHVQRIQKVLEDANVKLSSVLTDITGASGRRMLTALMGGEANAEKIAGLADRRVKASKEEITEAVSGCLTEDHRFLIGVHLRQVDALDAEVASIEARIEEKIEPFRNAADHLVTMPGIKEDAAAAILAEIGTDMSVFPSDDHLVAWSGISPGMNESAGKRKSTRTRPQRWLKSKMTQCAWAAVKKRDSYLSARYHRIRTRRGKKKAILAVAGTMLRAIYHMLKNDVDYQDLGPNFFDRRDELASARHLKRRLERLGYDVELRKAA

SEQ ID NO: 458675 - protein, 434 aa, unidentified
MTPDSAAVRATKGKVMKPFNEITHYAGFDWARDHHDVVMVDGQGQIVADFRIEHSLAGWQQFRDKIKDYPALGVAIETSQGAAVDQLLQLGCNVYPVNPLSAKSYRERKAPSGNKTDHLAGWSLAEALRTDGHAWKALQPLDPLTQQLQLLCRDEISLIEQRTALVNQLQQALLEYYPAALQAFEDWTLPACWDFILQFPTPEKLATAGRRRWEKFLHTQKLWRPETATKRLEIFQNARHFCGSAPVTSAKSLLALSLANLLNALQIQLDQYRQQIEALFAQHPDHDLFGSLPGAGKTLAPRLLGEIGGDPQRFEDTEALQCIAGTAPVSFQSGQIHRVRLRHQCNKVLRHTVHLWSQCCVRVCPWAETYYKQKRAEGKSHACALRCLGQRLLKIAWKMVQTRKPYDADLHARHQKLHGSWVLTLMQPAASASE

SEQ ID NO: 458676 - protein, 399 aa, unidentified
MLAVGIDISKSKSVAAILNQDGSMHTSPFEFHHTQPELDAFIKYILNSNQSATILMENTGHYHYPVLKAFREAGLPVCMVNAYQIKKFGDMDLRKAKTDKKDAVRIARYALEKSYSLVPYTSMEQKYEDLRFLARQYNQRMLTLKTNKVFLLNLLDETMPGITNILPLTTRTPETSLSVLFINRFKSYDRIKKMGKSRFLDAFEKIARKSRNRQTKTYGLAIYEAALRNITTRGENEYTLAAQDQCLELVCESQKAADSIILKMQTLAETLPEYAVLRSMAGVGDRLGPLILAEIGDIRRFHSGKALNAYAGNDAPPYQSGTFESHNRHISKRGNAALRKYCFEVMQALKLTRPQDDPVYLFLLKKEQEGNPYNVAKMAGVNKFLRIYYARAMETLKQQ

SEQ ID NO: 458677 - protein, 337 aa, unidentified
MFNSEEGYLHKVVQLGIDVSKAKLDCTLLLDRDTLRSRSKIVPNTAAGFVQLVEWVQRQAQVAAAQVVAAMEPTGVYHQALALALYEAGMTVVVVNPGQLRQFAEGLAVRTKTDAKDSVVLARYAGQPERIVWQPAPIEVRQLQALMGRLATVETELRRELNRREAAQLGHDPQLVQASIADAIAFWSAEQSKLQQAIDEHIDRHPGLKIERERLLTIPAVGPKTANRMLCVLSAHDFGRASQAAAFIGLTPVEHQSGSSVRGRPRLSKCGDARLRAALYMAAVVAIRHNPDVRALYQRLLKRGKAKLSALCAAMRKLVHICFGVLKNQQDYRPQCA

SEQ ID NO: 458678 - protein, 341 aa, unidentified
MSIVGAFDVHRRQLTFEYLDTVTGELKRGRVMPADRPQLRAWLARFAGQQDVQFALEGCTGWRYVVEELYAAGITPHLAEPADTAALRGKKRHAKTDKTDTRHLRVHLMAGDLPECWIPPQHVLEARATARLYKDLVDERGGWHQRVAATLFHHGVPAAVSVAKPDGRAAAEQAFLSPAGRQAVETGLRQIDRLTAELEPLRRQLDMLSRRQPGCAALRAAHFGIGAVTSVAIWAELGDVRRFGNSDDVVRHTGLDITVYSSDGKRSAGHLSRQGPPLLRWALYEAAKCAARPAAPDYGYYTAARDDRGGGRATLSVARKLARRCYHTLRELGEEAMAPAA

SEQ ID NO: 458679 - protein, 332 aa, unidentified
MDKFYFIGIDVSKKKLDICVMYGSKVLIEEQVTNSTKGVTQAIKHIKKELDITNDMFIICAEHTGQYTYPLICATKAIDCKLWLENPTQIKYSCGMTRGKNDKVDARRIATYAFRFFDKMKCYTRPSEAIIQLNQLQAERSMYVTDLAKYKAILTDQSDFIPKDIYIQKAKRIKVLMASLQQAISALEKKMNEIISTSEMLSRQMSLLTSIDGIGRVIAMNMIIATEAFTRFENARQFCCYAGVAPFSYTSGSSLRSQNRVSLRADKSIKSLLHLAAVAIAHRKDGELKEYFLRKVEEGKNKMTVINAIRAKLVSRMFSVIKNDRYYLPVLA

SEQ ID NO: 458680 - protein, 375 aa, unidentified
MGDYSEAFVGLDTSKLRNAVAIADVGRGGEVRFFGEIENTQAATAKLVRKLSAKYKRLTFCYEAGPTGYGLYRQIKDLGFECVVVAPSLIPKRPGDKVKTNRRDALSLAKLLRADELTAVWVPDGRHEAMRDLTRARETAMLDLRTKRQHVSAFLLRLGRPYPESRKTWTKAHMSWIASQTLEHPQQRLVLEEMMLAIRQAQERLQRLEQAIAAAVGEWSLAPVVTALMAMRGMDLISAATLLAEIGDLSRFQTPHELMAYLGLVPSEQSTGEDVRRGPITKAGNRRARRMLVECSWSYQHPPRVGQAKQPKVDAAPPAVREIAWKAQCRLYRRYRALIRNGKLKTVAIVAIARELAGFIWAVARAVTTARAAVA

SEQ ID NO: 458681 - protein, 363 aa, unidentified
MTVYIGVDFHPYEQSVAYASDEDGEIGYRRFLHSDKQSIRAFYRKCGADAVIGVEATGCLWWFEKMLADGGHKLKIGDPRMIRRAALSRHKNDFRDAETILDLLVRGAFPSIVPRFEESREVLDLLHYRQTLVQKRTSIANQLQAFARGKGLARFRMPAVKGRRKLVEAPVTEIETLLVTSRLVLFDELTAQMKALESRLEKLAAEDERARLLMTHPGIGVINALALVHTLGEVRRFRRKEEVVAFVGLDPLEKSSGQTKRIGQISKHGSRLARHLLGQAAQACRDHRIRKFYLEVSRRRGRPKAKVAAARKLLINCYVMLRDGIGYEEFQRRGEVGLCEGSGEVRAKASVSGGLRARPAISI

SEQ ID NO: 458682 - protein, 347 aa, unidentified
MTIVEAPPGITGGVDTHLDTHVAAALDPLGRLVGTESFDADAAGYKALLVWLEDFGEVTKVGVEGTGSYGVGLTRFLRRKGIEVVEVNRPNRQSRRNQGKSDSLDAVEAARAAISGRASGVGKTKDGPVEAIRVLVVAKRSARQARVKAIVQMRHLGFTAPDQLHSRLKGLSVTALVAEGAKLRATKSADTVTAATKASLSSLAHRIQALDTEIAELDEKIESLLLATAPDLMARFGVGPDTAASLLVAAGDNPERLHSEAAWAHLCGVSPVPADSGKNAGHLRRHTGCDRQANSALWRIAMVRIAHDPETTQYFERRVKEGRTKRDVIRILQRYIAREVYRYLPRG

SEQ ID NO: 458683 - protein, 411 aa, unidentified
MRLFAGDDWAEDHHDVEVMDEAGTVLAKKRLPEGVAGIAQLHELIGRHLGEDADEAEVIVGIETDHGPWVTALIAAGYAVFPVNPLQASRYRERHGVSGAKSDAGDAHMLADMVRTDSHQLRAVAGDSPDAAAVKVVARTHKTLIWERTRQVQRLRYQLREYFPAALAAFEDLDAPDALELLARAPDPARARRLTRAQVSAALKRARRRDIPAKATAILAALRSAQLGQPEAVTAAYAVTARSLIAVITVLNEQVKTLQGQVEAVFGRHPDAEIYLSQPGLGPILGARVLGEFGDDPHRYASGKARKNYAATSPLTRASGKKKVVAARFVHNDRLVDALNAQAFASLNASPGARAYYDELRARGIEHNDALRRLANRLVGILHGCLKTRTLYDEATAWSHRENLPQSSVAA

SEQ ID NO: 458684 - protein, 410 aa, unidentified
MELLRSEVPASSLVVAIDPGKAFNRVWLTSGERGLIGEPVSLPVLRDGVDELERLVASSGVVGSPVIGLEATGGLHRAWAAEIERRWPGSLRLFAPSETAAARAQLGSRRFKTDDRDCAALVWLVRQGAGRPAEPQVVEALLGAVRHRSQLVDARRVLQHRLHDQLNALCPGLSAPPGHGRALKLESPTGQAVLSCAAAFAGRAPSKRSLLARAPGRTTDATAAFWTGRWKRLLEPPVDAELRAQRLTGDLGRWQELRQDIALAEEQLAVLLAQTRGQILTTLPGVAIVRAAAFSAYTLPIERWATPEHLYSATGLAPASYQSSTITRRGGISRQGLPEHRDALMGIAWGLSQRSEAFHARDGELRARGFRPIQARVALARNACRLCWRLLQSQHPYDDRRYARTRRRGR

SEQ ID NO: 458685 - protein, 410 aa, unidentified
MKMAGIDVHKKVLMVVVVDTNTPEEKPVRRRFATMPSELQRFRIWLEEQGVEEAVMESTAQYWRSVWFELEPHMRLHLAQAFSNRAPRGRKHDFKDAERLVRRLMADELILSFVPSGEQRIWRSMTRMKLQLTRDRVRLQNQIECLLEEMRIKLSIVVSNLLGASGLRILHALANGETDPKKLAQLGGERLQCTEEQLVDALTGRAQPVHGEMLALQLQRLQLIDQQMARLNSMIAAAMKAHQDAVIRLAEVPGLGVDSAQQIIAAVGAQASTFASAAEWTSWVGTCPGKEESAERNRSSRSAKGNKYLRRVLNQAAHAAVAKKGSYFQMLFRRLLPRLGYQSAVWAIAHRLCRLVWKILHEGVRYIEQGGEADPRTKKKRAQMLARALRKLGYQVTITPINQITATNEI

SEQ ID NO: 458686 - protein, 417 aa, unidentified
MGKRRNRVCGADVHKDTIVATIQSSDGTELQGKFGTTQSELERFKNWLIAHNCEQVAFEATGVYWFPVYDALNSSIDVIVANPWMIKGIPKAKSDSNDSKWIAGNCLDGKIKRSRVLSKEYRDLRTMTRARSAYLKTRTQLRNRVHKYLALCGITLSSYISDIFGKSGRHILDGLVESKDIDSILESIPSGKIRKKQAIIKASLGKGLDDVSRMLVRDTLELLDQLDKIVNNTSLEILSRLQIRAKDLAIAMSVPGIGFTSASIILAEIGDYHDFQTPEQLVKWCGLAPGLNESAGKSRPCGITKQGSKNLRTILVEIAQVVAKMSSNRLSRFFRKLSARKNYNVAITALARKLISLIYHLLINQELYQENNDTTTVSKPAKKDLLLLSDKERLKDGIAAIVDAFYHLKRKYPQGGG

SEQ ID NO: 458687 - protein, 348 aa, unidentified
MLTERADTVIGVDTHAERHAFCLLDARSGLVLAACELPATRAGYREALRLARRRGQGRRVWSLEGTGCYGAGLARLLAQKGERVLEVERPRRRGRDGRLKSDALDAERAARAVLAGDRLASPRRGGEREALRVLLAVREQEVGVRRGGLNELRALVVTAPEQLRERLRGMRGDALVAACLRLRRQAGAEPAAAACRLALRSCAERVAQASARAGELEREIAALVRALCPQLLAEPGVGPISAGYLLVAWSHKGRLRSEAAFARLAGVAPIPASTGKTIRHRLDRGGDRKLNRALHTILLSRRRTDTDTIAYLKRRVSEGKSEREALRCLKRYLARSLYRLLERCATTA

SEQ ID NO: 458688 - protein, 367 aa, unidentified
MFTETVVGLDVHAHSITAAILEGSSNEPEVVTLPGDLMKVRRLFRRLADRGPVRSCYEASGAGFVLQRVLADDGFRCEVIAPSLIPRRPGDHRKTDRLDAVMLARLYRSGHLTPVHIPREDHEALRRLLRLRSVYHRYATATMHRISGILRIHGHVFTQGKTTWTKKHRRWLASLRTTLEGPLQTALAVELQHLEYLETQYRALDAELERCACLVQYRRQVDALCCLRGIKTLTALTILCEIDDIRRFASPRRLMAYFGLVPSEHSSGSKEQRGPITKAGNVHVRRLLVEAAWNNRHNAGAALILKRRRQGQPPEIVAIAQKAQLRLVNKFLRLDKRKHRHVAITAVARELCGFIWAILNALPQPQH

SEQ ID NO: 458689 - protein, 444 aa, unidentified
MAYRIAGIDVHKRKLAVVVADVEVEDEYQFERRWYGSNPEQLRVLSEWLLEQQIEEVVMESTAQYWKPVWGALERYWKPRCQSREGAGRMSGTLHLAQALSNRGRRGRKKDFRDAERLVKRLVSQELVLSFVPDSEQRMWRTLTRTRYQRTRDKVRLQNQLEALLEEAHIKLSSLVSDLLGASARRMLKALADGETDPAAVAALADQRLRATPAQLHDALGACTELNPVYRRLVKMTLEGLQFVEQQIGQLDQEMASLLRQHQDAVERLAVVPGLGVDSAQQIIAEVGAKAATFPSAEKLSSWVGACPGEEESAGVNRSRHSPKGNRQMRRVLNQAANAAVKHKGSIFEIAYRRLVPRLGHNKTIGVIAHRLCHLIWIILHKGVRYEERGPAVSEKVQTTPYGTNGPDTQNPWLPSRTSNESDMRNAIFDPVFVKEKKILLTRA

SEQ ID NO: 458690 - protein, 334 aa, unidentified
MKSDMVHMGVDVSKEKLDVFVPAQKEGMRPTAKELDNSVAGFRELRDLARKAGATVCVEPTGGYELELIAFMHKFSVPVAYADALRVRQFARAEGCLSKNDSIDAALISRFADKIGVRLLEEKDVEAVELKRRAKFRQTMSDSRTAMVNRLETEVDPDMKALLKEQIKRINKLIAKAERLCLETVRKNDSTNKLCERFTQVGGVGAITAISILAGLPEIGTLSDEKLNRLVGISPEEDQSGSRDRLRRIWGGRQDVRNALYMAATASLMWNSILGAYYRKKRAEGHPHKWAMVPTMRKLLSLLNRIARDPDFTPRPEPESTKRNAIATRKRKAA

SEQ ID NO: 458691 - protein, 343 aa, unidentified
MTKDTMIGVDLAKSVFQLHGASMTGEVEFRKKLTRTQFLRFMGEHPPAVVVMEACGSAYYWSREMVRLGHETKLIAPQYVKPFVKRHKNDAADAEAIVIAAQRPEMRFVEPKSEEQQAQAILFRGRERLIRQRTALVNALRSNLYEYGHIAPKGIGQIKRIEAIIDDTNSDLPDLMQEECRDLLEQITEKTARIEAKSERLKGLAAGTDTARRLQTMPGVGPLTALAIEAFAPDMKTFKRGRDFAAWLGLVPRQHSSGGKQRLGRVSKAGQADIRRLLIIGAMSRLAWHGRRSIPEGSWLDRMMARKPRMLVAIALANKMARAIWAMLTKKEDYRDPARAAVA

SEQ ID NO: 458692 - protein, 402 aa, unidentified
MSDVIALDVSEGHSYMVWYAHEACQAEFQVLHTRSGFAKLLKVVQRANHPILYFEATGVYSRQVERFCTDNQLPYCLLNPLDLKLKTNSLRRLKTDRQDAHRIARAVLNNHFRLKQPRTCVYAKMHELTRFYERVQTDVHIKHVQLHTQLQQTFPELEQLFTSRVSKLALNVVSLFPHPSLVQGLSRTVLKNRLIHSTDKKLSKVKGIQYAEKLQALAKDSYPAVDPDSVQVQAVRYYCRILINLIRQKEALTKQLVTLANSLPELAVITSMPGIGAQSAAELIGELGDIRRFDSANQLNAFVGIDINRYQSGKYLRQDHINKRGDPRARMLMYLIVKNMLRAQHTANNHIVDYYYQLKNGPIPKRNKVAIVACMNKTLYCLFSMVQANQKYDYTYHGLVVP

SEQ ID NO: 458693 - protein, 392 aa, unidentified
MLFVGIDIASKKHDAVITTSYGDILTEPFTILNNLDGYKKLRDEILSHTEHLDDVRIGIEETGIYSKNIAEFLALCGFTVHMINPVLTSNSRKSQSLRLTKTDKIDALAICRYVEFNYKRLNSYTPTLYIYDEIKSLSRARLDIQSRLVKAKTEWTRLLDLSFPEFRSTYNQHSKWAYSLFSSYPTPDRIAKMHINTLIQIVGIQGDRHEAASHIKSIAKSTVGTFSSTTRLLLKNTLGDIAHYESQMKELEREIENLITAYFSNLLTIPGVGPIIAGLVVGEIGDVTRFHSPRALVAFAGIDPVVFESGLFKAKKVGISKRGSKYLRTALYTATKVAIINPKIKNNKFRDKYSKKISEGKHHNSAIFSAAKNMSNAIFAMLQTGNNFDYSL

SEQ ID NO: 458694 - protein, 415 aa, unidentified
MSREPLRYVLKALSEASSFTDGMRGPVSAGCDKLPRIDALDGAKKRRPAMKKTSIVRVNGNTIFKGHKLTIGVDLGDRSSNYCVLDEAGEILLEQKLATTPEGMKQTFERIPRSLIAMETGTHSPWVSRLLKELGHEVLVAHAQKVNLITKSTRKDDRHDARTLARLARIDPELLGPIRHRSAKAQIHLTVIRARAELVSARTALVNGARGLAKSYGERLRKCGTEQVSRELATELSAELREVLEPLLKEIESLTERIKEYDVRMEKIARESYPQVALLKQVKGVGTQIALTYVLTLDDPHRFAKSREVGCFLGLKPGRRDSGQSQPQMHISKEGDRYLRTMLVQGAHYILGPFGEDSDLRRWGLRLAERGGKNAKKRAVVAVARKLAVLLHRLWVGGEVYEPLRNSHKAMRAAA

SEQ ID NO: 458695 - protein, 356 aa, unidentified
MANPCDLNKEVVMVTTIGIDPHKATHTAVAINETETILGELTIPADRSQTKTLLDWAQNLDGDGRVWAVEAAGGLGYLLSQQLVACGETVFDVPPVLASRVRLLGSGKSDKNDPNDARSVAIAALRQPGLAVVRREDHTQVLRMLAKRHLELTSLRTQAACRLHAVLTQLRPGGMRQRLSAKQASRMLQGLRIVDPVGEQRRSMARTHLTDIRRYDREIKANKVLIRKAVAASNTTVTDVYGVGPVVAAFLIGYTGDPTRFASADHYAAYNGTAPVEYSSGGKTKHRLSMRGNRMLNHAIHMAAITQIRHDTPGRVYYDRKQAEGKTGKEALRALKRRISDVVYRQLLKDQQTKKS

SEQ ID NO: 458696 - protein, 376 aa, unidentified
MNEKLRFLGLDVHAETIAVAVAEPNGEVRSLGMIANREDSIRKFIRKLGSPEHLRACYEAGPTGFVLYWQLTQLGVKCDVVAPSLVPKKPGDRVKTDRRDALKLARSHRSDDLTAVWVPDEGSEALRDLVRAREAAKQDQLRAKHRLTKFLLRTGQRPPLGVKAWTEKYVEWVQQVRYTHPAQEATLLDCLNEVQHMEERVKRLEQSIVEVIQLAPAPMQEVVRGLQALRGVAHISAVTIAVELGNITSRFERARDLMGYSGAFPSEDSSGKRIRRGGITKSGNAHLRRIVVESAWSYRHRPAIGARLRRRQEGLPAEIIEIAWKAQNRLHKRYMTLMARGKEQRKTMTAIARELLGFIWAIGIKAEAACKQQMAA

SEQ ID NO: 458697 - protein, 351 aa, unidentified
MPHKTDLTVVRTIGIDTGKSTLHMVGLDERGAIVLREKVSRHRIAARLVNVQPCLVGIEAGMATHYVARALSALGHDVKQVPPAYAKPFRQGHKNDFRDAYAVAEAVQRPSTRCVPIKTDDQLDLQALHRVRSRLIGDRTAVINQLRGFLLEHGITVRQGHRFLRQQLPQILTTRTDVLSPRMVRIAADLVGDWGYLDERIERVTDEIEGLAQTDVGCGQLMTAPGIGPIVASATVAAIGNGAAFAKGRDFAAWLGLVPKQMSTGDRTILGRITKRGNRYLRMLFIQGARAILLHPTSWAKHSFGPWLTAAAKRLHHNVLTVALANKLARIALTVLVEGRNYETRITPAAA

SEQ ID NO: 458698 - protein, 370 aa, unidentified
MPQSSTLYVGMDVHKDSIAVAYVAQDHGAEVIPLGTIGTRQVDIDRLTRKLQSKAKHLVFVYEAGPCGYWLYRYLSKKGYDCWVVAPSLIPKKAGDRVKTNRRDAIKLARLMRSGDLTPVYVPTVEDEAIRDLCRAREDAIRDLKAAKFRLKAFLLRHDIRYTGRATWGPAHLRWLSEVVCPTPAQQIVFQEYVRAVNEHTERLERLEQELTEQVQTWRLAPVVDALQALRGVQFTVAVTTVAELGDLTRFTNPRQLMHYLGLTPSEYSTGERRRQGGITKTGNTHARRALIEGAWAYRYPAKVSRHLQLRLEKVPKPIQDISWKAQVRLCKRYRQLSARGKHPNQVVVAIARELSAFMWAIAQEVPLVA

SEQ ID NO: 458699 - protein, 333 aa, unidentified
MFLLLIIRLKTGGTMMNVIALGIDIAKNVFQLHGINANGQVVLQKKLSREKLLKFIAQMPTCKIGMESCGGSNYWAKQFQALGHEVKLISPQFVKPYVKSNKNDMRDAEAICEALTRPNMRFVSIKTLEQQDIQAIHRVRSRVIKERTALVNQIRGLLAEYGIVVAQGVSHVRKGLPIIVEDLENKLTQVSKKLFNNLLCELRDKDTKVKEYDNEIKQICQRFDTCKRIMKIEGVGALTATAVVATIGDATIFKNGREMAAFIGLVPRQYSSGGKEKLLGISKRGDRYLRCLLIHGARAAVTRSKNLPDKKATWLKSVEERRGRNPPRAGIRY

SEQ ID NO: 458700 - protein, 336 aa, unidentified
MRFIGVDLHTTQITVCALNHELEPAVKTYQLTELEKFVSQLQPTDEIAVEATGNTRWFVGQVKGRVKRVVIVNPRQFQVIRKSVKKTDKNDAVALARFLQANLLPEVREKSAENERIQSLNETRNKFVRLKTSLLNKIHALGVSRGRKLKKSSLSSEKGLTRVLESEWTAGERIELEIVIEQIRWLKESIKKLDKAITQESEKVSGFENLVSITGVGARSAGVLLSVIGDVNDFESADKLASYFGIVPRVSNSNETVRTGRITKQGSKTGRTTLVQCVLSAIRGNEYLRKYYEQVKERRGHGKAKIAVARKYLTLIYNTLKNNWVFEDFNNFVLAE

SEQ ID NO: 458701 - protein, 336 aa, unidentified
MKQITTLAIDLAKNVFQLHGVNEYGVVVLRRQVRRAQLLALIARLPACLIAMEACASAHYWGRQFLNLGHRVKLIPPQYVKPFVKGSKTDRNDAAGICEAAQRPDMPQVAVKSEEQQGVLALHRIRELLEKQRKQVANQLRGILGEFGIAIAASMRALREALPEAKQQVPSLLRPTLEQACERLRELERQCKAHTEQIEACANNNPLCRRLMRERGIGPISASAFVATLGDPRHYRSGRQVSACLGLVPRQHSTGGKAVLLGITKRGDKYLRMMLIHGGRSVVRHAKGKHDPLSEWVNELARRRGPNRAAVAMANKNARRLWAIWRDEGQELAAAG

SEQ ID NO: 458702 - protein, 367 aa, unidentified
MMGWMAPLRHLSAKLLSDRNSSEWEPSMGEVTTIGLDLAKLVFQAHGVDAEGATVLRKQLRRAQVLAFFSRLPPCLVGLEACATAHYWARELRALGHEVRLMPAQYVKAYVKRNKHDAADAEAICEAVVRPTMRFVPVKTADQQAAVLLHRGRERLVRQRTGLVNALRGHLAEFGVIAPQGLRNVGKLIAIVRDERDARLPDLARQVLQVLAAQIEQLEAAVAAIEKQLMAWHKSNPVSQRLASVPGIGPIIATAIAATVVEPSGFRSGREFAAWLGLVPRQNSTGGKHRLGGISKRGNQYLRRLLINGASANLLRSKATNADPWVIGLRRRRPSLVVAVALANKTARIAWAVMHRHENYQRVAAAA

SEQ ID NO: 458703 - protein, 417 aa, unidentified
MNNMTINPYVAFVGIDWADTKHDVCIQAADSMKREFAVVPHKIEKIDAWAQSLHKRFPGQIAIAIELSKGPIVYALQKYDYFVLFPIHPLTLAKYREAFQPSRAKDDPTDAELALDILLSHPDHFAPLNPQSVEMRTLMTLVEQRRRLVNDRVRITNRLRSTLKQYYPQTLEWFGRIDTKLFCNFIEHWPTLTQVKRARTTTLTAFFKAGKTRNPALLETRIASIRSSQHLTQDEAIIEPNKLHALMLVEMLRVILNAIKTYDKEIAELAPKHDDYDLFSSLPGAGPSLAPRLLVAFGEQRDRFKNAAEMQKYSGVAPVTERSGTKHWVHWRWRCPTFVRQTFVEWAAQTINKSYWAGEYYRQQREKGSAHQSALRALAFKWIRILYCCWQTRTQYNEAIYLKALARRGSPLMAKAA

SEQ ID NO: 458704 - protein, 412 aa, unidentified
MEQIHDRVAGLDVHRDQVAACVRTPGPRGGVQTEKARFGTTASGLAALAEWLSGHAITLAAMEATGVYWKPVYYALEGRFLVWLCNAHHVKNVPGRKTDMSDAEWLADVAAHGMVRPSFVPPPPIRELRELTRYRKTQVDARAAEIARVEKVLQDAGIKLTSVASKVLTQSGRAMIEALIAGERDPAALAGLAKGKLRPKIPQLTAALDGHFGAHHAIVAARILAHLDSLDDAIAVLDGQIAARVAGRYQSAARLLADVPGLERRSIEVIIAETGADMSCFPSPAHLASWAGLCPGNHESAGKRRRVATTPGNQWLRRTLIESARAAARTRGSYFGAQYRQIARRRGPNKAAVAVAHSLLDVIWHMLTTGEVFADLGADYFTSRQDKEHQTQRLVRQLEKLGYTVQLAAATA

SEQ ID NO: 458705 - protein, 407 aa, unidentified
MICVGIDVSKRKSTVCFMAPGDKIIRRPFDVKHTKEELQPLVDEIRVQAKYDEIKVVMESTGVYHLSIAYFLQQNGIFVSVVNALKVANFNKAENFRHTKTDSIDSTNIARYGIAYWAKLPQFDLNGDKYFLLKRLCDAYLNFSEERSRILLQLQSQLEQTMPGIFDLFGGFDINSGKDKLLDFLEKYCHIEDIIAKPEAEFVASYREWAKEKGYRSNESKAATIYAQAKNGIPSIPNNPIVRETIMWYVGLLRRADEALMASLTRMEDIAKDLPEYELVGEMGGVGRVTRVALIAQIGDVRRFKNKHSLICFAGLTPSIHESGKFRASQNHIVKKGPARLRKVLYQVMMSLVMHKIPKDDAVYRFIKKKEAEGKYKKVAKVAGMAKFLRIYYGRVMHLYRDLGLAA

SEQ ID NO: 458706 - protein, 404 aa, unidentified
MIFVGVDWAETHHDVCVMSEDGQVLEQRRVSHSVAGIGELHALVAGHAGEGEPVAAGIEVDRGLVVTALLAAGYQVYAVNPLASSRYRDRHATSGAKSDRGDAKVLADLVRTDRHNHRQVAGDSDLAEAVKVLARAHQSAIWSRQRQVNALRSALREYYPAALAAFGTDLAASDAVAVLALAPTPDAGRSLSRAKIASALRRAGRQRNTEQRAAEIQAALRAGYLQAPPAVAGAYGAAARSAIRLISAYTAEITELEEALSGHFEQHPDVKIVRSLPGLGTILGARVLGEFGDDRTRFASPQCRKNYAGTSPITKASGRSHVVLARHARNRRLADALEQWAFCSLTPSPGARAYYDQLRARGKTHRQALRQLANRWVGILHICLERGCTYDETAAWNHLQANAA

SEQ ID NO: 458707 - protein, 448 aa, unidentified
MTVRKQVRGLEVAHPNAAGIDIGSASHYVAVPPDRDDEPVRQFRSFTEDLEALAQWLKECGVEIVAMESTGVYWIPLYDRLAAQGFEVLLVDPRQTKHAPGRPKSDVLDCQWIRRLHSYGLLTASFRPSDEIVRWRGYQRQREMLIRYAAQHVQHMQKVLEEMNVKLTEVVSDIVGQTGMKIIKDIVRGERDPRQLAKHRHERCKATEAEIARALYGNWRREHLFALKQALKLYEFYQRQLRECETEIEACLRGMADKSQGKPLPPSLRKRKPEKNEVRFGARALLFRMAGVDLTVLEGISETTALVILSEIGTDLSQFPHEKNFVSWLGLCPQHRGSAGKIFKRRIRRGANRAARALRMAAQGCHHAKNALGAFYRRIQARCGGAKAVVATARKLAERVYRLLRYGQEYVRQSEQAYEEAYQLRLLKSLTKKAASLGYKLVPETLTP

SEQ ID NO: 458708 - protein, 418 aa, unidentified
MEDILECCCGLDVHKESIIACILKGAIIEGLKPTSVIREFGTQLKDLIALRKWLEEQDCHHVAMESTGIFWQPVYAVLEESLSEDMHLLVVNARHMKNVPGKKTDIRDAEWIATLLRAGLLKGSFVPERDIRNLRQLTRYRKALIRDITSQKNRIEKLLQSSGFRLSSFLSDIFGSSGRAIMLQLVQVGYISGQSLESCLKGRARQKATEILSSLNGILSVPQRKLLKMQLEHLKDLQDNLHEVEEEIRSDFSRFQGPIVLLDSIPGIDQTAAYAILAEIGQHMSAFPTAQHICAWAGLAPGNHESAGKKKKQQITQGNKYLKTMLCEVAWVIASHKKLYLSGWYWRLKQRIGAKLAIVALARKLLVIIYTMLKTNQPFNEQKFQERKDAANKKRVYRMVNELAKLDMPFLWRLSLFS

SEQ ID NO: 458709 - protein, 325 aa, unidentified
MSAFVGIDVSKATLDVAIRQDTKSHHFQVPNHLKGFQDLHQRLQGMGEIRAVALEASGRYGEALAHFLFEQGYWVNYLNPKLTHRFSQESLRYSKTDAHDAQNIAHYAQTHPRAAWLAPSPEQSQLQQRSRRLETLKKMQQQEVNRLQSGLNDAFVLEQIQALIEHFERLIQDTEASLRDLIQQNPTLRANFKLLTSIQGIGKVTATLFLAEIGDIGRFPSVKQLTAFIGLDPQDYQSGTSVKKPAHISKQGSRRLRAALYMPALTAIRYNPACKALYQRLEAKHKASKVRIVAVMRKLVHQIYGVLKSQKPFNPNYQPFSQISA

SEQ ID NO: 458710 - protein, 343 aa, unidentified
MSEVTTIGLDIAKNVFHAHGADASGRALFSRKISRTKLLEFFGKQPRCTVALEACGGAHHWGREFTRLGHDVKLIPPAYVKPFVKRHKNDAVDAEAICEAAQRPNMRFVAIKSEEQQASGLVFRTRDLLVRQRTQLINAIRGHLTEYGWVAPKGPSHVAMLGDLLEEEIGSSLPEAAKAMFRTMLDLLEELNDRIGDLDKEIAWRACEDAIARRLMTIPGVGPITATAIRALAPPAETFAKGRDFAAWLGLAPRQLSTGGKQKLGSITKMGERTLRRLLIIGSSAVVLQASKRGAPAGSWLEQMLARKPRMLVTVALANKTARIIWALLMSEEDYRAPVAAAA

SEQ ID NO: 458711 - protein, 345 aa, unidentified
MEELLILSPVGRTLILKRTCYGHFYPRHRRGVPRKLDLVWSNGNKQEHATIEYNRASLTTYVKTHAQMSPATCIVGLESTGDYHLAAARFFLERGFPVKVLNPIITKRYTQTTVRGTKTDKTDAQIIARLIAEGEGDEATLSDIMSRERELLRLSQSLAKLRSQLTLRLQSLQRKEVGKTKRIERKVEKVITLLRELGDELVDEATQKRSREEELIDSISGFAIKLSAIVHYELGDVSRFKNARSLVSFSGLDPRIKQSGHKLNTTGRLLKRGSPYLRTALFVAANVARQYDLELQEYYQKKKTEGRAHTEILCMIARKLLYRIWAVLRDQREYEVANRVETEKG

SEQ ID NO: 458712 - protein, 356 aa, unidentified
MFYGVDLHSDSITIAAMGEEGETSRVFRYHLGTEAFEKFVERLTDNDYMIVEASTNTFWFYEKVRYRVGRCIIIDPRKIQGNDGVKVKTDKRDALQLVRLLRYVILTGATLPEVYIPEKPVQEIRQLFTTYYLYKRQMVMTKNRIHSLLKQEGYTVPKKSLDLAKTWDIIARFKLSVSAKIQIQQLYEQIESIRKGKELIKQEILVRGVIFQEEIELLTSIKGISVFMAIGIMADIVDINRFPSAKKLCAYLRTAPTVSSSNKMTRIGSINKNSRKLTISLLIESVEHFRSVEKINRFYAGKKKGKGAGKARVAVVRKIIVAIYYILKKRQYYYYRSEEMHCRKLNEYENFLKKVA

SEQ ID NO: 458713 - protein, 347 aa, unidentified
MLYAGLDLSRKRLDVCVVDECRRVVVEMACAPDVDGLRGLADRLGPMSAAIESMTGARFVRDRLQELGWEVQIADAERVKGLAPLACKTDRVDARVLAQLAARDLVPAIWLPDPAVRAERERARWRLHLVKHRSQLKNRIHATLMTFGRPCSVSDLFGITGRRQLETLALPQPWAGTMLASLGLIDELDEQIAGCVRELRELGADHPYVSRLQSAPGIAWVLGYTIASEIGDITRFASPKKLVGYTGLCPRVYQSGQHDRRGPLAKNGPRYLRWALIEAAIHAARHPHYRARYQTAAKRIAGPRGRKIARVQIARDLTTAIWHMLTRDQDFAPAGPALPLAAQTAPH

SEQ ID NO: 458714 - protein, 355 aa, unidentified
MDSVKYIGMDVHKESISIAVRNGAGKIVMECVIETKASMILQFIDGLRGDLQVTFEEGTSAAWLYDLLKPRVTKLVVCDPRKNASMREGNQNDKIDARRLAELLRLNHLSPVYHGEHGLRSLKELVRSYLTITKDLVRVMTRVKAIYRSWAIPCTGKQVYAPRHRAEWLGKITEPGVRRRAEFYYQQLDALRSVRQEVRRELLAEGKKHKAWKLLCQIPSIGPIRSAVLLGILQTPHRFRTKRQLWTYSGFGIETQSSADHCNVNGQLQRAKKQNSIRGLNRNCNHDLKNLFKGAAIVASSKPGPFQEFYSALLTKGIRPEMARLTLARKIATIVLMVWKRGACFDAQHLKPQTA

SEQ ID NO: 458715 - protein, 354 aa, unidentified
MSQKLSSEVAVIGVDIGKNSFHLVGQDRRGALVLRQKWSRGQVEARLANLPPCLIGMEACVGAHHLSRKLRSLGHDARLMPAKYVRPYSKGEKNDYRDAEAIAEAVQRPTMKFVATKTAEQLDLQALHRVRERLVSQRTGIINQIRAFLLERGIAVRQGLHFLRAELPGILAKRTDVLSPRMLRVIEDLAGDWRRLDERIESLSAEITRLVERDPACQRLMTVPGIGPLTSSAMVAAIGTGDVFSKGRDFGAWLGLVPKQMSTGDRTILGSISRRGNCYLRKLFVQAAWVVLVKVRPQQWERYGLKSWIEAAKKRLHRNVLAIALANKLARIAWAVLHNGRAFECVKTNAPRPA

SEQ ID NO: 458716 - protein, 416 aa, unidentified
MKLFVGLDVSSEKLDACFMTDDSTCSVLKEASYGNSQLGASQIKEYILEFSQKFEIESLVIGMEATSLYSFHPAMFFKEDLELNQLNLMVSVEQPNKIKKYRDIFEENKNDQIDAFYIADYFRIQRQVNSIIKEEEYLALQHLTRTRYQLIKQLVRTKQHFIENIYYKCNTLSKEQKAEGGSVLSATLVTLMTEDYTMDQLAELSLEEFANLIQKLGKYRFKNPEGIAKAISKAIRSSYRLGKVHQDSVDIVLGVLAKEIRSLEKLIKDLDKAIDDLVVVLPEYQCLTSIPGIGPVYAAGILAEIGPINRFSDESKLAKYAGLYWRQNQSGNSEYENTPMAKRGNRYLRYYLVEATNSVRRYEPEYHAYYKKKYAETPKHKHKRAIVLTARKFTRLVDTLLRNHQLYMPPRSVIDK

SEQ ID NO: 458717 - protein, 413 aa, unidentified
MGKKKIRVDNEVLTLDPSIDVSGYEFVGGIDVHKEKCAIFVVYAKHGEIPHDAEVFAEYINRSYRRVKSNAEGFEQLLIDLSKAKKVSFLMENSTKSHEIYWMLTSMGIETYVAHSTDLYRITKSTRKNDDRDARELAFYMRRKLYGEVEFALCLMPDAKQMERKQLCRFLANIKEDLSVLKKQARMRLLITGKHTSREYSDISCVSARRELLAMRDNVLSFIVKRMEQTIDLIKFAEKVILNEFSDDRTFQIIYSIPGFGIHSAAYITSEIMDIERFPNKQRFSGYFGVRPKQSDSADSQNDQHISRRGDSLARRLCYQATFVHINHVEESNITQKYQRLKAKGKVHKESTVACTNSMFMMIYTMVKHDTAYTCNKELLKMCREKADAMDINDLSEIDDPEIPSCVQEMTTA

SEQ ID NO: 458718 - protein, 329 aa, unidentified
MAKLTAARDRCAKLSGRAPSIVLCYEAGYDAFWVARFLKARGIECLVVDSASMQVNRRARRAKTDRIDVGKLLRGLIAWLRGDHHVWSVVRIPSVDEEDLRRSHRERDYLVHERTAHINRIKGLLFAQGIRGINVKRQYKTLNVDKLVTGDGHPIPPRLASEIVREIARLALVQEQIATLERERDERPTPCTATEKKRAQLMYLNGIGPAISAVMTREVYYRQFDNRRQVAGFLGLAASPYDSGEVERSQGISRGGRGQVRGTMIQAAWLWIKHQPKSTLTRWFLQRTMGQGGRVKRIMIVAVARKLAIALWRFLEHGLVPQGAILSSK

SEQ ID NO: 458719 - protein, 353 aa, unidentified
MKSRMESKMSSPVVIGVDIGKDVFHLVGFTADGKIAFRRRIKRLALKDVFEKLPPCIVAMEACLSAHFVSRTLRALGHEPRIIPAIYVKPFVKGQKNDYNDAEAIAEAALRPNLRFVQEKSQDQLDLQACHRVRSRLVSRRTATINQIRAFLIEQGIAVRAGPRALRKSLFPILENRKDEISPRTAKLIRGLYDDWCCLDERIETVTGEIEILSRSEAKCRQLMSVPGVGPLISTAMVAAIGSGEAFERGRDFASWLGLVPRQYSTGGRSILGRISKRGSKYLRTLLIQAAKVLLMRPHNWARYSFGPWLNAASVRLHRNKLAVALANKLARIAWSVLRNDKAFDTHLEVAAI

SEQ ID NO: 458720 - protein, 355 aa, unidentified
MESVKYLGFDVHQSTISVAVVNADGKLVMQSVIATHAATILDFIHGLRGTLHLTFEEGTHSAWLYDLLARGVARVVVCNPRQNALLKAGNKSDTSDARKLAELLRAGLLAPVYHGEGSTRTLQELVRSYAALTEDTTRVMGRVKALYRSQAIACAGKKPYGRRHRREWLSKLSEAGLHRRAERLYEELDALQGLRRAAKRELVLESRKHAAAKLLRTVPLLGAIRAALLIGRVQTPHRFRSKRQFWAYCGLALETRSSADYRFEDGQLVRAKKPVFIRGLNRNHNHDLKNLFKSAATTASVIHGPFREFYEGLLAKGLQPAMARLTLARKIAAITLSVWKKGESFDAEQLKPQAA

SEQ ID NO: 458721 - protein, 395 aa, unidentified
MFRGRTGLRLNSFSLYACILTSNMDNNSLIGKVDVAEVSVANRGNIKRRREFDRGKVKKAVTEREPRRHRGISPNSRLNRRRPTRSVSSHLQVREYTMSEEIYVGIDIAKETFHVATCPATIKTQLPNTHQGHHQLLRLLQKQNIALIVLEATGGYERPLALELISNSLPVVVANPRQVRNFAKGMGQKAKTDPIDAQVLAKFAQIVKPAPRPHSKPEIKELSELVRRRRQLNDLLTQESNRLSMICHPKVKKSIQKMIKTLNSQIDEIDRLIRNYIDTDDDFKNKDNILQSVSGVGPQTSAMLIANLPELGTLNRQEIAALAGLAPWNNSSGKSDGRMHIWGGRKDVRSVLYMSAFTACRFNPVIRIFAERLKKSGKAYRVVMTARWLKFTPMR

SEQ ID NO: 458722 - protein, 347 aa, unidentified
MRFYNRQHRYYCGIDLHVKTMYVCILDAAGQVLVHRNMSSTPDALLATVAPYRDDLVVAAECMFTWYWLADICAAEGIAFVLGHALAMKAIHGGKSKNDKIDSHKIASLLRGGLLPQSYVYPATMRSTRDLLRRRLHLVRKRGQLLAHIQNTRAQYNVAEFARRLAYPANREGVPDYFADASVRKSIEVDLALLERYDDLINDLELTLVRTAKRHDGDAFHRLRSVPGIGKVLALTILYEIHDIHRFDRVQEFASYARLVKGRKQSGGKMLGTSGAKMGNVHLKWAFSEAAVLFLRHATGGKKFLATIEKKHGKGKALSILAHKIGRAVFYMLSRDTVFSMEKFMAA

SEQ ID NO: 458723 - protein, 340 aa, unidentified
MYYVGLDIHTKRISICVLSEVGQLVRRCQVRGIEEMLGTLKALPDRFEVCYEASCGYGHYHDLLQPLAARVVVAHPGRLRLIFRSRDKSDRKDAERLAKLLYLGEAPTVHVPAPDVRTWRELINCRGQVIAKRTRAKNALRALVRGAGVTPPRHPDLWTKAGLAWLRRLGLPTASQQLRRDLLLEEVKALHRQVRRIEQQLGRRARPLPAVARLRSIPGVGIRTAEAVAAFVDDPDRFRSAKAVGRYLGLVPCQDQSGDRNRLGHITREGAPVVRQLLAEAAWQARRRSPRVRAYFERVQRGDPQRKKIALVATAHYLVRVMWAMLKRGTTWEEDPAQAD

SEQ ID NO: 458724 - protein, 321 aa, unidentified
MSAFTYVGIDVSKDHLDIATLPSGAERSAEAWRIANDPDGIDALAARLTQLQATLVVLEATGGHEHAVAAALAAAGLAVAVVNPRQVRDFARATGELAKTDALDAQVLALFAERVRPEPRALPDASQRALESLLSRRRQLIGMLVAERNRLLLADAAIQKSLKKHVRWLEKELGAVEDEVAKAVEASPVWWAKENLLRSVPGVGRVLAATLLADLPELGHLNRKEIAKLVGVAPLARDSGKHRGQRIAWGGRAEVRSALYMSALACITHNPVIGAFYRRLVASGKPKKVALVAAMRKLLVMLNAMARDGERWDPDIIPATA

SEQ ID NO: 458725 - protein, 393 aa, unidentified
MPQESKAAIPTQDKKNAGDIFISVEMSRSKWVIGVHTPLAEKIALHTLTCGDVDALLTLIDRAQAKLTAAGVGAPAVVVCYEAGYEGFWLYRRLVALGIRVVVIDPASLLVDRRAKRAKTDRIDARAMVRALMAWSRGERQVLSEVRVPTVEQDDARRGLRERQRLVKERTAHGNRIKGLLKTQGIMDFDPRAADAIARLDAIVTGDGRPLGPCLKREIVRELERLALVMRQIEHVEAERDAVVRECGQQADTAAEPEREAEMIAVLNRLKGIGMNDATILAREAFWRDFRNRREVGGWSGLAPSPWASGSVSRDQGITKAGPPMLRAHMIQMSWRWLFWQPESELAQWYRKRTEGTTGRMRRIMVVALARKLLIALWRYATTGMVPRGAIVT

SEQ ID NO: 458726 - protein, 352 aa, unidentified
MEQFIGCDAHKKFSVFVAVNEKGQAGEALRVAHDPVLIREFLSRLPAHSAIAVEASRNYSWLVDEMERAGHRPKLCNPLEAKRRMGLTHKTDKLDARGLAILLRNGTLPEVWIPPGELRDQRELLRLRIFLVRLRTRVKNRIHGTLSRHNVQVPGADLFGAGPRLELVGRLSELPVNSREAVEQELKTLDFLEMQIEVAEKRLEAIMKVSVEADLLKTLPCVGPILSMVMMLEIGRVDRFPTAAHLASYAGLVPRVHSSGGRTRMGQVGGNVNRNLKWAFVETANLIVINQRRLAGTHVVRLYQRIKRAKNHQKAAMAVARHLAEAAWWVLNKLEVYREPQLAQQALSSTHG

SEQ ID NO: 458727 - protein, 361 aa, unidentified
MKCIQRNKLDFRGQNIYVGIDVHLKSWSVAILSEHSVLKRFSQSPEPESLHKYLVSNYPGANYFSVYEAGFCGFWIHERLMDLGITNIVVNPADVPTMSKEKFRKTDAVDCNKLARELRSGSLEGIYVPRADVLEMRSLIRMRNLIVKDNTRAKNRIKSLLRFHGVEIPEEFTRCSIGCWSKRFLSWLQTLELSTEYGKKTLELHLEQFIRLRKMLLQETRAIREISRKEPFEKPIRLLTSVPGIGVTTAATLMVELDDIVRFRNADHLASFIGLVPMCHSSGESNGTGDITVRRHFMLRCLLVEAAWIAIRKDPAMTVAYTEYRKRMNPQKSIIKIARRLVNRIYYVLKHEKEYVPCVVK

SEQ ID NO: 458728 - protein, 343 aa, unidentified
MDIATIGLDLAKNWFQVHGVDAQGQAVVRRKLRRGDVLTYFRSLEPCLVGMEACATAHHWARELTLLGHEVKLMPPGYVKAYVKRNKNDAADAEAICEAVTRPTMRFVPIKTVDQQAVLMLHRARNLLVRQRTMLVNALRAHMAEFGIIAPQGLHHVEDLTKELAHEQERLPELARSILLTIVDQLRDTVARVREIEIRLTRWHKGSKVSQLLASIPGIGIMGATAIAATVSDPSLFRSGREFAAWLGMTPRQNSSGGKERLGRTSKRGDKYIRCLLVAGAVAVLRHTRTRTTKDAAWVQGLLARRPTKVAAVALANKSARIAWAVMARGDGYRSKDQIVQAA

SEQ ID NO: 458729 - protein, 414 aa, unidentified
MKKRTYRAKNVNKINWDKVTEQLSGEAGVFAIDVAKAKQYALLTNADNSVSELIWWNHPEQTYEVLTALKCLACPLNVVMESTGTYGDALRYQFKQSGFSIYQMNAKRVSDAQEIYDGVPSMHDAKSATVITRLHAEGLSKPWVELTDEERNMNALRREYDMHHTQYQRNQNRLEAFLSRHWPEVGKFLDLDSVTLESLLIAYGSPEHIAADAKDAAKKMRGWGRSLLSDEKIESVIKSARHSLGQPCTDIEVRYLQALAEEMRHSRLQQKRTKNALEGFIERDDELKELSNLIGMITTAILLSCHLDPRKHDCARSFQKALGLNLKEKSSGRHVGQLKISKRGSSTARSYLYFAALRLIKNNPVTKAWYLNKVDPRAKNKTVIAVMRKLVKALWYVGRGERFDANKLFTLAKA

SEQ ID NO: 458730 - protein, 316 aa, unidentified
MTDDKTIICCAGIDVAKDKLDVALWPCGTHAVFAYSGAGLAELDRFLATHKVERIGFEASGGYERRLLEHLRDRGIAAARLQPAQVKAFARSRLRRAKNDRLDAQLIAVFTAHLDKLPPLPAKVTLELAEHLTFIEQIEDQLVAAKTRLETTASPRFRKLHSAEIRRLELRREVELMRLAKAVEASEELARRLARVCSIKGIGLRTGLAFVIRLPELGSLTREEAAALTGLAPYDNDSGRCSGKRSIKGGRPRLRTSVFMAGFSATRWNPDIKAFYDRLRAKGKHHLTALVAAMRKLVILANAVVARDTDWQPVRP

SEQ ID NO: 458731 - protein, 341 aa, unidentified
MKEATIIGIDLAKRNFSICGIDRNSKVLFRKSLSRHEMMEFIVTSKKALIAFEACGGSHYWARFCERHGHDVKVISSYRVKPFAPAKKKNDAVDAEAIAIAAQQVSVPSTRTKSTDQQDIEIMQNYREQIIAQRVALMNQLHAIALEYGVSLPSCKSFLQIEKIVIELENGDNELTDVAREMISRILVRAKNLNAEAESIALEIASFYKGNENYKLICSIPGVGPQTAAAVLAHTGGNVSSFKNGRQFSAYLGLTPQQYSTGGKSKLLGITKTGNERIRRLLIVGMNSVLRVVDKKQDKVSLWASEKKSHKAYRVTAVAMANKTARIIYAVLKNQTPYCVA

SEQ ID NO: 458732 - protein, 378 aa, unidentified
MTATIGSPTSVSEARLYVAFELGKAEWTVACTSGFGVTPWLRTVRSGDLAAVQTVVAQARARLGLGAAAPVVSCYEAGRDGFWIHRALTGLGLQNVVVDSASIEVNRRARRTKTDRLDAEKLVFMLVRAWQGDRRVWRTVHVPEEAAEAARHVSRERTSLVAEQTRLRNQIGSWLATIGCEVSAAGRRAAGWWTAVRDWQGRPLPGSVQARIARATARLQLVAEQIAALDTVQQTATATAAAPEALTRLIQLKGVATTSAAVLLGEGLVWRHFRNRREVGALLGFAPAPYASGERQRDQGITRAGNRRLQAVGIQLAWNWIRWQPSSALTRWYQARFGAGRRARRIGIVAVARKLLIALWRYATTGVVPTGALLRPAV

SEQ ID NO: 458733 - protein, 448 aa, unidentified
MRTRKPPRPRKMKLPKHLQHINPHAAGIDIGGRSHFVAVPEGSCEQPVREFTSFTDDLHRMADWLLACAVSTVAMESTGIYWIPVFEILESRGLEVRLVNARHVKNVPGRKSDVLDCQWLQRLHSYGLLQGAFRPTEQECTLRAYVRQRMNLVRYAASHIQHMQKALAQMNLQLANVVADITGGTGMRIIKAVLAGERDPLVLAQLRDVRCKSNEATIARCLQGNFRPEHLFSLKQAVDLYEFYQGQIGECDRQILDQLSSFDGADASGNGPPESLDEALQRMTGVDLTQIDGINSNSALKVISEIGTDMSRWKSAKHFASWLGLCPGTKISGGKRLSAKSKPVANRAAGTLRMAAFSLFNSKSALGAYLRRQRSRLGAPKAITATAHKLARLVYSMLKHGTAYVDEGQKRYEERYRTRVVQNLKRKAKELGFALVEAVEKQPKLETT

SEQ ID NO: 458734 - protein, 348 aa, unidentified
MVILGIDAHKRTHTAVAIDDTGRELGSKTTLATTTEAHLELLRWAERFGAERRWAVEDCRHLSRRLEADLLAAGEAIVRVPPKMMAHARDAARTYGKSDPIDALAVARAALREPGLPMARLDGPSRELRLLVDHREDLIRDRTGHINRLRWHLHELEPSWDPAPRSMTRYAQLDAVAARLKGFDGMVARVAMELVGIIRDLTVRANALEREILERVRLLGPNLLRLTGVGALTAAKIVAEVADVRRFRSKDAFARHNGTAPLPVWSSNRVRHRLSRSGNRQLNAAIHRIAVTQKRCHADARTYVERRMANGNTKTEALRALKRKLSDVVYRALVADADTTSTSMTQAA

SEQ ID NO: 458735 - protein, 458 aa, unidentified
MSRSNTHPHPRVPEALPHLNPDAAGLDIGAEEIWACVPADREAQPVRRFGTFTPDLHALADWLAQCGVKTVAMESTGVYWIPIYEELETRGFEVYLVNARHLKTVPGRKSDVQDCQWIQRLHSYGLLTASFRPAEEMRVLRAYLRQRALLVEHRAAHIQHMQKALQQMNVQLPQVVSDITGHTGLQIIRAIVAGERDPHVLAQLRHGRCHASQAEIATALSGQYRPEHVFALKQALALYDCYTQQVQDCDAYIEQNYAAIRPTYDDTTPPPPLGPAPKPTAHAKNAPSFDVRGCLYRILGIDLTAVHGLEASTAQTLLSEIGTDMSPWPTEKHFASWLGLAPHNDISGGKVLRSHPLKVRNRAAQALRLAAQALGRTQTALGAYYRRRRARQGPKAAVTATAHKLARIVYHLLKHRDPYHPLSPEAYEHHLRQRELALLKRKAARLGFTLLPRPATAA

SEQ ID NO: 458736 - protein, 344 aa, unidentified
MPIITVGIDLAKAVFAVHGVDEAGKATLVKPKVARDQLVPLIAQLPPCLIGMEACSGAHHWARVFAEHGHTVKLMAPKLVSPYRMSGKRGKNDAADAAAICEAVTRPSMRFVPVKDEHQQATLCLHRTRQGFIEERTSTYNRLRGLLSEFGVVLPQSPERLRKEIGPCLDSLPGWARRCMSELLEHTSHIEDRLVELDRAINQIAREDDRSRRLLQLRGVGSTTASALVASIGDGHDFRNGRQVAAWLGLTPGQYSSGGKQRLGSITKAGDAYLRSLLVLGARSVMANLGDKQDPLSRWIRNLMERRGYWRAAVAIAAKNARMAWAVLHYGDTFKPEQAEPTGA

SEQ ID NO: 458737 - protein, 410 aa, unidentified
MELLHRRCCGLDVHKVTVVACQRLVSDGKVTTEVRTFQTTTADLLHLSEWLASNGCTHVAMEATGVYWKPVWHILDDGEFGLVLANAAHVKNVPGRKTDVNDAMWLAELLAHGLIRASFVPDTQTQEMRNLLRTRKQLVREQSSHVLRVQKTLEDANIKLDSVLTDLMGKSGRAMIEALIAGETNPTKLASLADRRAKASNEEFREALRGRVTKHHRFLLRLHLNQIDALNAAMATLDAQVEENLGPFRTAVDLIISIPGIKNLGAHVIVSEIGIDMSRFPSDAHLISWAGICPRNDESAGKRRSNRLRKGAPWLKTTLVQCAWAAVKKKDSYLQAQFYRIKARRGAKKAIMAVAASILTAIYHMLKDGTIYKDLGHDHFDRRSTDQQKQRLVKRLAELGYVVEIKPLAA

SEQ ID NO: 458738 - protein, 375 aa, unidentified
MAVGATNVVGVDGPRGIECATMRSLLLISDKGRPSVDQISRIGMDTSKHIFQLHGVNAAEVPVLRKKLRRKEMLAFFKKLAPTVIAIEACGASHHLARLLQSFGHTVKLIAPQLVKPYVKRGKNDAADAEALCEAMSRPTMRFVPVKTAEQQAALMLVGVRDRLIRNRTQLANTIRGYAAEFGLTAAKGMAHLVPLLERIQADETLPALARELFASQAGEYAQLQAQIGEVEAKLTAWHRADECSRRLAKIPGIGPIGAVLLRMKAPDPAQFQSGRQFAAWIGLTPKDHSTAGKVRLGVITRAGDEALRSVLVVGATAVIQQALRSGKALPWLAGLLKRKPAKLAAVALANKTARIAWKVMLTGDAYRATSAAAA

SEQ ID NO: 458739 - protein, 363 aa, unidentified
MHHGVQQQTYRVDQDMSLLAFDLLARIIPGWINAGPPCILPLPATKQSASLSVDGSPQPPRVSEPEKKQGAPSTGSIENPNSRLGRKPSPHSQGRVMERHPASPSFVGIDVSKDRLNVHVRPSGQVFAVARDCQDLAQLVADLITLAPALIVLEATGGFEIIVAAALASAGLPLAVVNPRQIRDFARATGRLAKTDALDAQIIALFAERIRPEPRPLADADSQSLAELIARRRQVVEMIGMETNRLHQARNSQVQRMLRVTLKTLKAQLAELDHDIDDTVKRSPVWRIADDLLTSVPGVGDVTAHTLIADLPELGQLDRRRIAALVGVAPVNRDSGQMRGKRTIAGGRADVRNALYMATLAAI

SEQ ID NO: 458740 - protein, 391 aa, unidentified
MGTSPSDLCRLADWLVAEQVEEVVMESTAQYWRPVWATLEQWWRPKLRESAGARSGQLHLAQAQSNRGAAGRKKDFPDAERLVKRLVAQELKLSFVPDVEQRLWRTVMRRKHQLTRNRVQFQNRLECLLEEAHIKLSSLVSDLLGKSARYMLQAVAEGETNPETIAALADHRLRATAPQLRDALGACRDLHPVYRQLLKMALEELKLMEEQIDKLEQEMASLLSAQQDVVQRLAEVPGLGVDSAQQIIAEVGPEATAFPSAKHLASWVGVCPGEEESAGVNYSHRSPKGNRQMKGLLNQASNAAVKTKGSIFEFIYRRLVPRLGHAQAIGAIAHRLCRLIWIILHRAIRYEERGPAVSRSKTERRAAKMIRELRRLGYRVEPMACQTGVSV

SEQ ID NO: 458741 - protein, 454 aa, unidentified
MCLEDRPVLEPNAAGIDVGAREMFVAVPADRDENPVRVFPTFTEDLERLVNWLIECGVTTVAMESTGVYWIPLYDLLEQRGIRPCLANVRHMKNVPGRRTDWHECQWLQFLHSVGLLRAAFRPEEDICAVRTLLRHRGELVQAASQHVQHMHKALTQMNLQLHHVISDITGVTGLAIVDAILDGQRDATELAKLRNSRIKADQETIRKSLVGNWRLEHLFTLRQSRELYRTYQQRIVECDLEIEKLLPGFEPRVDPAEKPLPPDQKQNRAGNKRRKKNGHPNPHFDLRTEAYKLFGVDVTQIPGLEENALPLFSEVGRDMTKWPTAGHFASWLSLCPDNDISGGKTLWRGMRNVKNRAGHLFRFAASSLHHSSTPLGNYLRRMKAKLGPSAAITATAHKIAAIFYTMVRNQVEYDGTIWAARDAEREKRLQTKLKRQAKQFGYELVPIEHQPAA

SEQ ID NO: 458742 - protein, 443 aa, unidentified
MKKNHSLTQSDFQIVHPNAAGIDVASQMHYVAVPASRDPNPVRKFGSFTQDLHDLARWLKKCEISTVAMESTGIYWIQLYLILEEYGFEVFLVNARHIKNVSGRKSDVQDCQWIQQLHSFGLLNASFQPDLNGRELRTYMRHRKNLTESYSMQVQLMQKAMEQMNIKLTNVLSDITGKSGLAIIEAILKGERNASKLALLADSRVKAPQKDIIKSLQGIWREEHLFELRQAYELYLAFKQKIKECDSQIELALQKHYGSSSKDDTESKRKVKSNNKFDFNATAYLKKILGVNITKIFGISELSAMQIIAETGIDMSKWATSKHFVSWLNLAPNNRISGGKMLKSKKEKKKNKAGQAFQIAAFTLIRSNNWLGATYRRIASHHGAPIAVKAVARKIAIIFYQMIKNQVEFTPLSIDRYNHLFKERKLKYIKNQASLLGFQLIPS

SEQ ID NO: 458743 - protein, 360 aa, unidentified
MRKRLSKKESWFKENSFTAEDEIYVGVDVHKVHYHVAIWHNGRIGCVYSMSSDNNKLLRDLKRIRGSLKNVVYEAGPTGYALVRLLRSAKLPAEVVAASKTPRMTDSSAKTDRLDCQQLATYAAKGLLTFVSVPTEQQESDRQVVRLRDQLASKRKRIMQQIKSLLLQHGISWPGGGWNEALLKRLRELDITSELMFTLNQHVDEYEFLCSKIRETKAELRKIFSSERHSAAIEIFKSHPGVGNIVAWAFRAEMFDITRFKEPKHISKYTGLCPRISQSGNTCRQGPITKTGRRQLRALLVQAAWAWYRNDPHARQIYNRLLRNTGNGKKAIIGLAKRIAIHLWRMLCDGCLYDANIVKV

SEQ ID NO: 458744 - protein, 355 aa, unidentified
MTKIKYIGLDVHQASISIAVRDQSGKLVMQSVIATRASAILEFLEGLRGTLYVTFEEGTYSTWLHDLLVRRVSKVVVCNPRKNALLKKGNKSDRIDARKLSELLRGGLLSPVYHGENSTRTLQELTRSYMTLTVDTTRVMSRLKAIYRGQAIPYGGKKLYTRKHRQEWLVQLHQPGLLRRAERLYEELDLLQQLRRQAKQELMMESHKHSVCERLRTIPYLGPIRAAVLAARVQTPHRFRTKRQFWAYCGLGLETRSSADYQQLEGQLQRSRKKVLVRGLNVDHNHDLKNIFKGAALSASIFAGPLQDFYQQRINSGIQPEMARLTLARKIAAVALTIWKKGESFDAAKLKTQAA

SEQ ID NO: 458745 - protein, 374 aa, unidentified
MKKPTRWVGLDVHAETIAVAVVESDGEIRSLGTIPNREQAVARLMRKLGPASTLRVCYEAGPCGYVLYWQMTQLGVNCQVVAPTLVPMKAGDRVKTDRRDAEKLASCLRAGTLTAVWVPDAAHEALRDLVRAREAATTDRLRARHRLGKFLLRQGKRRPEGVAPWSMRHLAWLKTVEFDQPAHDATLVDYLTEVNHATDRIERLDRALDAAIEQAPPQMREVIEALQTLRGVGKVIAITLVAEVGQFSRFARPRELMGYSGAVPSERSSGNKVRRGAITKTGNSHLRRVLVEAAWLYRYRPSLYAALRKRQLGQSEEIKAISWKAQQRLSSRYHRLTARGKPQPQVVTAVARELLGFIWAIGVHVEQQQQAQAA

SEQ ID NO: 458746 - protein, 411 aa, unidentified
MEVKYTHCAGLDVHKKNVVACRITLQDDGWREETRTFGTMTPDLLTLADWLREAGVTQVAMESTGVYWKPIYNLLESEFDIILVNAKHVKYVPGRKTDVKDAQWIAQLLQHGLLKASFVPPTPQRHLRDLVRYRTKLIQDRTQEVNRVQKVLEDANLKLASVVSDVMGLSAREMLSSLIAGQDDLQQLAQLARGRMRSKIEELERALSGHIAEHHRLLLSLHLRHIDTLTELIEQLSHEIDQHIKPFNQDDEIDRLDDIPGVGPQVAQTILAELGNDMSRFPTAAHAVSWAGLAPGRNESAGRNQSAKTVKGNRHLKSMLVQAAHTVARTKDNYLGALFRRLAARRGKKRAAVAVARSMLVIAYHMLRNGTHYIELGADYFDRLNHQQLQRHLVNRLSQLGYQVTLEPVAV

SEQ ID NO: 458747 - protein, 369 aa, unidentified
MPHVTSIGLDVHARSVAAAAFNPFTGEVVHRDFGTDAAEIAEWALGFEEPRACYESGPTGFHMARELRALGLDCAVAAVSKMQRPAADARRKNDRRDAEFIARMLATHNIVEVPLPDAAVEAARDLDRALDDATAEYRRARQRLNMFLIRLGHVWDERNADGTRKGSWTRAHWRWISGIRLEGPQRDVLEYYVTAARCAESDRRQLEKKVLALARTDRWRPAVEALSCIKGIDTLTAFRLAAEAGSFTRFRTAPAFASWCGLVPSERSSGETERRGGITKTGNRLARTALVESAWHYLTCTPRPKPPTPGADVPAAIRARADACTARLCRRREALAAAGKSSCKANAAVARELACWVWEIGRRAEGTLS

SEQ ID NO: 458748 - protein, 311 aa, unidentified
MNDTIGVDISKDALDTYWLSKRKHKQFANNKMGLRALIRWVRQAKVPLVVFEATGVYHRLLETSLAAHDLPFARVNPRQARRFAEGTGTLAKTDRVDAAMLARMGSLLELKADKPKSETLHNLKGMETARQALIKDRTAARARLNTATYPLLRKQATLRLRQIERDITQIDAAIEAIIAADKALSQKADILISIPGIAKITAYAMLTEMPELGTLSGKQAASLAGLAPISRQSGKWQGKERIQGGRACLRRAIYLPAVVATRFNPDMKAKYHELIANGKCKKLAITAVMRKLVVMANALLRDGRKWTETRT

SEQ ID NO: 458749 - protein, 345 aa, unidentified
MQIKSIGIDLGKTTFHLIALGSRSQIVIRKKFSRSQLLVFTANLPSSLIGMEAGVGSHFLGQALREQGHQVRLIPAQFVRPFVKSNKNDYRDAEAIAEAVERENMRFVPIKTEDQLDLQALHRVRDRLVARRTSVINQIRAFLLERGISFRKGPASLRRQMPEILENADEKLSTAMRRLLDFLWQEWKGLQLQIESLNTELEQIASSDAACVRLQQIPGVGPLVSTAVVSAIGNGATFKKGREFAAWLGLVPRQWSTGGKAKLLGISKRGNPYLRRMFIHGARAAVLRVKREGSSLGEWMSGLESRAARNVVIVATANKLARISWAVLASGNDYQPRHKAPIFSN

SEQ ID NO: 458750 - protein, 430 aa, unidentified
MRSEVEALKQEPQFAAFVSIDWADKKHVWCLQAAGSEQRESGELEHTPEAVEAWVGQLCQRFANRPIAVALEQSRGALVFMLSKYEPLHLFPVPSTMSASMRKALYPSGSKDDPRDADLLLDLLLQHRDKLHRLSPDTEATRRVQNLVEERRKLVDEKTAQANRLTSDLKIYFPQVLDWFERLDTELVCDLLQRWPTLAELQKVPPAKLRTFFRKHYCRDEELIERRLLAIRQAIPAIRDRAVIEAKSMVVRVIVQVIVSLLEGIADLDKKIEEAAATHPDFFIFDSLPGAGAVMAPRLLAAFGSQRERYGSAGEVQTYTGIAPVMEKSGKMKWVHFRWACPKFLRQSFHEWAGHSIAQSVWARSYYQQLRSRGKGHHAAVRALAFKWIRILFRCWKDRVAYDEKKYLAALVRRGSPLAAVNVAVAGKGL

SEQ ID NO: 458751 - protein, 356 aa, unidentified
MSTQRTKPDFSGQAISAGIDVSKKSWKVCVLTETIEHRTFTQPPEPEVLASYLRRHFPNASYRCAYEAGYGGFWIHDKLRSLGIDCIVVNPSDVPTMGKERANKTDRIDARTLARELRNGALTPLYVPSRAALEDRSLVRIRHSLVRKQTRCKNQFKGLLSFYGVELLEGPGPTSWSKRFMAWLDELSLQSSSGTQTLKTLVRELEHIRQLIKETTTSIRSLAQEPPYAQYVTPLMTVPGISCLAAMIFLTELVTLSRFRNLDKLSSYVGLVPGEYSSGERETTTGISKRRNPFLRGVIIECAWVAVRKDPALLLAFERLCTRMPKHQAIVRIAHKLLNRIRYVLKHQADYVPAVG

SEQ ID NO: 458752 - protein, 355 aa, unidentified
MTSTKYIGMDVHKESISIAVMNSVGKVVIECVIETKASTILQFIGGLHGDLRVTFEEGTWAAWLHDLLKPHVTEVVVCNPRKMALLKDGSKSDRIDARKLAEQLYMNKIRPVYHGEHGLRTLKELARSYLTISKDLTRVMNRLKALYRSWGIPCAGNEVYAPRHRSEWLSKISEAGVRRRAEHYYQQLDVLRSLRQEVRRDLLLESKKHKAWKLLRQIPGIGPIRAALILAILQTPHRFRTKRQLWTYSGLGLETYDSAQYEVVEGQLQRSKKPVTLRGLNKNHNHDLKDIFKGAAMRASTAAGPLRDFYEALLAKGRRPTMARLTLARKIAAITLIVWKKEVRFDANELKPQAA

SEQ ID NO: 458753 - protein, 456 aa, unidentified
MSFRLVNRAQRWRAGLNPTPMQPLPVLDPKAAGIDVGSEQMYVSIAGGAPKVFGTTTGQLHGLRDWLVGEAVHSVAMEATGIYWLCAYEVLEGAGLEVLVVNGKHVRNLPGRKTDLKDCQWIGTLHAHGLLRSGFVPPEHIRRLQDYLRLRTDHIGMAASHEQHMQKALERMNVKLHDVISDLTGVSGLKLVRAILGGERNSLALLALCDPQIQKRKADRVREALRGTWKAEHLFALRQALELWEFYQQKIAECDQALAEVLREVAGPDDPARPAPPATKRGGHNTPDIQNLHGMLWRLCGGKDPTVLPGMADYTMLQLLAETGRDLQVWKTEKHFTAWLGLAPGSKQSGKRRGNQPRRRNRAGRLFCVVARSVGRSVDKALGGFYRRLKGRRGGLVANLALARKLAVLYWRLMVHGMHYVEEGLKNYQIRVAETEQRVLRRLAQKHGLVLQPKAP

SEQ ID NO: 458754 - protein, 320 aa, unidentified
MLSYCGIDVSKDRLDVAVLPDGECFSVRNDAAGWAELVERLCSFSIAAIGIEASGGYERGVMRHLLAAGMPVRQVNPFRLRQFAKASGVLAKNDPIDARMIASFVAIMPTRPAQRHAPALERLTEILAIRRQLSAEKVAAENASRLLENAMLHRLSRRRIARLTADIDSLDKYLLEIVVSDAALGHRYELLTSMPGVGPLLACTLIALLPELGTMSRKQVAALVGVAPYAFESGTLKGKRCIWGGRAPVRHMLYMAAMSASNWNPALRAFHARLKGAGKLPKVAIVAVMRKMIIALNAMVRDDVAWADRHRGRHPMPTAR

SEQ ID NO: 458755 - protein, 339 aa, unidentified
MSLYCGIDLHSNNNYISIIDSNDKIIFERKLTNNIGAVTDALARMREPITGIAIESTYNWYWLVDGLQELGYKIHLVNTSKVKQYEGLKYTDDKYDAYWLAHLMKLGILPTGYIFPKEMRAVRDLLRRRMQLVQQRTANILSIGNQLTRNTGKQFSSNKIKSLKLVDMKSMIKDPNIQLSIKSNINIMQSLSVQIKLIEKAVLKQVELKEEYIKLTEIDGIGVILALTIMLETGDIARFKAVGNYASYCRCVNSKRTSNDKKKGEGNKKNGNKYLAWAFVEVANHSMRFNEKAKRYYQKKAAKTKRVVALKALAHKYARACYYVIKNKESFDENRLFGC

SEQ ID NO: 458756 - protein, 363 aa, unidentified
MIFVGADVHVRNSYFHATDENGKRLAHGRVANTPLDLQAFCQRVLKQAGGELQPIRFALESTTNSRAVQKLVHNAATQSGFDDVSADVLDARKLRIIAESVTKTDAIDARVLNELVRSNLSLPTCYMPDDEEFALREHLRARRDLVRMRTMLKNRVHALLHRRGILTPAGGLFTKAGRAFLDELELDDAGRAILERFLLAMEAFETLIKQSNNDLKAMMRRERWAKPAALLQTMPGLGLISALTILAELGDLKRFKSRAAVANYAGLVPVIRDSNTKHYSGGITHRGSAHLRHVLSEAAWVAVNRVPAYKDLFDRISARRVKQVAIVAVARRMLEDAARMLWKDEAFRFVPARKADIVASVAG

SEQ ID NO: 458757 - protein, 319 aa, unidentified
MSTADAPAVFVGIDVAKDHLDVHLYPAGTAFRVANADAGLDDLVARLQAASPALIVLEATGGYQNPLVAALGAAGLPVAVVNPRQARRFAEGHGRLAKTDAIDAATLALFAAQVRPEARPQPSAAAQEFAALVGRRRQLLQMRLAEEQRLARASGRIARDLRAHIAYLTRQFDRLEAELDAALRASPLWRERDALLQSVPCVGPQVARVLLAELPELGTLASRPLAALVGLAPFARDSGRVRGRRRIFGGRAAVRSALYMAALVAVRFNAPLRSFYQRLLGHGKAKKVALIAVARRLLGILNALVRHGTPWDEKRLAHP

SEQ ID NO: 458758 - protein, 347 aa, unidentified
MLKISINLVKFCVGIDISKDEMAVCFSQMDGQQRFTIKGSRKFQNNCRGWKSLETWISRFRKDAEVPLVLVVEATGVYYEGFAYHFKAQGYTLHVVLPNKSKHFAKSLNIKTKNDTVDAALLSRMGLERNLPAWKGMDPNMQKIKQLSRQRAALQQMRTRVSNQLHAHTHGHTPHKSIVKGMHQHLKFLENQIKNIEAELVKSAAKDPELKQKLDNICTIKGIAIMTALTVVAETNGFDLIENKGQLVSYAGYDVVENQSGISLKGKTRISKKGNSHIRSALYFPALSAAKYEPKLQNIYQRILEKNPKVKMIGAVAVQRKLLVLIYTLYKKNEPYDPNFEDIQKAA

SEQ ID NO: 458759 - protein, 359 aa, unidentified
MTSMAPDPRRRRVIIGVDTHKYVHVAVALDIIGGVIDSQSFAADSGGYEQLITWALSLGLKLTFAIEGTGSYGAGLTSAVRRRGVGTVEVMRTDRRDRRLRGKSDTLDAENAARAVLSGNATAIPKTNDGTVEMIRQVKIAKDLAVKARSAAIISLKTIIVTAAPELREQLQGLPRVALIERCAGLRPGTLTSVLAATKHTLRATARRWVLLNTEVLAHEKILTELTKQVVPDLVTAHGIGPDTASEMLIVAGDNAARVRSEPAWARLLGVAPVPASSGLTNRHRLNRGGHRQANAALYRAVIVRMQFHEPTKAYVARRTAEGKTKREIIRCLKRLLAREIWTLMKPFREASGTTAMAA

SEQ ID NO: 458760 - protein, 309 aa, unidentified
MEIVVGIDVSKDRLDVHVWPSGEAFAVPRHHAGLLELQARLGGLGPARIGVEATGGYETVVAASLAGQGHPVVVVNPAQVRAFAVALGQRAKTDPIDAAVIARFVAATRPEIRPLPDAATQLLADLVARRSQIVAMIGAEQQRRKRTGERRLLRSLDRLVAALEKELSHVETAIDDAVRGSPAWREKEDLLASVPGVGPQTARRLIADMPELGALDRRQVAALAGLAPFTRQSGRWRGRSVIGGGRASVRSALFVAAMVAARHNPVLKAFADRLKAAGKPRIVALVAVARKLLTILNAVLRDKTPWRTT

SEQ ID NO: 458761 - protein, 408 aa, unidentified
MEVVVVVGAGLDVHKKKIVACCIDGRSSPPTVVTCTFGTFRDEIERMRDWLIQRECTHVAMESTGVYWMSVYEVLEGALEIILGNPRHMANVPGRKTDVSDAHWIAKLLRHGLIQPNFVPPRPIRDLRQATRYRRKLMQTRTACLLRVEKLLQCATIKLSSVASNIFGVSGRLMLAGLAGGVTDPRELSELAKGKLRGKRGALQRAFRGSFREEDASLLQVELKVIADLEAQLEQLEALIEQKVGSFEDVIALLDTIPGVNRVTAIDLIAEVGTDMTAWKTDRQFAAWSGTCPGNRESAGVRKKAKAREGNPYVKTILIQAAVSASQTIGSHLAHRFHRLSARRGPRRAFVAVAREIAVALYHMISQKVPYTPPLNVDPEVTRQQRSRHLMRELTKLGYEVNCKLLKT

SEQ ID NO: 458762 - protein, 346 aa, unidentified
MEAGYAVSGQIVGVDLHRRRSVIVRMDAITGEQLGCVRIDNSRARLVAEVVKAGPAPKVAIEATFGWYWAVDALHAAGAEVHLAHPRGMVGMNDRRVKNDERDARELADLLRVNRFAEAYIAPPALRELRELVRWRQKLVDHRRSVKASLHAVRGKCGIVPELGDMFGPGGQKILDSLALPEPYASRVHCQRRQLAQLDHEIGGVEIATVARLKDDPDFQALLKLRGIGPVFASIFLAEIGDISRFATPQALACWAGLTPIHRESDLKAHRGSISKQGSRLLRWALIEACQRSCEPYVAQAKTNIVARRGRKAVNIAKVAAARRLATIVFYVLRDGEARCLQQQAA

SEQ ID NO: 458763 - protein, 344 aa, unidentified
MTYYAGLDVSLRSTHICVIDDDGELLAEGKTDSEVADIVAFLDELDVEITEVGLEAGTLTQYLTYGLQFAGYEVVCMEARQVKAALSAMRNKTDKNDARGIAQLLRSGWYSRVHVKSIESHQVRALLSCRKAILTKCIDLEQEIRGLFKVFGIKLPPKLGHGSFDPKVRPLIEADEALSQSLLPVLDARLVLYRTFLTLENRVRNLAKQDPICQRLMTAPGVGPITALTYKAGVDDPTRFKRSRTVAAHFGLTPRRFQSGEIDYEGHISRAGDANVRSTLYVAANSMMTRSSQWSPLKAWGMKLAKSRGHKRAVIAVARKLAVILHRMWIDDTQFRRSAEAARS

SEQ ID NO: 458764 - protein, 400 aa, unidentified
MRAVFGIDVSKVSSEVAILVNGEKVHGYTMSNDAIGFARLLGDLRTVHKPEIIFEATGVYSRRLQAFLDEHGYAYTRLNPLEAKKQLDSLRVRKTDQIDAEKLAQSQFVLNRKSTYVQEEVYQNLRDLSRFYQNLTEDIVRAKNRLHKVLQVTFPELENILSTPTGEQYWNLVIAFPCKDFVLELSKDKLLESIRQSTSKRISDKRVAYLAEKLIALANQSYCAVKKNSPMLEEVRYYTKELLRLSEQRQAVLDEMVELAQPLPEYDILRSIPGIAETTATSIIGELGDIRRFQSANQINAFIGIDLRHYESGNFLAKEHITKRGNPYARKILFKCIHNVASASHTNPCHIADFYEKRKRQSQTTSTKPHTIASIHRLIRTMYYLIMHNKLYDYASTQNR

SEQ ID NO: 458765 - protein, 398 aa, unidentified
MELVDEDGKKLAAKRLPEGLAGVSELHALIAQHLPPEWADLPDGEAASRVKIGIESDHGVWVQALVAAGYEVFAINAFSVKQYRARHSTSGAKSDAADAHLLAEIVRLDRASHRPVAADSAQVEAIKLAARTHQTMIWERSRHVLRLRSALVEFFPAALEAFPDLDAPDALELLAAAPEPDTAARLSLSRIAAALTRARRRNVQERARNIQQVLRASELRQSPPVQQTYAAIVTVQVRLIVALNEQVDALAAVVDHHFGLHPDADIYASLPGLGVILGARVLGEFGDAPDQYADARARKNYAGTSPITVASGKKRLVQARYARNKRMADALRQWAFCSMRGSPGARAYYNELKARKIGHHAALKQLANRWVGILHGCLKTHTLYDEHTAWSHHNTATA

SEQ ID NO: 458766 - protein, 348 aa, unidentified
MVIVGIDAHKQTHTAVAVDEAGRELATKTVQATPDGNLALMTWVSQLDPERRWAVEDCRHLSRGLERALLGAGEAIVRVPPKLMAHARDSARTYGKSDPIDALAVARAALRYPDLPAACLDGPAREVRLLVDHREDLVAERTRIINRLRWHLHELDPTFPVASRALDRYVTLDKVDAFLEGRPEMVAAIARELAERCRELTGRERALQGEIARRVMNIAPALLALPGCGVLSAAKIVGETADVTRFSSRDAFAAHNGTAPLPVWSSNHPRHRLSRSGNRQLNAAIHRIAITQLRIHPEAQTFLERRRLQGDTKAESLRALKRKLSNVVYRALLVDAQSAAAICLPAAA

SEQ ID NO: 458767 - protein, 338 aa, unidentified
MLHSGIDLHKRTIALSTVTADGQPVRDAQLPTTRAAVRAYFDALPGPHRAVVESTSNWYWLRDLLVGAGVDVRLGHSKYIKAISYAKVKTDAVDAATLAQLLRSDLIPEAHMVSAEWREARDLLRARLQLVAQQVRCKNTVAGLLAQYNVTAPAALPPLVQLRARLLEEQRALLGDQATRLAAELNPLLIPTPDVQRLLWIPGIGRVVAFTIWLEVDGIARFPSARDFVSYCRLVPGAGNSGGKTRHTRTKDGNRYLKIAFSHAAVRAIQYYPEIHRFYRALARRKPPVVARAVVAKELARIVYFVLTKQEAFNGTFKGKTLSRTKQPKWPRLASPPV

SEQ ID NO: 458768 - protein, 370 aa, unidentified
MARKITRKKKSSKFALREDETAFVGLDVHKKSFTVSVWTPQRGTIANWTHPADALSLCRKLGPYRHQIQRVVYEAGPTGYWLCHTLKDAEFSVDVVAPSKTPHAPGRNGKSDRRDAQELARLAGKGMLTPIVVPTRQQEADRQLIRRRDKIIRQSRQAKQRIKSFLLQYHLPEPKGLVHWSRAGVDAVREIEMIDELRFTLDSLLVDLDHANAQTKAINRRLAALSRTDRHAAAATLLRRVPGVGLVTAMTYVLEFPSPESFATPAQVGSYMGLAPWSSRTGEHVRTGPIVKSGKKQLRSVLIEAAWQWRKHDPDARARFDHLARQTASANKAIVAMARHVAILLWRILTTGLAYEPGAPLDIDDDLSAA

SEQ ID NO: 458769 - protein, 339 aa, unidentified
MELYAGLDLHSRNTYIGIMDKEFKRVFAKRVSNNLPLIINTLEPFQDQLKGIVVESTFNWYWLIDGLMDAGYDCLHLANPSAIKQYEGIKHTDDQFDSFFLAQMLILGILPQGYIYPKEERPVRDLARKRLFLVRHKTSHILSLQSLISRCCGQRVSANEIRTFTVEDLQQLLKEEYVVLSAQANLDTIVFLKQQIVQLEKAIKNKVKLNKAFQQLLTVPGIGLILAMTIMLEVGDIGRFPQVGNFASYSRCVSSQRLSDGKSKGHGNRKNGNRYLSWAFTEAAHLSRRYNEHFRSYYNRKVAQANTSLATKALSNKLARICYYIIRDQVPFRNNLLSQ

SEQ ID NO: 458770 - protein, 346 aa, unidentified
MTIVEAARGITGGIDTHGEVHVAAALDDVGGLLGTESFDATPEGYAALLSWLAGFGRVGTVGVEGTGSYGAGLARFLARSGVEVIEVDRHNRQARRRQGKSDPIDAVEAARAALSGRAHGKAKSRDGSVEAIRVLVVAKRSARQARVKALTQMRQLTFTAPDQLQCKIKGLPTPQFIAAAKGLRPTRSSDPVTAATKAALSSLAHRIGELDEEVDQLDAQITPLLQAHAPALLAVYGVGIDTAATLLMTAGDNPERLQSEAAWAHLCGVSPLQASSGKVTRHRLNRGGDRQANRALWIIVISRLASDPETQAYMERRVKEGRTKREVIRMLKRYVAREVYRQLPRG

SEQ ID NO: 458771 - protein, 328 aa, unidentified
MNAVIGIDVSKDKFDTCWLRDASTGKKKSKSLRNNSKGYQEIHQWLLKNVGCEAPDILIVVEPTNVYHESLIHFLYEKGFKIFLANSGKAKKFAESLCMTHKTDKSDAAMLAYYGHAQAAQAALWEPEPKEIRQLKAMMRRLDALEKDLQREKNRRETSEISDVSGPVLQSLDNMIKALEDEIEQLENDIDNHIDHDSHLKKNRELLKSINGIGPVLSRELTYLFAAKRFKNAKQVAAYLGLIPKQHESGKLKGRTTISKVGPSRLRAKLYMAAVVASMCNPDIKAQKDRLMNAGKCKMEALGAAMRKLIQICFGVVKHQTKYQPQIA

SEQ ID NO: 458772 - protein, 351 aa, unidentified
MREYIAFDSHKHYTWVEHEGEKSRKGRGYRLEHGPGAIRRALAGCAAGTVVALEATANWYWIVEEIEQAGLVPQLVHPRKAKLMMGLINKTDRLDARGLNRLQRNGTLPTVWIPPGPLRSLRELTRTRVVLVAQRTRWKNRITASLAKYGAPGSEYSDAYGAGARTELQQRLEWLPEQARWASQQMLTQLDGLSVQIAQFEARLQGLVQITPEMQRLETLPGVGVILAATIALEVGAVERFPDAEHLAAYAGTTPRVHSSGDHTRYGRTRPDVNRYLKWAFAEAANSVAVNHLRLPERHVSQLYERLRRRKGHSQAVGAVARHLAEATYHVLHRQEDYRDPTARLGRSTEV

SEQ ID NO: 458773 - protein, 317 aa, unidentified
MEAPSSGIDVSKDKLIVYFQGKLYEFTNDRQGFEEIRKILPKGCKVGIESTGVYHVNLAKYLSNEYDVRIINPFILKKFKGFRGKKSDKNDAKKLAEIVVSMGSEFVTSEARELTSQWDFITRSIARVKNRLRRDLVLLGYSDSLSKRNLEEVLRGGGDGIVLAEVRFLLEELERLESRKREIEDRLRELVPKDSLIFTIPGIGKTLGCIILARVGDVKRFSDRKRFVAYCGLDPVVESSGKSVITRGISKRGDAVLRRAFYLAALTAIKVNPVIKRFYEEHKGRLRGRKLIIACARKLAVITWAVLYYNKPFDASE

SEQ ID NO: 458774 - protein, 341 aa, unidentified
MKIHSIGIDLGKTTFHLVALGEHGKILLKKKLSRKQLLALTANLPASRVGLEACSGSHFLARALREQGHDARLIPAQFVKPFLKSNKNDFLDAEAIAEAVERENMRFVPIKTDDQLDLQALHRVRERMVSRRTAVINQIRAFLLERGITFRKGASSLRGQMPEILENGDAPLSPRIRSLLAMMWGEWKQLDEQVESFNTQIEAIGSGDAACQRLREIPGVGPLIASAVVASIGNGAAFRKGREFAAWLGLIPKQYSTGGKVKLLGISKRGNRYLRTMFIHGARSLVLRVNRERSPLGGWISSLEARAHRNVVIVAMAHKLARITWAVLSSGERYCPTLMAA

SEQ ID NO: 458775 - protein, 376 aa, unidentified
MNEKLRFLGLDVHAETIAVAVAEANGEVRSLGMIANREDSIHKFIRKLGSPEHLRACYEAGPTGFVLYWQLTQLGVKCDVVAPSLVPKKPGDRVKTDRRDALKLARSHRSDDLTAVWVPDEGSEALRDLVRAREAAKQDQLRAKHRLTKFLLRTGQRPPLGVKAWTEKYVEWVQQVRYTHPAQEATLLDCLNEVQHMEERVKRLEQSIVEVIQLAPAPMQEVVRGLQALRGIAHISAVTIVVELGNITSRFESARDLMGYSGAFPSEDSTGKRIRRGGITKSGNAHLRRIVVESAWSYRHRPAIGARLRRRQEGLPAEITEIAWKAQNRLHKRYMTLMARGKEQRKTMTAIARELLGFIWAIGIKAEAACKQQMTA

SEQ ID NO: 458776 - protein, 348 aa, unidentified
MTMLADTADAVIGVDTHTDTHTACMLDRLGRRVAAITVPADPRGCAMLLAWAGKQAPGSRLVWAVEGTRSHGLGLTRALRGDGQAVVEAGRPARASKRPGGKSDPADALRAARDALSADKLAQPRSDGAREGLRILLTARAQTSTARTAAVNTLKALLLGAPDNLRQALRGLSTPRQASKCRRLRVHASQPVAEQILRTELRRLATHIGAWDRELRASKAQLRQLVAQVMPALLGQPGVGPMSAAQLLVSWSHPGRFRSEAAFAALAGVSPLEASSGKVTRHRLNPFGDRQLNRALHVIINWRMLRHLRTQAYLARRAGHKTEREIRRCLKRYAARSLYRLMERAART

SEQ ID NO: 458777 - protein, 310 aa, unidentified
MQKFIRIGVDLAKNYFQVHALVSEGGSAVTRKLTRSKMREFFAQIEPCRIGLEACGSAHYWARELQAMGHEAFLMPPAYTKPYVKRGKNDAVDAEAICEAVSRPGMRFVPIKSAEQQATLTLHKTRDLLVKQRTMTVNALRSHLSEFGIIVAKGIGHVSDLLQLAETDARLPSVANASVKALAQQIDAIDQSLDDLEKEIANAHSRSEMSQLLVEIPGVGKITATVISASMPDPNVFRSGRDFAAWLGLTPRQNSSGGKPSLGAITKQGNKYIRKLLVLAGTSLLNVVGKRKGVLRDWIVGLLQKSPRAS

SEQ ID NO: 458778 - protein, 362 aa, unidentified
MFRPHTLYIRIRIVRKVHEPVFAMRDQDVSDVIKTKNRTAMQYIGIDVSKATFVVAYSSDKGGEIRTFNNTTAGIKQFIGTLPKDGSIHCVMEATGNYSALLLYMLNVAGITVSMENPLKIKNFARAMLSTVKTDKIDARLIALYGEKMNPQPFKVQGEAILRLRQKRTVIRQLTKQITAMSNLRGSLACLPVPDKGATHTVDETIKFLEKRRDRLQSELTDLVEVEFSRQLALLTTIKGIGITLATALIITTGGFTYFQNAKLVSRYLGICPTYEQSGTSVNIRGHINRNGDAYTRGLLYVAAWTASRFNTKCGETYTRLRQNGKPGKLAMIAVANKLVRQAFVVVTHDKEYVDGFVSNRP

SEQ ID NO: 458779 - protein, 347 aa, unidentified
MTIVGNPDAVVGGVDTHVDVHVAAAVDHVGGVLGIESFRTTRSGYRQLLSWLGSFGELTLVGVEGTGSYGVGLSRYLGNAGIDVVEVDRPNRQTRHRKGKSDPVDAVGAARAALSGQATGLPKTRDGNVEAIRVLMIARRSAVDTRIETLNQLRHVVFCATPEIRAKFTGLTAIALANKASSLRPRHGDDPVRYTTLITIRALGQRVQYLREETKRLNRLLRPLIRDTAPGLLDVFGVGFDTAAKLLVAAGDNPERIRNEAAFAHLCGVAPIPASSGKTIRHRLNRGGNRQANSALYHIVITRMRHDPATRAYVARRLGEGKTMGEIARILKRYAARQVFKHLPRPA

SEQ ID NO: 458780 - protein, 354 aa, unidentified
MPRSAETAVARTIGIDTGKNTLHMIGLDEKGAIVLREKVSRTRIAARFVNLPPCLVGIEAGMASHYVARELAGLGHEVKQVPPAYCKPFRQSHKNDFRDAHAVAEAVERPSTRCVPIKTDGQLDLQALHRLRSRLIGNRTAVINQTRGFLLEHGIPVRQGHHFLRQQLPQILATRTDVLSPRMVRIIGDLMTDWKYLDERIEGVTDEIEALAHADEGCQQLITVPGIGPIISSAMVAAIGNGAAFCKGRDFAAWLGLVPKQRSTGDRTILGRITKRGNRYLRMLFIQGARAVLLRPASWAKHGFGSWLTAATRRLHRNVLAVALANKLARIAWTVLAQGRRYEARVEPRVEAAA

SEQ ID NO: 458781 - protein, 400 aa, unidentified
MISVGIDVSKGKSTVCLLKPYGEIVCKPFEVQHTEKDLEELANLLQKLDGEIKIVMEATGIYHLPILTFLLEKGFFVSVINPLMMKRFSKDNSLRGAKNDRLDSVMIASYGIEKWYKLKKYEVNDRIYTELRLLGRQYYRFMQTHVKHVQELTHLLDYTAPGLKAMFNSWNEHSNRDKLSDFVERFWHFDLITSLSREEFVEQYLLWAKEKKYHQSRSKAEKGYDLASNGIPTLSSHTPSTQLMIQGAINVLRIVNNSLYYILSRMKELAKSLPEYATVHSMGGVGDSLAPRLIAEIGNVKRLRNGHALVALAGIDPPPYESGQFVGTHRRISKRGSPILRKIGFEVMRVLKSHKEPEDNAVYNYILKKEAEGKNKKLSKIAGLNKFLRIYYVRVMEVYQ

SEQ ID NO: 458782 - protein, 324 aa, unidentified
MIDAILGIDVSKNTLDVSISSCTKVRTKSFANSSDGWHHLLDWLVAQKIQRVHACLESTGRYSLGIACSLYEAGHLVRIINPAQIRDFVRTKLGRNKTDGIDASRIREYCELFKPSPWAPPSEAHRRLGELQTIRAGIIAGLTEWKNRKNSGIVDTEAQALADATILHFTSQLGAVDKAIALTIDNDSDLRSKRDLLLSINGVGDTLAGVVLAELPGPDVLRSSGEVVAYAGLNPRQHQSGTSVDRATRISKIGNAVLRAALYMPALSAMRYNPAIVALVTRLKSRGRLKPKQIVVAAMRKLLVLCFGVLKTGKPFDPAIAMGC

SEQ ID NO: 458783 - protein, 420 aa, unidentified
MPDDRCRLGSDDVVIGLDLASAEHQAVVVTAAGKRLTRFRIPHSRAGLAELLRRTTPAALGRAGGARLFAFEATGHLWEAVAYVLQGRDERYVVVNPLATFRVREARQLSREKTDLTDAEQIAELCRTGLVTRTQLEARPYLALRRAWGEYARLREERARLKVLVAHQLYGLFPEFLHVWADLLQPGALAVLRTGLTPAAIAALSLTEFVAQARAHGAGHRIWRDKLAQIHRAAAQTIACPDGLDVLAREVQRAVARMDMLTAHMTAVAAEIDSVLAELEEVPYLRTIPGLGWASVAGLLAHIGAITKYHHGRQLIKLAGTNPSRRDSGQTVGRGQRMSHRGRAGLREVLYLATISCLQHNPRIRAHYDRLIQRADRPLPKMQALGACMNKLLLYAFAVMHRREAFQLDHDWQRTMSRVA

SEQ ID NO: 458784 - protein, 320 aa, unidentified
MNASGAQFAGIDVSKASVDVCVVPGEQASSFTNDATGHEALYRWLQERAVRLVVLEATGGYERECAAALCVRGCAVMVINPRQARDFARSQGQLAKTDRLDARLLAQLARVLDQSPKRAQLLQPPRDAQRDELEAQVMRRRQLIDMRVAETHRLAQAQGAIRKSIQQIIKVLDRQIGQIDHDIDTHLRTYHAPTRALLDSVTGVGTGTIATLIAMLPELGQMPGGQISALVGLAPFNCDSGKHRGQRRIWGGRAQVRRALYMACMSAIRFNPVIAPFYQRLLTQGKPKKVAIVACMHKLLLILNAMMRDHTPWNPALHSA

SEQ ID NO: 458785 - protein, 393 aa, unidentified
MVCVGIDVAKDKHDCFILSSEGEVLADVFTIQNNAEGFNTLLQTISCCTNPKDKIKVGLEATGHYSYNILGFLLDKGLPTYVINPLHTNLYRKSLSLRKTKTDRVDARTIAAMLMSDVDLKSYTDTAYHNEELKSLTRYRFDKVRERAKLKQSVSRLVTILFPELEKLVPTLHMASVYALLSEFPGAKQVAEAHLTHLKAVLHDASKGRYGRDMAVTLRDAARCSVGSVMPAKSLELRHTIRLIRELDSEIQDIEAAIQTMIEEIASPITTIPGIGVRMGAMILAEIGDFSRFDSPDKILAYAGMSPSTYQSGQMSLTGAYSHMEKRGSRYLRYALYNATKYVCHWDPIFSAYLAKKRAEGKHYNVALSHAAKKLVRLIYALEKSRLPYSSAA

SEQ ID NO: 458786 - protein, 399 aa, unidentified
MLAVGIDISKSKSVAAILNQDGSMHTSPFEFHHTQPELDAFIKYILNSNQSATILMENTGHYHYPVLKAFQEAGLPVCMVNAYQIKKFGDMDLRKAKTDKKDAVRIARYALEKSYSLVPYTSMEQKYEDLRFLARQYNQRMLTLKTNKVFLLNLLDETMPGITNILPLTTRTPETSLSVLFINRFKSYDRIKKMGKSRFLDAFEKIARKSRNRQTKTYGLAIYEAALRNITTRGENEYTLAAQDQCLELVCESQKAADSIILKMKTLAETLPEYAVLRSMAGVGNRLGPLILAEIGDIRRFHSGKALNAYAGNDAPPYQSGIFESHNRHISKRGNAALRKYCFEVMQALKLTRPQDDPVYLFLLKKEQEGKPYNVAKMAGVNKFLRIYYARAMETLKQQ

SEQ ID NO: 458787 - protein, 316 aa, unidentified
MSKHSIVCAGIDTGKSKLDVAITGSLKRWCFDNAAQGHAMLSARLRQHQVERVGIEASGGYERAVVAELRREGFVVIVFQPIQVRAYARFHLQRAKNDKIDAGLIAACTAATQKIHAPPDPRLAVLADQQTLIDQIIDDIATLKNRRESAREAYFRQFWTVQIADLKKKQKNEFNKLVAAIRRYDDLSRRLDLIASVDGVGLPTAAAILVRMPEIGRVSREQAAALVGLAPYDDDSGERSGAKHIAGGRERLRKTLYNASLAAAYHWNAQLIAFKDRLLAAGKLHKVMRVACARKLLIYVNTVVARGTPWVSSPVP

SEQ ID NO: 458788 - protein, 381 aa, unidentified
MQASTEITPTAGHIDTVFVAIELSQKTWLVTLHSPDRDRISRHKIEGGDHAELLAQIEKVRARATAKLGSAPRVVSCYEAGYDGFWLHRLLQAAGIANFVFDAASIAVEQRSRRVKTDRIDGELMLRTLMAYLRGEPRVVRIVRVPSVAEEDARRASRERDRLVEEQTGHTNRIKALLRLVGMAVGNPRRGDWLAWLERQRDWQGQPVPPHLLAEVKREHARLMLLRDQLAALEQAQAADATVPAAMVDRRNRLQRLKALGPAFTTTLVDEVFYKDFRNRREVASYNGLAPSPWKSGGIDREQGISKAGNRRARHKAIELAWLWLRHQPDSALSRWFRTRTANAGKRAKRIAIVALARKLIVALWRYLTTGLIPEQATMKA

SEQ ID NO: 458789 - protein, 463 aa, unidentified
MQKNCDKNSKPDKEVGIEGLPVIRPNVAGIDLGSETHWVCAPNVERTGLEVETFGATTPELERMAEWLKARKIESVAMESTGVYWIAPHEGLERHGLEIVLVNTRELARVPGRKKTDRVDCRWTQRLHSCGLLKGSFRPNEPVCMLRTLVRDKGNLVAEAGDWLRRMQKSLDQMNVRVHRAVSDIDGVTGMRIVRAIVAGERDAHELAKLRDRRCGKSEEEIVEQLSGHWREDHLFSLRQALKMYDAIQERIADYEREILRKLAEMERAECHGQEPPKLKNPQKAKAIQKRGEEPLRQALYRLSGVDLTGIDAIGVETVQVVLSEYGPDLSRFPSEKQFVSHVTLAPRQALSGGKPVKKKKRGSASTRVAAALRMAALSLRHSQTALGAYYRQISRRIGGDVAVFATARKLATLIYRLLRWGQPYVDVGAAAWENRYRQARIQRLAATAKDLGYQLTPNPTKA

SEQ ID NO: 458790 - protein, 481 aa, unidentified
MIENHRRCCGIDVHKNSVTVCVLAPRGGRHSEIKKRKFRTFTRDLRQMRAWLKNCRVTEIAMESTGQYWRPLWNLLEGEFSRLVLVNPQHIKGLNGYKTDPKDAQWIADLLEGGKLKGSWVPQRPIRELRDLTRQRVNLLEDLNRAKNRIEQLCQAGNIKVSSVATDLFGVSGRQMLQALVEGKRDAGWMADYAHGALRNKRRELTLALEGTLTDEQRWLLAKELRQIEFLESQVEILEQEIERRVAPLEDSIRRLVTIPGVERKTAWTIIAEIGVDLSTFADAKHLASWAGLCPGNRESAGKRMSGRTRKANRYVKRAMCQAAWAASHTKNTYLTAFYRRMAIRKGAPKAVMALAHHMLVVVHQILSRGEEYVEFGGDYYDRRNKPKVVARMVARLTRLGYQVDLKPMAQTATAPPEALAGSLPEAASGTTVQPDPPTAGTKRKRGRPCKCIERGIICKHHTSVPANSLVQQPSSQGRFS

SEQ ID NO: 458791 - protein, 409 aa, unidentified
METIRQRGCGLDVHQASVVACLLIHQVGRKVKKLIRTFGTTTRDLLALRDWLQSEGCTHLAMESTGVYWKPVYALLEGAFEIVVANARHIKNVPGRKTDVKDAEWIADLLCHGLLRSSFVPPKPIRELRDLLRYRRKLVESRGAERNRLLKLLETANIKLSSVATDVFGASGQLMLDALLEGVQTPQQMAELAKGRLREKIPQLQLALEGRLEEHHRFLLRLQRRRLQQVEADLAELEKHLTDKLQPYASQHTLLMEIPGVDRIVAATLIAELGIDMSVFGSAPRAACWTGICPGNDQSAGKRRSGRISQGNVHLKTALVEAASAAARAKGTYLREKFFRLKARRGYKRAAVGVAHKILIAAYHMLDKQVSYNDLGDAYLDKLSTKNLSRSLVQRLERLGFHVTLTAAA

SEQ ID NO: 458792 - protein, 327 aa, unidentified
MIHYIGIDISKAKFDVAFINPSTNKVKTKVFNNNKAGFDLLLAWLKTNVSNHLDELHIILEATGVYHEHLSEFLDDNNIKQSIVNPNYVRKFADSLGVIHKTDKKDSIILSRYGYSHKPEVWVAPSIEAKQLKALLARLEALKEDLQREQNRQELLLSPNLPDLVKASMQTVISVLQEEIAKLTKDIDDFVDKQPSLKQDKTLLETIDGIGSVIAKEVVCLIHTKQFKKASQMASFLGLIPKQRQSGVFKGATKLSKQGQVSLRAKLYMSAMSAIRYNSTIKAFYERLQQNGKTKMQALCACMRKLVHICFGVIKTQTSFEQQVSLS

SEQ ID NO: 458793 - protein, 369 aa, unidentified
MEHTRFIGLDIHKERISVAVAQSGRSGAVEYLGEIINEPGAISKLCDRLRRPGKPLAFCYEAGPCGYGVHRQLTSLGHRCNVVAPSLIPTKAGDRVKTNRRDATMLARLHRAGELTSVWVPDAEHEAMRDLIRLRSVVRQIVTRARQHLQGFLLRHGKKHGPGWGMAYRRWLSTLAFEHPAQQIAFQDYVDAVTDGERRLQRVEEQISSLLPAWNLRPVVDGLQAMRGISLINAVVLVAEVGDFTRFSNPRQLMAYFGLVPGEQSSGETARRGGITKTGNTRVRRALVEGAWAYRMRARIGRHKVDRIEALPKAVRDIGWKAQVRLCARYRRLTARGKTANVVNVAIAREMVGFIWSIACTIQSAPKAA

SEQ ID NO: 458794 - protein, 431 aa, unidentified
MSQQQDFETQAGGGQEPQFAAFVAIDWAGRKHVWAMQKAGSDKRETGEVDSSPEAVDEWVQNLLARVDGRPVAVCLEQSRGALVCLLMKYPNLVLYPIHPAAVKRFRAALYPSGTKDDPLDAGLQLELLLHHRGRLRAWKPDTVETRELQILVEQRRGLVDQRTAESNRLKQALKLYYPQALRWFDDVTSPLLGAFLKRWPTLESAQSARPETLRKFFHQHNCRSAELIQQRIDEIGRAMPATGDPAIVRTSVMLVHHLTDMIAVLRSSIGKLEEAIRSVSRSHPDFAVFDSFPGAGDALAPRLIAAFGTQRERFPCAGDVQCFSGIAPVTVRSGKTVAVHFRFACSKFVRQTFHEWASHSIGFCDWARAYYQQQLGRGSGHHAAVRSLAAKWIRIAWRCWKDGTPYNEQTYLDALRRRGSPLADKLAAAQ

SEQ ID NO: 458795 - protein, 342 aa, unidentified
MDVEYAGQRYVGIDLHRRRSVIVQMSSEGERLGVARIDNDPFELARQVASWGESPEVVLEATYGWYWAVDVLAEAGAVVHLAHPLGVKGFAYRRVKNDVRDASDLADLLRMGRLPEAWIAPPEVRGLREAVRHRAKLVAVRSGLKAQVHAVLAKQGVRVAVSDLFGVGGQRLLDRLALDAPFAARVTSLRRLIEAFTFEIDVLAQRITADLRGHRGYQAIQAIDGVGPLLAAVFVAEIGDVTRFARPQQLCSWAGMTPRHRESDTKVHRGRITKQGNHLVRWAAVEAVQRLHSGPLGSTRTRLAERRGANIAKVAAARKLLTLVYWGLRDGHIRCLARPACL

SEQ ID NO: 458796 - protein, 466 aa, unidentified
MTPPKDYCLEAPCPPTPLLPPLPVLSDALHVCNPHAAGIDIGEAEHWVAVPPGRDPQPGRRFGTFTVDLDALADWLIDCGVITVAMASTGVYWMPLFELLEARGVQVLLIDPRQAKRAPGRPKTDRLDCQWLQRLHAYGLRAGAFRPDDQVCVLRAYLRHRQRLLTYAAHHIQHMHKALQQMNLKLTQVVSDLTGVTGMAIIKAILAGERNPQHLAKLRNPHCHHDADDIAKALQGTWRAEHLFALRQAVELYEVSHQQMAQCDQQITRHLETFADKSDGQPLPPKARRHKKTNEPRFDARTPLSRLAGVDLTTIEGIEENTALILLSEIGTDMHRWPSVKHFCRWLGLCPQHKISGGKVLSRRVRPGAHRVTVALRLAARRLHHSQSALGAFFRRMKVRLGTPKAITATAHKLARLVYSLWQHGSAYVQQGLDAYEAQYRERKVTTMAKQAKALGYTLVLLAAQG

SEQ ID NO: 458797 - protein, 335 aa, unidentified
MKTKFIHFAGIDVSKAKIDVCVIINTARSDLLHGIFEQSKKGFNELRKWLQKVLSKHQDNMLICVENTGLYDDALLYFLRDQGYSVCLENAALIKKSIRDTRSKNDRLDSRHIAMYALRHHDELELWEKPRQVIDTIKQLLAYRSNLVESLKRVKQAQKEPEYFKWARVKKTKSYDSGMKGLEKDIRQIEEDIWELIKKDKALLTMFTLLISIPAIGKITACHFICYTNEFKRVKSGKHLASYCGVVPFEQESGTIKKPARLSKQANKALKRLLHLCAVTAIRMKGEFTQYYQKKIAEGKHVLQALNGIRNKLALRIAAVIKNQRPYDENYIYQP

SEQ ID NO: 458798 - protein, 358 aa, unidentified
MQSVTRVGIDLAKMFIQVHAVDAVGKLVCNKQLSRDKFIAWCNQLPAGCLVAMEACSGSHAWARKLIALGLDAKIIAANHVTPYRLEGKGGKNDANDAAAICEAASRPSMRFVPVKTLSQQGMLCVHRYREGVKEERTANINRIRGLLAEFGIIAPQSPNKLRERLAEIIEDADNDLCGIARMVIQEAFSHWDEIDKQLEWCAQRISAHVKENQQAQTAVQLMGVGPVTASAAVVTVGDFKQFKNGAQFGAWLGLTPRQNSSGGKTKLGRITKRGDVYLRMLLIQAAKAAVMTAHKRDDPISRWLLQLREKSGWQKAAVAMANKNARILWAVMTKGCDFDPRYVSVKPSGGGSIAAAI

SEQ ID NO: 458799 - protein, 341 aa, unidentified
MRYIGLDVHKDNITACVLTSTGKPKFEKNFIKDSESWNLSELMEYGDKDGFCVMMESGTYAYQPFRFFSDKGVETHVVHAQALKLITQSDKKTDKKDAYTIARMLRLWKKGDIDLQMAFMPTREQCELKDICRYREEISRKIGDETRRIKSHMSRNCEYLPESFNDFQSQRARNYVKFNFSSDITLMSRMTELERLFNERDSVKTEVESRLPDSKEVDLLMTVPGVARQTAVQIMSMIVDIDRFDDAEKLCAYFGMVPRVRDSGGKEHHGRMTKNGDRMMRAIMERVTESHVRNCDSSVTQYYKRKCSEMGTKKALITASRKMLSVIFAMLKSGSDFRLAA

SEQ ID NO: 458800 - protein, 322 aa, unidentified
MYKYTGIDISKESFDASITTDKGLITKKFSNNEGGFNKLLKLLPQQAQVVMEASGPYYYRLAFFLYEHQVRLSVVNPLVIRRFCQMRLVRTKTDKKDAAMIREYGFNQQPDLWQPDAPMITKLKQLNAALDLLEKQITASINQLEAFKQMPDADAFTLQQLQQAMEQNQQVRGKLEAQMQTLVQEHYQQSYQALKSIPGIGPKSAAMLIAITGNFTKFSDYRQLVAYVGLNPSIFESGTSVKGKGHISKMGTGRLRKLLYLCAWSAKRYNEQCKQMYERLKAKAKPQKVINVAIANKLLRQAFAIGKNLRKYQTNYAPNLAF

SEQ ID NO: 458801 - protein, 361 aa, unidentified
MKRVQSNKLDFSGQNIYVGIDVHLKSWSVAILSEYSALKRFSQSPEPEALHKYLVSNYPGANYFSVYEAGFCGFWIHEKLTGLGITNIVVHPADVPTMSKEKLRKTDAVDCNKLARELRSGSLEGIYVPKADVLEIRSLIRTRNMIVKDSTRTKNRIKSLLRFHGVDIPEEFTRSSIGRWSKRFLAWLHSIELSTEYGKKTLELHLEQFVRLRNMLLQETRAIREISRKAPFEKPMRLLTSVPGIGVTTAATLMVELDDIVRFKNADRLASFIGLVPMCHSSGESNGTGDITVRRHFMLRCLLVEAAWIAIRKDPAMTVAYTEYRRRMNPQKSIIKIARRLVNRIYYVLKHEKEYIPCVVE

SEQ ID NO: 458802 - protein, 377 aa, unidentified
MAGKVTETAVVGGVDTHKDLHVAAVVDQNNKVLGTQFFSTTRQGYRQMLAWMTSFGALKRIGVECTGTYGSGLLRYLQNAGLEVLEVTAPDRMERRKRGKSDTIDAECAAHAAFSGIRTVTPKTRNGMIESLRVLKTCRKTAILARRIALQIIHSNIISAPDELREQLRNMTRMQLIRTLGAWRPDASEYRNVTNVYRISLKSLARRYLELHDEIADLDVMIAAIVDELAPELIKRNAVGYESASQLLITAGDNPQRLRSESGFAALCGVSPVPVSSGKTNRYRLNRGGDRAANSALHIIAIGRLRTDDKTKEYVARRVAIRRQLVLPTRANYTGRTLQGDIKSRLLLPSLSFSCSFPLSVRTYIRDGSACLPQPPP

SEQ ID NO: 458803 - protein, 348 aa, unidentified
MSTYYIGADVHSNSTELAIDKRGKIVARYRVPTSIPAIANVLDSFQGKKHFAIEEGPMSGWLYRNLNKRVDVFISSDPRRNKLIASDGDKDDKIDASKLASLLRGGFLRKIHQSDDAGRAELKHWVSLYHDRVRDAVRSINKIRARCRMHGVKLSRAALRNPDRRADWLLETNSRALANQLNMLWIGYDATVQQVKLAKRQLALLGKKYEIIQFFSQLPGIGLIRATTIFAYLDTPWRFKKKNKLWKYCGVGLQRTTSGTDKKGTPKPARLKLPWAVNRTLKNAVLGATLSAINQKNNAFKESYERMVKNGMMTSNARHAVARKMLTAMWAMWKTNRPFDESLICLSN

SEQ ID NO: 458804 - protein, 343 aa, unidentified
MSEQKIIGIDLAKTNFYLFSINAHGKPAGKSKLSRNQLLNWLAQQPKMTVAMEACGASHYWAREIRKLDHDVILLPAQHVKAYQRRQKNDYNDAQAIAEACQHGTIRPVPIKTLGQQDVQTFLKMRRLVSMERTQLINHVRGLLAEYGIVFSKGATELRQKLPALLEDAENELTDTMRTLLHQQYIRLITLDNELEWYDSEQKKYVRQDPVCKRLLSILGFGPLVSQAIKSWMGDGKQFRRGRDASAAMGLVPRQFSTGGKQVLLGITKCGDQYVRSMLIHCARAVLFRASEKTDSLSVWVNRIREKRGFNRAVVALANKLLRIAWVIIARNEMYLPATKQNQ

SEQ ID NO: 458805 - protein, 337 aa, unidentified
MDRQYVGIDFHRRRSVIVRLSATGEKRSSVRVANDPLAIAAAVAEAGPDPEVVIEATYGWYWVVDLLQANGARVHLANPQGLNWGQRRVKNDERDAVDLADMLRLGRLPEAWIAPPEVRELRELVRYRAKLVGLRSGLKAQVHAVMAKEGVLPAQGRMFGPAGNAQLDGMAMADSFTTRVASLRDLIERYDREVTMLEGQIHHQLLHHHGYQAIQAIDGVGRTIAAVLVAEIGDVGRFRSAQALCSWAGLTPKHRESDTKTTRGSITKQGSRLVRWALIEAVSRYHGGPRLAGDFRRIAERRGTNKARVAVARKVLTLVYYGLRDGQIRCLAQAPAA

SEQ ID NO: 458806 - protein, 341 aa, unidentified
MREFIRIGVDLAKNVFQLHGVEREDGSPFQRKLTRAKFRAFFARLAPCRVGMEACGSAHYWARVLRAMGHEVVLIAPAYVKPYVKRGKNDAADAAAICEAMSRPEMRFVPVKSADQQAVLMLHKTRDLLVKQRTMTVNALRGHLQEFGLIAAKGVHRIAELVALAEADQDLPEEAKQAVALLAWQSEQLAMKIDALEKTIAGSGAKRPESRLLQEIPGIGPLIASALAASLPDPGVFKSGRDFAASLGLTPSQHSSGGKERLGAITKKGNRYLRKMLVVGCTSVLRVAHKRKGALAEWIVALKAKKPERVAAVALANKLARICWAVLSTGETFREELYARA

SEQ ID NO: 458807 - protein, 343 aa, unidentified
MNQYVGLDVSLEETKIHVLDEAGGRVWRGKCASHPDELETTICKHAPGAVRIGLETGPLTTWLWTELSKRRLPMVCLDARQAQRALDMRANKTDANDADGLAHLVRAGWYKEVRVKSRDAMLSKAVSAARRQLLDISTNLSNQVRGLMKTFGLVVPKGKGRIFEANVRRLLDEEHALAAVVLPLLEAWCAIRNRAAELDRLLLRKVRDDANCRRLMTAPGIGAVVAASYVAAIESPANFKHARDVGAWVGLTPRRFQSGEMDYDGHISRRGDERLRALLYEAATVILTRVRSASALRSWALALKKRLGFKRAAVALARKLAVVLHVMWKIGKNFDPNHRLAAA

SEQ ID NO: 458808 - protein, 404 aa, unidentified
MANNERVVIGGVDTHRDVHVAAVIDDRGKILDTSSFETTTAGYRQLLTWLRSYGELATVGVEGTGSYGAGLFRYLFDEGVAVVEVNRANRQLRRRRGKSDTVDAESAARSVLNGEATVIPKTHDGVVESIRALRVAFTSARNSRTRVALQIRDLIVTAPASLRAQIEGLTTVQRVARCARFRPGDPSDPREATKLALRILARRYEALTEEMEELGKVLDELTYKANPALRSARGVGADVAAILLVTAGDNPERLRNESAFAALCGVSPVQASSGMTTRHRLNRSGNRQGNNALWRIAVVRATHDEETRTYVARRLSEGKTKREIIRCLKRHIAREIFIHLTNPAVVPVGTELRAERNAAKISLTTASTELGTYPLRISRLERGIDHDREFAEQYRAWLEQQKAA

SEQ ID NO: 458809 - protein, 397 aa, unidentified
MYIVGIDIAKRKHEAAVIDGEGAVIIKPFSFTNNCSGYNRLLAMLTKAKLPLDEVSFAMEATGHYWLALFTRLQKEGFRVQVINPVQTNSIRSFYIRQAKTDPRDALLIAEVIRFGHFSESTLHPENIYELRELCRGRHAIVSMQADVKRKVVALLDQVFPEYETAFTNLFSDTSMAILQTCPTPKELSEMPLEELCHLIEVSSHKRFRMAKAQELQALARNSFGFAMAGDVFSTMIRLYAKHLDFLKQQVREMDRKIAEIMETLDTPITTITGIGPTLGAYILSEIGDISRFSSAAKLAAYAGIDPTMRQSGEYNGVRNRMSKRGSPYLRHAIWLAASSAVLHDPALKLYFQKKRDEGKPYMASVGHACRKMVSIIYAVMRDNKAYTPCIPNEISA

SEQ ID NO: 458810 - protein, 422 aa, unidentified
MKAFDVSNFAALIGIDWADRKHDICEVNPQTNKQHFSVISSQPKAINAWANEIKRKYNGQLVAVACELKKGPLIYALSKFSHIVLFTINPSSVAKYRKAFTHSGAKDDPTDAAIQVEILQLHMHKLNVITPDSESVRSLAQLVEYRRKLVQDRVNLTNRITTTLKNYYPHVLDWFKEKDTMIFCDFLLRWPSLEQAKRARKQTLVDFFNQHNSRYPAVNEKRINEIKLAEALTNDKAIIAPNLLLTECLIEQLKHLMLAIERFDVEIKALYKPHKDRFIFDSLPGAGPQIAPRLLAAIGSNRDRYHSCEEIQKYAGIAPVTERSGKKEWIHWRYSCTKFLRQTFVEWAGQSVRYSFWAKAYYRQQEAKGKPHNTIIRALAFKWIRILFKCWKTKTAYDESTYLEALKRKGSPLLKYAVESKF

SEQ ID NO: 458811 - protein, 341 aa, unidentified
MKVSTLGIDLAKNVFQLHGVDHEGHTILRKKLTRAKFVQFVIQLEPCLIGMEACSSSHYFARLFTRYGHEVKLIPPQYVKPYVKTNKTDAADAEAICEAVTRPNMRFVQIKTEEQQAVLALHTERGILIRERIACANSLRATLAEFGITIAAGQSHLTRELPAILEDGENGLSPFVRTSIYRQSKHIRELEEQVKQVEEALASWYRTQEACQRMAKIPGGGMLTATYVVAAVGNARQFSTAKQFASWLGLTPKEHSSGGKQQLGGISKRGDGYFRYLLVHGARALTAWVNRNGAVEENSWLQGLLERKHYNVAVVAMAAKTARIMWSMLSHNTEYQPRQLA

SEQ ID NO: 458812 - protein, 343 aa, unidentified
MDKADPEQEHKTRRLEPKGVIMFLGIDVSKSTLDAALLKEGSKPRHKVFSNDAAGHAALIAWLGEHACHPVHACLEATGTWAQEAALALHQAGHMVSLVNPARTHAFGKSQLKRTKTDKADAILIAEFCRMHNPPVWAPQSSQVQQRQGLVRRLEHLEEMQKREENRLSSGGLSSQVEASLQEHIGYLTHQIEKTRRQIKDHIDQNPDLKSQSQLLESIPGIGATTAALLLAELGDISHFSNARQVAAFAGLVPRIRESGTSVRGRSRLSKVGSSRLRKSLYFPAITALRFNPLIKAFGLRLSVQGQSKMLIIGAAMRKLLHLAYGVLKSKQPFDPAFCHQNA

SEQ ID NO: 458813 - protein, 351 aa, unidentified
MKEYIAFDSHKHYTLMEREDRQTARTVQLRVAHQPGAIRSCLRDCETGTDVAVEATGNWYWIVSEIEQAGLKPQLVHPRKAKLMMGLINKTDKLDVHGLNRLQRNGTLPTVWIPPAELRDQRELTRTRLVLVAQRTRLKNRLQSTLAKYGLAVRDCSDAFGMVARSQWPELLAGLPEQTQWVSQQLLKQLDVLEEQIGQCEKRLNQLLKITPQIERLKSLPGVGLILGASIAFEIGEVSRFASAEHLASYAGTTPRVHSSGDKLRFGRLRPDINRYLRWAFVEAANVVALHHQQRPERHVSHLYWRLKQRKGHGKAIGAVARHLAEATFHILSRQEDYVDPTLRKGRSKPV

SEQ ID NO: 458814 - protein, 315 aa, unidentified
MELTTLYQRVIGLDVHQAQITACAIIQESDGKTRTERRQFGAFKRDRRELAEWAASLKPDQVVMESTGIYWKSPYAALEAVGIRALVVNARHVKNVPGRKTDVGDAQWLATLARAGLLRGSFVPPAKLRELRLVTRQRQKLVGQLSAEKNRLHKLLTDSGIRLGVVVSDIHGQSARAMVKAIIAGKTAHEVLQLASRRLKATREELFDALQGELTANHRFVLDEIMHHIEEIEARIARFDARLLEELKDEHNKLALLQTLPGIDLIGAAMLLVEIGTDMNAFGSADRLASWVGICPGNNESAGKRNGVSRHFAVR

SEQ ID NO: 458815 - protein, 332 aa, unidentified
MFQVHGVDAHGRTVLRKQLARHQVAAFFANLPPCLVGMEACGSAHFWARKLSTLGHVVKLMAPQFVKPYVKGSKTDAADAEAICEAVSRPNMRFVPVKQPEQQALLAVHRARAAFVKARTAQANQLRGLLAEFGMVIPLGLAALRQRLPMILEDAENGLPGMMRELVARLVEHLQVLDQQVAELERQIQLWHRQSEPSRQLAAIPGIGPITATALVASIGDARSFANGRQLAAWLGLVPRQHSSGGKPVLRGISKRGDVYLRTLLIHGARAVIGHFERQRDQTDGWLKRLLSRRHRNISVVALANKNARIVWALLANDRQYSANYPSTLLAA

SEQ ID NO: 458816 - protein, 348 aa, unidentified
MKNKSFVGIDISKKVIDVSIFREDTNIKMFPHEVFNNTRKGFGDMCSWLKKSRVVLSQALFGMEFTGCYSLDLEKFLTSKNYSFCMLSTRIVKHHPMGTIDKSDKNDSAKIADFLYRYDGTECAKPYKLPSKAMQQLKQLVNERKFLVEQRTNFMNRMQMFETKEDSAMYESYIKKLNHDIEKIDQEECELMSKEEDVLDTFQNLLTIPGIGFVNATNIIAITRNFTAFDTARQYARYVGVAPCSHTSGTSVKWRARPSAHCNGQVKADLSMAALRAVEYDVEMQIFYNRKLGGRKDSDTKRKALNAVKFKLIRRMFAIGKQKRKWEVLNTSDDRKNLHIEKSKASEL

SEQ ID NO: 458817 - protein, 377 aa, unidentified
MKKGSPQGYYAETGSRPAQKPHRGEPHECHSLYRIRCTQEKHQLLRQDGAVVEEGTLRAQRPVLRQWAAARRQPWRGAMEATMFSGWIYDTLKPYGEQLDMAHPAMMKAITAGKKKSDRVDARTIADLVRCNLLPTCYVAPPEIRELRRLLRYRSLVVGESVRMKNKIAGLLMESGAPFNKEKLHGKKYFAHLLQNLEEVPESVKDLLRLSRGAMEMFEATQRRLVLALLANPKLSQRIERLASIPGIGEITALTWALEIGDPQRFTSSSRVMSYCGLTAALNSSADKQQRGPISKQRNQWLQTALIEAAKLAPRWNPQLAAVHARELERGHRNRATLAVARKLAAYLLAVDKSTQPFQLRALPVISEAAPMLEQAG

SEQ ID NO: 458818 - protein, 412 aa, unidentified
MRIVNSTCCGLDVHKRSVTACLLQWGARGQAQKQIRTFPTTTAQLRQLADWLVSHGCQHVAMESTGVYWKPVYNILVGVCNEVLLVNAQHVKNVPGRKTDIKDAEWIAELLSYGLLRGSFIPSAEIRELRELTRYRTTLIQERADQCNRIQKLLEGCNIKLASVATDILGVSGWEMLTALAEGEVDPDRLAKMARGRLRAKIPQLKEALLGVTSETQRWLLGQQLQHVSHLEALIGELDQKIEALTLPFSAVLEKLTAIPGVSRHVAQVIIAEIGIDMKPFPTAEHLASWASICPGNRESGGKRKSGRTRQGNPWLKAALAEAGWAASHTKKTYLSARYHRIARRRGRKRAILAVGHTILKIGYHLLSNPDKTYKELGPLYYEESDKERLVRNLTHRLNTLGYKVQLQANLV

SEQ ID NO: 458819 - protein, 339 aa, unidentified
MTYFGFDHHKRWTQAVAMDEQGRVLREGRVLNDSASLKRFLRGLPKPWKGVVEAGPTWGWVYDTLSQAGVEMVLAHPRNVRAIAEAKIKTDKIDARMLANLLRVDLIPAVYVPCEEVRAQKMLWRERIWLVRMFVRVKNRIHRLLAHYHVAVPEFSDLFGAAGRRFLEGVELPEPGNRILKAELKLLESYRSQIQQVQRWAIEATQNHPYRVYLESLPGFGKVFAPVVALEIDDPKRFANPGKLASYCGLVPSLYSSGGKSWQGGIGREGNHWLKWAFVEAAWVAIRTSPYFRLLYQRLRQRKTAQVAIVACARRMSEIAYHLMKERRYYQERPLSYVS

SEQ ID NO: 458820 - protein, 328 aa, unidentified
MSEAIIIGLDIAKHVFHVHGADDRGRAIFRKRISRGKLLGFFASQPSCTVALEACGGAHHWARQLAQLGHQVRLIPPAYVKPFVKRQKNDANDAEAICEAAQRPSMRFVAVKSERQQAAALVFRTRDLLVRQRTQLINAIRGHLAEYGWIAPKGPSHVAILADLLKEEERASSLPEAARAMFRLMLDLIAGLDGKIAALDKEIARRARDDEVSRRLMTVPGIGPISATAIAALAPPAETFAKGRDFAAWLGLTPLQRSTGGKQKLGATSKMGERTLRRLLIIGSSAVVLQARKPRMLVTVALANKMARIIWALLVKQENYRAPVAAQA

SEQ ID NO: 458821 - protein, 408 aa, unidentified
MGRAAEVVAPSSSIRIDGGCPVAQVNDLSRSLTAFDLISTLVVVVEMSKASWLVSGAVPGVERQPLKKLEPDATALLRLIERWRNEAVRAGRPISRIALAYEAGRDGFWLARWLIARGIEAHVIHSASVAVSRERKRAKTDRLDAAMLMRVFLGWLRGERGHCGMVAIPTMEEEDARRPSRERESLINERSRITNRMKSALARLGVRGFKPHLRKAPERLAGLRTAEGTGLPANIIEEFRRDMARLALVREQINSIEKTRAERLKRAPDTGPHAMVRLLARVIGIGIETADMLVREILSRKLRDRRAVARYAGLTGSPDESGLKRREKGLPKAGNARVRRGLIQLAWRFLTFQKDSALARWYRARTEGPSGARKTTMIVALARKLLIALWRLVTTGEVPDGVELRPAG

SEQ ID NO: 458822 - protein, 338 aa, unidentified
MNIVILGIDLGKTTCSVVGLDADGRVVLRRRLRRDGVVAFAANLAPCAMAMEACCGAHHMGRALAALGHDVRLMSPEYVRPYVKAQKNDDRDAEAIAEAATRPTMRFVELKSEEQLDVQTLHRVRDRLVGERTSLTNQIRSLLLERGHTVAQGHARLRGLLRELLEADTDALSPRMAFLLRDMRTRWEELDRRIAAFDAEFAAMARTDERARRLTAIPGIGALNATALVAAVGNAATFSKGRDLAAWLGLVPRQVTTGGKPKLLGITKRGSRYLRKMLIQGARAAMPVVSREDTAIGKWLRALLVRAHPNVAVVALAAKMARIVWALLHHGRSFRVVL

SEQ ID NO: 458823 - protein, 355 aa, unidentified
MKTKGKNLDFTGQPIYIGIDVHKNSWRASIYSSHTFQKTFILQKPFVDNLVKYLNTKYPNGEYQCAYEAGFSGFWAQEQLQAKGVQTIVVNPADIPTTDKERQFKNDKRDSKKIALTLRSGELEGIYIPEKQAQKDRNTVRTRSQVAKNQRRIKNQIKSTLHFFGLEIPEDFSERYWSRKFVSWLEKVSNENKLEGLELLIEEHLALRKLELIAIRVLKKLSKEERHAELTKLLNSVPGVGLLTLMLLITEIIDMKRFKIEDKLYAYVGLIPTSASSGDKETMGEITKRGNKRLKSAVIESAWVAIKKDPQLLMKYEEYRKRMGGHKAIVKIARILMRRIRRVWLKKEPYLITEY

SEQ ID NO: 458824 - protein, 449 aa, unidentified
MKNQARMIKSSDGNKLAIVNPNAAGIDIADTEMQVCVPEDRDGDNNRRFGSFTKDLNTIVEWLIGCNITTVAMEATGVYYLSLFLKLQDAGIEVLLANPADVKNLSGKKTDAADAEWLMVLHRYGLLSPCYQPGNAARQIRNLTRQRSNLIRMADKEVLYMQKAMEQMNIKLSTVLSDITGLSGRRIITAILQGQRNIYELAALAEPNCKASQEDIALSLEGTWDVDLLFMLKQSLAAYDFFLSQVAECDMEIEQLPSLYGAQIEASDAELIRCQRKNKRSKNAPKMDIENFAYQLWGVNVFEIPGLKDTAVMHLIGELGHDFVDKFESAEKFSRWCNLTPNNKISGGKILSSKIMKRKNPVGQIFRTAVAPLARDKGEMGNYYRRIKSRSGALQANVATAHKMAKIFYTMIKTKAAYNASKVGLGERELAERKIAKLERILMKLKNVS

SEQ ID NO: 458825 - protein, 367 aa, unidentified
MSSVASPEGLIHLGMDTSKNTIVVATLLPGEESPVTDRVFNEEEAIRRLVGRFPDRSVLRAWYEAGPGGYDLYRLLASMGVACQVVAPSLIPKGGSDKVKTDKRDSRRLARLGRAGELTPVRVPSPAEEAVRDLARARAVVLEDRKRARQRLTAVLMRHGRIWRGASYWTAAHRAWIAAQRFGEPALASAVGYYRAALEVREAELAAIEAELAPWAAREPLAGPVARLGCYRGIAELSGLTLAAEVVDWRRFPAARAFMSYTGLVPAEYSSGERTRRGHITKAGSEPVRTALTEAAWAYRFTPAIGAGLRRRQAGADPATLARSWKAQRRLHARYQHLLHAGKAAPEAAVAVARELAGFVWAEMTAA

SEQ ID NO: 458826 - protein, 344 aa, unidentified
MSQVTTIGLDIAKNVFHAHGADERGAMVFSRKLTRAKLLEFFAGQPVCIVALEACGGAHHWARQLQTMGHDVRLIPPSYVKPFVKRNKNDAIDAEAIAEAAQRPGMRFVAVKSEEQQAAGLVFRTRDLAVRQRTQLINAIRGHLAEYGWVAPRGTAHMTMLADLLEDEEMTSSLPAAARPMFKLMVDMLADLDKQVAVLDREIAQRAKEDEAARRLMTIPGIGPIAATAIIALAPPVETFRKGRDFAAWLGLAPRQHSTGGKQRLGSISKMGERTIRRLLIIGGSSMVRQACRFGAPAGSWLERMLERKPRMLVSVALANKMARMVWALLTKNEDYRAPAAVAT

SEQ ID NO: 458827 - protein, 344 aa, unidentified
MEHFAAIDVSLELSSVCVVDGAGRIVREVKLASEPEALVRFFRESGLAYTRIGLEAGPMSQWLHAGLSAAGFEVVLLETRHVKAALGAMTMKTDRNDARGMAQLLRMGWFRPVHAKAVPAREIRALLVARKQLQARLNDLELCLRGILRGFGLKLGDIGKGRFEARVRELVAGQATLESLAEPMLRARAALRAECATLHRQVLRMVRVDADCRRMMTVPGVGAIVALTFKAAVDDPGRFKRSRDVGAHFGLTPKRHQSGEVDRSGHISKTGDAQVRTVLFEAAHVMLLRVQRFSALKAWALRVARSRGLKRAKVALARKLAVVLHRLWADGTEFRWSREAAASA

SEQ ID NO: 458828 - protein, 400 aa, unidentified
MHLTANISVPQKNFIAIDLHSDNAVICVRRNALNKAGELIGKNIWCGRVSIRDGLDNFIKALLPYCQDFDHVAVVESTYNWYCLADVFEERGWLLRIADPSTVSQANLKASDDRTDAQYLAERLRVGSLKHYLPLSYSSRALRDLCRYRMAMVQDCASLKIKLINLYRNQLSKNMRVADLLDRCRNHMQSNYRFDPDILEEFKDPNIRLRVAFEVSCIAMLEEMIEECNAEIQKQCKDQELVKLCKTIPGCGPVLSAVICTEIGTMQRFKSAGDFVSYCRLCSTSKLSNGKSKGLGNAKNGNAYLSWAFTEVAQYVSRNPVIREILQRLLRKYGGLKIKAIRTLAAKIARVTFYVLKNRQPFNAAQCFGDELTKGIKKKLALKPLSKDDSVVLPIVAGLA

SEQ ID NO: 458829 - protein, 367 aa, unidentified
MKATAKEKKTAARFVGIDLGKRTYEAAIVGKCGKVTKSNGKTTVAGRQALYQKLRPGDQVALEAGNLAFMMAEEMTATIGCTVYVLNPSQLALIYGSMKKTDKEDSLKLAHIIEDTKEERLPTVPIPSDQEMNRRKIVAGYRRAQQSRNRDINKLHGLFLAQGITTKVRADLATGEARKEAIKELTGLEREEAEYLVAGLELHDRRIETLNTKMAQESASDEAIKRLQSVPGVGPMVAFAFVSHVAHERFENAGQVSNYLGLVPRVYISGETVRYGRITKRGNGFLRALLVQAAWALIRTKQGGKLKELYQYMTVEKAKSKKTAIVAVARRIAELLYTLMRDGTRHEARPFVRGETTAELAKLAMSA

SEQ ID NO: 458830 - protein, 348 aa, unidentified
MRVYKTQHSYYCGVDLHARSLFVNVLDDTGKTRLAQDLPASPSVFLDAVKPYRQGIVVGCECMFAWYWLADLCERESIPFVLGHALAMKAIHGGKAKNDKLDAEKIAGLLRGGFFPMAYVYPKDKRETRDLLRRRSFFVRQRAQLIAHIQNTNSQYNHPPFDKKLTYKGNRNTQIADRFEHLSTRLSITADLNLIDSYDTEIASLETHLVKSAKIDDPTTFAFLRTVPGIGPILGLVMLYEIDAISRFAEVGNFLSYSRLVTCTHESAGKVKGVGGRKIGNAHLKWAFSEAASLMLRSFPAAKSWMQRQSKKRGKKKAHAILEAKIGRTVYHLWRKQVAFDAKKFLAS

SEQ ID NO: 458831 - protein, 358 aa, unidentified
MRIIGCDLHAKQQTVAMLDTDSGELVEKTLEHDGEELRKFYSGLARPVLVGIEATGSMQWFLELMEELSIECRVGDPAKIRAAEPRKQKNDRRDAQLLLKLLSENRFPTIWMPSTEQQDLRTLLRHRHQWVRMRARLQHTLQSMALNHGLRRGHSLWNQAGQQALRALPLAPHASERRKALMTLYPSLQESIDKLDREVSQQAQNHPAARRLMTHPGVGPITALATEVFLGDPLRFTDGKAVASYIGMIPREHSSGGRQRLGAMSKQGNTLLRYLWCEAAMHAVGRDPELKRFYRRKLVQKGLGKARVAAARKLGIRLWIMMRDQIDYQEFCRRGKARQESGSVYAGMSDITNGPAEA

SEQ ID NO: 458832 - protein, 352 aa, unidentified
MKEIATVGVDLAKDVIVVCAADAEGHSIFFRQFSFHGFGQWAAKLAPCTFGMEACGSSHHWARTLTSYGHTARLMAAEFVVPFRKSKGAKNDRNDAQAILSAVRQPDMRFVSIKSIDDQAVLAWHRMRKGWSDERTALISRIRGLMAEFGRWIGRSPESLMRALPILQEDERIPARLRPLLIATREELRRLEERIESCEIEIRDHAKQSDDAQRIQKIIGIGPITASAMVSTVTHATDFKNGRQMAAWLGLVPKQSSSGGKTVLGRITKRGDTYLRGLLFNGSRSALVSALRKAPEKRTRLQRWMIDLRVRLGYIKALVAIANKHARMIWAVLAKGEAYDPEAWQQHMPRPT

SEQ ID NO: 458833 - protein, 347 aa, unidentified
MQRTTIALDIAKRVFQAHAVDPASGAVTRTKLQRAEVLPYVAQLQPSLIVMEACGAAQHWAREFAKLGHEVKLIAPQFVRPFVKTNKNDVADAQAIWTAAQQPEMRTVAVKTEEQQAVLALHAIRERLKKARTAAINQLHGLMGEFGIGLPRGWRTMLPQAAAALDPAESAVPALLQPQLRRQLEEVRSLTAQMTEVERQIASWRSRQEQCERIAAIPGVGLLTATAAVATMGDAKTFRSGRQFAAYLGLVPRQRGTGGRVQLLGISKRGDTYLRTLLIHGARSVLVNSQAAKDPNTWLGRLTQRRPRNVAAVALANKRARQIWAILAHDRTYEPNYGLPQALATPA

SEQ ID NO: 458834 - protein, 356 aa, unidentified
MLYLGIDQHARQVTISLRDEKGDVVQAHQVSTAPDKINDFFQQLTRERIRNGEPFVAVLEVCGFNDWLIRMLQDYRCHKVILIQPDDRKKRKTDRRDAAALSELLWANRDRLLQGKPVRGLRQVDIATSTDQENRRLTTLRKDAGGARTRIINKIKQILRRYNWQWEMPTKTFPTVSAIAWLKKLVLPEIDRLEMNHLLADLEQVEKRLKELEQVIARRVAASKEAAILSSMPGMGGGFTALSLACRVGRVERFPRAHSLANYWGLTPGCRNSGENSQRLGSITKAGSSTARWLLAQLVLKVLRKDARLREWFKRIKRRRGASIARVAVMRKLATIMWHMLNKRKTYAECRELAAA

SEQ ID NO: 458835 - protein, 411 aa, unidentified
MGYETTLIRRAHVMTRKNTLKSLPTDTEFRVVGLDLAKSDVSVAAIPVDDNTPSLVDRMTYADLLDWAGKISPTLFAMEPCNGYSLLCLQLENLGHEIKVISGSTVSMWINTHLSGQKTDLNDAIALARLAVSDAELTPIRHKSITEIRIQTVQAVRQQLMSQRSKSIVSFKALAQQWGIPCAAGHRNLKKLRESIEAKVDLITRPVANAMLFLLDAVKSLDRQIGQLNQTLQELVMSDERGRLLQSVLGVGTQISARVITVVGNVERFNSPRSLVAYVGVAPRNFITGHKNLTKKKHGNCPDLSHKGQGKISRRGDKLLRSLFIQGAACLYMQFCKDQLPECQLKRWILKQLASQKPYGKLIVSLAAKLIRIVWAVLTYREKFNIQKAGMTRSMWSEMALETPLNKEVPA

SEQ ID NO: 458836 - protein, 456 aa, unidentified
MESSESSRRQLKGLPLIRQNVAGIDLGSERHWVCAPTPDGNGREIADFGATTPELVRMAEWLKARQVETVAMESTGVYWIAPHEILEGQGFQVLLVDTRQLARVPGRDKKTDPTDCEWIQRLHACGLLRGSFRPEETVCMLRTLVRDKANLVAESGDWVRRMQKSLDQMNVRVHRAVSDIDGVTGLAILGAIVGGERDAQKLAKLRDPRCRKSEKEIAEQLSGHWREDHLFSLPQTLEMYDAVQERIAAYEKEILGKLGDMERDELRGQTASPLPNAKKAKAIRKGGQEAKRQALFRMSGVAITQIDAVGVETVEVVLSEYGPDFTRFPTEKQFASHVTLAPHVPTSAGKPVKKKKRNSASTRVAAALRMAALSLRHSQTALGAYYRRIAQRRGGDIAVFATARKLATLIFRLLRWGQPYVDEGADAYENRYRQMRIARLHDTAKQLGYHLAPINP

SEQ ID NO: 458837 - protein, 347 aa, unidentified
MRYYTRQHRHYCGIDLHARTMYLCILGHDGEMLLERNLACDPKLFLRTIEPYREDLVVAVECIFTWYWLADLCARENLPFVLGHALYMKAIHGGKAKNDRIDAHKIAALLRGGMFPQAYVYPPEMRSTRDLLRRRLYLVRKRGQLLAHIQNTHHQCNLPEPTRKIIYKANREGIAEKFTDPSVRRSVEVDFELVAHYDQLIRSLELFLVRTAKQHDPQSFQRLRSLPGVGKILALTLLYEIHDIRRFPRVQDFASYARLVKCSKESAGKKLGTGGRKIGNVHLKWAFSEAAVLFLRNNPQGQALLARLRRKHGKGKALSILAHKLGRVTSPLLQREIVFDMTKFLAA

SEQ ID NO: 458838 - protein, 409 aa, unidentified
MRIIGLDIHRAFAEAVAWDEGELKRMGRIDMRRPLLEAFAKKLSKDDIVVVEATGNASSVAVVIAAHVKKVVIANPKQVRIIAHAKIKTDTIDASVLAQLYASGFLPEVWIPDEPTQALRRQVTRRNQIVRQRSRLKNIIQSILHSHLIPSCPHADLCGASGRAWLFHQVLPEDERLAVERHLREFDRLGEDLKVIERDLARSALGNEGVKRLMTIPGVDMVVALAIVAAIGDVGRFEQPQKLVSYLGLNPSVRQSGPGPAYHGRITKQGRGHARGMLVEAAWAAARAPGPLRAFFLRVRARRGQHVAAVATARKLVVIIWHLLRKGESYAWARPALHAKKLRDLELKAGYKAERGQRGAAHTYNVKSHRDQERRWVEQAETAYARFVAGWNPRGPKRARTGAANEGRQ

SEQ ID NO: 458839 - protein, 348 aa, unidentified
MSLALQSLLPYPNSCEGASPHQQGRDTKMLSFCGIDVSKDRLDVMVLPDEYSSSVPNDPAGWAILVEQLRGFSITAIGIEASGGYERGAVRSLQAAGMPVRQVNPFKLRQFAKASGVLAKNDPLDARMIASFVGIMPTRPALRTTPAAEQLVEMLAVRRQLSAEKTAAENASRLLEDLMLQRLSRRRIARLAADIELLDKRLLEIVATDATLAHRYRLLTSMPGVGPVLACTLIALLPELGGMSRKQVAALVGVAPYAFESGTLKGRRSIWGGRANVRQVLYMAAMSASNWNPMLKLFHDRLKGAGKLPKVVIVAVMRKMITTLNAMVRDDIAWADRLSGRHSVTTAR

SEQ ID NO: 458840 - protein, 320 aa, unidentified
MATESSDVFVGVDVSKHRLDVHVLPTGASFAVDNTPQGIEQLIERLKPLGVCRLVVEATGGYQRRVAAELTAAGIPVMTVNPRQARDFARSLGKLAKTDKIDAAVLAEFAHVVRFRADPAAGPTQGQLQERVVRRRQITEMLVRETNRLHLAQDEVARNSLRVIIRALEKQRDALDAKIAELIESDDDWKNKLQLLQSVPGVGAGTACQLISDMPELGKLGRGEVAALAGLAPLNRDSGLMRGHRSIFGGRARVRSALYMATVASLKWNGLIRSFYQRLKAAGKPSKVALVACMRKLLIVLNTLLRENRPWREQLNSQAV

SEQ ID NO: 458841 - protein, 424 aa, unidentified
MDAITERSAGIDVHKDVVTACAMTGPLDRKPQEEIREYSTSTQDLLALAEWLGEQGITDIAMESTGIYWKPVWHILAGSEYNFKLLLANARTIKNVPGRKTDKCDARWIAQLTRAGLIEGSFVPPQDIEELRELTRYRKRLISDATAEKNRIHKVLKKYNIRIDSYMSDIFSASGSAILDALISGEVITLEKLELVVQSRMRSKIPEILDALNCELGIATREMLDYSYSHLQYLEQLIQKIEKSIDDHLTPYKKQVELLDAIPGVNKNGAAVVIAELGVDMSVFPSAKHCSSWAGLSPGNKESAGKKGRTKAVHGNRALRALLCECAWAASRKRGSHIASKYWRLVKRMGEKKAIFAIGHSLLTIAYNILKDLSPYKELGADYSEKSKPNHINLMIKKLLKAGYCVIPDPDAMRTAVKTLPETA

SEQ ID NO: 458842 - protein, 338 aa, unidentified
MELKRIAIDTSKHVFTVHGVDEHEHPVLRRDLRRQQVEGFFAALPPSEVVLEACGGSHHWGRRLSALGHQVKLIAPQYVKPFVKRGKNDRIDAAAISEAAARPTMRFVPVKSAERQAQASVLSLRELLVKQRTQLINALRGQAAEFGIVAAKGAGNAAALAARIAGDGELPIAVKEVLALLGQQIARLDATIAALDGKLAAQHRASAMSRLLCDIPGVGRITALTALLTVDPGQFKSGRHLAAWIGLTPKERSTGGKRRLGAISKQGNERLRQLLVLGAMAVIKVAKPGHRYATRWLLKLLERRPRRVAAVALANKMARILWAMMTSGQAYRPSPVAA

SEQ ID NO: 458843 - protein, 402 aa, unidentified
MNCVGIDVSKGKSMIAVMRPFGEVVVSPFEVRHTANELSELAGLLKSLDGETRVVMESTGNYHAPVAWLLHDAGLYVSVVNAMLVHDYGNNSLRRAKTDKKDAVKLANYGLDHWLTLPRYIPEEDTRLMLKICYRQYQQYSKVQTMLKNNLISLLDTTFPDANRLFTSPPRADGSEKWVDFVATFWHCECVCGRSEKAFTTQYQKWCRKHGYNFSQDKALDIYASACGRFGVMPKTNTAKLLVEQAISQLQATSAALAALKQEMQSLAASLPEYPVVMGMFGVGPTLGPQLLAEIGDVRRFHSKKALVAFAGIDAPPYQSGQIDVRSRSISKRGSASLRRTLFLVMSVILQCAPIDEPVYQFMDKKRSEGKPYRVYMMASANKFLRIYYASVKAYLESLEHD

SEQ ID NO: 458844 - protein, 414 aa, unidentified
MPYKIAGIDVHKKVLMVVVLDASTPEEKPERRRFPTMPSEIRRLLIWLREQGVEEAVMESTAQYWRSVWLELEPYMRLHLAHAFSNRAPRGRKHDFKDAERLVRRLIAKELILSFVPDGEQRTWRSLTRMKLQLTRDRVRLQNQIECLLEEMRIKLSIVVSDLLGASGLRMLRALATGETDPKKLAQFGDARLRCTEEQLVDALTGRVQPMQRAMLGLQLERLQLIDRQIAELNRMIAQAMKPHQEAVMRLAEVPGFGVDSAQQIIAEVGVQASTFPSAAELTSWVGTCPGKDESAEENHSSRSAKGNKYLRRVLNQAAHAAVKKKGSHFQVVFRRLLPRLGYQSAIWAIAHRLCRVVWKILHEGVRFIEQGCEPDPKAKNKRARMLARALRKLGYEVTITPINLVIAENGMQI

SEQ ID NO: 458845 - protein, 460 aa, unidentified
MITQFVPENALSVGIDPHRDTLEIVGIKFPEIMLIDEEFENTASGHQALLERAREVASEHDLKLTFGIEDSGNYGYNLARYLVEQGCEVKGVNPLKVDRQRDFYGQDKTDHLDALTTAAVVLRAYDRLPDVKPVREAVQATRELSRYHEQLVKEQTAALNRLHNLLANQYPAYKSFFNPIRGVTALAFWQTYPTPSQLEGVSIEELADFFYEKSHHRINHQASREKAKLILGSCEQVLSTNQGLLIETQARIIQDVARHLIQLKQSIEEVKAQLEETVSATGQQLETLNGLGVVLAAVFIGDTLSTKRFDNDPNRYASYNGTAPVVKGSGQYSYHVENKRCNRRLKNAFHQLAVTAARHEPLSKEYYEHLVEEKGMESNHALKRLMRRLSDIIFAMMRDKTPYDPDIHRRKQAEGGKKKGESVAAAKQRQEPSTFPSPRDDTISRPRERVKQREAELSSV

SEQ ID NO: 458846 - protein, 432 aa, unidentified
MIAAIIERCAGIDVGKKFIAVCVMTGPADGEARSETRIFGTTVAELKQARSWITEEQCTHVMLESTGSYWKPIFNILEGQVKVALANPQEVKARKGHKTDQKDAWWLAHLLRHGMVTPSFIPPQPQRELRDLTRRRRKLIQTASAEKNRISKVLEDANIKLGNVLSDVFGVSGQLMLEALLQGKTPETTELADFARGSAKKKIPALVAALQEHQMREHHRQMIRFSVEHMRFIEEQLVDLDQLIRAKIAEAGYTKQWELLRTLPAVRENAAVVLAEMGPDPAQFPDEKHLGSWSGLCPGNNRSAGRNKSSHTNKGNRWLREALTESAWAVSMMKTGHLRDKFWRIAAKGPPQRSRPIAVVAVAHDLLKLAYFVMQRGTPYEERRGQPMTEEQKQRLIRHHIRRLGKLGVPVRSSRPSAAPTHSKSKTSPSNR

SEQ ID NO: 458847 - protein, 338 aa, unidentified
MKYVGVDLHKKRFSVCWRGEDESEALESYPMDAEGLSRFLESLDKGCEVGLEATGNSRYFYDQIVGYVKRVRVINPLQFKVISESVKKTEKEDARLIAEYMSKGLLPEVRVMDKERRELKSLIQTRDKLVKLRSSLKNKIHGILLEHGIQSKREMFSSRKALEKVLEAAVSETARFELGVIVKQICGLTEGIEELEKKIKDKGKGLKGHDNLKSITGIGDLSSVIILCNIGNIEDFESGKKLASYAGLVPRVRVSEDSVRYGRITKRGNKIFRTTLVQVALIAIKYNGYLRAFYERIKGRKGSGKAIIATARKMLEIIYQTLKNDWIFEDFNNFVLAQ

SEQ ID NO: 458848 - protein, 416 aa, unidentified
MSGKREKACGVDVHSKFIMATILSTDGLKLQKRFDTSQEDLLMFKNWLKENGCHKVALESTGNYWLPIYYVLEGSVNFILANAYQIKHIPGRKTDALDSEWLAEICLKNLITPSRIFTGDYRELRSLTRTRESLIKVRTKIKNQVTHELEAACIKLSSAISDVFGKSGRHIVDGLLNGIDLDAILDSVPSKKVKANKEKIRATIQASLSSSQITLLRSLLNTIDAITRQIEEIDSKILEKISSRSEDMKIALSMPGMGFISASTILAEIGDFRDFSSANKLAAYCGLVPSVYQSAGKLINGHITKHGSPHIRGMIIEVAHAIIRTKRISKLKKFFLRIKARRGAKIGIVALARKVLCILYHLLINREFYKDDLLEKPRSIKGSRIHSTEVMSLDEMIKTIVRAGYEVRRIGSLEHG

SEQ ID NO: 458849 - protein, 363 aa, unidentified
MLEYISFDSHRRYTLAEREEKATERCRQARIEHRRGEIRRYLSDAQPGTPVAVEATGNWYWIVQEIEEARCVPKLVHPRKAKLMMGMINKTDKLDVHGFNRLQRTGTLPTVWIPPAGLRDLRELTRVRMVLSRQRTVLKNRIGATLAKYALTVEGYSDAFCRCARPTLEGQIALLPEQTAWACTMLLEQLDFVCKQIGAQEQRLKDLLPTSAAMRLLKTLPGVGLILSAVIALEVGDVSRFASAERLASYAGTTPRVHASGGKVRYGTLRPDVNRYLKWAFAEAANSVALHHATHPDRHVSQLYRRIKGRKGHAKAIGAVARHLAEAAFHVLGKGQAYRDPAARRNNREPQTPNNQDASATLS

SEQ ID NO: 458850 - protein, 430 aa, unidentified
MKSNTQNAKIEAITEKTLVLGIDVGSEMHYARAFDYRGIEYSKKPFKFSNTEAGFVTFKEWILDIKERHEKDKVVLGMEPTGHYWFNLGKFLQDNEMKPVLVNPHHVKKSKELDDNNPTKNDRKDPKVIAGLVREGRYMIPYLPDGVYADLRTASNIRFQLQAELTRIQNRISRWFNIYFPEYKTVYGKPDAKSGILILKAAPLPEDILTLGIDGVNQIWRDAKLRAVGKARAKTLIEAAEHSVGSKEGAVAARMEIRMLLEDYESRSIRLQEVMTLIEGLVKQIPMAEKLLEIKGVGIRTVSGFLAEVGDISRFNNPKELQKLAGLALVENSSGKHKGETTISRRGRKRLRYLLFEVAMSLVAKNPEFRELHNYYTTRRLNPLKKMQSLMAIAAKLIRVFYAMLTKGVDYDPKKMVSDIKRPAVYIQAA

SEQ ID NO: 458851 - protein, 426 aa, unidentified
MPYKIAGIDVHKRMLAVVVSDVEVDGEYAFERRQFGSNPAQLRLLADWLLEQQVEEVVMESTAQYWKPVWAALERYWTPTCKKREGAGSMSGTPHLAQAQSNRARQGRKNDFADAERLVKRLVANELTLSFVPVPEQRLWRTVTRTKCQLTRNRVQLQNRLEALLEECHIKLSSLVSDLLGVSARRMVQALADGETDPAALAALANYHLRATQEQLRDALGACQELNPVYRRLLKLALEELQLIEKQISQLDQEIADLLRPYQVQRLAEVPGLGVDSAQQIIAEVGPTAATFPSAGNLSSWVGACPGDDESAGVSHSHRSPKGNRQMRRLLNQAANAAVKYKGGIFEILYRRYVPRLGHKQTIGVIAHRLCRLIWKILYQGVRYEQRGPDVRKKSQRYRAARMIRELQSLGYRVEQANSQSADVPA

SEQ ID NO: 458852 - protein, 425 aa, unidentified
MNFTQNQKINQVSEQTLVIGIDIASELNYARAFDWRGIDKDKVFKFFNNLEGFQAFKDWTAQVMAANNLSELLVAAEPTGHYWFRLADYLKGEGIKLVLVNPFHVSRAKELDDNHPSKTDAKDPKTIAKLTIEGRYMEPYIPEGIYADIRILYNCRQKVVKAMVSLDNQIRRWFKIYFPEYLEVFGNIAGQGSMAVLEKAVLPKDIISLGIDGINKLWREKKLRAVGLKRAKSLYEAAVTTIGRKEGSVGAKAEFRMLWEDYIHKLEQLEKLNKEMVILLEKIPQAEELLKIQGIGVVSVGGFFAEVGDLRRFESPKQIQKLAGLAIRENSSGKHKGQTSISKRGRARLRAVLFGAAMALVAKNKAFREIHEYYIGRQKNPLKKKQSIVAVCCKLIRVIYAICKHKSAYDEAKMLKDIRRERAEA

SEQ ID NO: 458853 - protein, 417 aa, unidentified
MKCFVGLDVSSTKLDVCIMLSDTTTPFVSSLPNNLIGAQAIKNQILELNDTYSFERIVIGMEATSLYSFHPAMFFHEDSNLKALNVEVMVEQPNKIKKYRDAFEESKNDTIDAFYIADYFRIERFSPAFLKEEKYMALQHLTRTRLQLIEQLTRTKQHFIENIYYKCNTLSTEIKNENLTTSLWSSAIISLMTEDYTLDELATVPLKDLADFIQKLGRGRFKAPEKLAKAIQAAINGSYRLSKLQQDSVNVVLGLLAREIRNLEQMIKDIDKAIEDMVEVIPEYQCLTSVPGVGKVYAAGIIAEIGQIERFKDHPQVAKYAGLNWKQNQSGNANSQNTDLVKRGNRYLRYYLVEAANSVRRHDSEYQAFYKKKYQEVPKHQHKRAIVLTARKFVRLVDALLRNRQLYTPPRRPMEDK

SEQ ID NO: 458854 - protein, 341 aa, unidentified
MQKFIRIGVDLAKNYFQVHALVSEGGSAVTRKLTRSKMREFFAQIEPCRIGLEACGSAHYWARELQAMGHEAFLMPPAYTKPYVKRGKNDAVDAEAICEAVSRPGMRFVPIKSAEQQATLTLHKTRDLLVKQRTMTVNALRSHMSEFGIIVAKGIGHVSDLLQLAETDARLPSVANAAVKALAQQIDAIDQSLDDLEKEIANAHSRSEMSQLLVEIPGVGKLTATVISASMPDPNVFRSGRDFAAWLGLTPRQNSSGGKPSLGAITKQGNQYIRKLLVLAGTSLLNVVGKRKGVLRDWIVGLLAKKPARLVTVAIANKLARIIWAMMKTGESFRTEMFMKA

SEQ ID NO: 458855 - protein, 422 aa, unidentified
MNDYRIAGIDIHKKMLAVVVAELTAAGELAFQRRQFENTEAGIHQMRDWFVECQVREVVMESTAQYWRTVWLELEGQFQLHLAQAMSNRAPRGRKRDYADAERLVRRLIAGELVLSYVPDREQRLWRMLAREKHLARRARVQQVNALEAFLEQIRIKLSCVLSDITGVSGWRILEALAKGEPQEPAKLAKLADPSVKCTREQIQGALAAAPHVRAEERAVLRQFLDRIELFGKQIADNDRLLAACLARYQDAVTRLAEIAGLGADSAQQMIAEIGPKAEAFDSPAQLASWVGVCPGREESAGVSKSDRCPKGNRPMRRLLAQCANAAIKAKGSVLELYYRRKVAHLGHFQAVWAVAHKLCRVIWKVLHDGVRYEERGSRLNSNQEAKQLQRLKRTLRSLGYDPNSLRKLQLPNNIATGPSMA

SEQ ID NO: 458856 - protein, 391 aa, unidentified
MSLYFVGIDISKYKHDCCIISATTQKVISKFTIKNDKAGFEELITTFNSLSSPEDIRIGFESTAHYALNLELFLENANHSFMEINPVLIKDFKKSQTLRRTKTDSIDCELIARWLMTVEYKPHSKGFYHAYSLKSLTRLRDRLIRQRSFYLVKITNVLDHTFPEFKPFFNERLSKTALYLLENYGSAEKMARMNSVSYEKLRSISRGKFSPQQFIALKELAANTVGVNNSIFDIELNSLLTLYKTLVTEIDTLEKEINRLIEEVHPHYLSVPGIGPISAAIIYSEYGDISNFDNPGQMLAFAGIEPGINDSGTESHGGRMVKRGSSQLRYALINCCLPLIRFDMTFATYYAKKRAEGKPHRVAITHVAKKLIRVIYALERQDTDFCVQKLR

SEQ ID NO: 458857 - protein, 363 aa, unidentified
MVLTNQGPEKGANMTIIGCDYHPGFQQIVFVDTKTGEWKEQRLEHREPAEKFYRELASRREKMRVGMEASGHARWFERLLAELDIELWIGDAAAIRAKRGRRKPKTDRQDAQHILHLMLKDDFPQIWVPSWENRDQRQLLWHRHRMVQARTRLMNQLQAVALNEGLRCKRRLWREKGRKQLEAIRLGPWASRRRKDLLQLLDGLNPTITELTQAIQQEVEKSVEARRLMTHPGVGPITALAFVLIIGRAERFQCGKQIAAYLGLVPLEDSSGERRRLGHITKQGSSMLRFLLVESAQMAARSIPQWRNQYFHLAMRRGRKIAKVALARKLAIRLFWMMRQAWDYEQMTKFGSHAGQPASCNGV

SEQ ID NO: 458858 - protein, 412 aa, unidentified
MDIVYPCCAGLDVHKKTVVACVRRLAPDGTSRCEVRTFGTTTAALLELADWLAAGGVTQVAMESTGVYWKPIYNILEGRFGVLLANPQQLRRVPGRKTDVKDCEWIAQLLQCGLLQASFIPSRPQRELRELTRQRVQLTGQRASVANRLQKVLEDANVKLASVATDILGRSGRDMLRALAAGVQEPRVLAELARGRLREKKPALEAALRGHLTEHHRFLLGLLLDQVDALDVLLARLDARVVELTAPFAEALGRLDTIPGVNRRVAEVVLAEVGPDLRPFPSDRHLAAWAGVCPGQRQSGGKSQGGRTRKGNRWLRRVLVQAAWAASRKKDSYLQAQYRRLAGRRGRKRAAVAVAHTLLVIVYHVLKDGSTYQDLGATYLERLEPERLTRSLVKRLERLGHKVVLQPKERVA

SEQ ID NO: 458859 - protein, 422 aa, unidentified
MKKHLPILDVKAAFVDVGSEHMHVSVGGDEPKVFGSVTSQLHALRDWLLAQGVRSVAMEATGVYWLPLYGVLEAAGLDVRMVNGRQTRNAPGRKTDMQDAQWGATLHMHGLLRAGFVPTADIRRLQDYLRLRADHVGQAGSCVQLMQKALERMNVKLHDAISSLAGASGMAVMRAIIGGERDPAALLALCDVQIRRAKAEHVMETLRGTWSDEHIFALEQALQSWDHYQRLIADCDRRIQAVLPPYDPTLPALAGPAKRGGVNAPEIGMLREILAKMCSGRDLTRLPAHTPYGVLQIIGETGTDLSKWASEKHFTAWSGLAPGSNDSGKRHGRVKRSRNRRAVVLHVGQQSGAQQDHRAGCLLPSIGRAARQGGGQQGAGPQARGLVLARDGQGRRLCRKRHRRLRSAGPKRQGARAAPARQ

SEQ ID NO: 458860 - protein, 367 aa, unidentified
MKKVSTVGAKPSKKISQQKLTVGLDLGDRNSWYCVLDESGQIQLEQRVRSNAKALREVFGQLPHSRIALEVGTHSPWISRLLSELGHEVIVANARKVRLIGESRKKDDRLDAQTLARLARIDPGFLSPVKHRSAQAQADLMMIRARAGLVRARTALVNTVRGLAKSYGERLRGCNVRNMNPEKADGLSPELQSALEPLLAGIEELSEQIREYNERIEKLAQESYPQVALLRQIKGVGTLIALTFLLTLEDPHRFRKSRDVGCYLGLQPGRRNSGQSEPQLHISKEGDPYLRTLLVQGAQHILGPFGVDCDLRRWGLKLAERGGRSGKKRAIVATARKLAVLLHHLWVSGEVYEPLHNSRRTAVAAAA

SEQ ID NO: 458861 - protein, 348 aa, unidentified
MTTDESRSARRIVGGVDTHKDLHVAAVVDEHDRLIASQSFATTRQGYRQMLAWMRAFGRLDRVGVEATGTYGAGLLRHLQAAGVQVLEVTAPDRPDRRRRGKNDDLDAEAAAHAAFAGKRAVTPKTRDGMIEALRVLKACRKTAVTARRVALQMIQNTIVSAPDDLRDTLRRMTRMQLVRTLAAWRPDLTDYRNMLSAYRIALKSLGRRYLELHDEIADLDDMIAAIVNDLAPDLVARNSIGHGSAAQLLLTAGANPERLGSEASFAALCGVSPIPASSGKTTRHRLNRGGDRAANSALHIIAIGRLRTDERTQAYVAKRLAEGHSKLEAIRCLKRKRCSQATGWAWG

SEQ ID NO: 458862 - protein, 467 aa, unidentified
MAASKRFKRLWGNGKERKEWARRLQSEDPGLEVVHPHAAGIDVGNSAHYAAVRPDRDVEPVRRFECFTADLYRLADWLRSCGVKTVAMQSTGVYWIPLYEILEERGFEVYLVNARHTKNLPGRKSDVQESQWLLKLHTYGLLSNSFQPSAEIRMLRTYWRQRGTHVAGAATCIQRMQKALTQMNVQLANVISDISGLTGQAIIRAIIAGERDPYKLAALCDPRIQASQDEIASSLEGNWRPELLFILQQEVEMYDTYQRRVAECDERLQKHLASFADTLSVRATMDKPKRKKAAKNAPHFDLSSELQRVTGVDLTRIDGIDVMVSQTILSEVELDMSRWKTEAHFASWLGLCPDNRISGDKVLGKGTRRVVNRAATALRQAANTLIRSRSYLGAQYRRLRTKLGAPKAITAMAHRLARLVYRMLKYGQTYVDKGTEYYEERLRQQQIQLLRKRAAKLGLHVVMETQA

SEQ ID NO: 458863 - protein, 344 aa, unidentified
MSEGYEGREYVGIDLHRRRSVIVRMTPAGERLSVVRIVNDPVALGLEIAKAGPDPEVVLEATYGWYWAADVLQAAGARVHLAHPLGVKGFAYRRVKNDVRDAADLADLLRMGRLPEAYLAPPAVRELRELVRHRAKLVALRSGLKAQVHAVLAKCGLLVPVSDLFGVGGRNRLARLELPVVYRARVDALCRLIDAYDFEVDAVSAQLRGRLATHTGYPAIQRLPGVGPTLAAVFVAEIGPVDRFTGPDKLCCWAGLTPRHRESDTVVRRGSITKQGSTLVRWAAIEAVQKLPASAGWLISNRARLADRRGRNIATVAVARKLLTLVYYGLRDGHIRALDRPQAA

SEQ ID NO: 458864 - protein, 337 aa, unidentified
MKIANSKDGFQRLMEGVQRYGDPVHVAFEPTADYHRNLAYWLQNAGATCFLVSSLMSARARELLFKTWDKNDRKDAQVILYLMRQNMMKPFYDPLVEGTMDIQELSNTYHQISLARTRCQHSLINHYLTLYFPEMERFYHASRSEWFCRFLCKFPTPQSITRYKIATFVKRAWVIVGRKVAKQRFLEEVHETACRSIGLPVELQGQAVKTFRIQLQRIIDLNQLRHQLEKTSENILNAREDYQQLRSVPGVGPICAMMIIAESGDLNRFGHYRQYLNFCGFNLCSSQSGQRQSKHKISKRGNSRLRYAYWLAATIAIRQRENSFREKYERHMKVVTK

SEQ ID NO: 458865 - protein, 391 aa, unidentified
MSMYFIGIDISKYKHDCCIISAADQKVVSKVTIKNNKAGFNELLTIIHSLANPADIRIGFESTAHYALNLELFLENSLLTFMEVNPVLISEYKKSKTLRRTKTDSVDCESIARWLMTVEYKPHSKGFYHAYSLKSLTRLRDKLIRQRSFYLIKITNVLDHTFPEFKPFFNERLSKTALYLLENYGSAEKMARMNSASYEKLRSLSRGKFSPQQFLRLKELAVNTVGVNNSIFDVELNSLLSLYKSLVKEINTIEKEINKLIEEVHPHYMSVPGIGPLSAAVIYSEYGDISNFTNPGQMLAFAGIEPGINESGTESHGGKMVKRGSSQLRYTLINCCLPLIRFDMTFATYYAKKRGEGKPHRVAITHVAKKLIRVIYALERQDIDFNAQKLR

SEQ ID NO: 458866 - protein, 347 aa, unidentified
MRFYTKQHKFFCGVDLHAKSMYLCILNAEGKIVLHRDIKTDPNVFLKTIAPYREDIVVAVECIFTWYWIADLCAQENIHFVLGHALYMKAIHGGKAKNDKIDAHKIAVLLRGGMMPMAYVYPQKMRSTRDLLRRRMHLTHKRAELLAHVQNTNYQYNLSDIGKKIAYKANREGVAERFQDASVQKSIELDLALLNHYDQILPRLEHEISLIAKAHDADSYFRIRSIPGIGRILGLVILYEIHDINRFPRVQDFVSYCRLVKSAKESAGKHMGTSGKKIGNVHLKWAFSEAAVLFLRRNLQARKYREKLQRKHGRAKSLTILAHKLARAVYYILKRKEVFHPESFFAK

SEQ ID NO: 458867 - protein, 349 aa, unidentified
MRFYTNQHRHYGGIDLHTKTMYVCILDRDGQVLIHKNLPSNPEAFLEVIAPYRDDLVVAVECIFTRYWLADLCAAEGIPFILGHALYMKAIHGGKAKDDRIDAHKIAMLLRSGMLPEAYVYPAGMRATRDLLRRRLHLVRKRGQLLAHIPMTNQQYNLPAFAKRSAYPSNREGVADHFEDRVVRRNVAVDLALLDRYDTLLTDLESYLVRQAKQHDPHAFALLRSIPGVGKVLALTILYEIHDVHRFDRVQQFASYARLVKCAKESAGKKHGTSGAKMGNVHLKWAFSEAAVLFVRHNEPGKKLLAKLEKRDAKGKALSIIAHKLGRAANYILLRGKAFEIDRFVATIN

SEQ ID NO: 458868 - protein, 330 aa, unidentified
MDRVVIGIDVSKAELAVAVHPSGERWTSETTPAAIDVLVMRLQSHGPVLVVMEATAGYELPLAAACAAAQLPVAIVNPRQVRAFAQAIGRTAKTDAIDASVLALFGARVQPPPRAVADAETQALGALITRRRQLLEMLGAERRRLHQAPPTGPITRDLRNHIRWLERRLGDVDADIATAIQQSAVWRVHENLLRTVPGIGPTTARTLIAELPELGCLDRRAIAALVGVAPFNCDSGEHRGHRHIWGGRGSVRASLYMAALVASHRNPVLAAFYQRLRGGGKPAKVALVAVMRKLLTILNTMIKHQSRWNPKAASTPASPSRPARAVAVLA

SEQ ID NO: 458869 - protein, 405 aa, unidentified
MSQMLVGIDVSLRSHHVHFMHGEGHTLADFSVRNDVEGADTLIQKIVRTAEKNQTNQLKIGMEATDQYSWHLAHYLKAQCKKVLPHLQTAIYMLNARKVARFKKGYDTLPKNDKMDAWVIADHLRFGRLPHEMQETLIYDALRRLTRTRFHLVHEIARNKTYMLNQLYLKFSGLRQDNPFSDTFGTTSIAVIEELDPGKIADMPLEELVEFLQEKGKNRFVEPEEIAKYLKQLARNSYRLDKMMADPVNLSLSVILSTIQHMESQVKRLDKEIERMMKGIPQTLTSIKGIGPVYAAGLIAEIGDIHRFDDHHALAKYAGLVWTQYQSGEFEAENTSRMRTGNKYLRYYLVQASDAIRKHDTEYKTFYQKKYHEVPKHQHKRALVLTARKLVRLVHSLLRKLPFFN

SEQ ID NO: 458870 - protein, 382 aa, unidentified
MNRIIKIGMDVHSTNYTLCAMEPVLDGEDRIFTNIQVTPDYENVIQFIDNLKERLGSSDSYSIECGYEAGCLGYSLYHQLTKAGVKCTILAPTTMLTQQGKRVKTDKRDAVMIAQCLSYGGYHAVHVPTDQDASVKEYLRMRDDHKLALKKIKQQINAFCLRHGYIYGGHKWTIRHLEWLKKLDLSELNRETLNEYMTSYEEQTAKIERFDKRIEELAADSDYHENVRKLSCLLGIQTYTALSLIVETGDFKRFRKGNTYAAFLGLAPGESSSGEKISRTGITKAGNSRLRTLLIEAATGICKGQVGHKSKALCARQAGNPAEVIAYADRGNIRMRSKYKRMIRHEKKRNVAVAAIARELACYVWGIMTNHIEPREEGKKAA

SEQ ID NO: 458871 - protein, 322 aa, unidentified
MSNVYYCGIDIAKNKFDCAIRLENGKYKDKVFKNDVSGFVSFISWITEQNLSPLHVCMEATGIYWEALAEYLINRGVTVSVVNPAQIKAFSMSLLVRSKTDRGDARVISDFCFERQPAVWQVPSVEEQELRALVLRLESLQKMRTQENNRIQVARTNVVKNIKDHIVWLNNEIATLLKEIQLYINRNTEMKKMKKLLESIPGLGAQTAAVLLSFGIHPGRFINARQAAAYAGVDPRLNESGSSVRGRPRLSKTGHAFLRKSLYMPAMTTLFRTEWGKQFYARLSAAGKPPKLIIGAMMRKLIHVAFGVLKTGEKFDKSLHCV

SEQ ID NO: 458872 - protein, 420 aa, unidentified
MRNAGIHANSLLEVRRMYNAVGIDVSKGKSTVAVLQPGGTVIRKPFDVSHTSQNLNELADYLSSLDGTTKIVMECTGRYHEPMVKALSEAGLFISIVNPHLIKNFGNNSLRKVKSDPADARKIARYTLDNWTELRQYSGMDNTRTQLKTLNSQFSFFMKQKVAAKANLIALLDNTYPGVNKLFDSPTREDGSEKWVDYAYSFWHADCVRKIGLKAFTERYKSFCKKHHYIFQQDKPEKLFNASKELVAVFPKEKTYKLLIQQSIQQLNLASEHVERLRREMNELASTLPEYSTVMGIYGVGKTYGPQLIAEIGDVSRFTHREALTAFAGVDPGVDESGQHKSKSNRASKVGSARLRKTLFQIMTTLLQNAPEADPVYRFLDKKRSQGKPYYVYMTAGANKFLRIYYGKVKECLRNLEQTE

SEQ ID NO: 458873 - protein, 458 aa, unidentified
MAKQKQQKQKVQMNALEQINPHAAGIDIGGEEVWVAVPPDRDEDSVRSFATFTADLRSLANWLQACGIDTVAMESTGVYWIPLYEILEAHGFRVYLVNARHLKNVSGRKTDVLDCQWIQQLHTYGLLSPSFRPPEQIVALRSLVRHREMLVQYRSAHIQHMQKALTQMNLRLTNVLSDITGVTGMKIIRSILAGERNPQVLAGYREPGCKKTEAEIVKSLEGHYKREHVFALKQAVELYDFYDRQIRECDAELEAMYQAFDPPEDPGTPPPAARSQKRRKNQASFDLAPALYRLTGVDLTQIDGVDELTVQKVLSETGTDMSKWPTVKHFASWLRLCPNNKITGGKIKQTGVQPTQNRASTALRVAASSLKHSDSALGAYYRRMRARHGAPAAITATAHKLARIIYFMLKDRKPYHDFGADYYEQQHRARVVRNLNRQAARLGFRLEPANPAASPEVS

SEQ ID NO: 458874 - protein, 478 aa, unidentified
MAARKKNTSKKAAPGSPAAAGQPGGDGAEVAEERVEVVTYAAAVDVAKGSGMVCTRVPGSRPDRKRQKVWLAEAGYDSVVALMDHLRCEGIQRLVIESTSDYWRIWYYLAEAAGLEVWLVNARDVKHLPGRGKSDREDCVWLCKLNERGMLRRSFVPPEPVRDLRSLTRTRSRLTQDQVRHQNRVEKILEDALLKISVVISDLFGASGRRFLDALVAGERSPKALAALGDYRLKASTAELEAALTGRFRDIHAFEIATHLRLIDTINDEIARLDAAIEQQLASIPGVAPACTACGLIGGGHAPGCASKDAAVLSLAERLAEITGVGARNAQVLIAELGTDMSVFPTPGHAAAWARLTPRTIQSGTTARPGRTGKGNPYLRGALGQCVMAASRTDTRLGEQYRRTARRRGKQKGIIAVSRVICEIACILIADRAARFTDPGAGYYSPGNPQRHTRSRIREIERLNPGMKVTLTPIDPAA

SEQ ID NO: 458875 - protein, 351 aa, unidentified
MMIIGVDYHPSFQQVAVLIEETGEYDEQRLNHEGGEAERFYRDLKRKGIRVRVGMEATGYSRWFERLLAELDFELWIGDPAEIEAKRVKKRKTDREDARLLLRLMREDRFPQIWVPSPENRDLRQLLWHRHRLVQMRTRIMNQLQALAMNEGKRWKSKLFSQKGRAEFEKLALGPWASRRRSELLELLDRLNPSIEELTTAVQQEVNKRPEALRLMTHPGVGPITALAYVLIIGTPERFTRGKQIGTYVGMIPTEDSSADKQRLGHISKQGSSLLRYLLVEAAQAATRFNPHWRRRYIHLAMRRHRSIAKVAMGRRMAIRLYWMWRNGCDYSPSFEFGSYAGQLEKRHGGK

SEQ ID NO: 458876 - protein, 331 aa, unidentified
MFPVGIDVSKNTLDLCILYDGIKGRIKTRNIQNNRHSVENILRWLRLQHCGPEDVHVVMEATGVYHERLATELHDAGFRVSLANPHRSREFARGMGIMTKTDKVDAYMLACYAFLKKPHYWEPPAPEIRYLGALLRRRDVLLGDALREEKRLEKYLSTDTPADIISSCRRMAQLLREEVSNIERQIKAHIKASPALRRDYTLLNSIKSVGPQLGMHMLVVLRSHNFASAEQAAAFLGVVPIEKRSGTSVRRRPRMSKIGPPQLRAKLYMSALCGKIYNKRMRNIYDEMCLRGKPKMVAIGALMRKLVHWCYGVLKTGTVFNDEGLKQVLST

SEQ ID NO: 458877 - protein, 376 aa, unidentified
MSNVRFIGLDVHAETIAVAIAEPDGEVRSVGVIPNRPESIRKLVKKLGPAEQLRVCYEAGPTGYVVYWELTALGVKCEVVAPTLVPVKAGDRVKTDRRDALKLARSYRAGDLTAVWVPDAAHEALRDLVRAREAAKKDQLRARHRLGKFLLRHGRRPPTAMNPWTQMHLTWVKTVHFAHAAQEATLLDYLHEVEHMADRIERLERAIDDAVQTAPERMRAVIEALQALRGIAQVSAVTIAAEVGELSRFTTPRQLMGYSGAVASEDSSGERIRRGGITKTGNAHLRRVVIEAAWAYRYRPAIGPALRKRQASVSPEVKAIAWKAQHRLHARYRHLTARGKCKQETVTAVGRELLGFIWAIGVTVEARGRGEQSAAA

SEQ ID NO: 458878 - protein, 367 aa, unidentified
MKKLSDPVRKVNAQSVGLDVHKSITVYCVLDAEGVVVEEGRFRSRRKDFDAFIARVLRAGESHFSFEASRSSLWVFDVLRESIEADHIHVAQAKRIRAIANSNAKNDTNDAWWLAYLTYEGRLPEAYVPQAEILELRIATRERRSCVRRRTQIINRLKAHLAQVGEVVPSSAVSTKVARLFIAQKASSTEGLRGRALQSCIDELEYQEAQIAEWEKLIDGVAAGLPEVELLAKEIPGVGKALSATIIAEAGDITRYVSAKAFGCASGLTPSDRSSSGKTLHGGITHEGNPHLRWALTQAAMGCLRSRSGAGLAAGNWIRQKQKRMGNKSKARAAGGRKLAETIWRLFNLGECFDAARPFGSRSVDAA

SEQ ID NO: 458879 - protein, 508 aa, unidentified
MPMNLADWPQAIRHAVWQHLRMVLSCPPRRLAPGRCRFIVWRLSSRLEALRLLIASRASTVCVNDSRLPIMLKEINAHAGAVDVGSENFHAAVYGGAIKVFGTFTRDLQNVLEFFGGQGVQTVAMEATGVYWMPLYEVLERGGIKVCMVNGAHVKNLPGRKTDMSDCQWLAELHAHGLLESGFVPEPTILRLRDYQRLRQDHIGMGSQHILHMQKALERMNIKVHDVLSDLTGFSGMQIIKAILKGEQDPEKLAQLCDNQVLNKKRDRLIESLRGHWKEEHLFALGQALEGWQFYQQQIAACDGQLGRILTEMAAVKPEVPGEKLRPLRERKKLHKNSPQITHLYETLVRLCGGNDATQVPTITEYTVLQLISETGTDMSRWPTRKHFTAWLGLAPASRQSGKHRGSQKRFRGRAGRMFCLAAGSLACSKHLALGGFYRRIRATCGGEVANIASARKIAELYYNTLRYGNGYVEKGLKAYEEKYRQDSIRRLKAVARKFGLKITDQNS

SEQ ID NO: 458880 - protein, 349 aa, unidentified
MVAETVGTVGNFVGVDTHGDVHVAAVVDPQGRFLGSRSFPSSARGNGALEQWVGTKGRVASFGVEGTGSWGAGLARALSQQGHRVVEVDRPDRRTRRQKGKSDTIDAEAAARAVLAGTATGTPKTRQGPVEMIRALRVARRSAVKARSQAALQLHSLVATAPQSLRDELRTLSLVLLVKTCARFRPNSTLDVTQATKVALRSIARRWQELDAEIWELEQVIGPLVRTTAPRLLALPGVGIEVAGQLLETAGDNPDRLRSEAAFAHLCGVAPVPASSGKTNRHRLNRGGDRQANCSLYLVAISRLRHDQRTGEYAARRTREGRSKAEIIRCLKRYVARDVYHHLVTLDTP

SEQ ID NO: 458881 - protein, 405 aa, unidentified
MGKVFVGHDWAETHHDVYVEDGAGQRLGKARLDEGVSGVARFHELVSSFVDDPGEVTVATETDRGLFVGALVAAGYRVLAVNPMSAARYRERHSTSGAKSDPGDAFVLAELARTDGHHHRPVAADSELAEAVKVLARAHQSMIWTRQRQVNQLRSTLREFYPAALSAFDDLASSDALAVLALASTPSLGRGLSRSKIASALRRGGRQRRIDERAAEIQTILRADTLQAPGLIAEAMGASVRALVAVISEQVAQTARLEAELADHFELHPDAKIIRSLPGLGMILGARALGEFGDDPNRYTDAKSRKNYAGTSPITRASGKHHVVLARHARNRRLADVCYQWAFAALTASAGARAFYDQHRAAGDTHHQALRALANRLVGILHGCLRHRTPYDEHTAWGHRTAAAA

SEQ ID NO: 458882 - protein, 342 aa, unidentified
MQIAVLGIDLGKNSCSVVGLDTTGRVVLKRRLHRDGVLKLAASMPSCVMAMEACCGAHHLGRILRDHGHEVRLMSPEYVRPYVKAQKNDDRDAEAIAEAATRPTMRFVTLKSETQLDMQSLHRARDRLVGERTALINQLRAILLERGIILPQGRRKLELHLTPLLAGDAMAISPRTRLLVNDLHLEWTELDRRIEAFDAEFAAQARTDETARLLTTIPGIGPLNATALAASIGNAQTFQRGRDLAAWLGLVPKQMTTGGKPKLLGISKRGNRYLRKMLIHGARAALPSLSKGETPMGGWLRDLLARAHVNTVVVALAAKLARIICAVLRTGRKFELTSAAVS

SEQ ID NO: 458883 - protein, 346 aa, unidentified
MDQIIRSGMDTSKNFFQLHGVDASERPVLRRKLRRNDLLAFFAKQPPTVIGMEACGAGHYWARELGKLGHKVKLIAPQHVKAYVKRNKNDGRDAEALCEAMSRPTMQFVPVKSEEQQAALMLIGVRQQLMTRRTQLSNAIRGYAAEFGLVTAKGLVKVEPLLAQIARDESLPALAREMFALQGRDYTRLQVELKAVEARLMAWHRANADSCRLAKIPSIGPIGATALVMKAPDPGLYPSGRHFAAWIGLTPKDHSTAGKTRLGKITRAGDAMLRSVLVAGATSVIQQAMKGRGRPSPWLVALLARKPPKLAAVALANKTARIAWKLLTTGEDYDRARMPAASKHAA

SEQ ID NO: 458884 - protein, 420 aa, unidentified
MKVVYQTCCGVDVHKSFLVATIIKTTSGVEPSYQKKRFSTFNNSILQFKNWLIENQCRDVCMESTGKYWVPVFNLLEDDINVTIANPKWVKAVKGNKDDTKDSKWIGDLFRLGLVPGSYIPCKPIRILREFTRYRYKLTSCRTSEKNRYQNALTVCNVALDSVVSDIFGKSATSVIDYLIERSDNSINHEEIASRLLRSLKKKSDSVIESIEGYQMTDSQKYRMRLVRAHLDYITSTINDIDTMLDSLIAPYENAVQLLCTIPGVDRNSAITVISEIGTDMTPFSNSKRLCCWAGLTPGNNESAGKKKSVRITRAGVYLKPALVQVAHAAVKSDKSPYYKQKYERIMKRRGKKRAIIAIARMILTAIYQMLSTGEAWNPTDLYKIDIPEPLKEKQKEKAIKQAKKLLIREGILSESQLAS

SEQ ID NO: 458885 - protein, 358 aa, unidentified
MNRNTGMSAGQIIGTMNGLQVIGLDIAKHVFQLHTVDMSTGEIANVQIKRAKVLEYFVNKPKSLIAIEACGGAHHWARELTALGHSVRLLHAKIVRPFVSGNKTDATDARAIWLAVQQPGVKFVGIKTAAQQATLTLHRQRELLMKMRTMQTNALRGLLYEFGATFAQGRKALFKDIERALEELSTQLPQMVRDSLREQVGRIKEMGDAMLEIEKRLALQLKADPHMQRIAQIPGVGLLTATAAIATMGEASAFKSGREFCAWLGLVPSQTGTGGKVRLGGISKRGDTYLRTLLIHGARSVLAHAKEPGPWLAQIQARRPSNVVIVAQAAKMARTIWAVTAKEQSYQQGFHSVRPQAF

SEQ ID NO: 458886 - protein, 332 aa, unidentified
MQKDFYIGVDISKKTIDVAIYKKEKASKASVCEKFSNSPDGFKEMKRWLRKCGVSLTNALFCMEATGHYTYNLCLFLEQQEVSYSVQSPLHLKRSLGLTHGKNDKVDAYRIASYAYLHREDIKLSKLATNSIRKLKALMAERKTLVVEIARCKAQLKEVGSHSSSTGTIKRTKELLEFLETQVLDIEKDMAQTIDSDAELKNNYQLLLSVSGIGVVNAVNTIVATHNFQLFDNARQYACYIGVAPFEHKSGTSVKGKTHVEKGAKILKADLTGSVRTCINHDKEIKKYFERKIAEGKEYGVVANAIKFKLLLRMFAVIKRRTPFVKKADHLL

SEQ ID NO: 458887 - protein, 316 aa, unidentified
MESPQNFVGIDVSAKRLDVAVLPAGTHFAVAHTDEGIASLVRRLQELRPHIVVLEATGGYELSVAYAMSEASLPVVIMNPKVLRHFAKSTGKLAKTDKLDAQVLAHYAQAIQPPVRPLKDSEQMELATLMSRRRQLRDMIVMEGNRRRTSTPKVRGNIDQHLLYLRQLLEDLDREIHDAIRRTPLWHEKSEILQSFNGVGPKVSASLIADLAELGTAPRTQISALAGLAPMNRDSGQWRGKRTIQGGRPAVRQALYMAALVASRRNPVIREFYQRLRQAGKPAKVALTACMRKILVILNAMLKNRTYWNPQLPLAA

SEQ ID NO: 458888 - protein, 344 aa, unidentified
MQIVRIGLDLAKYVFEIHGVDAHGKTVVRKTLRRHAVSTFFANLPPCLVGMEASNGAHFWAKALSDLGHDVRLISPQFVTPYVKSNKNDRNDAEAICEAVGRPNMRFVPVKSAEQLAVQAVHRIRSRLVADRVRLVNQVRGLLGEHGIVVAKDIGNLRQALARIVGDDEDRVLNPLVRALMAELREELTELDARIAGYDRKIRELYRNSEICQRLGKVEGIGPVTATALVAAVGDRSSFKNGRQFAAWLGLVPKQRSSGGRARLFGISKRGDRYLRTLLIHGARSALGRVRDKQDPRSLWLGRMRQRRHPNIVAVALANKNARIAWSLLANDSAYDASLSVGAA

SEQ ID NO: 458889 - protein, 412 aa, unidentified
MQILYSRCCGIDVHKDSVYACVRRIGPGGGVRETVQVFGTMTPDLLQLADWLAAEGATHVAMESTGVYWKPVYYVLDEQFELVLANAQQLKRVPGRKTDAQDCAWIATLMQHGLIAASFVPPEPQRDLRELCRQRVQLTRQKAAVSNRIQKVLEDANLKLGSVASDVLGKSGRAMLRAIIAGETDPVTLAGLALGRLRKQLPRLRPALTGRVTEHHRFVLKLFLDEVEVVEEWVRRLEERIEAVLSPFAEAVRRWTTIPGVDRRTAQAVAAEIGTDMSRFPTEGHLSAWAGMCPGNDESAGRRRSGKTPKGSSWLKRALVQAAWAASHTKGTYLSAFYRRLAARRGRKRALVGLGHAMLGIMYHMQRTGTDYTDLGGDYFERRDADRLTRRLVRRLESLGLKVTLEPSPQAA

SEQ ID NO: 458890 - protein, 385 aa, unidentified
MTIQVPGARFVPREYDVFAGLDVDKKSMAVVFTDHAGAMRSLRMAHSSGLLLNYVRKHFAEQRVAFAYEAGPTGFGLHDELVTQAYTCVVAAPSKVPRARGERVKTNRLDGRKLSESLRGGQLHSIHVPTRPYRDLRHLVQLRDTHVRQLTASKLRIKSLLLYEGIAFPDPQEKWTAQAMRELQTLPCSETVRFKLDDLLNTLHFHFQAAASAIKQIRRYCLNDPELQQSINLLQSLPGIGWIVASHLVARLGDPQQITNGRQIAGFLGIVSSEHSTGEKENRGEITRSGDSRLRNKLIQSAWTAIKKDPELRTFYQRIYHRHPQKVAARKAIVAVARKLTTRIYVVLKEQRPYVMRPDSSIAPLTAEETVGPRERLVGAQNDQP

SEQ ID NO: 458891 - protein, 376 aa, unidentified
MGTPSAQTLVDMGVRKMFQELEEVPMTIVGGLDVHRQQITFEYVDDDGLVHWGQIRPATRTTLRSWLGKHCPDGDAEFALEGCTGWRYVCEELTAAGVVAHLGDPAETAAARGPKKRAKTDRADARLLRTLLLEGRFPESWIPPAHVVEIRTLGRLYCALMHERRIWQQRIHAQLFHQGCPPIRALLSQAGRKTLATAELSAAGRQYVDTALRRIDELSAEIEPLRTQLVSFARRQVGCQALQRHYGVGWLCAVIIWAEIGDARRFASSDQLVRFAGLDVTVYSSDTKRSPGHLSRQGSPELRWAAFEAAKSAARRGSPDHGYYHKLAAKRDGHNGKNPTLAVERKILRRCYHSLRELGDAVLALPVAERTHTAAA

SEQ ID NO: 458892 - protein, 440 aa, unidentified
MSCTDLGHPVPTTTRSEENIVFAALELSRKSWLVATSSPGEARISKRVVTTGDGPGLLALLAKLRGTAEQRLGRPVRVVVIQEAGLDGFWLHRFLEANGIESHVVDPASIAVDRRKRRRKTDAIDAEGLLRALMAWARGERRVCSMVRPPSPEDEDRRRLCREREALVTERIRHTNRIKGLLAGQGILDFDPLRPKHRERLDELRTGDGRPLPPCLLAEIRRQLGRLDAVVRDLATVEAERNGLVGLRSMDRPAQSPTEAAEPSGVPEAVTIPVAPETGSAVAPEGAAASAASEAAPAKAASETAPAEPAALLMRLKGIGPEFAAVLWFEALFRSFGNRRQVAAYAGLAPVPWQSGGIDRDQGIAKAGNPRLRKTMIQLAWLWIRHQPGSAISQWFARRVGTARGRVRRIAIVAVARKLLVALWRYVTQGVVPEGAVLKA

SEQ ID NO: 458893 - protein, 416 aa, unidentified
MNAVGIDVSSRKSTVAVLRPLGEVVCLPFDVTHDIAGLASLAEKLKALDGETRVVMEHTGRYYEAVEKALHEAGLFVCAVNPLLIKEYGANSLRRVKTDKADAIKIARYALDNWADLRDFTPMDAIRYDLKTLNRQFQLASKQRTASANNLIALLEQSFPGIRKCFDSPVRSDGTQKWVDFAHSFWHVDCVRKQPFAAFCERYRKWCKRHAYLFKLSNAEEVYALAKRAVVLTPKSKVVKVLVQEAANQLISISRSVEVYRAEMDRLAAMLPEYPVVMAMYGVGKSYGPQLMAEIGDVRRFERKQALVAFAGIDPMPNQSGDKNVRSNKSSKRGSPYLRKTLFNVIRTYLQCAPQDEPVFQFLNRKRAEGKPFYVYMLAAANKFLRRYYAKLRDYFASLDTLQPVAPIPTILKATL

SEQ ID NO: 458894 - protein, 416 aa, unidentified
MKKGQNTRGYERYMALDIHREYILVGAWNEAQDWVLTPRRVSTEKFPEWAKKNIRAGDIVVLETTTNVWTTYDLVAPLASRVLVANAAEVGEIANARVKTDKEDIKRLLKLLVGGIVPEVWVPPVEVRELRAFTSYRGRLVKTGVMIRNRLQSLLHKHNLMLSEAGLLDQAWWESQKNISSLEKMQIRQELVLLQEVEKLKVAVDEELQRQSTSSTWGKPALQIMQLPGVGFIVAMTVLAAVGDITRFENARQLVGYAGLGAGVHDSGKTHKEKKITKKGRRELRWAMVEAAWRAIRMSPFWKAEYEKRLDRMRKPNQAIVVIARKLLVAIWHVLSKEETDIHATEEELAYKMLLLSWSFTEDVRMGLTYKQFAKYALMKLGVETDITRFERRNIPRRLAPRDEVLARMTELGLTA

SEQ ID NO: 458895 - protein, 354 aa, unidentified
MPRHSKDTVAILGIDIGKNTFHLVGLNKRGAIVLRQKLSRRQLDARLANLPPCLIGMEACVGAHHLSRRLKALGHDARLMPAKYVRAFLKGNKNDYRDAEAIAEAVQRPTMRFVATKTAEQLDLQALHRVRSRLIGERAAIANEIRAFLLDRGIAVAQGLHRLRLALPEILATRTDVLAPRLLHILEDLIGDWRHLDQRIHTVSLEIQLLAQEDPACERLMTVPGIGPIISSATVAAIGTGDVFSKGRDFGAWLGLVPKQISTGDRTILGKISKRGNKYLRTLFVQAARVVLLRPATWERHGLQPWIEAAAQRLHHNVLAIALANKLARIAWSVLHHGRNFEVRKMSQATSQPA

SEQ ID NO: 458896 - protein, 387 aa, unidentified
MTDRTVNNLPAATHGEPVRCLFAIELSTKSWVIAFNTPLSEKISRRTLTGCKWKRLLELIEQVRARVSRETGRTVEVVSCYEAGYDGFWLHRQLEAHGVRNYVIDPASLQVDRRARRAKTDRIDTERLLRSLMAYLRGEPKVWSVVRVPSVAEEDARRLHRERDRLVSERVQHVNRIKGLCALHGIYDYNPLRPQARARLEQLRTTQGGALPPRLNSEIKRELQRLQLVVEMIATLEAERDAIVDDEASTHVNAKKIQNLHKLKAIGPEFAAVLVGEIFHRDFNNRRQLASYVGYAPSPFQSGNVAHDQGISKAGNRKGRTTGIELAWLWLRYQPDSELSAWFRARVGTTKGRIRRIAIVALARKLLVALWRYLETGLVPRGAVLKV

SEQ ID NO: 458897 - protein, 354 aa, unidentified
MEHTRFVGLDIHKERISIAVAESGRSGAVEYLGEISNDPVAIGKLCERLGRSGKTLTFCYEAGPCGYGVHRQLTSLGHRCDVVAPSLIPHKSGDRVKTNRRDATMLARLHRAGELTPVWVPNADHEAMRDLIRLRSVVRQIVTRARQHLQGFLLRHGRKHGRGTPWRMAYRRWLSTLAFEHPAQQVAFQDYVDAVMDAERRLQRVGEQIFSLLPEWNLRPVVDALQAMRGIALINAVVLVAEVGDFTRFSNPRQLMAYFGLVPGERSSGETIRRGGITKTGNTHARRALVEGAWAYRMKARIGRHKVDRIDALPKIIRDIGWKAQVRLCTRYRRLRARGKTANVVNAGEPSWTL

SEQ ID NO: 458898 - protein, 334 aa, unidentified
MVRYVGMDVHREFAQLAVVEDGIVRDEGRIAVSPEALRQWAGGLRADDEVALEATGNSDAIATLLTPLVGRVVVSNPSKTRAIAEAKVKTDKVDARILAQLLAADFLPSVWLPDDRTRRLRRQVTRRAHIVRTRTRIKNQVHAVLARNLCPTPPVSDLFVKKGRHWLSCQDLPADEAATVAALLRQLDFHAGELALVDRELAIEALSDPVVARLMTIPGIDAIAGISIVAAVGDFTRFSDPDKLVSYLGLNPRVRQSGNSAPVHGRIAKTGRAHTRGVLVEAAWSAVRAPGPLRAFYRRVQARRGFPKAIVATARKLTILAWHLGQVRAGGVRG

SEQ ID NO: 458899 - protein, 326 aa, unidentified
MWYLGIDIAKAKFDVCLLHEEKQEKKVFKNNEAGFEELRCWLEPWSKAEGKIVMEASGNYGKALLRYLAEQGYWVAQVNPARIKGYAQSRMLRNKNDRLDAALIAHFAKTQEDLRHWEALSEEEESLKEMVRHLNDLKASQQQEKNRLEAQPSSAKVRESLQKHLAFLEEQIKDLEKLIRQHVNQYPDLKRQKDLLTSIPGLGESSAFQMMAECGNLTRFEDVRELVAFVGLHPQQAQSGSSLHYTKGISRMGPASLRAALYMPAIVAKRHNPILKVFADRLKASGLSGKEVVVAVMRKLFHLAYGILKSGQPFDPHFLAKMALAS

SEQ ID NO: 458900 - protein, 388 aa, unidentified
MEPASIHPTAVRTDLGAIFVSLELSRSTWLITSLSPGSGEKMSKHVVAGGNVAELLDRFEQLQQKARLRTGKLFPIVTIQEAGLDGFWIHRVLEAHGIESYVVDAASIATSRRRRRAKTDKIDGEALTRTLLAFKRGEPRVCAMVRVPDPKDEDRRRICRERKILIAERVRHVNRVKGLLFAQGVSGYQPVRKDRRQRLEELQTGDGRELPKHLKAQINRELDRLELLLEQIAAVESERNSLLSMDEQPAVEATSPAAMLLSLKGVGAEFAAVLWTEALSRHFDNRRQIAAYAGLTPTPWMSGTIDHEQGVSKAGNPRLRTTMIQLSWLWLRNQPASALSRWFVDRVQSNGGRLKKAAIVALARKLLIALWKFVTAGVVIEGAVMKTA

SEQ ID NO: 458901 - protein, 472 aa, unidentified
MQERNAIGIDPDARGFVCAHVRASETKVVTRGYLVTDADLKSFLAWARGEGDVIIAIEGSNGWSRPLEKVLREARVVFYSVKPSDTNQFRKAVMGQNKNNKKDAESVARYAMALEGQGKLDQYRRVWFPDMELQLLTRRHRSVTEQLTAEVNGLWKELRYASPDLYLALGGKNPEVECDPKMLKNQGILNLLTSVPDVGQWKSLSDEQILEAMGGGDYKGRRSLIGELRKVMDSFQPTSEPIALLLHTSAQHIQMLKGVLRDIEKTLEKLTAENAAVQALRDIRGIAVKTATRMIAEIIDIRRFAREDSLACYSGFGMREYSTGQTTNMIHSELYNHRLKDSFMTAARRVVQYNPDSHIAGYHRNLIKGGMSELEATKRVARALVRVIYRRLSAKAGRTSEAQAPKGEKYQEAGESGMASGLTRSGRSHMSNMPPSSQDNNTVMAASPVKKVIRTTRTTNRMRRTKISKKTS

SEQ ID NO: 458902 - protein, 340 aa, unidentified
MRIRKVARSGDRGKSPVPYDHYIAVDWSLETMAIGHMSRCDGHPRVFERPSDLKELKEYLTSLKGRTILTLEESGTAHWLYVELLDCAERVMICDPFHNRLLCHGPKTDKIDAGKLCELLRAGLLKEVYHSDNGLYELRTLVSAYQDVVSAGVRAQNQRKALTRDHRDRGKSASFIGGILQENIDLYRRSKQQYERRLADVARRNRLVRYQKEIDGIGTIGAVKIVATVVDAKRFPHAGKYLSYCGLVKHEKFSGGRSYGRRKPRYSRVLKSVYKTAAMVALQTAGPIREYYDHLLSRGVAERNARNTVARYIARISYGMLKSGTHYEPYRWRGRVQEAM

SEQ ID NO: 458903 - protein, 362 aa, unidentified
MDDATTPICKDKVTVGLDLGDKYTHICVLDSDGEVCEESRLRTTPMALRRRFAPMPRARMVLEAGAHSPWISRLLKECDHEVYVANPRKLRLIYQNDSKSDRVDAQYLARIGRLDPALLAPFQHRQADTQTDLALIRSRDVLVRSRARLINHVRGAVKSQGGRLSTCSSATFAAKALPDLPAQLEPALDPLLEVIATLDEQIRSYDRRIEELAKERYPETALLRQVAGVGALTALTYVLTLEDPARFPDPRAVGSYLGLRPRRADSGDLSPQLHITKAGDEMLRRLLVSSAHYILGPFGPDTDLRRWGLALAERGGSRGKRLALVAVARKLSVLLLRLWATGEVYEPLRNSAGHGGSLPCSA

SEQ ID NO: 458904 - protein, 403 aa, unidentified
MNAVGIDVSKGKSMVAIMRPFGEIVSAPFEIKHTASGINSLVELINSVEGESRIVMEHTGRYYEVLAHQLSEANLFVSAINPKLIKDFDNDSLRKVKSDKADAVKIARYTLDKWQNLKQYNVMDELRNQLKTMNRQFGFYIKHKTAMKNNLIGILDQTYPGVNTYFDSPARSDGSQKWVDFASTYWHVDCVRKMSLNSFIDHYQNWCKRKKYNFSQSKAEEIYGKAKELVPVLSKDAITKLIIKQAVDQLNSASTTVESLRTLMNETASKLPEYPVVMAMKGVGTSLGPQLIAEIGDVSRFTHKSAITAFAGVDPGVNESGSYEQKSVPTSKRGSSDLRKTLFQVMDVLIKTHPQDDPVYQFLDKKRAQGKPYYVYMTAGANKFLRIYYGRVKEYLSVLPDPS

SEQ ID NO: 458905 - protein, 339 aa, unidentified
MVHAGVDLHKRSSQLAVLMPDGEVTQQRLENDPTRLEQFFAQVPRGAQIAIEASGTRWWFVDLVERLGHHAVLSNHKQTKAIAAARLKNDRVDAERLALLLRGDLLPTVWIPPAGLREARELVRHRVSLVWVRTEIKNRLLALLSRRNLQPTSSKRWLTVRGRQELEALPLGAIPSTVRADCLALLRVLDEQIRRLDHELVERWGADPRVQRLQTIPGVGPFTAILLILELGEIQRFPSAKHLASYVGLTPRVQASANRVRMGHISKEGNRLLRWALVVAATQAARRPGPLRAWFRAVQQRKGLKIARVALARRLAEVVYQIWKHDMDFVTLVCGGVRR

SEQ ID NO: 458906 - protein, 355 aa, unidentified
MKGELRNKKVLVRGKEVFIGVDVHKESWHVTARTEGEEVFHGGIPSQYPAFRKLLDHFKDCRIKVAYEAGPCGFWLYGRLTEDRIETIVVPPSLIPIESGNKVKTDRRDSRKLARLLENNMLKRVYVLNEEDRVDRELLRTRRQMVEHRNDVARQIKSKLLFYGIRSPFAPRYGWGQNYLQWLKGMELPREGLRACFESLIELYEYLSDQLMKMNQRVKELSQSLKYRQRLKLLCSIPGIGTLIGMEILVELPEMERFKSGDELASYIGLTPSEYSTGQYVRQGRITRCGNKRVRTCAVEGSWILITKDPLMRLRYNKLKAIKGAKRAIIAIARKLIIRIRRILLNKEPYTVGVC

SEQ ID NO: 458907 - protein, 419 aa, unidentified
MSCLTGPAGAHPPGRKGSTIMANEDRSIGGIDSHLDTIHVAVIAANGREVDDQEFPTTTSGYRRAVAWLAEHGPLRAVGVEGTSSYGLGICAALTDAGIKVVEVNRTRPAERRRQGKTDQLDAYRAARSVLSGEATTDPKSASIEPLRALQVARRSAVKSQQAAGRQLGALLVNAPVRLRDRYRDLKVPKLVAALANTRPGQVGDPDDADVLAALRSLARRHQALAEEISSLQDRMAARVTAANPALLSIKGVGAVLAAQLLITAGDNPERLRSSSSFAALCGTAPIPVSSGRTDRHRLSRGGDRAANCALHQIVTVRMTTDARTRAYRDEHLARGWTKKAVYRSLKRAVVREIFRALVGRYDVPDHRDLRPARQTKNLTLAAAATCLHVWPSALSELELGTRRDDGLANIYRDWLLAA

SEQ ID NO: 458908 - protein, 344 aa, unidentified
MTQIKRIGIDTSKAVFTLHCINQADQPVLRVNLRRSQMLPFFKKHLSAEVAMEACASSHHWARKLTALGHNVRLIPPQYVRPFVKRAKNDRNDAEAICEAAGRPGMRFVLSKSAEQQAQGMVLKVRETLVGQRTQLVNALRGHAAEFGVIAAKGISRVTSLLEAIEAETTIPLEAREMLALLGQEIEHLNTRLKEIETKLTAMHKANAISQLLATIPGIGPIIGLTLAIEVDPSAFESGRHLAAWIGLTPKEHSTGGKQRMGGISRAGHERLRQLLVTGATAVIKLATRPGNRLATEWLLKLLQRRPRKLAAVALANKMARIAWAMMTSGEAYRHQSAAGAVSA

SEQ ID NO: 458909 - protein, 347 aa, unidentified
MTNSKAGITGGVDTHADAHVAAALSSTGGVLGTQSFPTTIAGYRRLLAWLRTLGDLDRVGIEGTGSYGAALARHLTEQGISVIEVGRPNRQLRRRQGKTDVIDAIAAARAVLSGEARATPKTHDGAVECLRALRVVTRSATKARTQALNQINQLLVTAPEDLRDRLRGLPRRELLATCAAFRVREDDDSLPGVTRLALRELAQRVDQLDDQLARAKTRLSRITAAAAPRLLAITGVGPDVASTLLLTAGDNPDRLHSERSFAALCGSSPIPASSGKTNRHRLNRGGDRQANAALWRVAMVRLAVDPTTKAYLARRVAEGKTKVEAIRCLKRYIAREVYNALPAPALA

SEQ ID NO: 458910 - protein, 351 aa, unidentified
MKTFYAGLELATTDFVICVVNQKGKVVFKREGKSLEAEILKAASEMSRQCQGDIILHVEVGDLVNWGRRLFKPFVKEIVVSVPRENHWIAHDPHKSDQHDANKLATLCRTNQFKKVFFHESEERREFKMVVQHYEEMTRETTRIKGLIKARLRAHDMIRKDSTVFHPDHREAVLSQIKGEVSRECMIQLFCRLDSAKELRQRALDSMKKMSKRFPEVKLLMGIPGIRIINACRFVAYVQDPSRFPTAHALWGYARLGVVQPTSNGRPIGPKHLNQAGCGTLKDISHKTFRACQRRSDNNLFKRTYNESLERTHNDSHARLSVQRKVLAVMRAVWMTGTPYRDDLGWAKAAA

SEQ ID NO: 458911 - protein, 411 aa, unidentified
MTKEDFIYVGIDLHKETHTAVMIDCYNQKLGEITFPNRPAAFPKLVTKVKKCNTDGKEVVYGLENAYGYGRALAVWLIDKGYLVKDVNTAISHRQAKHRGAMYRKSDSDDAKAIALATLNMLDKLPDACPNDAYWSLGQLVHRRDNIMKQRTRLVNQLHEQLCIAYPSYKQFFNDISRPTALYFWEHYPSRKYLKGKSVEDLRTELVPVSHNRCSTKNCEKILDAVASDKVKNNAYQDARDMVTLSIVSDLQHYDSQLAEVDKMLEQMYKMLGCTLTTIPGVNVITAVKILAEIGDIKRFSNANKLAQFAGIAPLHLSSSGKGKDVATKQGNRRLQATIYFLAIQMVQISSKGTPRNPVVRAYYEKRKAEGKTSQQALICISRRLISIIYGMLKSGTEYRMPVMENTGETV

SEQ ID NO: 458912 - protein, 340 aa, unidentified
MSEITTIGLDLAKHVFQVHGIDAQGTTVLRKRLRRGQVLAFFSRIPRCVVGLEACATAHYWARELGALGHEVRLMPAQYVKAYIKRNKHDAADAEAICEAVQRPTMRFVPVKTAEQQATALLHRGREQLVRQRTMLVNALRAHLAEFGIVAAQGLRNVGELIAIVRDDGDTRLPDVARQVLQVLADQIEQIETAVAGLERQLLAWHKTNPVSQRLASIPGIGPIIATAIATTVADPKVFRSGREFAAWLGLVPRQNSTGGKTRLGGITKRGNRYLRRLLINGASANLLRSKATKADPWVIGLRRRRPPLVVAVALANKTARIAWAVMLREKEYQPRAMAA

SEQ ID NO: 458913 - protein, 326 aa, unidentified
MGKSITDLSSVTTIGLGLDLAKHVFQVHGVDASGRVVVAKAVRRNKLMQFFASLPRCVVGLEARGSAHHWARELIKLGHDARMMPPAYVKPYIRRQKNDAADAAAICEAVTRPSMRFVGVRSLENQAALMRHKAREMLVSQRTQLLNGLRGHLTEVGVIAAQGPRHARELAELIAACDETIPFEVCGALAPLVVQLRTLDEAIARLDRTITKLAQRDETARRLMSIPGFGPITASAMAATIQDTSSFAGPREFAALLGLTHKQNSSGGKQKLGRISKMGNRNLRKLLVVGAHAVLLHRKRSAASPRTSSRARPRRGRTGGEVKNAS

SEQ ID NO: 458914 - protein, 547 aa, unidentified
MCGKAYHGLVLLFLSEVKLIITPDPQTPDYGVNTLAVLAEGEKLYIGIDVGKESHHAGLISRSLLDKHKRFDKCPVTNFPNTREGFEALLEAVKAYAPLERCIVLKERTGHYGHALGEYLQKQGITVYTMHVYKRGLKNKTDKRDALNLANTAYTQLELGQQPGDSMKAIRHEVLASEAARKLRVLVQRHAELSKDITIRRNRLTSIADEIFPELTQVFVDPNKATALNIRSKFPTPADIAAASLDDLCACRESKRPSKENLKRLKDELALQSIGIKDSSRLYGLILEQTQLITELRIMQGHLETLKTEIEQIISESREGKILMSIPGIGVFGAAGIVASIGSIAKFESPARLRAYCGWSPKSTQTGKTKDAMTLAKGGNKILKQAIFFATFQAIKEDTELKAKYDKLVVRKCNLDMRTGKYTGKMKCVGRIAGDIVTLIYVLLRKDYDLLQSLPPGATPPEPTLYDRELHKKHCLRGKEDETPSVVATKRSEKTDRIYELLEQNPAIKVGELAEMAGCSRKTAGVARKQWREENLLKQQPAEAAKE

SEQ ID NO: 458915 - protein, 362 aa, unidentified
MRKSIFVGIDLGDKNSVAKIAVDREKSERLGFVNTHSGRRRLFREVKLRAQRAEDAIILMAYEASACGFVLRDEAEVEGIHCEVLAPTKMEKSVEQKKHKNDDRDAEDVLERLRASVLAGNRLPIIWVPSLQMRDDRELTRSRNDLVEKTTQIKAQIQMLLKRVGMEKPSDIDGNWSKSHRHWLESVSESHFLGSGTRQVLGSLLRQLTFHEQETQLMEKPIYELAAEARYKPIVAQLTQVKGVAIIGAMTYATEVAYAGRFKRGRKIGKFSGLTPTSHESGQQSDHKGHISRQGPARLRKMLCQASWVHIRYDEKAKDFYNRVVERNPKRKKIAIVAVMRKLAVCLWHRMRQAELAMAQPV

SEQ ID NO: 458916 - protein, 341 aa, unidentified
MLIIGCDYHPSVQQIAWADTATGECGERRLTHGAEAEQFYRDLKQKAVRVQVGIEATGHSRWFERLLAELNFEVWIGDPAQIRAKQVRKQKNDRRDAEHLLKLMLENHFPQLWVPTPEDRDVRQLVLHRHRLVQMRTRVMNQLQAIAMNEGVRRKRGLWTRRGRAQLEGLQLPPWSSRRRQELLELLDRFNPSIDELTKAIEQQAQRRPEVERLQTHPGVGPITALAYVLVVGTPERFACGKQVASYLGLIPCEDSSADHWRLGHISKQGNALLRYLLVQSALSAAHAEEEWQRKYVHLAMRRNHAIAQIAIARKLAVRLFWMWRRGWDYEQLKKFGSHAG

SEQ ID NO: 458917 - protein, 340 aa, unidentified
MDEYVGRQYVGIDLHRRRSVIVRMTPEGERLGAAVRIDNDPFELARQVASWGESPEVVLEATYGWYWAADVLTEAGANVHLAHPLGVKGFAYRRVKNDERDAADLADLLRMGRLPEAGGAPPDVRGLREAVRHRCKLVALRSGLKAQVHAVLAKQGVRVPMSDLFGVAGTQLLDELALDAPFHARVLSLRRLIDAYTFEIDVLAKRTAGHLTRHPGFQAVQTIPGVGPVLGAVFVAEIGDVTRFPRAEKLCAWAGMTPRHRESDTKIHRGRITKQGNPLVRWAAVEAVQRLHGGAIGRTRARLTERRGANIATVAAARKLLTLVYYGLRDGHVRCLTRPA

SEQ ID NO: 458918 - protein, 338 aa, unidentified
MKTIKQVIGIDVSKDTFHVCFGSIDETQSIKIVKQSSFNNNEKGFKQLLSWKQKNLNSDIYLYYVMEATGVYYENLAYFLSEKGEHISVLLPNKSKSFSKSLDIKTKTDKVDAAMLCRIGLERVLPIWKIPTVLMKQIKSLCREYKSLKVDGAKIKVRLHAYKHSYKPEKRTISRLKQQLSLIEKQIMMVEKEIQCYIIKDEALQKRVNNIQQVKGLSMITIITVIAETNGFASITSAKQLTSYSGLDITMNQSGQFYGRTKISKKGNSHIRTALYLPAMSAVRYNIRLKQFYENIMQKHKCGKVGIVAVARKMLVLIYTLWKNETIYDPMLNVEKIY

SEQ ID NO: 458919 - protein, 334 aa, unidentified
MALNTLAIDIGKHSFHLFGIDDDGVIVSRKVSRLKLVATVDRLDPKIIAMEACGSAHHWGRMFQEAGRMVRLINPYFVRPFVRGSKNDATDAQAIFEAAGRPTMRFVPVKSLECQDLQSLHRIRDRLVHNRTSLINHTRGLLAEYGIVLPQGATRFTLQVRQAVVEAELSDLARELFEELLDQLGDLDRRIAHIDKHLIAICRDKAACRRLVGIPGIGPVVATALLAAVDDGRQFGSGRDLAAWIGLVPRQYTTGGKPRLGGIGRRANHYLRRQIVHGARAVMSQAGRRSDPRAEWMKAVAARRGFNRAVIAVANKMARAAWAILVRGEAYAAA

SEQ ID NO: 458920 - protein, 361 aa, unidentified
MFTERTSVGLDVHARSVAAAAIDGVTGEVRKARLRPGQEVTDWVRALPGPVAVTYEAGPTGFGLSRELTAAGFRCEVAAPSKMSRPAGDRVKTDARDAMHLARALRMDDITSVEVPSVDREAARDLVRAREQTGADLMRARHRLSGLLLRHGIVYSDGSKWTGQHDLWLRRQALPGLSQAPTRATFDADYEAVLTLTARRGRLDTQIRALAADSEFTPVVHRLGCLRGIGTLTGFALAVEIGDWHRFTGNTIGSFVGLVPSEHSSGESRSQGPITKAGNTHVRRLLVEAAWHHRIRYRVGKTMLDRWDLAPAEARARGHAGNQRLHTRWVRFTDRGKLPQIANIAIARELAGWCWSLAVLE

SEQ ID NO: 458921 - protein, 360 aa, unidentified
MSFNGTSVGLDVHALSVVAHAVDEETGRIERARLCPDHGEILDWLHRLRAPVRVAYEAGPTGFGLARTLAAAEIDCVVAAPSKLIRPGGDRVKTDARDAAHLTRLLRLGEITAVTVPEADVEAVRDLVRAREDARADLMRVRHRLSKLLLRHGRVYSGGQAWNGVHETWLRRQRFDDSHTTAAFDHHFDAVLSATAARDRLDEQIVTIAASPRWADPVDRLGCLRGISALTGLALSVEIGDWTRFTGSSISAYVGLVPTEYSSGTSRVQGSITKAGNAHVRRLLIEAAWHHRAAYRNPGPTLRARWAKVDPALKARGHAGNRRLHQQWCRFNERKKHHVVANVAVARALAGWCWSLATLN

SEQ ID NO: 458922 - protein, 342 aa, unidentified
MSNLDSCGIEVSAKQLVIRLRRQGDLEPLRHFTNTPEGHEMVVGYLRRAGRLVRVCLESSGLYGLDLARALSAAEGMEVMVANPRAVRHFAHALMKRSKSDRIDATVLEEFAARMPFQAWNPPSQAALALHALARRLHELVEIQTAEKSRQHAAGLSETIPTAVRRDLARSLRAQQRAIERLTVQARKLIDKDAELKERFALIDSIPGVGETSAVQILGELAPLAADLDACQWVSYAGLDPREYTSGSSVHKKPRISKSGNKHLRHSLFMPALVAVQHDPYLGAFYQHLLAKGKLKMQALVAVMRKLLHAIHALFKTHQPYDGSKLYPAMRTKEVPCAPVAC

SEQ ID NO: 458923 - protein, 343 aa, unidentified
MKITTVGVDVAKKFFQVHGVNEHGTPVLRKQLKRRQVLPFFANLAPCLIGMEACSGAHHWGRQLQKVGHTVKLMAPQFVKPYVKTNKNDMADAEAICEAVRRPTMRFVPMKNCEQQAVLALHRARQGFVRARTAQANQIRGLLEEYGIIIPQGICQISKQLPDILEDGENELPGLFRRLLQRLGEHLKRLDLQVSELDSQILLWHRQHEGSCRLAQIPGIGPLTASALVASIGDAKSFENSRQLAAWMGLVPRQHSSGGKTLLLGISKRGDRYLRTLLVHGARSVLRVAERKAGYGTSWIAGLVKRRHPNVAAVALANKNARIVWALLRHEQNYDARYLAIAA

SEQ ID NO: 458924 - protein, 320 aa, unidentified
MKELTAGIDVSKETLDISLYNGGKHDNITIANDKKSFVKFLKKYSSDDLQIVMEATGIYHLRIALEAHDLGYFVSVVNPLIIKRYGEMKMLRAKTDRVDARLIAEYGYEQSPKEFTPHSDDRMVLFQLLKAIEDLYKTRTEFRNRLESYTHGYPVSKEVGKTYRSMVQKIDREIERLKKKLQDSLDTHFPDQSSKLTSIKGVGKMTASMIMAFYGNFEQFETAKQAVSFAGLNPHPRQSGTSVKRGSSISKRGHALIRKTLYMSALSAKKHNPVYREYYERLLASGKSKKVALVAVAHKLLRHIFAIVKYDREWDPQYAK

SEQ ID NO: 458925 - protein, 409 aa, unidentified
MRLFVGLDVSSFDMKVCFLNGEGEKLDSFSVSNDLPGAQVLKERLLQCTTNQEVEILKIGLESTSVYSFHPSMFLHHDEDLKRFGTKVFLLNPKQVANFKKSYSDMNKTDEIDAFVIADYLRFGRNQMSIVKESQYVALQQLTRSRYQLVRMLTKEKQHFLQHLSYKCNTFSQKVDSSIFGNAMMELFLEKFSLEELADMPLEELAEFLQEKSKNRFGDPKCVASTIQKAVRTSYRLDKVVEDSIDILLGTSIEIIRTYQKQIKELEKSIKRIMAGLTQTLESIPGIGPIYAAGIIAEIGQIERFDDETKIAKYAGLYWRTYQSGRFTAENTSLSRNGNHYLRYYLVEAANSVRKHVLEYQEYYAKKYNEVPKHQHKRALVLTARKFVRLVDALLRNHQLFTPERCVKV

SEQ ID NO: 458926 - protein, 343 aa, unidentified
MTLHMLGIDIAKNTFQLHGADSAGKEVFKKRLPRHKLAAYIANLSACTIVMESCGGANYWARVFQGSGHTVKLISPQFVKPFVKTNKNDANDALAIVEAASRPSMNFVPIKQVEQQDIQSIHRIRTRVVKSRTALINEIRGLCQEYGIVVTPGAARVKSSLCIIIADSENELTPSFRESMQDLYEELVWTEARLKKLDVKIRQLCRLDENCKRILKVPGVGELTATAIVAAVPNPKEFMNGRHMSAWLGLVPRQSSSGDKQVLLGISKRGDRYLRTLLIHGARAVLSHHKDAANDYSRWVARKKSTLSHNKAAVALANKNARIIWSMLNTGEEFSYGVQTGAA

SEQ ID NO: 458927 - protein, 422 aa, unidentified
MDILYERVAGLDVHKDTVVACVRIAADGKTKRECRTFAATTEQLVELRAWLEDCRCTDVAMEATGVYWMPVFRILGEGDFELIVANAAHIKNVPGRKTDMNDAMWIADLLACGLIKASFVPNEEVQELRALTRTRKQLVREQTRHVQRIEKTLAEANIKLSSVISDIMGASGRRMIQAMIDGVRQPRQLAELAGKQIKATPKELYDALHGRLTDHHRILLAIHLKQWDGLDETIHKLDVEIAQRIEGMEARTAGKTPFRALIGLLTTIPGVSAVAAPAILSEIGPDMSRFPTAGHLVAWAGLCPGQNESAGKRKSSRLRKGAPWLKTMLVQCAWAAKRAKDSYYRAQFFRLQSKRGPQKAICAVAASLLTAIYHILKDGTEHHDLGLAYFDRRPTEVKAHHLVARLKKLGFTVQLQPIAEAA

SEQ ID NO: 458928 - protein, 394 aa, unidentified
MIYAGVDIAKTDHVIGAVDERGAETCRPMPFKNTEAGLERAVAWLEGLAGSPSDVVVGMEATGHYWMACYSFLVARGYSVAVINPMQVKAVRKLKGLDKVKNDRIDAWLIAEALRIGQYDETRLATDEVASLRSLSRYLQSLRGMAAELKTQCVCLMDAHFPEYAGIFSDMFGAGSRAVLSKSPPPFELARRRADSLARDVAEASRRGGKSAGYAARIKAAARSSIGVRLGQEAASFQVKSLIRQIEFADSECAKVEARVRALLDEVEPLVLTIPGVSYATGAQIVSEIGDVSRFRNASALVSYAGLNSSVSQSGQFDSGGGPITKHGSPYLRRALWLAANRARQYDPGLRAFYDKKRAEGKPHRVAVTAVARKLCHIVFAVMRDQVPYDPGRE

SEQ ID NO: 458929 - protein, 341 aa, unidentified
MNITHVGIDLAKHVFSVHGVDQRGRCRLRRDLRRTQLLKFFANLNPCVLGLEACASAHYWARELGKLGHEVRLINPRFVIPYRKSDKNDHNDAEAICEALSRPSMRFVPVKSPEQQAVLSLHRARALLSSQRTALMNQMRGLLAEYGLIVAQGPSALRTRVPEILEDADNELPDIARETFAELYERWLDHERRLTDYDRRLQRMAHQDPATQRLLQLPGVGVITATALVASAGDLGVFRNGRQFAAWLGLVPRHYASAGKRRTGRITKRGDAYVRTLLVHGARAALRTAHRREDALGHWALAVKERRGPNKAAVALAAKHARIIWALLTREVDYQPRLVSA

SEQ ID NO: 458930 - protein, 370 aa, unidentified
MKTKNTTPSVVSTTTPTPATMVPGGFTLGLDLGDRLHHVCVLDAAGQLVREASLPNTRPALAQLLADFPRATIALEAGTHSPWISRYLTGLGATVLVANPRKLHAISRSERKCDRRDAQMLARLARVDPALLHPIQHGTAQAQHDLLGLKLRDALVRTRVNLINAVRFTLKSLGQAVRNPSSESFHKTVLADIPADCLPVVQPLLAVLAQVTEQIKTMERDLVQRSKKDYPATQRLQQIVGVGPITALCFVLKIGDPQRFSRGRDVGAYLGLCPRRDQSGGTDKQLRISKCGDGLLRRLLVSAAHYVLGPFGPACALREHGQRLTGTGSAREKKRAVVAVARKLAVLLLSLWKHGTDYEPRVTALVMTPA

SEQ ID NO: 458931 - protein, 466 aa, unidentified
MKPFYMGIDVSKGYADFMILNSKKQPVTQSFQLDDTFDGHQSLYKMLGRFLTEHPGSALFAAVESTGGYENNWYNSLIEFQGSLNIQTARLNPLGVMHNSKADLKKNTTDKISAQNIAEYLIAHPEKVVYQKEDQLSGLRKQWGFVKMLTKQSTQFLNQLNTLLYTANPELLSYCQDGVPGWMLALLVQYPSAARLKNAHAKTVGNIPYVSRMKAQQLIANAKRSVASASDATTEQLIVATTRQILHLKKTIAEQTKRMIKECSVSEIELLKTFPGIGDTSAIGLLIEIQTVKRFASVKKLSSFFGVHPVYKVSGDGAGGFKMSKQGRKEPRQILYMVALSAIRYNPLIQKIYEKHQQQGKHNMAAVGICMHKILRILYGMLKHNAAFDPQIDIRNRQRNVPVKNDTPVKNTNRRFQDYDQKAPVTRRQRKKRLERERPHNEGNIESGVTTPVPLADIIAGILPQL

SEQ ID NO: 458932 - protein, 354 aa, unidentified
MRIVCALDVHRRQITYAIVDVGSGELSRGRITPATRESVREWLARFDSLHDVHFALEGTTGWRFVAEEVARAGHRAHLADPAETAVKRGRKRRAKTDRADCDLLLRLLSARELPESWIPPAQILELRTRVRLRKTLVDERTAWQQRLQAQLFHQGVPAGVRPRTRAGREALASVELSPAGRELVALALGMIDRIERELEPLDRALSLYARRQPGCRELITRLYGVGPVTATAIVAELGDARRFGCSDDAVRHCGLDVTVHQSDRKRAPGHLSHEGPELLRWALFEAAQQACRPASPDYDYYRQVARRIDHNRACLSVARKLCRRAFHILRELGAEALAPIEPAPPGEEVTPAAA

SEQ ID NO: 458933 - protein, 447 aa, unidentified
MPELPKPAEPEFVAYIGIDWGDKKHAWALQVAGSTKVEQGEVLHTPEAIQEWVMGLRHRFPTGRLAVALEQSRGPLVFALSKYEHLVLHPIHPTSAADYRKIFRPSGAKSDGPDAAILLDMLVRHRDKLRPLHPDTPETRTLQLLVEDRRQLVNERTRLSNRLGADLKSYYPQVLQWFEDPYAPVALDFLERWPTLEQLQKAKPATLQKFLQTHQCRDEAKNHARREAMQTAVAATTDIAVVTAGCAAARAAVRLLRDLSQSIREYDRQIEKLAKAHPDFAIFDSLPGAGAVLVPRLIAAFGTQRDRYQNAAELQRYSGIAPVTEASGQQSWVHWRWSCPKFLRQTMHEWAAQSIQHCDWAAAYYQVQREERGKSHHAAVRSLGYKWIRIAFRCWQDRTLYDDSRYEAVLRSHHKKATAQPNQPSQFEMPTQWISCGSFQKIALKNS

SEQ ID NO: 458934 - protein, 325 aa, unidentified
MQTSQSFFGVDVGKSEVVVAMHGAAKPLTRAVKNSTTGLEKWLQTLPRGSVLAMESTGGYERLLADLAYERGLRVYVLNPKALHHYAKSQAQRGKADRLDAVMIARYVALEHERLHRYEPCPEHIERLSQIQRLRKVAVTTRTRLRLSSDRHKHVGSQAQVQQALDALTQLADALEREMLDQIAAEPALADDFNLITSITGVGKLTGAALVTAFARIPFASSDAVVAYAGLDPRPKESGAYKGLRKLSKQGDAALRSLAYNAASSASRTAAFKPLYTALRIKGWASTQALNIIARKLLRIAFGVWKSRKPFDVNLFMASQACAKP

SEQ ID NO: 458935 - protein, 456 aa, unidentified
MGHARARKIPAQLVEDEEYQLRHERVAGIDIAKAKADVCTRLPPARNGGRRASRLEEVPATAREILALAGRLLADRVELVVMEATSDYWRIWYYLLEGAGLNVQLVNPAHARQLAGRPKTDRLDAQWIARLAEMGLLRPSFVPPPEIRALRDLTRTRLQLVRDRTREWQRLEKLLEGALIKLSSAVSRLARAKTARDILEAIADGQRDPRALAALAARQITGGREAVEQALEGMLLGGHHPRLIRIHLDHITFLDRSITAVEDEIDAALDAIPAAWGISADGVPSPDPGPDAAALTAAERLAEIPGVSPKLAIAIIAETGLDMTRFPSAARLVSWAGLAPVARQSGPRNRKPKKGQGDAYLKGYCTQAANGAANTDTFLGERLRRLSRRLGGNRAKCAVGRSILVIIWHLLSNPEARFADLGPDWHERKADRDRKIRAHVHQLRAMGLHVTITPAA

SEQ ID NO: 458936 - protein, 351 aa, unidentified
MDIIGLDLHQRESQLCICDADGTITERRIVTSRERFTAVLGDRPRAKILLEASTESEWVARHLESLGHEVLVADPNYAPMYATRSRRTKTDRRDARTLMDACQTRAYRLAHRLSEPRRHVRAELAVRDALVRTRTRYVALAKTLVRRDGLRVTSSESHLVAQRIGALSLSSALEAELQPLFTVLAPLNEQIAAADRRVATLAATDPVVARLATAPAIGPVTASAVVATIDDIARFRSAHQFEAYLGLVPGERSSGEKRHVGPITKAGNSRVRWLLVEAAWRLLRTKSPEAVALRTWAHGVAGRRGKKIAVVALARRLAGVLYAMWRDGVSYDASRIRGPRIAAAEVTARAG

SEQ ID NO: 458937 - protein, 348 aa, unidentified
MKVTTSGIDVAKSVFQVHGVDERGNAVLRRQVRRSQLLLFFSKLEPCLIGMEACASSHYWARKLTALGHTVRLMAPQFVKPYRKNDKNDGNDAEAICEAVQRPSMRFVPVKSPEQQAELAVHRIRRRLMGKRTALINQLRGLLAEYGLVLAQGANHVRSKLPALLESSSESLPSLAVELFRDLYEELVELEQRIGAYERRVERLYRGNPLCQRLGQLEGIGALTATAFVATVAHAAQFKNGRQCAAWLGLVPKQDSTGGKTRLLGISKRGDVYLRTLLVHGARSAMRHTPKRNDPKSRWVEQLRKRRGENIAAVALAAKHARILWALMVRGESSAQPASFDRLEQPTV

SEQ ID NO: 458938 - protein, 436 aa, unidentified
MLPTLNPHAAGIDAGSTKFFVATPAGAVTVFEAFTSELHRLRDHLVAQGVTTVAMEATGVYWLALYEVLEAAGIEVCVVNGAHVKNVPGRKSDVQDCQWLQQLHAHGLLRKSFVPAEPIRALRSYTRLRDDHVRQSAMHVHLMQKALDQLNVKLHTVISQLQGASGLAVVRAILQGERTPAKLAALCDERILKTKRAAVERSLQGVWKREHLFALGQALAGWEFCERQIAECDAQIAVQLQELTRDLPPAPPADSPKSGRHHVPQVPGLHGHLLSLSGGHDAARLPGLSAGNWLKLLSEVGTDLARWPNEKAFTAWLGLAPGKHQSGKTARRARRRPKTAAGQIFRLAAHSLAKSRYLALGGFYRRLKARTSAAIAVVATARKLAVLYYRAMRHGLAYVEHGLDRYEQQYRERQQRYLQKRATELGLILIPTPQIT

SEQ ID NO: 458939 - protein, 387 aa, unidentified
MPQPNDLSRSLVALDQNSTIIAVIEMSQSSWLVAGMLPGIERQPRKKLEPNPERLLGLLHRWRDEAVRAGRTITRIAVAFEAGRDGFWLARWLAARGIEAHVIHASSVAVSREHRRAKTDRLDTELLKRGFLGWLRGERGHCSMARVPTIAEEDAKRPNRERDCLVGERTRIVNRIKSTLARLGIRNFKPTLRKAAERLATVHTPEGMPLPPNTLAELHRDMARLGFIVSQIRQIEEARQKRLEQQHETGPHAMVRLLARIVGVGVETADMLVHEVLSRPMRDRRAVARYAGLTGSPDESGARRREQGLARAGNARVRRGMIQLAWRFLMFQKESALAVWYRARTADSRSGTRKTMIVALARKLIIALWRFVTIGEPLEGVVLRPAS

SEQ ID NO: 458940 - protein, 341 aa, unidentified
MNIITVGIDLAKNVFAVHGVDDNGKAVLVKPKVSREHLLPLLVQLPPCVIGMEACSGAHHWARLFRQNGHTVKLMAPKFVTPYRMSGKRGKNDAADAAAICEAVTRPNMRFVPIKEEHQQIILCLHRTRQGFVEERTATYNRLRGLISEFGVILPQKVACLRREIGAHLEDLPGYASQCIIDLLAHADGLDVRIGEYDRIIAKAAKDDARSKRLMERPGIGPVSASALLASIGGGHDFKNGRQVAAWIGLTPGQYSSGGKARLGRITKAGDPYLRSLLVMGARAVLAGLGDKQDGFSRWARSLQERRGYWKTVIAIAAKNARLAWAVLKYGEDFRLNPSAA

SEQ ID NO: 458941 - protein, 429 aa, unidentified
MPYRIAGIDVHKKMLAVVVSDVEIDSEYEFERKKFSSNPEQLRSLAAWLLEQEVEEVVMESTAQYWKPVWEALERYWKPIREKREGARRKSGTLHLAQALSNRGRRGRKRDFPDAERLVKRLVAQELTLSFVPDVEQRLWRTVTRKKYQLRCDRIRLQNQLESLLEEAHIKLSSLVSDLLGFSAQRMLKAIAEGETNPATLAALADKHLRATPEQLCDALGACTQLNPVYRRLLNLALEELRLIDDQIGRLDREMASLLGEHQDAVQRLAEVPGLGVDSAQQIIAEVGPSAATFPSQKCLSSWVGACPGDDETAGVNYSHRSPKGNRHMRRLLNQAANAAARTKGSIFEIVYRRSVPRLGHNQAIGAIAHRQCRLIWLILHQGVRYEERGPAVTKRSKQLRTWKMIRQLRSLGYRIEPANPQPSQAHAQ

SEQ ID NO: 458942 - protein, 473 aa, unidentified
MARAARRPGARQPHKRHSSRARSAPLAQMHLNAAGIDVGATEHWVAVPEDRDEEPVRRFGAFTADLYALAAWLQQCQIETVVLESTGVYWITLFEVLEERGFDVKLVDAHDARQVPGRKTDVKDCQWLQELHTYGLLHGAFRPEDQVCILRSYLRQRSMLVAMASRAVQHMQKALEQMHLKLTEVVSDINGKTGMEIIHAILAGERDPQRLASHRDRRCKHDQATIAKALEGHWRAEHLFALQQALEQYEFLQQQLQACEMQIEACLQTFVTHVDVDTPPPAPARQRRARQRHAPGFDVHGYLAAMTGVDLTQIDGIDALTALKVISEIGLDMTRWPTGKHFASWLGLCPGNKLSGGKRYRMRSKPTANRAASALRLAAQGLVHSHSALGAYYRRMRARLGAPKAITATAHKLARLVYSMLRYGTAYVDAGQQAYEQKYRDRVLTNLQRKARVLGYQLVHVADPGSAQAAATL

SEQ ID NO: 458943 - protein, 455 aa, unidentified
MSIHSTDPTTVPSSPVRVQVGIDAAVVANHHVCVREILGDGQVRLTRFTTPPTLAGLNALSARLGRHPGVVAVAEPTSMTWLALSIAMRQAGGDLSLLGARHAARLRGAIIGKDKSDVIDADVLATAGEVFTLTPLRPLSPAQLSLRRAVTRRGKLVVDGNRARRRLISLARWAFPDVWSAFAGSQPTAIAVLTRWPDLRALGSARRATLTGVVAAHTRAVPDVPARVEAIRSAARAWADFWDGHLDLDALAWEVGEHLHDMHEAQERIARATAQATGYWTDLYGDDVLLGSVPGMGPATAPTVRAFLGDGSAFTTAKAAASYVGMNPSTWSSGTVVQPSRAITKEGPAVLRLAFYQAAGGARRVDPQLAAYYRHLMVDRGHGHTKATVAVARKLIERTWTVLHRDRPYQLRDTDGTPLTRARAKEIARTYAVPPEVRARARARSAATHRSKLTR

SEQ ID NO: 458944 - protein, 415 aa, unidentified
MEDEGLRALHRRVAGIDVHRMLHVVTVLIEQPDGSMQRHTREFGGFKRDCRALAAWLAELGVELVVMESTGIYWKSLYAHLENAGVAAWVVNAHQIKHVPGRKTDMADSEWLAILARFGLVRASFIPPKDLRQLRLVSRYRRKLVTMCASQINRLHKILDDGGIKLGAVVSDINGVSATAMVRALIAGQSMEQMLDLARGALKRKHEELAASLQGDLSARHLFVLGHIDAHIQTLQREISQIDTYLLAAMRPYAWAHQLLQTIPGIDQIAAAMILIEIGDDMGRFGCAARLANWAALSPGNNESAGKRKSGRTRHGSLVIRFILCECANAARTTKSTLAAKYRSLMVRKPHKKAIVAIAHKMIRLIFLLLIRRQPYIDQHVDYAAMSAKKNAPRWIKQLKAIGRWPAPKPAAAST

SEQ ID NO: 458945 - protein, 385 aa, unidentified
MDEEVSPTTKNGDKHMNKTDKYIGLDVHKDTTVIAVAEGGRVGEVRVYGSIPGDLRSLEKVLGKLGGENVRLHVVYEAGPTGFLVYRRLRQLGIDCIVVAPSKIPQQKGVRQKTDRRDAEQLARLHRAGELRAINVPDEVDESVRDLTRARADAVHDLTRAKQRLKSFLLRQGYRYPGSANWSEAHQRYLRKLTLPLPALRSVLEEQLLAIDQATERVKRLDELLEVQIPKWRHYPAVQALMCLRGFQMTAAAIMVAEAGDVRRFAHPRGFMGFLGLVPKEETTGGSRKLGSITKAGNAQARWCLIEAIQSAYGPPKVSARLSLRQEGQPAVYKELAWKIQVRLHKRGWHLLHRGVMKAKVNVALARELAGFVWDLLRQVPTPEA

SEQ ID NO: 458946 - protein, 377 aa, unidentified
MHSENIAAYVGLDVHKETLAVAIAAPERLGEVRYYGTINNEAQAVRRLFQKLQGLYGNILSCYEAGPCGFGLYHQLTAMNIKCLVIAPSRIPKSPTDRIKNDHRDAISLARLLRAGELTPVWIPDLTHEAMRDLIRARAAAKRDSRVARQRILSMLLRTDKRYAGKHWTGKHRTWLANQSFSQPSQQIAFQHYCQSLEQIEDRILQLDQEISRLLPEWSLCNLVCQLQALKGVGQLIAITLVAELGDFSRFSNPKQLMAFLGLVPGEYSSGNSIRPRGITKVGNSELRRLLYEAAWSYRTPAKVGAWLIYYRPDSVTQYSKDIAWKAQQRLCSRYRTLTAKGKKSQVAITAVARELTGFMWDIALAAQSSFSQQKQN

SEQ ID NO: 458947 - protein, 336 aa, unidentified
MVTIGVDAHKRTHTLVAVDEVGRKLAELTVEATTREHLRVLEWAGQLPGGRRWAIEDCRLVSRRLERDLLGAGERIARVPTKLMAGTRKSSRTYGKSDPIDALAVARAAQREPDLPEARLDGDERELRLLVDHRENLVAERTRLITRLRWYLHDLDPALEPRRSSLTSTAALRRLDAQLIPLSGTLVRIARELVTRCLELTGSIRSLERELTDRTRMLAPALLAIPGCGAITAAKLVAETAYIRRFRSASAYARHNGTAPLPASSGSARHRLSRTGNRQLNAALHRIAITQTRIHPAAQAMLSRLHNAGKTRAEARRILKRRLSDVVYRALLADCP

SEQ ID NO: 458948 - protein, 328 aa, unidentified
MFYLGMDVAKAKLDCCLLLDEASSKRKTKVVNNTQSGIVDLLAWVAKQNVSPEELHIVMEATGIYHEQAAMALADAGVMVSIINPAQVKDFGRGLAVRTKTDGVDSVVLARYGALLKPKAWVPPPQEARVLQALLVRREAIAQDLQRERNRQEKADATDTPALIHKSLEEGIGFLVKQLAQLQKDIDAHIDKHSNLQKDRALLQSIPAIGPQVGSNILSVMHNHDFGSAEQLAAYLGLVPVERQSGSSVLGRARMSKAGPARIRAVLYMAAVVGTRYNPHVKAVYERLLARGKSKMSALGAAMRKLVHLCFGVLKTQQPYQHDYLKNA

SEQ ID NO: 458949 - protein, 365 aa, unidentified
MQSNRISFKGQKIYVGIDVHLKKWSVTVITERGFKHTHAQKASARELLDFLERRYPEGEYHAVYESGFSGFSTFYSLRDVGINCIVINPADIPTSQYEKVMKTDSVDSEKLAKALRAGLLTPIYIREKENLDDRAVMRIRKTAQAQLSSYKIRVKHLLHQNGVELPERFDRPGTYWSGSFIRWLKEEVVLLSSTRLSLDLLISQVLSMRRNVLDCTRELRRISQSDKYRERFALLLSIPGIGMIVAMCILTEIYDIKRFSNERQFASYLGLIPTCHCSGEKVSHGEKTYRGNKVIGPLITEASWVAIQKDQGLNAAYGHYCQRMKPHNAIIRIARKLSNIIFHVLKNNTRYEPHQWDKGRQKTCL

SEQ ID NO: 458950 - protein, 354 aa, unidentified
MTSTKYIGMDVHTESISIAVRNSLGKVVIESVIETKASTILQFIDGLRGDVRVTFEEGTWATWLYDLLKPHVTEVLVCNTRNNAVRNGSKSDRIDARKLSEMLYMNNVKSVYHGEHGLRMMKELARSYLTITKDLTRVMNRLKALYRSWAIPCTGNEVYAPRYRAEWLAKISEAGVRRRAEHYYQQLDVLRPLRQEVRRDLLVEAKKHKPWKLLRHIPGIGPIRAAILIAVMQTPHRFRTKRQLWNYSGLGLETHDSAQYHVAVGQLQRSKKPPMVRGLNKDHNHDLKDIFKGAATRVSSSRGPLHDFYENLLAKGRKPTMARLTLARKIAAITLIVWKKEVRFDANYLKPQAA

SEQ ID NO: 458951 - protein, 387 aa, unidentified
MTTRSNDMSRSLAAFDQDSTLVAVVELSKKSWLVTGLIPGVERQPKKKMEPDAEDLLRLLGRWRDEAVKGGRPITRIAVAYEAGRDGFWLARWLESHGIETHVIHSTSVAVSREKRRAKTDRVDAEMLLRVFLGWLRGERGHCSMVAVPTIEAEDARRPGREREALVADRTRIINRMKADMARLGVHGFKPHLRSAPKKLPSVQTPEGVAVPPNTKAELQRDMARLAVLREQIAAIEKARLERIENAPDNGPHAMIRLLARVLGLGIETADMLVNEVMTRRLRDRRAVARYAGITGSPDESGSRRREKGLAKAGNARVRRGMIQLAWRWLTFQKESALALWFKARVDGAPRLRKTMIVALARKLLIALWRMATIGEIPEGVVLRPAA

SEQ ID NO: 458952 - protein, 387 aa, unidentified
MSQASDLTRCFAPYDQATTLIAVIELSLSSWLIAGMVPGLARQPLKKMAPDEAGLLRLLERWREEAVKAGSVINRISVAFEAGRDGFWLARWLRTRGIDAHVIHSSSVAVSREHRRAKTDRLDTALLMRVFIGWLRGERGHCSMVAVPSIEEEDAKRPNRERENLVGERTRIINRMKSALARLGIRGFKPELRKAPQRLDTLSTPEGMPIPINTLDEFRRDLVRLALVREQIDAIERTRIAQLEAAPKTGPHAMVRLLAKILGLGIETADMLVNEVLSRNLRDRRAVARYAGLTGSPDESGKKRRERGLAKASNARVRRGLVQLAWRFLLFQKESALVLWFRARTESAAGVRKTKMIVALARKLLIALWRMVTTGEVPAGVVLRPSP

SEQ ID NO: 458953 - protein, 410 aa, unidentified
MNASDSKCLFVGVDLGDERFQVCVVEPTGASGEQRSFAHDAEGIGEAIAWLKSAAVERIAIAIESPCGAVVAGFLEAGFEIFSINPKQLDRFRDRFSVAGSKDDRLDARVLGDSLRTDPRAFRQLIAEPGWLVRMRQASRMEDELKQEQRRSANRLRAVLHEYHVELLALVPAADEPWFWDLVAIASTPALGARLRPKQVERLLAEHRIRRVSAQDVIERLRRRPVPARPGVVEAGSTHALILVPRLHLLTQQLTQCQAQIQKLLDELAAEDQPEQTSEHRDVRILRSLPGAGRYVVATMLAEAFWALQQKDYRLLRALCGVAPITEQSGRSRFVYMRHAGNRRLRTAAHHWAWNATLVDPHFARLYRDMRARGLTHARALRGVADRLLNVTVATLNNGTRYDPSLSAAA

SEQ ID NO: 458954 - protein, 435 aa, unidentified
MDEMTDEPLYRNRVCGIDIGKAQMVATIRVPSDRDPARRAAETRTFATTKRGVLALADWCRSWQVPAVVMEATGDYWKGPFYRLEAEGLECVLADARQVKNLPGRPKRDPADSRWLAACFERGAVTSCFVATPEFRIIRLHTRYRRDLIEERTRDKQRAEKLLESAAIKISSVVSDLHGVTGRDIMDHLIAGERNPKVLAQLARAAARRKIAKLEEALEGAEFFTAEHAGLLMAMLERIDRVTADIARLSEVIEQLLAPYEEQLQQAESMPGWRRRSAEDAIAETGADMTRFPTGAHLASWGSRAPLDHQSGTRKGRARSKKGNRYLAGVLGETAVAAGRTQTREGARYRRLTRRIGKPKAQVAVGNTQLKVLHKLLSNPGMRHEDLGPDYYERRASLRRQIHHHVTHLESLGFEVTLCRTPDPQPGPAGQAHAV

SEQ ID NO: 458955 - protein, 437 aa, unidentified
MRVLYEHVAGIDVHKDMIKVAIRSPGEKPWTRKTEILEFRTFYGVLQEMARLLRRRGVTHVVMEASGIYTDPVYYALAEQDFTEVAVVNPAHARALRGHKTDAADCRRLAELFECGLLRGSYIPPAELREVRDLTRYRMKTVQARTSEIQRLAKALESAGIKLGSVASDITGKSATAMIDSLIDGERRGAVLADLARGRMRTAGKLADLSMALTGRFTGHHALMCRLHQDRIAGLDAAVADLDDQIAGRAGRWQRELDLLKTIPAFGDVVAWAWLAEIGPAPHRHFASHEKLASWVTLCPGNNISARKRKHGRTGDAGTYIKPVLIQAAWNAIRTKGRLQARYNRLVRRFGGDKNPAAKKKAITAIAHTLLKIAYQVLKSGMPYQDLGADFYTRRESPDQQRAYLERRLQKLYPGCAITITISPPEAVLTSTAGNAP

SEQ ID NO: 458956 - protein, 342 aa, unidentified
MMDTMIGVDLAKSVFQVHGASLTGEIKFRKKLTRVQFQKFMAKQPACIIVFEACGGAHYWAHEAQRLGHHAKLIAPQYVKPFVKRQKNDAADAEAIVIAAQRPEMRFVEAKSSEQIARGVVFRARDRLVRQRTEQINALRSVLYEQGRVFSKGTHQMKKIAEYLQQVDNGLLSLVREECDELLASISDLTTRIQAKTLKLKKLSQQSEISRRLQTIPGVGPLTAMAVEAFAPSMDIFRRGRDFAAWLGLVPKQHSSGGKERLGKISKAGQVDIRRLLIIGAMTRIVWAGRKPCEDGSWLDRMLKRKPKMLVAIALANKMARTIWAILTKEEDYRDPAKIVAA

SEQ ID NO: 458957 - protein, 416 aa, unidentified
MNAAGIDVSSRKSTVAVLRPFGEVVRLPFDVAHDTEGLASLAEQLKSLDGETRVVLEHTGRYYEPVAKALHEAGLYVSAVNPLLIKEYGANSLRRVKTDKADAVKIARYALDNWTDLRDYTPMDTIRYDLKTLNRQFQLASKQRTACSNNLIALLEQSFPGVRKCFDSPVRNDGTQKWVDFAHTFWHVDCVRKQSLNAFCDRYRKWCKRHGYFFKHSNAEEVYALAKNAVVLVPKSKVTKVLVQEATNQLTSISRSVETYRAEMERLASMLPEYPVVMEMYGVGKSFGPQLMAEIGDVRRFERKQALVAFAGIDPMPNQSGDKNVRSNKSSKRGSPYLRKTLFNVMGIYLKCAPQDEPVFQFLDRKRSEGKPFYVYMTAASNKFLRRYYAKVRDYLATLENLPPVDLDSTGLQESN

SEQ ID NO: 458958 - protein, 453 aa, unidentified
MCLEDRPVLEPNAAGIDVGAREMFVAVPPGRDEKPVRVFATFTEDLERITDWLEQCGVTTVALESTGVYWIPLFEILEQRGIRPCLVNARHMKNVPGRRTDWHECQWLQYLHSVGLLRAAFRPGQDVCAVRTLLRHRNELVAAASQHVQHMHKALTQMNLQIHHVISDITGSTGRAIVDAILAGQRDGAELAKLRDPHIKADTETIRKSLEGNWRPEHLFTLGQSRDLYRIYQQQIVNCDLEIEKMLRDFEPRTDPVEKPLPPDRKQNRAGSKRRKKNGHPHPEFDLRTETYKLFGVDVTQIPGIEENALPLFSEVGRDMSQWPTAGDFISWLALCPDNDISGGKVLWRGARRVRNRAGHLFRLAAFSLHHSPTPLGHYLRRMKAKLGPKGATMATAHKIAVIFYAMVKNQVEYDETLWDTRDAQREKRFEAKLKRQAKQLGYELVPIELKAA

SEQ ID NO: 458959 - protein, 420 aa, unidentified
MAPLSNQQFNAFVGIDWADTKHDICLQQAGDDRREFDCIPHQVTRINEWAKALHQRFGGPIAIALELARGPIVSVLQKHAFFTLFPINPAMLAKYREAFKPSRAKDDPTDAELALDLLLRHPERFSPLRPQSAGMRFLLSLIEQRRELVGDKTRFTNRLTNALKQYYPQALEWFDDIDTVLFCDFLTRWPTLPAVRRVSRKTLETFFHAHNCRRAQLIEGRLESIRCAVSLTDDPGIVAPHRLLALMLVAQLRTALAAIDVFDKEIATVARTLPDFDLFDSLPGAGPHLTPRLLAAFGEQRDRFKGADELQKYSGIAPVTERSGKKCWVHWRWQCPTFLRQTFVEWAGQTINKSFWAGAYYRQQRAKGSSYQAAVRALAFKWIRILYRCWQTGTRYDESVYLNALRKRGSSLLRNLELPG

SEQ ID NO: 458960 - protein, 416 aa, unidentified
MSKNMLCGCDVSLENNTVWLMLDDGSQPTKLFNADNNQLGAETLVERIYSIAKEHCVSDILIGTEATSMYDWHLLEYLAESKLALEFNLKLYRFNAKWIKNFKKSLAPRGKTDPIDSFAIAERLRMGRLPKEYIPDTKYQPLRKLTRFRFHMMQQIAREKDFFLANLFLKASAYSRVSPFGSTFSATSLSVINDFFSVDELAAMSVEELTAFILEKGKSHFSKPAEIVDNLKRVARESYRLKPELAPTVNLILASTFNNIRCYKDQVKLVDQAIAENLKAFKHTLESIPGIGPVYAAGILAEIGDVHRFSNDSSLAQFTGLTWPKHQSGKFQAEETRMSHAGNQYLRYYLVEAANSVKRCDATYKAFYEKKYKEATKHHHKRALVLTARKLVRLVWTLLTRQVLYQPGYSSTSLTV

SEQ ID NO: 458961 - protein, 349 aa, unidentified
MDIIAFDSHKRYTLVYATGDDGQPRDERRIEHAPGAIRNYLARFQPGSPVAVETIGNWYWILGEIEQAGMRPQLVNARRAKLLMGNANKTDRLDARGLNILQRNNTLPSVWIPPAELRDQRDLPRTRMSLVSQRSRIKNRIHATMAKYNLNAHCSDPFGKKGRAELRRLIKLLPEHTRFTTEILLAQVDQLDKQVELIDKRIEEVFVETEQLRLLRSMPGVGFVLGIVIMLEIGDVGRFASAGALASYSGTVPRIHASGGKTRYGKLRADVNRYLKWAFVEAASAVSIHRKTRPDRYASVLYGKIRARKGHQKAVGAVARHLAESAYWVLTRREEYKERGAKGSLPTRA

SEQ ID NO: 458962 - protein, 311 aa, unidentified
MEHPCFVGIDVSKAHLDVYVRPLGESFRVSHDDAGFVTLIARVGPIAPAVLVLEATGGYEVTIAAALAGAGLPVAVVNPRQIRDFARATGQLAKTDALDARIIALFAEAVRPVARPLPDAQARALGDLVARRRQLVDMLTAEQNRRRLLRDLRLREHLDAHIAWLGDALGRLEADLKTLIRGTAIWWETDELLRSVPGVGAITSCTLIADLPELGHLDRRRIAALAGLAPLARDSGAFRGRRMIVGGRAHIRRILYMATVAAIKFNPVIRAFFQRLVAAGRPGKVAITAAMRKLLTILNAMLRDRRPWQLT

SEQ ID NO: 458963 - protein, 433 aa, unidentified
MKVLYERVAGIDVHKDMIKVAIRSPGDKPWTRKTEILEYRTFYGVLQAMARELRRRGVTHVVMEASGVYTEPVYYALCEQDFTGVAVINPAHAKALKGHKTDARDCARLAELFECGLLHGSYIPAPELKEVRDLTRYRMKTVQARTSEIQRLGKALESAGIKLGSVASSITGASATAMIEALIDGERRGGVLADLARGRMRDAGKLADLSMALTGRFTEHHALLCRLHQDRIAGFDAAVAGLDDRIAGKAARWQREADLLTSVPGFGDVVAQAWLAEIGPAPHRHFATCEKLACWVTLCPGNNISARKRKHGRTGDAGTYIKPMLVQAAWNAIRVRGRLQARYNRLVRRFGGDKNPGAKKKAIIAIAHTLLKIAYQVLKSGTPYQDLGADFYTRRESPEQKQAWLERQLQKLHPGCTITITVSPPEAALAPGA

SEQ ID NO: 458964 - protein, 384 aa, unidentified
MYKHNILFIGLDTHKISTIVAHVEDQRGAKPVHYGKINTTKAAITKLARQYQSKYPQATLHFVYEAGPCGYWIYRLLTSLGHCCYVVAPSLIPKKPGDKVKTDKRDALKLAKLLKDEELTPIYVPECEDEAIRDLSRARETAMKDLKDAKYQLKALFLRNNITCKVNDNWSNQHLRWLTELVLPHPSQQIVLQEMIQIITERINREKRLANELFHQVRQWRFYPVVKALQAVRGIKLLIATGIVAELGDLRRFDHPRKLMSYLGLVCKEDSSGDNRRLGSITKCGNGRARRLLVQGAHTYKHKANISTELQKRQENLPREITDIAWQAQLRLCRRYNRLLSRGKHRNIVVIAIAREMAAYIWAIAREVVISPVNARLRISRVPA

SEQ ID NO: 458965 - protein, 408 aa, unidentified
MNTLYVGIDVSSKSNVVYLMLPNGDKHSNFSVANSHEGSTLLVKKIYSALTSHSLDTVLIGLEATSIYGYNLVYFLREDATLAPFNRKIHVLNPKQVKKFHDTYNDLPKNDYVDSFVIADCLRFGRINKEVYMGEYRYKALQNLTRARFFAVQNLVKEKQRFMNVLFKKYSTMTQEKVFSDTFSTTALAVYDEFESAEALANMDLHELTDFIIEKGKNRFPDPDAVAKAIQKAARSSYRLPKTVNDSVNQVLSISITSMKALESQIKEFDKAIKAQMELLPNVLISIPGIGPVYSAGIMAEIGDINRFNSQAALAKYAGLAWKQHQSGGFESEVTRLIPSGNRFLKYYLCEAAFSLVRCDKEYSDFYHLKYKEVNRCQHKRALALTAHKFVRLVFRLLKDNRLYCPAK

SEQ ID NO: 458966 - protein, 460 aa, unidentified
MNRTHRKKPGNGPQDWSLNLEVVHPNAAGIDIGNESHYVAVSPERDPIPVRQFACFTEDLHRLADWLKSLGIVTVAMQSTGVYWLPVYEVLTEEGLDVFLVNARHTKNLPGRKTDVQECQWLLQLHTFGLLNNSFRPPEEICVLRAYWRQRGEHVASASACIQRMQKVLTEMNVQLANVISDISGLTGMAIIQAILAGERDRYRLADLAHARIHATREEIARSLEGNWRKELLFILQQERNLYLIYQQQIAECDTALAAHLQSLDNKSEPGCQPPATRASKRAGSNAPTSFDLRGELYRISGTDLTQIEGINIMNAQTIISEVGVDMSRFPSEAHFASFLGLCPDNQITGGKVLRRGTRQVENRAATALRMAASSLSRSKTYLGAKFRRLRARLGAPKAITAMAHMLARLVYRMLKYGEQYVDKGMNYFEEKHREHEIRSIQKKAKELGLDVTLSPATAA

SEQ ID NO: 458967 - protein, 447 aa, unidentified
MDTESATQYAAYIGIDWADKDHAYALRATEGKKVEQGKVEAKPEAIEEFVAQLRQRFGGKAIAVALEQSRGSLLFTLSKYDHLVLYPVHSSTLDSYRKACHPSGAKSDPDDAALILDLLQKHPEWLQPFAPDTVPTRTLQFLTEERRDAVNDKTRYLNQLTAALKTYFPQMLEWLDVDSKVMCEMLQRWPTLEQLQQQKPSVVEEFLREHRYPVVRVKPLQEAMEKAIPATTDQAVIEAKKFTVQRTIAQLEALRENIAELDRRIEQITRLHEDYRVFASLPCAGKVMVPRLIAAMGTQRDRFQTASELQCQTGIAPVKEASGQREWIHWRWACPKFLRQTFVEWAWLSTRKSQWAREFYDRQRAKDKSHHAAVRALAFKWQRIIFRCWKDRCPYDEARYLATREQRARTAKASTDGSPQLKSSQAGGVEIMWKNVSGFSRPDSISC

SEQ ID NO: 458968 - protein, 334 aa, unidentified
MEMLYGAIDIHKHVFQAAVFDAASGEVVEERFPATRERLGDWAMEWQGRLTEVAIEATSGWRWVVRELQQHGYVVQLADPGQAVALKGKRRQAKTDRLDARWLAMLLAKQMLPASWIPPAEIQRLRDLTRLRLALSQDRTRWAQRLHAFLGHEGWPCSRSRLLTTKGRLWVASLALDPHAKAQTERLLRLIAALEQEIGELDSELRQLARADARLRALQTIWGVGPILACHLLAEIGDARRFRRARQLVRAAGLDPVVIDSGDNKRRGRLSKTGSPQLRWALVEAAQHASRNGSPDLELYQSVRERAGAQRATLTAARKIARRCFYTLTAAEAA

SEQ ID NO: 458969 - protein, 351 aa, unidentified
MPKRTNAVAVSTIGIDTGKNTLHMIGLDEKGEIVLREKVSRNRIAARLVNVPPCLVGIEAGMATHYMARELVALGHVVKQVPPAFAKPFRQGHKNDFRDAHAVAEAVQRPSTRCVPIKTDDQLDLQALHRVRSRLVGDRTAVINQLRGFLLEHGIAVRQGHRFLRQQLAQILATRTDALSPRMIRIIGDLVEDWAHLDERIERVTDEIESLARTDSSCGRLMTVPGIGPIIASAMVAAIGNGAAFAKGRDFAAWLGLVPKQLSTGDRTILGRITKRGNRYLRMLFIQGARAIQLHPASWAKHSFGPWLTAAARRLHCNVLTVALANKLARIALTVLVQARNYETRIAPAAT

SEQ ID NO: 458970 - protein, 389 aa, unidentified
MSPQNDQSKKCFTAFEQASTMVAVVELSKKLWLVAGIVPGIGRHPLKKFEADENRLLALLHHWHQQAVKAGREIKRIVVAFEAGRDGFWLARWLRIRGIEAYVIHPTSVAVSREHRRAKTDRLDTEHLKRVVLGWLRGEPDHCRMVAIPTVEEEDAKRPNRERETLVGECTGIVNRVKACLARFGIRGFNPTLRKAADRLETLVTPEGVRLPPLTLAEMLRDIARLRFLREQIKSIEKARVQRLRDGPATRTNVMVNLIARVFGIGIETADLLVHEILSRNLRDRRAVARYAGLTGSPDESGNRRREKGLARAGNARVRRAMVQLAWRFLGFHPDSALTRWYNKRAADGRGSTRKTMIVALARKLLIVLWRMVTTGEVPADLKLRRTTA

SEQ ID NO: 458971 - protein, 323 aa, unidentified
MQGKVSLEQSAATRVYVGIDVCKEWLDVHVHPCGQSFRVSNTRHGLRQLKRRLADFDVALIVMEATGKFHREAHRNLHASGFAVAIVNPLRSRLFAEAIGQLAKTDAVDARMLALLGATIEPKAKAPPPETLENLQEIVRGRAACVAQRTALLNQQAAAKTACLKQQIRCQLKAVERAIQALEVEIERIVEAEPTLTRRCAILTSIPGIGTLTAVTLLANFAELGSCTRKQAAMIAGLAPIACDSGQTNGGRHIKGGRAEVRTGVYMAALSAANSNADLKRFYDRLLANGKLPKVALTAVMRKLIALANTLIREDRLWHPIHA

SEQ ID NO: 458972 - protein, 335 aa, unidentified
MQIYGIDLAKEKFDVSFFDLTSKKVSNQPSHKVVTNNLKGIGKFLKGLPSDAVLVAEHTGVYGDTLLKCCMDSNVKIAFVGGYVIHRYRATPDRAKTDVLDCALLRDFGERYPDKLKYKTFPEEALYELRQLARHREMLVEQRKQLITADRSEDCRPIRSLAVKRSMDRIKEMLDTEIAETEKEMLKVINGHESIHHNYELVKSVDGVGLITAVELLVKTENFTKITTARQYAAYAGTAPYEKSSGKMDKGAHISKIGNRRSKTLLYICAESARLHNKEIKLYYERRTLIDKKPRHYVLNAIANKLLRIIFTLVEKGEYYDANFIRQDPRVVKYN

SEQ ID NO: 458973 - protein, 352 aa, unidentified
MERYVGLDSHARSCTLGVMSASGQRLKSLVVETNGSALVEAVRGIAGRVHVCLEEGTQSAWLYELLRPHVAEVVVAMAPDRKGPKDDQRDAWARANELRTGSIETRVYKAPEHLAGLRNAVRAYGFAVTDVVRAKNRLKAVFLSRGMSADASVYDVKKRPEWLKQLPSPHRELAEWLGRQLDQVEPLRDEAQRWLLTEAKRHPIIRKLATAPGLGPIRTAQVVAIVATPERFRTRRQFWSYSGLGIVTRSSADWVQDRNGKWARSQVAQTRGLSRKRNPRLKAVFKGAATTVITQLPDDPFHGDYERMLQSGIKPPLAKLTLARKIAAMVLSMWKHQEVYDPKRHHPVLNQP

SEQ ID NO: 458974 - protein, 430 aa, unidentified
MEEVDEQELHVERLAALDLGKAVLEACVRVPHDSKPGRRMQEVRTYPTTTAALLQMADWFRCWGVTRVVMESTSDYWKGVYYLLEAEGFECWLVNARDVKNVPGRAKSDKLDVAWLAKVGERGMCRPSLVQPKPIRELRNLTRYRRSLIRDRTREMQRVEKLLEDAQIKLSSVVSKLFGVSGRAMLDALAAGQTDPKALARLAKGRLCPKVPQLQEALRGFFTDHHASILAMMLANIDRLSAQVATLDTMIEQAVVPFTHQAQQLAEITGAGPIAAQELIAEVGVDMDRFPSDAHLVSWAKFCPQTHESAGKKKNKGRAKGNPWLAATLGNIAASAARTGEGFLGARHRRIARRRGPQKAIVATGNAVLVIVYHLLSDPTARFRDLGADYFTTRIDKNRRARNLAAALQAVTGQKITIRDGQAIIEPQAA

SEQ ID NO: 458975 - protein, 429 aa, unidentified
MCYRIAGIDVHKKMLAVVVSDVEIESEYQFERRMFGSNPEQLRSLVAWLLEQEAEEVVMESTAQYWKPVWGALERYWKPIREKREGAGRRSGTLHLAQAQSNRGRRGRKRDFPDAERLVKRLVARELILSFVPDAEQRLWRTVTRKKYQLRRDRVRLQNQMESLLEEAHIKLSSLVTDLLGVSARRMLKALAEGETNPAALAALADERLRATPEQLCDALGACTELNAVYRRLLKMALEELRLIDEQIGELDKEMASLLHQHQDAVERLAEVPGLGVDSAQQIIAEVGPTAATFPSADQLSSWVGACPGDNESAGVNYSHRSPKGNRHMRRLLNQSANAAARTKGSIFDIVYRRSVPHLGHNQAIGAIAHRQCRLIWLILHQGVRYEERGPAVTKQSKQKRTARMIRQLRSLGYRIETPNPQPSQAQAQ

SEQ ID NO: 458976 - protein, 454 aa, unidentified
MALEDRPVLETNAAGIDIGAREIFVAVPPDRDEHPIRVFGTFTEDLQRLGEWLVACRVTTAAMESTGVYWIPLYDLLEARGVTPCLVNARHMKNVPGRRTDWHECQWLQYLHTVGLLRPAFRPEAEVCGVRTLMRHRAELVMMASQHVLHMQKALTQMNLQIHHVISDITGTTGLAIVDAILAGQRDPVALATLRDCRIKVSQETIQKALVGTWRAEHVFTLTQSRELYRVYQQQIVECDREIEAALRRFEPRVDPLEKPLPVDRKRNRSARKRRKKLGSSDTPFDLRTEAYKLFGVDVTQIPGLETMAFPLFSEVGRDLSKWSTAAHFASWLALCPDNDISGGRVLWKGVRKVNNRAGQLFRLAAHSLHRSPTPLGDYLRRMKARLGPAAATTATAHKIAIIFYTMVRQQAEYDETLWAARDAERDRRLQAKLKRQAHRLGYELVPIEQTPAA

SEQ ID NO: 458977 - protein, 405 aa, unidentified
MFEIDNVGVFLGLDVGKTTHHGHGLTPAGKKVFDKPLPNSEPKLRAVFDKLTAKFGTVLVIVDQPASIGALPLTVARDAGCRVAYLPGLAMRRIADLYPGEAKTDARDAAVIADAARTMPHTLRSLELTDEITAELTVLVGFDQDLAAEATRTSNRIRGLLTQFHPSLERALGPRLDHQAVTWLLERYGSPAALRKAGRRRLIELIRPKAPRMATRLIDEVFDALDEQTVVVPGTGTLDLVIPSLAASLTAVHTQRRTMEAQINTLLEAHPLSPVLTSMPGIGVRTAAVLLVTVGDATSFPTAAHLASYAGLAPTTKSSGTSIHGEHAPRGGNRQLKRAMFLSAFACMNADPASRTYYDRQRARGKTHTQALLRLARQRISVLFAMLRDGTFYQPRTPKDIELAA

SEQ ID NO: 458978 - protein, 389 aa, unidentified
MEARTVNNLPPAGAHDDAVRCLVAIELSKKSWIVAVNTPLSDKISRHTLKPCDGRGLLELCERVRARVASETKKRVEIVSCYEAGYDGFWLHRLLEAHGIRNYVIDPASVQVDRRARRAKTDRVDVERLLRSLMAYLRGEPKVWSVVRVPSVAEEDDRRLHRERGRLICERVQHVNRIKGLLAIHGIYDYQPLRPDRMQQLERLRIADGQMLPPRLKAEILRELERLELVVGMIKTIEVERDAIASAKIETAHGSAKKIQYLTKIKSIGPQSATTLAGEVFFRSFDNRKQLASYVGLTPAHFQSGSMSRDQGISKSGNAKARAVMVELAWLWLRHQPASPLSVWFHQRVGKLKGRIRRITIVAVARRLLIALWRYLETDLVPEGAALKV

SEQ ID NO: 458979 - protein, 429 aa, unidentified
MNYTQNQRISQITESTLIIGIDIAKYKHVARAQNDRGLMYGKAFSFPSMREGFEAFCHWMKNIMREHEKTQLLVGMEPTGHYWMTLAAFLRSRGIPVVVVNPMHVKKSKELDDNSPTKNDPKDARVIAQLVKDGRYSAPYFPTGVYAELREAVKIRDHLSCELQRTQAKVHNWLDRYFPEFLTVFTSWEGKAAFETLKHFPLPQDLIQAGAFEVLTIWKKNIQRGLRPKRAEELVEQARHSIGLQEGMKMARLELKTLLTTYETLQQQIEEVIKEIEDLLRDIPGVQYILTIPGIGVATVAGFFAEVGDLSRYQHPRQIQKLAGLNLKENRSGKHRGKTRITKRGRPRLRALLYKAIRPLVAKNPAFKALHTYYTTRQENPLRKQQSLIALCCRLLRIMFVLARKQIDFNMNKMIKDTPLCGQNQSLAA

SEQ ID NO: 458980 - protein, 393 aa, unidentified
MVCVGIDVAKDKHDCFIISSEGEILADVFTIPNNAEGFDTLLQAIRRSTRPEDKIKVGLEATGHYSYNILGFLLDKGLPTYVINPLHTNLYRKSLSLRKTKTDRVDARTIAAMLMSDVDLKSYTDTVYHNEELKSLTRYRFDKVRERAKLKQSVSRLVTILFPELEKLVSSLHSASVYALLSEFPGAKQISSTHMTHLKAVLKNASQGRYGQEMAETIRNAARSSVGSVMPAKSLELQHTIRLIRELDAEIEDIETAIQAIVDEMQSPITTIPGMGVRMGAVILAEIGDFSHFDSPDKILAYAGMSPSTYQSGQLSLSGAYSHMEKRGSRYLRYALYNATKHVCHWDPTFAAYLAKKRAEGKHYNVALSHAAKKLVRLIFAMEKSQRPYCAAA

SEQ ID NO: 458981 - protein, 402 aa, unidentified
MYNAVGIDVSKGKSTVAVLQPAGVIIRKPFNVNHTSSELDELAKYIGSLEGETRVVLECTGRYHEPVVKTLSEAGLFVSAVNPHLIKNFGNNSIRKVKSDPADAKKIARYTLDNWIELRQYSSMDNTRTQLKTLNSQFSFFMKQKVAAKANLIALLDNTYPGVNKLFDSPVRDDGSEKWVDYAYSFWHVDCVRKIGLKTFTERYQAFCKKHHYNFQPAKPAELFLASKDLIAVFPKEASYKLLIQQSIQQLNLASSHVEELRSKMNELASTLPEYATVMGMYGVGKTFGPQLIAEIGDISNFSHREALTTFAGVDPGVDQSGTHNSKSNKASKCGSNRLRKTLFQIMSTLLQTAPEDDKVYQFLVKKRAEGKPYYVYMTAGANKFLRIYYGKVKECIRNLEQ

SEQ ID NO: 458982 - protein, 348 aa, unidentified
MLADQLDYVLGVDPHRDVHTLAIVEVRTGGVVFETSVVASSAGYASALELADEHAPGRRAFAIEGTGSFGAGLTRFLSGEGERVLEIGRLRRERRSGGKSDALDAIRAARSVLGQKRAAEPRAGGEREALRALMAAREGAVNARRAGLCQLRDLLITTPEPLRSELRPLSRAQLLRRLVAVRPERRSDVELRGTLLALRTVARRVQQLTAEERELADEIETLTRKLAPQLLEQPGVGPLAAAQILISWSHQGRIKSEAAFARLAGCAPIPASSGQTVRYRLDRSGDRRLNRALHMILVTRRRAHQPTIAYINRRVQEGKSRREASRCLKRYLARNLYRLLEHGAPLAT

SEQ ID NO: 458983 - protein, 316 aa, unidentified
MNPEPVVVGIDVSKRYLDVALADRIERVGNDAAGLAALVAAITAAGTGLVVLEATGGYETAAVRALQGAGMPVAVINPRQARDFARAQGRLAKTDAIDARVLACFGAAVRPSPLPPIEPGRDALAGLVARRRQLVDMLVAEQNHLEHAAAAVRSWIEHHCGALRNQLAQVDAAIAVAVEADLALARRRAILVSVKGIGQATAAVLLAELPELGRIDHRQLAALIGVAPINHDSGQFRGQRHIAGGRASVRCALYMATLSAVRHNHNLQAFYQRLRANGKPAKVALVAAMRKLATILNAVVRDDRPWQPSSPLQHGC

SEQ ID NO: 458984 - protein, 360 aa, unidentified
MQPEASQEVKDRMARFVGIDISKTKCRAAIMDPGGIILEEFTFANNHEGIEGLASRLTLDDRVVMESTGSVWTNLYNHLDERHIPVALANPLKTKAIASAKIKSDKVDARILAHLLRSNLVAESYVPPKHLREIRALVRHRVGIVKIRTMVKNEIHALIDKHGLKHEFSDLFGKRGLEWLRNLQLPPLDKLILNNHLTHLESLDQQTERVDEEIHNKACEDSDVKLLLSMTGIDVYSALLIRSEIGSIDRFPDYKKLVSWAGLAPSLHQSGNVEYHGSITKQGSRMLRWIIVEAARVAVNHDAKMRAFHERVKHRRGDQKAIIAVANKMLKIIWFMLTRREPYQSRNEKRYQQKLNSIAA

SEQ ID NO: 458985 - protein, 408 aa, unidentified
MTVVGIDVSKGKSMVAAMKPGGELVTTPYEVKHSDIELSRFALDVLCMEPDTRVVMEATGRYHEPVAALLHSEGIFVSVLNPLLIKQSGAGSLRKVKSDPKDALKIAKYGLDNWSTLREYTPMEAIRQQLKLCARQCDLYSKNIVMLTNNLISLSDKTFPGVNELFSSPEKENGHLKWVDFYRTFWHCDCINRMSPDAFEERYKKWCKRKGYHFSADAADALYAASCGLYTTLPRDNNAKLLVTVATDQLIALRENQSKLETEMLNLCKQLPEYETVMDMYGVGKSTGPHLMAELGDIRRFPHRSSIVAFAGVDPGVVGSGKMQLSSVATSKRGSPQLRKALFQVVSAYVKRKPENEAVYQFYAKKRDEGKPYYVCTTAAANKFLRIYYARVKECLNAAESATQAEEG

SEQ ID NO: 458986 - protein, 332 aa, unidentified
MKKFSGIDLHSNNSVVVVSDEVDHIVYQRRLPNDALQIRAALAPHREELEGVVIEATYNWYWLVDALLADGYHVHLANPAAIRQYEGLKYSGDFTDAAHLAQLLRLGLLPEGYIYPADGRQVRDLARKRMQLVQCRTAQILAIGNLFARYTGSQLHGPQVKRLDGAQVSRFGFAPDVTHAIRANLAVLGTLQQQIEIIEKRLMQQVKLNPDYALLNTVPGIGPVLATTIMLETGTISRFATVGHFSSYCRCVDSRRESNSRKKGEGNTKNGNRYLAWAFVEAANFAIRTCPQARRFYERKVSVSGSRLELRHSECEGGAFVRTRAMRWKTRT

SEQ ID NO: 458987 - protein, 426 aa, unidentified
MDIVHPRVAGIDVHKKVIWVAVRLPGDQPGGRAVTVRRFATFWRQLQKMAAWLAELGVSHVAMESTGVYWWPVYHALAGERIEVCVCNAAHMRNVPGRKTDLRDCQWIAELHEYGLLRPSFIPAAEVAALRQRTRYRKKLIEQRISEGQRLTKVLEDAGIKIDSVASDLLGVSGRAMIEALIGGERNPGVLADLAKGVLRRKIEGLQMACDGRFTASHGQMCRLHLDARDHLTARIGELDILVAEAAAPFQPLIARLVTIPGIGQRTAEVIIAETGGDMARFASSARLAAWAGLAPGDNESAGKRKHAAARQGNRHLRTALVESAWATARTRSRPGARFRRLARRFGRGNEKKAAVAVAHTLARIAWTVMKNSQDYNEAGEDYYDRLDQRNRDHIVRHHQQALARLGYQVTLTPPGDGRPPPAHAA

SEQ ID NO: 458988 - protein, 450 aa, unidentified
MGNGRGISRGDRNRNARLARLRQLVPTANAIVGIDLADDKQMVVVTDHDSRVLARRTFKCRAWKLGTALDWAASQGVKAGFAQVTVACEPTGHRWRVLGQLAAERGMPFVCVQPMVTSWSRRTEDLTFDKTDEKDAVLIARLTAQLRCYVPEPIDETWGRLRHLGARREQHMVEMVSQVQQVRDLLECVWPASLEAANYPFRSRTWAATLSVIMGRDGGDLGRTHRLGVQRLETAVCRELGAWGGQRPCRRIVRAVFASLSDSTGVLAHRRGAFERIGLLLSDWQQTRRRLADTETRMRTVLEELNLTELVTSITGLSALGAAAILAETGDLNRFASARAVVKHAGLAPREKLSGNYTGRTKMTGQGRPGLRLAAWRAVWGAQRANPVYADRYRHLTSRQQNKLTPTQAQSVIAAAILRQLHAVVTTGRRWDPQIAAHGTAQPTETRSAA

SEQ ID NO: 458989 - protein, 412 aa, unidentified
MRIMYRCCAGLDVHKETVQCCVRRVEPDGSLQETVRQFGTMTDDLLEMVEALKAQGVTHVAMESTGVFWKPIYNLLEEHFSIVLVNPAHCKQVPGRKTDVKDCQWLAELLQYGLLRGSFIPPQWQRDLRDLTRERTQLINERTRVANRMHKILEDANIKLGSVATDILGASGRDMLRALIGGEQDPEVLAEMARSRLRDKIPQLRRALRGRVREHHRFQLELQWDHLEQLDQLVARLNEKITQLYQPYEQQLALVDEVPGMDRRMAETVMAEVGMDMRQFPSDSHLCSWAAVCSGNHESAGKRRSGRTRKGNRWLRQALAVAGQAAGHSKNSYLGARFRRLAARRGKKRATIAVAHTILRIIYHMLREGIHFHDLGPAYFDRLNPERIQHYLVSRLERLGFKVMLEPQQATA

SEQ ID NO: 458990 - protein, 335 aa, unidentified
MQIKHFIGIDVSKETLDLSVVVDGKNLQYFCIKNRTAEIKSTINKIMKGLGATVDDTIFCMEHTGMYNLPLVKWLQIHQGKMWLESGVHIRKTLGVVRGKNDKVDSSRIAMYAYTNRHQIKFWNPPRKLIERIAALLSQRARMNKAKKQLNTANKEQKRFLDKDIMKSLNKYTQKTILVINKQIEAIEKEVLGLINDDEKLNRIYKIITSVHGIGFVTASYILVTTNEFININNPKKYACYSGVVPFEYSSGSSVRGKNRVSHMANKNIKSLLHMSALSAIQMQGDLQEYYKRKVSEGKNKMSVLNAIRNKLVLRVFACVNQNREYEKKYEYILV

SEQ ID NO: 458991 - protein, 394 aa, unidentified
MNAHAVGWDIHRKFSQVSLMEKSADGEIRVVERARLEHDHPQEMRQWLSHLGPEIPVALEATFGWPWVADLLQQLGHEVHLGHPPVIRALAKHEAKTDRCDADRLARFQLRGILPESYLAPPEVRQHRERTRYRMALVVLRTGVKSRIQAILHRLGIQHSFSDLFGKGGRKFLETLHVPAASAVVLRGNLELVDLLTMLIEDVEKWMRENLEVDEIVRLLMTLPGIGLILAHVLRAEIGEIERFPRPGHLASYSGLAPLSNDTAGREGRRHCSAACNHILRWAFIEAAHGVQLTKGTKAQRLRKLHARLSRNGPGKKGQKSSAKVAVAHELSKLVHVVWSKRMPYTDTPPPRPGNCGRQPSPQAAQTAKTTLRPDQPRRPMVRRRPAAVGQTRS

SEQ ID NO: 458992 - protein, 359 aa, unidentified
MSEVSIIGLDLAKSVFQVHGATKEGKMVFNRRLRRDEVISFFLKQPSCLVVMEACGGAHFWSREISKLGHEVRLIAPSHVKPFVKRNKSDRVDAEAVTEAAVRPNMRFVPTKSEEAQAQATQLRVREQLSKQRTQSINALRGLMSEFGLVVALGRQHVDKLIAKLGDEGSAVPEAAQPGLLFLAANIATLTEQIDNLDRQTRTQAKQDETSRRLMTIPGVGPMSAVALMALMPEPDFFKCGRDFGAWLGFTPVEHSSGGKQRLGGISKKGQPTLRRLLLLGAAAVVRQAMRRPLNPKTWLGRMLAKKPTMLVITALANKTARIIWAIRAKGGVYRDPQTSNDQVKGAADLDQQTSAKAA

SEQ ID NO: 458993 - protein, 328 aa, unidentified
MCTLGIDVSKNKIDLCLLTAGPGGKKKHKVLTNEPAVARKVVDWLNAQKCVPESVTVVLEATGIYHENLAYGLHEAGVSVCMANPCRVREFAHGMDILNKNDAVDAFVLACYGELKSPAVWVPPSPEVRKLRALLRQRDALREDVQRTVNRLEKANSTSTPQEVIRSLERTKSWLNEELARIEKLITDHTDNDPGLKADLDLLKSIKGVKDQVGREMLALLKDGTFKSASQVAAYLGLTPVEKTSGSSVRGRPHMSKTGPSGVRAKLYVAALTASRWNKQAKAIYERLVAKGKAKQAALGAVMRKLVHLCFGVLKTRLPWDENYVATA

SEQ ID NO: 458994 - protein, 449 aa, unidentified
MEILYTNCAGLDVHKKTVKVCLLTRTPNGEPHKEFRTYFTTAEELLQLGDWLKEQGCTHVAFEATGVYWKPVFNLLESSFELLVVNAQHIKAVPGRKTDVKDAEWIADLLQHGLLKASFIPSGPQRALRDLTRYRVRLTEEKAREINRVQKTLEDTNLKLGDVVSDIMGKASRTILQAITDGETDPGRLAALAVGRVRATQEQLEAALRGTITDHHRFLLSEHLTQIRHLEQAIERVTAEITRRFTPPPEDGTSVPKEPEALPEMVPDSALPQESVSSPPAALSWAKAVALLCSIPGIGERAAIGIVAEIGINMQQFPTAAHLASWAGVCPGNHESAGKRLSGKTRKGNPWLRCLLVQAAHSASHQKQCYLAEQYRRIAKRRGAKRAAIAVAHSILVMIYHLLRNQTTYQEKGETFLEEQERQGAEKRLVRQLSRLGYHVELQPVALAG

SEQ ID NO: 458995 - protein, 430 aa, unidentified
MTTHSYSTSPRAIVASLNETINQNNSDSAVSVNINIGRTITLIDGLKPMGIDLAARKYQICYQDSMGRLINREVCKSELRQFLINAEDKYLICIEACSGASYWSRFALAYGHTVKVVSGKATRALSWLGNKDDFNDAYSLYQLLFMPGLTSCQIRTEAELAMSALISEKEALIKNLNEQTNKTRSFLLETGEYDDVVRGGPSAVYAIDRYLNNHQSDYSEHRYSIRCFEVLKETIVFLSKRIDEINELICEYAQHNEKAKLLMTIPGIGAETAVPIAIGAKDISRFDSARQFQAFFGYHTCHSGSGGKVVMGKMASNGDRAVKRNLYESALSVYHQGKSNNEPRSEWIAAKAEQNKAAFKKGMICIGSKILRTSYGVLKSGKPYNPAVDNSLGRMKARLNRRSNPKYREQGLDAVLQSQYEQELSLTALD

SEQ ID NO: 458996 - protein, 412 aa, unidentified
MDVIHPRCAGLDISKRDAKVCVRINGAGRRKTTETVATFGATTRQIMAMRDHLAAQKVTCVVMEATGDYWKPFYYLLEDLTGVEVMLVNARHVKNLPGRKTDVADATWLAQLGAHGLVRGSFVPPEPIRQLRDLTRTRTAVTRERTREIQRLEKLLEDAGIKLSSVAADLNGASSRAMLDALLAGETDPATMADLAKKQLRRKIPQLTEALYGRFNAHHAFLTRMHLDLIDQHTAAIEALTERIEVVMKPFRRFRDLICTIPGIGGYTADVVVAETGADMTKFPTAQHLASWAGTTPGNNESAGKIKSRRTRPGNPYLQGALGTAAMSISHTRDTYLAAKYRRITARRGPLRANVAVQRALLVAIWNIATTNTAYHDPGGDYFTRLNPQKARSNAVRQLEAMGYHVTLEQAS

SEQ ID NO: 458997 - protein, 346 aa, unidentified
MQNDTLVAVDIAKEVFEVAVSDRSGRVALRKRLLRDRFVAFFAQQPQATVVMEACGTAHYWGRRLEELGHVVVLLPPQYVRPYVVRNKTDRTDVDALLEASRNQQIRPVPIKTLTQQVIASLHRLRSGWLADRVRSINTLRGLLRELGFFIPEGRRHVLPEAWQIIHDHRRGLPEALKPSLAALCEEIASLSTRIENVETQLQALARQIPPIARLRSVPGIGLLSATALYAFIGHPARFPSGRHLASFLGLTPREYSSGLRRRLGPISKRGDSYLRLLLIHGARSVLYHAKRMKDRDRLRSWALRLEQKVGHNKAAAALANKLARITWAVWKHDRSFEPLPQPQAA

SEQ ID NO: 458998 - protein, 425 aa, unidentified
MKKTDYLSTLFVGIDIGSRINVVSAIDFNQEYLIRMKPVPNAKEGAETLESLLVDVLSAHHEFNHVIIGLESTGFYGVHIANYLSASDKLSPFGTEVYCLNPKEVAKYKESFNALDKNDGIDSFVIADFARVGRISIKPWRGAQYLALQRLTRHRLHIAECIAQEKTYVLNNIFLKFSEFAMMKNEDHPFSNKYGATAEAILEQYVTNDDIIDASIEDLVELIESKSRGRITDPEETAKLLKAAASASYRLDKVIAEPITLSISSSFNCIRAFEKELKAIDKAIEQTVQGLNPTEYQVLRSIPGIGHVYAAGILAEIGTIKAFPNNNALAKYCGIVWKENQSGNFRAEDTKMSKAGNRYLRYYVIEATGSVINHCPEFKAFYDKKFAETTTHQHKRALALTSRKFLRMLFGLLDKSQLYSPDKSR

SEQ ID NO: 458999 - protein, 347 aa, unidentified
MVYVGIDLHRNRSQIAVLDREGNELLSRRIVNKPETFLELLQGLGDEAQVALEATYGWEWLADLLEEAGYELHLAHPLRTKAIAAARVKTDAVDARTLAHLLRTDLLPEAYIAPRELRDLRDLLRHRVALTRMRSALKQRVGAILAKHGIARPYSNLFGVGGSRFLAELELREAPRRRLDSLLTLIAAFDRQIETTTKEIEQRAQADPYVDVLCQIRGVGRYIAMLVIAEVGDISRFPSARHLCAWAGLTPTVRSSDGKARLGHISGQGSPALRWALVEAAQHAPTGGGPLRAAYERIAKRRGKQVAKVAVARKILTLCYYGLRDGEIRCLAPRAKARTIRTTAVTR

SEQ ID NO: 459000 - protein, 342 aa, unidentified
MPIVGGIDIHRQQLTFDYLDTDSGEASAGRISPADRPRLRAWLGRFAGGPGVAFAVEGCTGWRYVVEELQRAGIEAHVAEPAETAARRGPKRRAKTDRTDARLLRDLLAEQRIPESWIPPQPVLEARAMVRLYKDLLDERTGWLQRIQATVFHMGVPELNVTTMSAAGRQRLSEADLSPATRTAVQVGMAQVDRLTEDMTRIREQIALISRGQPACRALQAAHYGVGPLTSVAIWSEMGDCRRFRSSDDAVRHAGLDVTVYSSDGRRTAGHLARQGPVVLRWALYEAAVYASRPSSPDYAYFRQVKARLDGQLALLSMARKLARRCHHTLRNLGDQVLAPAA

SEQ ID NO: 459001 - protein, 416 aa, unidentified
MIRIIAGIDIHKKVLMAVVATVVEREVEGGVEQQIEYEGRRFGSGTREREHLVAWLRERQAGDVVMESTAQYWKPVWMDLEPHFPMLHLAQAQSNKAPKGRKHDFADARRLTRRMAAGELILSFVPGAEQRIWRTMTRGKHQLVRDRVRLQSQTEALLEEMRIKLSSVVSDLFGVSGRRILGALAEGETDPRKLADLGDDRLKCGREELVDALTGQGEPIHVQILKLSMERLRLLDRQIEALDQMAAGALKKHAHAVARLAQVPGFGVDSAQQVIAEVGFDAKTFPGAGELASWVGTIPGSDISAERNHSSRSPKGNRSLRRIFTQAAQAAVKTKGCHFQNLFRKLLLKLGYNGAIWAIANRLCRLAWKILHDGVSYIEPASETTPQAKKRRAQRLTQALRKLGYQVALTPMAPPA

SEQ ID NO: 459002 - protein, 319 aa, unidentified
MMAQNGQVVAGIDVAKNKVDVCIRSLSQRLTSPGTEQGRRELIAWLGKHGVGKAVMEASGGYERSWAKALREAGMEVRIVDPKRVRRFACSAGRLAKNDTIDAEMIAWFAETFDKAPGQAYDAAREELQKLVRARQGLLDYQTRVQNQDEHEVPAAVQKMHARMLKQVAGEILKLDVAIAAMIEATPRFAELAKIIESVPGLGRITAANLISGMPELGRVSDKVAAALLGAAPYDDDSGRRRGPRRVQGGRRKVRNAFYMPCLGAATQHNPVIKEFYQRLLAKGKLKKVAIIACMRKLIVILNTMIARGETWDAERASH

SEQ ID NO: 459003 - protein, 410 aa, unidentified
MEVVHAHCAGLDVHKETVVACVRHMADGKVTTTIKTFNTATQELLALSDWLSAENATHIAMEATGVYWKPVWNILSDGEFELVLGNAAHIKNVPGRKTDVKDAAWLADLMAHGLVSGSFVPDQTTQEMRDLLRTRKQLVRERTSHTQRIQKTLECANIKLDSVVSNVVGVSGRRMLEALISGRTDPKELAAMAHGRLQATPAELEAALRGRVTAHHRFMLKLHLDQIDSFDEAIARIDKEVKDNDKNFRAAVELLKSVPGVGSLAAEVIVSEIGIEMNRFATAGNLVSWAGLCPKNDESAGKRRSNRLKAGAPWLKTTLVQCAWGAARSKETYLHAQYVRIRARSGNQKAICAVAASILTTVYHMLKDGTFYVDPGPDYFDKRNKDQQANKLVNRLQNLGFNVTIQPAAA

SEQ ID NO: 459004 - protein, 379 aa, unidentified
MGWLPPSLDGIAMCQDVVLKEPRNGEDGDMNDTMIGVDLAKSVFQLHGASMTGQLKYRKKLTRSQFRKFMADQPPSVVVMEACGSAHYWTREMVRLGHDVKLIAPQYVLPFVKRQKNDAADAEAIGIAAQRPEMRFVEPKSQEQQARAVLFRARERLVHQRTELVNALRAVLYEFGHAVPKGIGNIKRFDVILEDPNCDLPALVRDECGDLVKQISEQTIRIDAKTKTAKEMATTADTARRLQTMPGVGPLTALAVEAFAPAMQSFKRGRDFAAWLGLVPRQHSSGGKERLGRVSKAGQTDIRRLLIIGAMSRLNWMGRKTIAEGSWLARMLDRKPRMLVAIALANKMARGIWAMLTKNEDYRDPVPAVAARSTCAAAT

SEQ ID NO: 459005 - protein, 416 aa, unidentified
MQSAPTTLSSAPPNGLTCGIDWAKDDHAVAVVDSAGREVHRWTVEHTNAGLHGLLRRLARTGVAEVAIERSDGPVVDALLGGGLTVVVIAPSQLKNLRSRYGSAGNKDDRFDAFVLADTLRTDRARLRPLTPDSPATVTLRASCRARRDLVTHRVALANQLRAHLQTVFPAAVGLFRDLDSPISLRFLTRFDCQDRADWLSVNRLAAWLASVGYCGRVDPAVLHARLTAAPRGATGEHGTAAAHVTHALLAALTTLVEQIKALTEQIDEQLDLHADAHIFTSLPRSGRVRAARLLAEIGDCRARYPTPEALYCSAGAAPSTRQSGKHRAVTFRWACDKQLRDAVCDFAADSRHANPWAANLYQRAIDRGHDHPHAVRILARAWLYIIWHCWQHGVAYDPAQHKALQRLTQDHQAAA

SEQ ID NO: 459006 - protein, 369 aa, unidentified
MNDITYVGLDVHKATVCVAIAESGRGGEVREVGIFENRPDVLRKMVARLGKQRHRLNFCYEAGPCGYGLHRLLTGLGHDCVVVAPSLIPMKAGDRVKTDRRDALMLARLHRAGELTPIWIPDAAHEAMRDLVRARATAVRALSKARQHLQGFLLRHDRICHGSRAWTLAYRRWLTTVRFDHPAQQIVLQDYIHTVEDAECRRDQLTRQIEELMPTWSMAPVAAALQAMRGVALVVAVTVVAEVGDFRRFTNARQLMAYLGLVPSEHSSGSTVRRTGITKAGNALARRVLIEGAWTYRMSARVSRKLHDRLEPLSAAIRDIAWKAQVRLCARYRRLAATGKPKVVVTTAIAREMVGFIWAIACVAQPELT

SEQ ID NO: 459007 - protein, 343 aa, unidentified
MDHYVGIDVSLDDSSVCVVDATGRIVREAKVASEPEALIGFLGGLDLRLARIGLEAGPLSQWLQAALVKAGFEAVLLETRHVKAALSAMIVKTDRKDARGIAQLLRMGWFRPVHCKSMPAQEVRALLVARKQLQAKMRDVELSLRGLLRGFGLKVGEISKGQFAARVRTLVAGHVMLERIAEAMLQAREALRVEFGKLHRAMLAIVRADAVCRRLMTVPGVGALVAITFTSGVDAPERFARSKGVGAHFGLTPRKYQSGETDVTGAVSRVGDAMVRTALYEAAHILLTRAVRFSALKRWALEVAKRRGMKRAKVALARKLAVVLHRMWVDGTNFRWGREATAA

SEQ ID NO: 459008 - protein, 337 aa, unidentified
MKRYLGVDLHRTQFVVCTRWENGEQEIRQWRIGELARFVEQLQAEDQIAVEAMGTTARFYDAVAGRVERVVVVNPHQFKVISESVKKTDRKDAQALALYLEKDLLPEVRMKPKQNRELMHLAETRDLLVKQRSALKGKINNLLAMQGIELKREALSSKIALARVLALPVSGMVQLELRILVEQVRALSESIAELDERLEEEGQQLPGYENLTSIKGIGALSATVLLTVIGKISDFADENKLAAYLGLVPKIANSNESERSGRITKQGNKLARTALVQCGLVAKRYSPYLSRFYERIKHRRGGGKAKIALARKLVKIVYDTLKNQWVFEDFPSFTLAA

SEQ ID NO: 459009 - protein, 356 aa, unidentified
MQHTILNFINQHFFVGIDVHLKQWKVTIRSNAIELKTFSMNPSPEELFQYLQRRYPDGKYHIVYEAGFCGFWIQRTFTDLGIQCIVVHPADTPTSAKEKVHKTDPVDSRKLARELENGSLKAIYVPQVASEQLRSLMRLRFRLVQQQTRTKNRIKGFLRVNGINIPAVHLTNPRWSGAFILWLKSIKPSHDAGSYTLGNLILQLEQTREHLSNVLKQLRREAKSKNLASAFEAIDSAPGLAFITTMTLITEIIDINRFSRFEPLCSFVGLVPSVYASGDTSYTRGMTFRHNQYLRPLLIEAAWTAVRKDPAMTLRFNELCRTMSKQMAIIRIAKKLLRRIFHLWKQQDRYVYALVA

SEQ ID NO: 459010 - protein, 245 aa, unidentified
MSISKTFIGVDVSKERLDCFCRPTGTTFSCDNTLPGIAALVQWVEAQQPQLIVLEATGGLERPLVAALVVAQLPVVVVNPRQVRDFARAIGQLAKTDRIDAAVIAHFGEAVNPEVRPLPDHLTQQMDALMTRRRQLVQMLATERNHLVSTPGQVQNYVKEHIVHLEELIKQLDQDIDQMITTSPIWKTKENLLRSVKGVGPVLSRTLLAELPELGRLSRQEISKLVGVAPLNNDSGKYKGKRSCW

SEQ ID NO: 459011 - protein, 273 aa, unidentified
MNYLCISAEQLVLPVLGLDVAKASVQAELRTKERKVRFDFANNAKGFAQLARVLDQQGAPKIWIWAGLEATGAYSQALALWLHAQGHRVSLLNPRRVKQYAQSAGRRNKTDLLDAAIIADFVCAMKPAPWQPPTLEVAQLQALVRRREELSVMLQAEKNRLEGLLAEMARPGQVERARQAAAHAGLVPRREQSGSSVRRNRGLGREGNRYLRKALYMPALVAIKYNAPLSHFASRLRSAGKPKMSIVCAVMRKLIHIAFSVLKHQQPFNPSLA

SEQ ID NO: 459012 - protein, 351 aa, unidentified
MPAPTEIAVSVIGIDIGKNSFHIVGLDQRGAIVLRQKWSRGQVDVRLANMPPCLIGMEACVGAHHLSRKLRALGHDARLMPAKYVRPYCKGQKNDFRDAEAIAEAVQRPTMKFVATKTADQLDLQALHRVRERLVSQRTGIINQIRAFLLERGIAVRQGQRFLRVELPRILAMPPDVLSPRMVRVIEDLASDWRRLDERIETLSSEIETLARQDAGCERLMSIPGIGPIISSAMVAAIGTGDGFSTGRDFAAWLGLVPRQISTGDRTILGKISKRGNRYLRVLFVQAAWVVLVKVKPNRWDGHGLKHWIEAAKKRLHHNVLAIALANKLARIAWSVLARGRAFEASKLQAA

SEQ ID NO: 459013 - protein, 318 aa, unidentified
MSRKKPQSFIGIDVCKQQLEVAAHERDYQFRCPNKAGALGALVAELIDLQPALIVLEATGGLEIPVVRALYAAGLPVVVVNPRQVRDFAKALGQLAKTDRLDARVLAHFAAAIKPPLRPIKSKEEQELDALTGRRGQLIEILTDEKNRRASAASDTVRDQIEQHIDWLKDRIAELDEQLKALLQSSPAWQAKDQILQSVPGIGPVASFLMIADLPELGRLNRQQISKLVGVAPLNRDSGQHRGTRHIYGGRARLRSVLYMAALTAARHNPVIKEFYQRLRANQKPFKVAITACMRKLLSIINVMVRESTPWKNPEVPV

SEQ ID NO: 459014 - protein, 340 aa, unidentified
MSTQFFCGVDLAKHHFSLHAVDDHGKVILHKSVSRAKLLATLANMPTMCIGIEACSGAHYWAREFNKLGHDTRIMAAKYVGPYRTKGKNDLNDAVAICDAVQRPNSRFIPIKSPERQAILATHRVREHWVNERTALINRIRALLAEFGIIIPTGRAAIHREVPLILEAVENGLPDIARAVVADCFDHLQTLNQRIADTEQCFDMVTKASPNAQRILNVRGIGPQTATAIIATIGKGEQFDSGRDFAAWLGLVPKQYSTGGKPRLGRISKRGDKYLRTLLVHGARAVITNLGDKQDRLSVWGRNVLERRGMNRAIVALAAKNARIVWALLHHQTDYQDYAA

SEQ ID NO: 459015 - protein, 336 aa, unidentified
MNYVGLDIHKKFTLGVIKDKEGNLLNKSKFENTQENFDLFLKDCKPEETKIVMESTGVWEFIYDLLESRKYEIKLANPLKTRAIASARIKTDSVDANTLCDLLRANLVAESYIPDKETRKIRDVVRQRKSIVKGRSQIQNKIHAILTRYGIKLPYATLCDSAVIWMLEEGMNDLPSVKTTLISYINLLQKYTEELDAIDGRIKEIANTSSKTNLLMTVPGIAEIRAVEIMAEIADINRFENSEKLCSYAGLVPSIHQSGDTLKFGNLIKQSSRSLKSVLIEACWNIVKTKEENQLQIFYMKLCFRKSKQKAICATARKLCCIVYAMLKKNREFHYS

SEQ ID NO: 459016 - protein, 356 aa, unidentified
MKQVKTLSFAGQDIYCGIDVHKKAWSVCIRDDERELSSFSQPPQPAVLTDFLGRNYPHANFHAVYEAGFCGYWIQQALSHQGIDCIVTHAADVPTSDKDRRQKTDAVDCRKLAKELSEGSLKGIYIPSRQIIEDRSLVRGREQLVQDQTRYKNRILSWLHFFGIIIPEGYKKNTHFSRRFISWLEQLQLNESTKLALQVKLGGLQCIRQQLLLANRNLRKLALFDRYQKQVELLRSIPGIGITNAMIFLTELDNIARFETFDHLCSYAGLKPDIYSSSDTIIIKGITHRCNSLVRESLVESAWKAVAKDPALLMAYKQYKKRMNYNNAIIRITKKLLSRIRYVLLHQTCYVTGVVG

SEQ ID NO: 459017 - protein, 423 aa, unidentified
MPYRIAGIDVHKKKLAVVAADVEVEDEYQFERRWYGSNPEQLQVLAEWLIQQQVEEVVMESTAQYWKPVWGALEQYWKPSCEKREGAGRMSGTLHLAQALSNRGRRGRKKDFRDAERLLKRLVSQELTLSFVPHAEQRLWRTVTRTKYQLRRNKVRLHNQLEALLEEAHIKLSSLVSDLLGASARRMLQALAEGETDPAALAALADQRLRATSAQLRDALGACTELNPIYRRLVKMALEELQRIEQQIGQLDQEMASLLRQHQDAVQRLAEVPGLGVDSAQQIIAEVGAKAATFASAKNLSSWVGACPGEEESAGVNSSPRSPKGNRHMRRLLNQAANAAVKRKGSIFEMVYRRLVPRLGHNKTIGAIAHRICQLIWMILHKGVRYEERGPAVCEQSKRVRTVRMIRTLRKLGYRVELLGDPA

SEQ ID NO: 459018 - protein, 310 aa, unidentified
MMDAQYVGIDVSKDRLDVHVQPSGESFAVARDGEGLAALIARLQPLAPRLIAVEATGGFEIIVAASIGGAGMPLVVVNPAQVRHYAQALGKRAKTDKVDAEVIARFAEATKPEPRPLPDEATQLLADLVARRRQIIVMMVAERQRATRLPKRLKKSCERVIRVLEKELAELDREIDTTVRGSPAWREKEDLLASVPGIGSITARTLIAELPELGQLDRRKIASLVGLAPFTRQSGKWRGKSFISGGRGSVRAALFIATLSATRHNTAIRLFYEHLIAAGKPKMVALVACMRKLLTILNAILREQKPWQSA

SEQ ID NO: 459019 - protein, 410 aa, unidentified
MEVLHAHCAGLDLHKDSVVACVRHMVDGKVTTEVKTFRTTTQELMSLSDWLSAEGVTHIAMEATGVYWKPVWHILSDGEFELVLANAAHVKNVPGRKTDVNDATWLADLMAHGLIRASFVPDEPTQQMRDLLRTRKQLVRERTGHTQRIQKTLEDANNKLDSVISNIVGISGRRMLEALIDGQTDPETLAALADGRLKATPAEREASLRGRVTVHHRFLLRLHLDQLDALDAAIARIDQEVDGNVELFRVAIELLSTIPGVSSLSAEVIVSEIGIDMSCFRSEGHLISWARLCSKNDESAGKRRSRRMKKGAPWLKTTLIQYAWAATRTKETYLHAQYLRLRSRRGPKRAIGAVAASILSAAYHMLQNGTLSQDLGANHFDNRAKGKQVLQLLNRLRNLGFAVQITPVAA

SEQ ID NO: 459020 - protein, 421 aa, unidentified
MYNTRVKHQKRSFVNDKALISTVDIAKDELMVYIRCPFGEEVKPFNVTNNYQGLKEYWATIMLYQKRYHLQDIIVGFESTGIYSEPLKNFMMDKAVKLVQINPMHTKKMKDITDNSPGQTDRKDTRVIADIIQLGHYLSLIVPEGAAAQLRELAHARENQMVHQTRLINQLEALIFKIFPEFVQIIKNLSTKTAQYLMSKYPTPQRLKGVSLEQLTSEIKMVSRGQLGKDLAQRIYQASRESLGTKEAQESILLEVNYLLGQLIQTAQFIKVLEKKMATALDQIPYAGNLLSIKGIGVVLLGGVIGEVGDFRRYRRQSDLVKLAGLDLYEMSSGKYHGLRRISKRGRWFLRKLLFYGALNTVRTGGILRDYYQGLIGRGMKKIKALIAVSRKLLRIMFALVRDNTYYHQKEAQINSLKVPA

SEQ ID NO: 459021 - protein, 341 aa, unidentified
MAGIDLHSNNLVIGVTEMDGKRVARSKLACELQEVDKFLKPFKQRLEKVAVESTFNWYWLVDGLRALKYPVVLANPAGMEQYSGIKHADDTNDAFFLADLLRLNILPTGYICDPELRPVRDLLRRRLLLVRQRTAQMLSFKGLYARTTGQEMKLSVLKQLDVKQAQRLYQHPANQLIAGMQIKHIGQLTESIEKIEKGVLAAARKLPCYGKLTSLPGVGKILGMTITMEVGDIKRFAGPGQFASYCRTVEAKCISNERKKGANNSKCGNKYLAWAFVEAANFARRFDEQCRRWFDRKAAKTGPVLPTKALACKLAKAAWYVMAENTQYDATRMFGQPAKSS

SEQ ID NO: 459022 - protein, 355 aa, unidentified
MNSLGIDVGKKKCRAALKDERGDIIREFFFSNNNEGISTLIQSASHYGKCTAVVESTGNMWIRIHDTLEENGIDTILANPYKTKIIAEAKIKSDKLDARILADLLRADLVYESYVPTKEFREKRSLVRHRISLVRNRTMLENKVHSLLDKYDYKSGLADIFGKSGIIWLKTLDVSTIDRLIMNTTLAAIENINVQIDTISKELAKYGWDSYDVKILLSMTGIDVFSAMLIATEIVDVKRFCTPWKLVSYAGLAPSTRESSGKTKTGRISKQGSPWLRWILVQCAMTAVRYDQRLKSFYERLKSKKGSAKAIVATAKEILVIIWYMLTRREFYRDMNKKRYEQKLSKIKKIKESAV

SEQ ID NO: 459023 - protein, 365 aa, unidentified
MDKAYYTTIGMDVSDRKTQVCVMAKTGATPKIVMETTIPTTKEGLAKFLSTQDRATPLAFETGMHCRWMNEVAEGMGFKAYVANPCRLRMITESKTKNDVNDARTLARIALADPGLLHPVKLRGAEHQKMLNLHEMRNLLVKQRTGIVVQLRAVAKSMGFRIAKCQAAVFHNLDRKAWPKEFRDIAWPMLKNLEQLAVTIKTYEKQIRELAETPTFKAQVERLMEIRYVGLYVATGFVAVTGGDMERFEKPRDIGPWLGVTPKQDQSGDIDRQCHITKAGSPFMRRLLVESAQMILRDGSADTDLKAKGLRICARGAKIAKRKAITAVARSLAVLMVAMLKKPDAPYVPLSERCEKELLAMRATA

SEQ ID NO: 459024 - protein, 345 aa, unidentified
MHIASIGIDLGKTTFHLVALGERNKILVRRKFSRSQLLAYTANLPASLIGLEACAGAHFMGAALREQGHQVRLIPAQFVKPYRKSNKNDFIDAEAIAEAVTKQNMRFVQIKTQEQLDGQAMHRVRDRLVQRRTALINEIRGFLLERGLTFAARPIYLRKNLPTVIEDAEQNLSSHLRWLLDRLWQEWKQTETEIEAITDEIERISNEDARCRQLRQIPGFGPLVSTATVAAIGNGSAFRRGRDFAAWVGVVPRQYSTGGKQKLYGISKRGNIYLRRMLIHGARSVLFRVKYDTGGFGQWVHRLAQRAPSNKVVVAIANKLARIAWAVLSSGQDYRHQPLQQLAAA

SEQ ID NO: 459025 - protein, 330 aa, unidentified
MTHYIGIDVSKNKLDIAWLKDTDKLKFKTKVFKNDHSDYAALINWLIANITDDLNNIHITLEATGVYHENIAYYLFDKKLNVSIINPAYVKSYAASLGSRNKTDKKDSMLLARYTYSAKPKLWTPPPAEARHLKSLLSRLDALQEDLQRELNRLEKTEATDTAPIVKASIEQMIVSLQAAIVKLNGDIDDHIDGHPNLKQDQYLLQTIKGVGPVVSKQMMSLMHNKQFSQASQMAAFLGLVPKHSESGLFKGKSRLAKNGSSAVRAKLYMPALVAIKHNPDIKAQYERLLANGKCKMQAVCAAMRKLVHICFGVVKHQQLYQARVELIST

SEQ ID NO: 459026 - protein, 404 aa, unidentified
MRRTDHRTAHPRSADHAHDTALFVALELSRSTWLIGSSTPGSDRISKHQVRAADTTALLVLLKRLKARAERSCSTTVRVISIHEAGLDGFWLHRFLEANGVESHVVDAASIAVNRRSRRAKTDRVDVEKLLDTLMEWARGGRRACSMVRPPSPAEEDERRLTREREALVIERTRHVNRIKGLLATQGVFGFEPMRKSHRKQLEQLRGWDGQTLPPRLKAELARELNRLELVISQVAAVEDERDRALKAQQHPASSISAPEAAAGAQPVAIEHAGQLLLRLRSIGPEFASVLSSEAFYRNFSNRREVAGYAGLVPSPWKSGGIDVEQGISKAGNARLRKTMIQMAWLWLRHQPGSTLSRWFHERVGDRRGKICRITIVAVARKLLIALWPYVTLGLVPEGAELKV

SEQ ID NO: 459027 - protein, 308 aa, unidentified
MGKAFVGIDVSRDCLDVYVRPLGNGWRVSNTPQGRALLVERLTALDPELVVLESTGGLEHAVAWALQEAEIPTAVVNPRQIRDFAKAMGRLAKTDALDAEVLARFAEVIRPEPRPLMGEATAQLGESVVRRQQLVKMVTAERNRLKRASPKMRLRIRRHLEWLEEEIAALKLEREEWKKRDRLLRGVPGVGPVLSATLLGCLPELGELRGKEIAALVGVAPFNRDSGHWRGKRGIWGGWATVRAAVYMAAVAATHWNPVIREFYLRLTGTGKPTEVALVACMRKLLVILNAIVRVEGRGDTTPLPLDP

SEQ ID NO: 459028 - protein, 319 aa, unidentified
MSRDVKYIGMDVHKEAIVIAVLSDGGKLVMESIIETKASSLLQFIHGLRGELHVTWEEGTWAAWLYDLLKPHVHQMLVCDPRRNALLKEGNKSDKVDARKLADLLRTGMLRPVYHGEHGLRTLRELGRSYQTISKDLNRVMNRVKALYRGWSIPGAGTQVYAPRYRQEWLGKIEHAGVRRRAELLYQQLDGLQTLRRTLRPELLAESRKHKAAKLLRQIPCIGPIRAARLMALMQTPHRFRSKRQLWTYSGLGIETHDSAQYCYVNGQLQRSKKPQQIRGLNRNHNHEMKEIFKGAATRASCGTVARLLCGFAGQRHEA

SEQ ID NO: 459029 - protein, 365 aa, unidentified
MKIMHWIGIDDHADKWTIAHFEGEAKEPTNEFELVPAEAGYRKLIGFAKGLKGEVRIVYEAGPCGYDLYRRLTKARLKCDVAAPSLTPTKPGERVKTNRRDAKKLARYRRSNELTLIAVPDEERESLRDLVRARHAVQKDLVRIRHQITKLILRYGHRYRDGQAWTTRFWVWLRKIKLSSQYSQTVLEEMIVTHDQRLAQRARYNVEIEEAAKKPEYLPYVQALAVLRGINTLSAMTILSELGDLRRFPTAPKLMAAIGLVPSEYGTGDKTNRYSITKTGNAHVRHIVVEAAWQYQKRPTAGPTIKARRKDRPQALLDIAQRCDLRLNRKFYRMTSRGKRSTVAVVAVARELVGFIWAIGQVVQP

SEQ ID NO: 459030 - protein, 417 aa, unidentified
MERMRILDAIRECCAGLDVHQAHVVACVLKGRLDEKPQMLIREFSTVLSGLLQLSDWLAELGCTEVAMESTGAYWKPVFNVLESTCQITLANAAHIKNLPGRKTDKKDAQWIAELHRCGLVSPSFVAPREIRELRDLTRYRRKLKGYQTSERNRILKVLEDANIKISTFMSDVFGKSGRLMLHALVNGEVIVPEQVAELAKGRLRAKIPELIQALNGRVTMHHRRMIQRCLEHLEFLERSIADLEAEMEQHFAPYQKEQELLETIPGVGAQVAKVILAEIGVDMSVFPLELHLSSWAGISPGNHESAGKKKRVSITAGNQSLKTALVEAAWAAARTRTFLSAKFWSISGRKGKKRAAIVVAHKILVIAYHILKTGESYKDLGYDYFEKRKTVSTEEWMIRRLQKQGYTITTPEGTTA

SEQ ID NO: 459031 - protein, 340 aa, unidentified
MNVNTKFFMGIDVSKPFFDAALLPVVDHKKEEMVCERFDNSHEGIKLFEKWLKGHKVCFDDNTLLVIENTGIYHRLLWSFCSKKNLPIHIGNAAHIKWSFGIARGKNDKIDSQRLCHYAYKESDELKASPALDPVLLQLKDLMTARTKLLSQINAIKVYIKELKNVSDKSIQKTLEQGYKQALDGMSASIKNFEAEIKKIIASNEAIQANYNLLITVPGIGHLTAVYLIGCTNNFAGKITGKQLACYAGVVPFGHKSGVSIKGRDKVHPMANKDLKKALHLCALTAIQFYPEFKQYYERKKAEGKHSMCVLNAIRNKIVLRAVAVVSKQKAYVDNTKMAA

SEQ ID NO: 459032 - protein, 335 aa, unidentified
MTITTIGLDTSKTWFQVHCVDADGRTVLRRKLARSKVLSFFANIPSCLVGLEACGGSHFWARELAKLGHDARLMPARYVRAYVKTNKHDAADAEACCEAVQRPGMRFVPVKTEEQQSMLMIHRARDLLVRQRTAAVNALRGHLAEFGIVAARGTAKAHELMRLAGDDERLPAMAQEALGYIVAQIHDIEIRLKSFEQRILSLAKENEVCKRLMTVQSIGPYIATAIAATVGDPRNFASGRHFAAWLGLTPKQHSTGGKEKLGGISKRGDSYIRRLLIHGARATVARVRSGQMKSAWLSGLLGRRHFNVATVALANKTARVAWAVMSTEQTYRRAA

SEQ ID NO: 459033 - protein, 342 aa, unidentified
MTTLLKQTVGIDVAQKELVVSLGRMNEQINIEIYAYKVFTNNQKGFSNLVTWVEKNTLAEIEVRYVMEATGVYHESLAYYLFGIEKQVSIVLPNKISNYSRTLDIKTITDKSASQAIARFGLERQLELWQPPSKIFNELRQLCREREQLVQERTMLKNQLHAERTSAIPNSRSIERISKRISLLDTQEKEIKEDIAGLIQADGYLMGKMKILSSIPGIGNLTAVTIIAETNGFELIRNKRQLVSYAGLDVREKISGTSVKSKPRISKRGNRNLRKVMHFPALAAIRTDERFKGIFARMVSKHGIKMKAAVAIQRKLLELTFILWKTDTFYDTEYLHQNIEVK

SEQ ID NO: 459034 - protein, 370 aa, unidentified
MTISNLLFIGMDVHKDSIEIAIADGDSHEVRRYGRIGGTHDAMRKTLRKLVSQGKSLHFCYEAGPCGYELYRYLVSEDHDCWVVAPSLIPKRPGDKVKTDKRDAVQLARLLRAGELTPVYVPNREDEAIRDLSRAREDTMLVQKSARQRLKSFLLRHDIRYQGKTSWTEAHLRWLADEVRCPSPAQQIVFQEYVNAVTESQQRLHRLDEQIKHFAQAWRLYPAVKALMSMRGVKMIVAITVVSELGDLSRFENPKQLMSFLGLTPSEHSSGPRQKRGGITKTGNGHVRRILIEAAWCYRYPAKVSREMQLRQEKLPLVIRDIAWRAQLRLTQRYQHMQRKGKPHNVTVVALARELAGFMWAIVNEVKYPR

SEQ ID NO: 459035 - protein, 355 aa, unidentified
MERRTAMQHYAGIDVSLELLSVCIVDTKGKIVKEAKVGSDPDTLVAFLRGLDLAIERIGLEAGPLSQWLHAGLTSAGFEAVLLETRHVKAALSAMTVKTDRKDARGIAQLIRMGWFRAVHCKSAGSQEVRALLVARKLLLSKLLDVEFSIRGILRGFGLKMGMVTRKRFEARVRELYAGHAMLEQICSAMLTARSTLQTEYAKLHKALLVIVRKDEVCRRLMTTPGVGPLVAITFKTGVDDPSRIHKSKAVGALFGLTPKKYQSGETDVTGGITRAGDEMVRTALYEAASVLLSRVTRFSALKRWGMDVAKRRGTKRAKVALARKIGVILHRMWVDMTSFRWTKGAPTTMRLARV

SEQ ID NO: 459036 - protein, 338 aa, unidentified
MKDIKYFIGLDVHKERTSYCVRDKLGIILTEAETATLYSELEPRLKPYLAYSLIALEASTSYYTLYQTFLKKGYRIKVANTIQLRQLIAKNDKLDAQRLSEMLRLGTLPCSYIPEEKIQHLRSMIQMRHALMQEKVRCNNRIQAFLDRNGVVMPPVKAFSKKWKHALMQHLGTGTASMELRYEYNHYAYLEKTNEQADQEIIGYTKTYWKLEYNLLRSITGFGVLLPCYVIAFVHPIERFLSNRKLRRYAGVIPLSKESGDTTSPGRIPKTTSKALLRWALVQAANTIGKTNTRLGRYYRRKKNQKKKSGIAKIAVASTLVDIIYKVLTTKKPYVSTC

SEQ ID NO: 459037 - protein, 317 aa, unidentified
MSVASEVFVGIDVSKAELEVCWLPQLGRLQVAREEAGLMQLVERLKALGPSLVVLEASGGYEMPVVMALAGAGLPCVVVNARQVRDFAKASGKLAKTDRIDAQVIAEFAQAIRPQVRALPDEAAAHLIALVARRRQLVEMLIAEQNRLALSHAVVREDLKQNIAWLKSRLQDLDGELSRAVRESPLWRESDKLLQQVPGVGRVVSAVLLALLPELGRLSPKKIAALVGVCPFNRESGRWNGKRAIFGGRAGVRSILYMAIVSAIRWNPLIKTFYQRLLAAGKPKKLAMTACMRKLLVILNAMMRDRADWNPNGALAT

SEQ ID NO: 459038 - protein, 415 aa, unidentified
MELVVERAAALDVGKDEVVACIRVPAAGVGQGRGRRRQEVRTYPTFTSSLETLADWLQTEGVTQVVMEATGQYWKPIWYVLEERGFQLLLVNARHVKILPGRKTDVGDAAWLCELLECGLLRGSFVPPPAIRQLRDLVRYRKRLIQAHTAECQRVQKTLEDAGIKLDSVATDVLGVSGRAILKALVAGERDPKTLAELAKGKLRKKLPQLRQALRGRFGDHHALLVGLALDHLEHLEAAIARLDARVDEVIAPFAVARDRLDTITGVGKRAAEAIIAEIGVDMTVFPTAGHLASWAGRCPGNNVTGGKRRSGKPTRGNRWLADVLTECAWAAARSRDTYLSAQFWRLARRIGKKKAAVAVGHSILVIAWHLLTEDCNYHELGGDFFIRRDSDRARQRAVAQLQALGYQVTLQPAA

SEQ ID NO: 459039 - protein, 353 aa, unidentified
MRKMQEYIIKCNKIFIGLEDSKKTWKLCVRCDRIEIHEVSMPAKYDVLQTYLKNKYPDCDISVMYEAGFQGFWLHDLLIKDGIHCIVTPANKVTQAKDDRVKTDKRDARRLAKNLENGDYVSCHVPDRERREDRQISRTMNQVQKDITATKNRIRCFLDYHGLNEGLKTGTWTDKDYRQLENLALSHSLRVSLQAHLRILDELLTVKKELMAELRALCEKERYKVGVLAKKSSPGIGWLTAIRLTLEWGDMRRFPSGKHLASFAGLTSSEYSTGETVRRGRITGQSAEYIRSWLIECAWRASRKDPVLLDKFRRVWRNSGSKKKAIVAVARKLSVRLWALETLGQTYSIGVIE

SEQ ID NO: 459040 - protein, 470 aa, unidentified
MGKQKRKVIVLEPDAAGIDIGAEEIYVAVPPDREQQSTRRFGTFTSDLNALAEWLRLCRIRTVAMESTGVYWIPLFQILEERGFTVYLVNAHYLKSVPGRKSDVSDCEWIQYLHSVGLLRTSFRPPDHICAVRALWRHRASLLQMAAEHTMHMQKALSQMNLQIHHVLSDITGTSGLAILDAIIGGERDPATLAKLCHFRVRSPRETVAKALEGDYRPEHLFTLRQSLEGYRFHQKLIVDLDCEIARLMQALPSAAENPALPTIRTKPTAYRRQGNDPSFDLRGELYRIAGVDLTDIPGVSTATAQVILTEVGPDISRFRHASAFASWLGLCPEKRVSGGKVLSCRTRRVAHRAATALRLGAHSLSRAKGYFGDFFRRMRSKLGTASAITATAHKIARVVYHVLLTKEPYSETVFHQCEEQNRQRAQLRLRRYAHQLGFQLVPTVSQEMGVSSLGDDQLLREGRGWSCAW

SEQ ID NO: 459041 - protein, 430 aa, unidentified
MKNSVANKLKQAPVGYLVIGIDPHKKKHAAVIMTQDFTTHSKFKFNNSKEGFEMALERIRIEMVRTGSRGAIFAIETGGHYWRNLAYFLDERGIPFHFINQFTLKRRREGKDLNRRKNDYRDSEVAAQLLCTGEFTDTKLSHGVYAELRAAHNAYRRLVKERTRIINLVKGLLDGLFPEFTQVFKDPCGLTALSVLSISPVPEGIAAMTEDEFVNTIRTGHRGLLMRKKLCALHYAAQTSIGVKADAQSVSYELSFLVEKLQLIKRHICCIDETLVRLVNETEEGKYLLSIIGLNYISVAGILAELGSFRSYRSAKQLIKMAGSNPTESESAGKRSGHTPMSKKGRPVLRYCAWTAVIPMLRFNPDFRAWAKKLRERPVHANPLSGREIVGAALNRLLRLAFVLVKNQTFYQVPEIELIPELELLPVARR

SEQ ID NO: 459042 - protein, 319 aa, unidentified
MAEKTSVVGIDLSGERWDVNYRATGATASFPTDEAGQERLRAWLNHHAPGAMIACEASGGLERHLVAVLVPAFQVRVVDAGRVRKFAQSAGLLAKTDRIDAGVIAHFAETFPGRPVKPDAARAALSEWVRAHDGLVEAITALQNQTSHITLAELKKLQRARIAALQQDLTVIDQRIAALIKASPVFAADARLLRSVPGIGPVNVARLIARMPELGQISNRKAAALVGVVPYDRQSGRRDRSRQISGGRSDLRTGLFMAALTAVQHNPALKPFYERLLARGKEKMVALVAVMHKLVVILNTILHTRTPWVDKTKSAACAG

SEQ ID NO: 459043 - protein, 342 aa, unidentified
MQVTTIGLDIAKNVFQVHGIDAAEKVVVRKQLRRSQVLEFFKALPPCLIGMEACASAHYWARELTKLGHKVRLMPARDVKAYVKRNKNDAADAEAICEAVRRPTMRFVQVKSAEQQSQLMLHRTRDLLMRQRTQVINALRAHLAELGITAAQGNAGLRELLAIIAGAADDRLPAEAHASLIVLAAELQAMRTLIASIEKRIIAHHRSDEASKRLRSIPGIGLVGATAIVATITDPKAFRSGRDMAAWIGLVPRQDSTGGKQKLGPISKQGDRYLRRILVVGAHAVLKLARQKPEKYPWLTQLLARKPFKVVAVALANKMARIAWALLVKGGPYRARALVAAA

SEQ ID NO: 459044 - protein, 441 aa, unidentified
MNVKGTKKKNQVVSANIFEQQEIVATIEAIKSNLKASTWHELETKGKFDKNAKLTFISDDMLILGCDVGSETHYVRAIDTRGRELSKSAFPFSNSAEEFQSAKDWAVELAARNNKHQIVMGLEPTGHYWFCLATWMISNGISVVQVNPYAVKQTKEVEDNSQLKDDTKDPKLIANLVKDGNYGMPYLPEKLYADLCRLSMFRDQLNEDRIRAINRMHREMKICFPEYKSAFGKIDGVFCLEVLKRAPFPEDLIALGVDGIRQIWHDAKLRGRGYSRVGEILQYARESVGIQDGADASKLVVKWFVEKIMELDEQLSDIENQMNEKCLKIPHAGNILEISGIGENILSGILAEMGDISRFDDEKEIQKLSGLGLVACNSGKHKGQTKISHRGRKRLRYWLFQAAKSAVGHAEEFKELHIYYTTRTENPLKKMHIDSNRLQTA

SEQ ID NO: 459045 - protein, 311 aa, unidentified
MTDDSIEIDISKDHLDVHRLSGGQYAQFTNTREGFAALHRWIGSTATARVVYEATGPYHGTFEQALRDHLPLVKVNPLQARRFAQASGTRAKTDAVDARMLARMGAAFKFEPDPHLPEDLPDLKELQIARTALIKDQTRLKNRFQTQTLAITRRHTKARLDQIARQLAQLDEEITSRLTASPKRQKAYEILQSIPGLGATTAATILIEMPEIGTLTNKAVACLAGLAPITRQSGKWKGQAFIQGGRKFLRDALYMPALVAARFNPDLTRKYQSMKAAGKPSKVALVTIMRKLIILANTLIKDDRKWVKNAA

SEQ ID NO: 459046 - protein, 412 aa, unidentified
MRIVYDHVGGMDVHKKTVVVTTSVKQADGSYHIERRTFGTMTSELLALSDWLMGNGVTHVAMESTGEYWKPIFNILEENFTVVLVNAQHLSRVPGRKTDQSDADWICELMQYGLLNASFIPPKGQRELRELVRYRTSFVRERATLVNRVQKVLEGANIKLASVVTDIMGVSGRAMLEAIVAGSATNEEMAELARGSLRGKRDELAKALEGRVKSHHRFVLTELLCQIDSLEESITRFDQEIEAISRPFEEAIVLLDTIPGVARQTAEVIVAEIGIDMSRFPTADHLASWAGVAPGNNESGGKRRSGKTRKGNQHLRTALVQAANAAARTRGTYLRAQYQRLAPRRGHKRAIMALAHSILVIAYHLIARSQPYRELGGDYFDTISPAKTAKRLIKRLEHLGFQVSIQETPAAV

SEQ ID NO: 459047 - protein, 370 aa, unidentified
MGEGTTFIGLDAHKKTIQVALLTPGSRVHVEWEVQNEPAAVRRLAKRLLREGTGRVRACYEAGPCGYALQRQLQEAGVDCQVIAPSLIPIKPGEHIKTDRRDARKLAELLRADLLTEVHPPTPEEESIRDLCRAREDAKEDQLRNRHRLVKMLLRRGILWPPGRNSWTQAHREWLRGLVFERESDRAVFDDYLLALEQVEERVRTLEAKLESISQAEPYREPVAWLRCFRGIDTVTAMTIVAELHDFRRFTSPRGLMSYLGLVPKEHSSGESRRRGSITKAGNNHVRRVLIETAWHYRHPYAIGAALRKRREGQPAKVVAIADKAGQRLYRRFYRLGARGKPGCRIVVAVARELVGFLWSILYPRAAALA

SEQ ID NO: 459048 - protein, 458 aa, unidentified
MAQRAHHVPVSPAPTAELLPMASGMGYVGLDVSHAEVVACVLLPDGREAVRRWSVANTQPGAESLAQRLAAVAAAHHLAGLRIGLEATNLYWWHLACLLKDTPLLVAVPHEVYALNPKLVAGLKGAYSDGGKTDRRDAFFIAERLRIGRLPAPFQVDVLYAPLQRLTRFRAHLAHTLVREKNYFLNMLFLKFSAFSASEAFGDPFGATSVAVLEGFSTEELIQLPLEELAHFIQEHGHGRFADPAAVAATLARAARDSYLLDRVLDEPVSVVLGTAMATIRTLQAQLKEVDKTIARELAAIPPARRTISSIPGLGPVWTAGLIAEIGDIHRFADDGALAKFGGLVWHPHESGHFQADDTALSKAGNAYLRYYLVEAANSVRLHCAEYRDFYAAKLAQSPKHAHKRALVLTARKLVRLVDALLRAGALYQPQDRKEGQTRPHTARPRPQQRARLAASAS

SEQ ID NO: 459049 - protein, 387 aa, unidentified
MPASGPRPGQVAVQVSLAAIFVSLELSRSTWLITSLIPGGADKMSKHSVRSGDIAELMTHLAKLRDKAQARAEVSFSIIAIQEAGLDGFWVHRVLERAGIESHVVDAASILTSRRWRRAKTDRIDGEALLRTLLAYKRGEPRVCAMVRVPSPEEEDRRRLCRERRTLVAERVAHVNRIKGLLFAQGIADYEPLHGNRRQRLEALRTGDGRPLPLYLKAQIGRELDRLELLLEQLKTVEAERNALLEPTNDVAPVAVKALAGLRGIGPEFTAMLWSECLFRSFRNRRQIAAYAGLAPTPWQSGSVRHEQGVSKSGNPRLRSTMIQLAWLWLRHQPTSELSLWFRERVKRHGGRGKKTAIVALARKLLVALWKFSSSGVVIEGATMKAA

SEQ ID NO: 459050 - protein, 470 aa, unidentified
MAAVMIGVDPHKASHTAVAISAAEEPLGELRVRACAAQAEHLLAWAAAWPQRTWAVEGAGGLGHLLAQQLLAAGERVLDVPPKLGARVRLLAAGDVNKNDPNDARSVAVAALRSPGVREVRADDHAAVLKIWSKRYRDLGRTRTQIVCRLHAVLCELVPGGFPKAITAGQTAQVVGSITPPDAVAATRCELAAAFIDDLRGIDARIRETRKRLAVAVQAAGTSLTGLFGVGPVIAAAVIGDVRDVSRLPSRDHFAGYNGTAPIEVSSGPHKVYRLSRRGNRRLNHAIHMAAVTQIGHRHSEGRAYYDKKLAEGKTPKEALRALKRQVSNAIFACLQADARRAAARAEGPGGQQGNDSAASAAGSHPRHRLFGQATPGPGHHPTTAAGNRPPGPARARGRAGHSSIAATLPSATPRVQVERPQRSEDERPGGAARRRPHSAARKATGQGSPRKPQRPKGTSQAAKNTRGAP

SEQ ID NO: 459051 - protein, 348 aa, unidentified
MDHYAGIDVSLEYSSVCVVDGTGKIVREGKVVSEPGALIAWFESLGLKLVRIGLEAGPTSQWLYAGMKQGGLAMELLETRHVHAALATMTVKTDRKDARGIAELMRVGWFRPVHCKSMGAQETRAMLTARKLVQSKLHDIEMSLRGILRGFGLKVGKTTNRAFAGRVRELVTGHPSLETIAAALLSVREVMLREFNGFEKRVRVMARGDAKAKLLMTTPSVGPIVALTYGSAIDDPARFKSSKRVGPHFGLTPKKYQSGETDRSGRISKIGDAAVREALYQAAHVMLTRPIKGCTELKSWAMRIAKRAGMKKAKVALARKLAVIMHRMLADGQPFNPTARTRPVAAAA

SEQ ID NO: 459052 - protein, 385 aa, unidentified
MRSVGLDLGARHIAYCEVSDGVVVRRASVRRLGELEAMLGPESPAAQVAFEASREGWHVHDVLTGWGKQPVMLDTTRVQQIGVGQHGRKNDALDAEAMALALDAGRVPVAHVLSPERRALRAKLSVRGELVEMRARQVTLLRGLARAAGVLVASSSTDHFLQNLQEAPLDPATRALMSPLVATLTVAQEQLAAVDKEIAQVAKADPIIRLCATAPGVALIVSATFVSVIDEAKRFRNAHAVSAYLGLVPGENTTGGKRRLGSITKHGNTHARSMLVQSAWQILRAGDADDPLRRWADALAKTRGKRIAAVALARRLAGVLWAMWRDGTVYDPGLQARESARGLQTHAQSQELRAQAMVRVAKKIQRRERTPSRTSRAKTSRASAM

SEQ ID NO: 459053 - protein, 397 aa, unidentified
MKTVLSVDVAKNKSMIMLMNSDGEIFIDTKEINHNLEDFEKVKEINPQNLTVFMESTGTYHLPVERYFKENGFNTLVINSLTTKNNYDTIRKTKTDKKDCYRLAKLFFVNEVEYHDLSKKDLYANLKAMTRQYFYLLQNNVSCKNRYKRLINICFPELEKIFKSTRIYDDTALNFIKEFPHAEIVKEKRIDALYNNLYKTNGRNLNFYKKLATTIKTASINSYPGVDKEHEDVKNLSYMAKIVQNNNNIINELREKMIETAKQFPYYKIINSFYGIGDTLTAEILGELGDITRFDSPKEIIAFCGLDPTIKQSGKSINVKGAISKRGNKYARYILFNCSQMVVKLGASNYPEHPVYIYYQNKKAEGKHYYESLTACSTKILRMLYSMCKNNKQFLEN

SEQ ID NO: 459054 - protein, 344 aa, unidentified
MTIIRVGLDTSKSVFQVHGADEQERPVLRRQLRRGQIEKFFAKLPPTRVGLEACGASHHWGRVLRDLGHEVMLIPPQYIKPYVKRGKNDVIDAEAICEAMSRPGMRFVPIKSREEQAALMLLKVRDLLTKQSTMLSNAIRGHAAEFGVIGAKGPQKIKELLERIAGEANMPEPARELLNDLASQLAAVEVRLAALEAKLMAHHKADPRSQLLATIPGVGPVTAVNITLKVPDATVFRSGRHFAAWLGITPREHSTAGRQRLGKISREGDEGLRRLLVLGATAVIQQVERRRKAKKTSGNDSPWLLQLLARKPRKLAAIALANKMARTIRAMLVSGELYRRPQAA

SEQ ID NO: 459055 - protein, 354 aa, unidentified
MTEQDRRVIGGVDSHADTHHAAALDDRGRLLGTMVFAVTAQGYRQLLAWLGSFGEIDRIGVESTGSYAAGLTRHARGEGIQVLEVNQPHPHTRRRRGKTDAIDAELAARHALGLASSVQPKETTGQVEAIRQLRVARDSAVKSRSAAMLQLGDLILTAPSELREQLACRRTLKGKAGLCRRLRPDPRHVADPSHAARVSLRSLARRIEHLNREITELDTQLMPLVAATAPRTTALLGVSTGHAGQLLITAGQNIDRIHSESAFAALCGASPVPIASGKRGRYRLNPGGDRQANRALHMIAVCRLRYCPKTRAYAERRTTEGKTKKEIIRCLKRYIAREIYATLRHDLQALPNPT

SEQ ID NO: 459056 - protein, 349 aa, unidentified
MSHKLNSEIAVIGIDIGKNSFHVVGHDKGGAIVLRQKWSRGQVETRLANLPPCLIGMEACVGAHHLSRKLRVLGHDARLMPAKYVRPYSKGQKNDFRDAEAIAEAVQRPTMKFVATKSAEQLDLQALHRVRDRLVSQRTGIINQIRAFLLERGVAVRQGLRFLRADLPRILATPCDVLSPRMVRVIEGLVGDWRRLDERIEGLSNEIEVIARRDVGCERLMSVPGIGPIISSAMVAAIGTGDAFTKGRDFAAWLGLVPKQISTGDRTILGKISKRGNRYLRVLFVQAAWVVLIKPKSWVRHGLKPWLEAAKKRLHHNVLAIALANKLARIAWSVLAHGRAFEASKIQVA

SEQ ID NO: 459057 - protein, 344 aa, unidentified
MTLVGCDLHTRKQQVAALDTETGEMCERELVHDGSGVEEFYAALPRPVTVGIESTGYAIWFHALMQRLGHTVLVGDAAKIRAMVVRKTKTDRRDARHLLDLLRHDRFPTVWVPDPATRDLRALLTHRRRLVRIQTMLKNGLHAIALNQRLARGAKLLRHAGVAQLQALPLPPYTAQRRDHSLELLEIVHTKIQQLDGAIATAALAHPDAPRLLTHPGVGPLTALATVVVLGPVTRFADAKHVVSYVGLAPSLNASADKYRLGHITKQGSSLLRWVLGQAAPHAARLDVDLKRTYFTLRHRRGRAKARVAVTRKLLVRLFIMLRDHIDYAEFRRRGRPPAPVPAA

SEQ ID NO: 459058 - protein, 354 aa, unidentified
MQITNNGFINLNLEKIELIKTGIIYDHYIAIDWSQKSMAIARISNKNPDKVKITIGLANLSGLKEHLNKIKGTKILTIEESTPAHWLYVELYDCIEKIIICDPYKNRLLGDGAKNDPIDAKKLCLLLKGGLLHEVFHTTENIYKLRKLVTSYEDIIVQSVRLKNQRAGFLAQNGKSKKTKELPKEKIEKLIQESQDKLINGYTEVKEKYLEEISIFCKRDKRLRFMKTIPGIGEILAVKILAMTVDPRRFKNGGKYLAYCGLVKHAKESGGRIYGRRNTRYNRVLKSAYKTAALAAIGGNNPVREYYEVLIKNGLAEYNARHTIARYIARLCFGIMKNPKKYEPYLWRKNRCEK

SEQ ID NO: 459059 - protein, 344 aa, unidentified
MSKFNLISIDLAKNVFQVGKFFHQKLQSNKAVSRKELLTILTTSPRCKVVMESCGGAHYWARKARSAGHEVVILDPRFVKAFRVGQKTDANDVIAIAAASFSPNVRPCKSLTQAQQSLQSIERMRALAEKQKRQLANQIRGLLLEFGIVIKQSECAFRQAIPEILEDSDNGLTAGLRQCLAQCYELFKAQSTLKETLNELLTGLVKQDEQCERLLALEGVGPITAVGLLISLSDTTHFTSGRNAAANVGVTPRQHSSGGKVRIGHIAKYRGEITLRSHLFLGARAVISQLKHREPKTKKEQWLKALVERRGVKCAAIALANKTVRTAYAMLKKGTSYEPSLLAN

SEQ ID NO: 459060 - protein, 371 aa, unidentified
MGESSKTLFVGLDVHKDTIAVAYAAEDRSTEVVSLGMIGTRQCDIDKLIRKLESKGAPFTIAYEAGPCGYWLYRYLTRRGLSCIVVAPSLIPRKPGDRVKTDRRDAVTLARLLRSGDLSSIYVPTVDDEAIRDLSRAREDAVRDLKRSKVRLKAFLLRQDIRYEGRANWNAAHLRWLARVVCPTAAQQIVFQEYVHTVTEQTERVQRLEVELHTAVKTWRLHPIVEAVQALRGVDLTGAVTLIAEVGDLTRFDTPRKLMSYLGLTPSEYSSGERRRQGGITKAGNGHARRALVEGAWAYRYPAKVSRHLQLRLENVPTEVRAIAWKAQLRLCKRYRLLSARGKHVNQVVVAIAREMAAFAWAIARTVPMAS

SEQ ID NO: 459061 - protein, 348 aa, unidentified
MEHYAGIDVSLEYSSVCIVDGGGKIVREGKVASEPAALIGYFQSLGFALSRIGLEAGPLSQWLYAAMRQAGLAVELLETRHVHDAFKAMPVKSDRNDARGIAQLMRLGWFRPVHCKSIAAQEVRAMLTARKLLQSKLRDVENHLRGVLRGFGLKVGHTTARSFAGRICELVSGQANLETITQALLAVHAVLLREFNGFEKRVRIMARTHVQAKLLMTTPAVGPIVGLTYACAIDDPARFKSSKQTGVHFGLTPKKYQSGQTDYTGRISKIGDAAVREALYQAAHVMLTKPVKGCSQLKSWAMRIARRAGMRKAKVALARKLAVIMHRMLADAKPFDPAAATKPVAAAA

SEQ ID NO: 459062 - protein, 341 aa, unidentified
MKQSMTIGIDLAKSIFFVVALSPSGKQLQRKKLRRSQVMPYLANQPQCTVALEACSGAHYWAREIQALGHEVKLLPPQHIKAYLRRQKNDYNDAEAIAEAAQHGRIRPVAPKTVDQQLDQNLHRLRRALVADQTRLINRTRALLAEHGVVIPEGKARFGSTVAALLEGDENSLPWRLRQLLGRQYQQYRLWEEELAWYTQEIERHAEQDEVCQNLISVPGFGPISSSAFRSWMGNGQQFKCGRDAAAALGLVPRQHSTGGKSILGGITKAGDGYLRALLIHGARAVIRYASKHNDRLRQWVLSLVERRGYNKATVALANKMARIGWAVIARSRRYQPVPCM

SEQ ID NO: 459063 - protein, 418 aa, unidentified
MIEDVQWFVGIDWATQSHRVGLLDIEGRHVSERDFAHGGAGMTELRDWLLEKTKAAPGQIAVAIETPHGPVVETLLDHAFQVFAINPKQLDRFRDRFTVAGAKDDSRDARVLGSALRTDRQAFRRLVVDDPLVIELREWSRMAEELQQERIRLANRIRQQLWRYYPQAAELTDDVADDWFLALWQQVPTPATAAAASEEAITRILKDHRIRRLDATTVLQTLRKTPLFVAPGTTEAACAHIRAVAARLRLVNQQIKEAHRALDGLCAKLEAPTDSPSGQNREQHDVTILRSWPGIGRIVLATLLTEATEPLRARDYHALRALAGTAPVTRRSGKQCFVIRRLACNKRLQNAVHHWSRVAIQHDTAARRRYDALRRRGHGHARALRTVGDRLLYALCTTLNRQTPYNPNCQTAQVTAGL

SEQ ID NO: 459064 - protein, 391 aa, unidentified
MICVGIDVAKDKHDCFILNSEGEVLADVFTIPNNAEGFDTLWQAIRRCARPADKIKVGLEATGHYSYNILGFLLNKGLPTFVINPLHTNLYRKSLSLRKTKTDRVDARTIATMLMSDVDLKSYTDTSYHNEDLKSLTRYRFDKVRERAKLKTSISRLVCILFPELEKLVPTLHLASVYALLSEFPGSKQIASAHLTRLTNLLHEASKGRYGREKAIEIRDAARNSIGSAMPAKSLELKHTIRLIGELDAEIEEIEKEINSIMDAVHSPITTIPGIGNRMGAMILAEVGDFSNFDSPDKILAYAGLSPSTYQSGQLTNCYSHMEKRGSRYLRYAIFNATKYVCIHDPTFASYLARKRAEGKHYNVAVSHAAKKLVRLIYAMEKSQQPYRPAA

SEQ ID NO: 459065 - protein, 360 aa, unidentified
MKKVSKQMRNLEVAEKPEMTLGLDMGDRYSHYCLLNPQGDVVEEGRMQSTEAALRRHFEDEPEMRIALECGTHSPWVSRLLTALGHQVIVANARKIPAITGSESKNDRNDAEKLARFAAYDPKLLSPLQHRSSERQLDLNLIHARATLVRARTMIVNALRGLVKSAGGRLPACSTESLPARAPAAIPPALAAVATPLVQQIALLNAQIEGMDKQVEKLGAKYPEIQLLRTVPGVGPIVAAAYVLTLDRPDTASNRSAGAFVGLRPGQSQSGDSDPQRRISKTGDSCLRSLLVQSAQYILGRFGPDSELRRWGLKLAATGGKRGKKRAIVAVARKLAVVLHAMWRSGQRFQPFPQPATAAA

SEQ ID NO: 459066 - protein, 361 aa, unidentified
MDPSEQQPMTTAGLDLGDKYSYLCLIDSQSGEVIEEGRLRTSPEAFRRRFSSEQPPMRIAIEAGTHSPWASRVLEECGHEVLVANARKLRRIYVNKRKTDEVDAENLARLARVDPKLLYPLKHRGEESQAHLAIVRARQALVGARTQLVNHVRGAVKSFGARLPKCPARSFHNKAPEHIPEALLPALGPVLEQIGSLTERIKDYDRKLETISEDHYPETKLLRQVEGIGPLTALTFVLTVEDPHRFKKSRAVGAYLGLVPATDRSGDSDPQKRISKEGDEMLRKLLVGSAHYVLGPFGKDSDLRRHGEKVASRGAKNAKKRAVVAVARKLCVLLHRLWVTGEVYEPLYNTHRRQEQQEAAA

SEQ ID NO: 459067 - protein, 357 aa, unidentified
MDKYIGFDIDSKKVVACVVEKGKMERFTTMSSELYSMIKYLKAQKADGSRVHLVFEISGQAGFLYDALCDYADSVTVANPSKMTWIYRTAKKNDRMDARKMAVLLSIGEIPSVYMPSREVRQWRQTILHRKGIVQKITAVKNSIRALLKSKGFCSPCHKGSWWKKANRQWMRALSEGMEKGSVNLFTVQLGNFLDELDVFNEQLRRLTEYLDNYLKAQAGSDILLSIPGVGPRTTEAVLAYTDDVERFSSYKEYCSYFGVTPRLDESGSSRRMGHISKLGPSVVRWVLCESSWKVIRKSKALKAFYERVMSGQTSRKKIAIVAVSRKLLCIMRAMLKSGQMFNEEIVERTCQLKETA

SEQ ID NO: 459068 - protein, 343 aa, unidentified
MDHFAGLDVSVKETSLCIVDDTGRIVREVKVASEPEALLHVLMNPAYHFKRIGLEAGPLSQWLFGALAEVGLPVICVETRHMRAVLKAQINKTDRNDARGMAQMMRAGLYRPVHVKTIRSQKLRMLLTHRKLLQSKAIAIDNDLRATLRNFGLKVGTVGRAKFEARIKELVEDLPDLVVLVEPLLIVRRVLREQVGILHSRLLAVVRDDDVCRRLMTVPGVGPVVALTYRATVDVPARFRHSKAVGAVFGLTPAKHQSGEVDRTGAISRCGDEMMRMMLYEAAQIMLVRSTKWSWVKAWAMKIARHRGMKKAIVALARRLAVIMHRIWVDGTEFRWTKDVAAA

SEQ ID NO: 459069 - protein, 380 aa, unidentified
MVTTHFQTETPTAIRTGLGAIFVSLELSRSTWLVTSLSPGGGERMSKHAVAGGNVSELLARFTHLQEKARSRSGRLFPIVTIQEAGLDGFWIHRVLETNGIESYVVDAASIAASRRRKRAKTDKIDGEALVRALLAFKRGEPRVCAMVKAPSPEEEDRRRICRERRVLIAERVEHVNRIKGLLFAQGIGGYQPLRKDRRRQLEDLRTGDGRVLPPHLRAQVCRVLDRLERERDALVERVECEAKAPEPATMLCAIKGVGPEVAAVLWTEGLCRQFDNRRQVAAYAGLAPTPWQSGTIDREQGVSKAGNPRLRTTMIQLAWLWLRNQPSSALSRWFIDRVQSNGGRHKKSTIVALARKQLVALWKYVTFGIVIDGAVLKSA

SEQ ID NO: 459070 - protein, 309 aa, unidentified
MEAKFYGVDVSKETLDVACDGRVVQIANEKTAVKSFVKAMPVGSCVVMEATNTYHLNMADICHTRGMRVFVVNPRITHHYRKSKGFRGHNDRMDALALSQYIERECDGLREYVPKSADQRRLKTLVRRRWKLVGMRTQAQESLGSMKELSREVEALLAGIDALIGKLEALIDKQLEGNADRARIETIKGIGAVVSAVLISDLDCYDFARADAFVAFYGLDPMPDDSGKRTGRRKLSKQGDRLGRAMLYNAAMSAVKSEVWKPMYEKCQERGLTKVQALVVVARKIARTAWSIHTHKTTFNPHRLFRALT

SEQ ID NO: 459071 - protein, 367 aa, unidentified
MKKLSTVTAKPSRNVAAQKLTIGLDLGDRSSWYCVLDETGNVLLEQKVATTPKAMTEGFGGMPRSRIALETGTHSPWISRLLSALGHEVVVANARHVRLIGESRKKDDRLDAQTLARLARIDPQLLCPVKHRSAQAQADLMMIRARAGLVRARTGLVNAARGLAKSYGERLRGCNVRNLNPEKAEGLSPELQRALEPLLSAIEELSERICEYNERIEALAQESYPQVALLKQIKGVGTLIALTFMLTLEDPHRFRKSRDVGCYLGLQPGRRNSGQSEPQMHISKEGDPYLRTLLVQGAQHILGPFGVDCDLRRWGLKLAERGGRNGKKRAIVATARKLAVLLHHLWGSGEVYEPLHNSSRTTVAAAA

SEQ ID NO: 459072 - protein, 406 aa, unidentified
MELVTRYKRVVGLDVHQAKITAFAIMENETGEVTVEPAEFGGFKRDRQALAEWVAARRPEVVVMESTGIYWKSPYAALEGVGIVATVVNARHVKTVPGRKTDWSDAQWLATLARSGLLRGSFVPPAKLQQLRHVARQRQQLVGILSGEKNRVHKVLSDGGIRLSVVISDIHGVAGRAMVKALINGASPDEVLALAGDRLKADRGQLLDALEGDLTAEHCFVLRELTAHVQELEERIDRFDRYLLKELEPHRTTLALMQTIPGIDVIGAALLLVEIGNDMDVFGSVDRLASWVGICPGNNESAGKRKSGRIRKGNPWVRRLLCQFAHAASRTQCAFKSKFEALRLRRGHKRAIVAIAHKILKTVFLLIRRQTHYRDSAVDFEAMSVARNAPRWLRMLKKHGFIQAAA

SEQ ID NO: 459073 - protein, 403 aa, unidentified
MERYAGIDLASEEHRLSIVDGEGGQLEQRRIGHDEQGIAALCRRLRALSVGRVALERPDGLVVERLLDAGLTVVAVHPNQLAAARDRYRVAGGKSDGFDSYVLAELCRTDMHRLRALGPDGDETKALRALTRTREDLVQARVALANQLRAQLEAFWPGARRVFSELDSPIALAFLERYPSPVDARGLGEKRLQGFLARQGYCGRKSAAELLARLRAAPEGRAGELELEARRAAVLGLVAALKPLVEQIKLLTSQIAGALRDHDDGAIFLSLFRDPKSVVTAAELLAEIGDCRNRYPSAEALAADAGMAPVAVESGKRKVACFRWACDKRLRNAVACLADSSRHRHPWAHSVYQSALARGHDHPHAIRVLGRAWLRVIWRIWQDQSPYDPARHGNLQRLLAAGG

SEQ ID NO: 459074 - protein, 366 aa, unidentified
MPSVAHLGPTHLGLDVHKDTISVAILAPDRDGPDVDRIPHDEPSVRRLVGRLGDPRLLRACYEAGPTGYELARLLASMHVHCEVIAPSLIPKAPGDKVKTDRRDARRLARLHRAGELVAIRIPTAQEEAVRDLCRARADLVEDRTRARHRLSKFLLRHARPWRGGNAWTLTHERWLLAQRFDQPALAATYAHYRAVLDVRDAQLEAIEADLATWYDAAPFADAVHRLAAYRGVTRLGTLTLASEVCDWRRFARAAAFTGFCGLVPSEYSSGTSTRRGHITKTGNAHLRAQLVESAWAYQHRPAVGVDLRERQRGLDPAVVARAWAAQLRLCGRFRRLAARKDSKNVVVTAIARELAGFLWAEMLVA

SEQ ID NO: 459075 - protein, 382 aa, unidentified
MTGTEPHAWGTGLMDDIIFVGLDVHKATVCIAVAEGGRGGDVRQLGVFENRPEILNKVVSRLSKGGRRLSFCYEAGPCGYGLHRLLTGYGHECVVIAPSLIPMKAGDRVKTDRRDALMLAKLHRAGELTAIWIPDAAHEAMRDLVRARATAVRVLVKARQHLQGFLLRHERIYRGARAWTLAYRRWLSTVRFEHPAQQIVLQDYIHAVQEAETRRDRLTQQIEELLPNWSMAPVVAALQSMRGVALVVAVTVVAEVGDFRRFANPRQLMAYLGLVPSEHSSGSSVRRGGITKAGNALARRVLIEGAWTYRMSARVSRKLHDRLEGLPAAVRDIAWKAQLRLCARYRRLTAMGKSKVVVTTAIAREMVGFIWAIARLAQPALV

SEQ ID NO: 459076 - protein, 355 aa, unidentified
MNSEKYIGMDVHKESISIAVMNGAGKIVMECVIETKASVILQFIHGLRGDLHVTFEEGTWAAWLYDLLKPHVTKLVVCDPRKNASMKEGNKSDKIDARRLAELLRLNHLNPVYHGEHGLRSLKELVRSYLTITKDLGRVMSRVKAIYRSWGIACIGKQVYAPRHRAEWLGKISELGVRRRAEFYYQQLDALRALRKQVRRDLLAECKKHQAWKQLCQIPSIGPIRAAVLLGILQTPHRFRTKRQLWTYSGLGIETRSSADHRSVDGQLERAKKQISVRGLNQNCNHDLKNLFKGAAIVASSKPGPFQEFYTALLTKGIRPEMARLTLARKIATIALMVWKRGASFDAQHLKPQTA

SEQ ID NO: 459077 - protein, 370 aa, unidentified
MDEVSTFIGLDVHKATIAVAIATGGLRDAAEFLGTIENTPSALAKLLARFGRKHKRLSFCYEAGPCGYGVHRQLTEAGHACSVVAPALIPRRAGDRVKTDRRDAVSLAQLHRAGELTAIWVPDTAHEAMRDLVRARLTAVQGVRRARQQLSGFLLRHSRVYDRKTVWTRTYRHWLAGLRFEHPAQQIVLQDYIDAVTDAERRRDLLGEQIRLLLPDWSMAPVVVALQALRGVALVVAATLVAEIGDLTRFDNPRQLMAHLGLVPSEHSSGASVRRGGITKTGNAAARRAMTEAAWTYRLPARISRGLLGRNEGVDKMVRDIAWKAQVRLCARYRRLAASGKPTKTVVTAIARELVGFAWAIARHVQPVRA

SEQ ID NO: 459078 - protein, 323 aa, unidentified
MPRIVGVDIAKRTFDIAVLQANGKYRTKAKLANNAAGFQELQQWLVKHCGPDVWLLMEATGAYHEALAEWAHAMGYRVCVLNPAQIAYYARSRLQRVKTDKADAKLIAEYGERHLDELRAWQPEPLATRRLKALVRRVGDLQEMEQMERNRLELADPSVQTSIQTVIEQLEQQIKETLTSIRDHIDDDPDLRAKCDLLTSIDGIGERTAALLLAELGDILRFGSTRAITAFAGLNPRLQESGTYQGQTRISRTGSPRLRAGLYMPAVCALTHNAAISALRERMKARGKTGKQIVCAAMRKLLHIAYGVLKSGKPFDPKLALAK

SEQ ID NO: 459079 - protein, 314 aa, unidentified
MIISPHCVGIDVSKRMLDIFDDAVGRPERIANTLQAITERVAGWRCGNVFVVFEATGVYDRELAEALRQADIRFARINPARARDFARADGRLAKTDAIDARMLAIFARKMMPAVEPAPEPARSALASLAKRRDQLVQIRAQEKNRRSEATDRTTIEGIQRHLDFLNGEIKAIEASIKTLIKAEPDISEQARLMRSAPGIGPVACMQLLAKMPELGCLGSKQVAALAGLAPFNVDSGSYRGKRAIGGGRKRVRDALYMAALNAVRRDLTMKAFYQKLRTVGKPAKLALIAAARKLLTTLNAMLRDRKAYVRPQPT

SEQ ID NO: 459080 - protein, 461 aa, unidentified
MHVDGGVANGVSGLLIQTHLGLKCRPRHLRHPAGQPGWCRLRGSVNRRDPRMTIISSTEGVPMSKSAHLELRVGIDVGCHSHNVAIGLSSGEILDEFSVSHNPEGFRLFFSRVEKQEKKHGCPVSVAMEGFNGYARPLDTLVRARNYRLFNVNNLKLARFKEIFPSAAKTDDIDARKCLELFQLRDHLPTAKDVLQEVAATPEENDILKRLTRRRRRLVNERARVLNNMQTDLQAVCPGLLEITADAANLWFLRFLTSTDSLIKLARLQRTTLLKISGIGAKYARLIQEWQKQAHFSHEAELVGEMIQEDACRILELSDKIKVLEAKFEDIASRSVIAQTLSTIPGFGTVSKSELAGEIGTIDRFKDEASLALYLGMAALDNSSGKKKGTKDPKHVNTRAKAAMMIAVDRHRKCIPESQRYYEKKRSEGKRHNQAIRALGRHLCRVIFKMLKHEKGYEIRN

SEQ ID NO: 459081 - protein, 335 aa, unidentified
MIAVGVDAHKHEHAICALDGLGRVIGARTICANRRGYAELESWIGRLPEAVVVGIEGAGSYGAGLCEQLLAAGVDVVEVDRPRRSERRRGGKSDRSDALLAAKKVLTNDGLSTPRAGGTRQAMSALLVAYGSCIAERTRVLNALHTTGPAALREQLGTGSGKQLATRVMKLQQRRNSLPAAQISLELLRDYAERAADLTRRADTYKAKLDELVRSLDPELLNEPGIGPISAAKLLVSDPHRLSGEAAFARCNGTAPLPASSGQTIRHRLSRSGDRQANNAIHTIALSRSIHDPETRAYLNRRITEGKTRREAMRSLKRHLSRSLYKRLITINLTS

SEQ ID NO: 459082 - protein, 410 aa, unidentified
MSDPYELYVGIDWASTSHQICLVPPDGAQEVFAVAHSGAGLAALRERLQARGVSPERIAVAIEVPRGALVEALLAHGCHVYAINPKQLDRFRDRHTVAGAKDDRRDAFVAADALRTDRAAFRRLQPENPLVVQLRELSRLHGELVEEHGRLANRLREQLWRFYPQLLAVSPAADEEWLWEVLTVAPTPAAGRRLTVSALRALLARHRIRRLTAEAVSAALQEPALPVGPGTLAAASEHLALLLPRLRLVHEQRAQCERRLDRLMRELAAEPAGADPVEHRDVTILQSLPGAGKVVVATMLAEAAAALTERDYQTLRAQAGIAPVTRQSGKSRLVLMRRACNGRLRAAVFHWARNAIRFDAVARAHYERLRERHGYARALRGVADRLLHLALKLLATGQLYDSHRRQRVAA

SEQ ID NO: 459083 - protein, 345 aa, unidentified
MTESKIVAFDLAKRIVQACVIDGTGAVIAEERMGPERVLSFTARHPHATVALEACGGAHHWGRALERQGHRVLLLPPQRVKSYGDPACKDDRRDARAIAEAASRSYLRPVPVKSEEQQALQSLDRVAALLARQRTQTVNALHGHLSEFGITLPKGPHLLKRRFTELEASPRWRELPEELGAAMGELFAAFLALEDRLSAIKARLARSAKQSKLGHLLLEIPGIGPMTAVSLEAAIGDDPGRFASGRQFAAWLGLTPRVSASGERRQLARITKRGSARLRSLLVVCAQAMLRQYRQGRHGDPLACWARHLLARKRWNVAVVALANKLARIVWKVASSGAAYQARTA

SEQ ID NO: 459084 - protein, 403 aa, unidentified
MLHDHLKHPTAIRVQFGAIFVSLELSRKTWLITSLSPGKGEKMSKHSVTAGDIAGLVVRFAELRRKAEMRTGKTFPIVVIQEAGLDGFWVHRVLQQEGIESHVVDPASIAIPRRRRRAKTDKIDGEALLRALLAYKRGEPRVCSMVVAPSPEDEDRRRLCRERDTLTAERVRHVNRIKGLLFAQGIADYAPLSRNRRKRLDELCTGDGRPLPQYVKAQISRELDRLELVLEQIKVVEKERDRVLLSPAPVAAVNTRPDGGCNKPRGATGVAMLTALRGFAADGATKLWSEGLSRHFSNRRQIAAYAGLAPTPWQSGGIAHEQGVSKAGNPRLRTTMVQIAWLWLRHQPQSALARWYFAKVGVCATKARKKVAITALARKLLVALWKYLSAGELIEGAIMKPVA

SEQ ID NO: 459085 - protein, 383 aa, unidentified
MSTQVEFPLFFDRCAGIDVHKESVVVTVKVNESPDQTRTFGTFTEDLISLRDWLSSNGIRHLAMESTGVYWKPVFNILEEDFEVMLVNARHIKYVPGHKTDCKDSAWIAKLLMSGLLKGSFIPPQQIREMRELYRYKKKLISQRVAERNRLQKILEDANLKLGNVVSDVFGKTGWAVICALIDGQTEAVSLASLAKGSLRKKIPQLICALNGRITEHHRFMLQTSRLALENIQQQIDRIDRRLDEYLSHHTTEVELLESIPGISHETVKGIVAEIGFDMSVFPTANHLASWAGVCPGNNESAGKKMSSRVTQGNRSLKTALVEAAWSAAKMKKGWLRNKYYALSVRRGKKRALMAIAHKILVAVYHVLSSHSPFKEPVLRITN

SEQ ID NO: 459086 - protein, 384 aa, unidentified
MGHQTFIPRDYDVFAGLDVDKRSISVTFTDHQGLLKSLRIPNNVEHLVNHVRKHFPNQRVAFAYEAGPTGYGLYDGLVAQEFRCLIASPSMIPKAPGQRVKTNRLDSVGLSENLRGGQLKGIHVPSPLYRELRHFTQLCDTFVNEMVGMKQRIKSLLLMEGVEFPPAPAGSQWSFMVKDKLRKLPCFSIVRFKLDQLLDSLEFNEKQVFKTTREIRRFCHNDPELSQCIEYTMSVSGIGWIVASQLLARIGDWRELRNIRQLGGFLGLVPTEHSTGERTDRGSITHTGDERLRSKMIQASWSAIRKDAELREFFRLICHRHPRRQGPRVAIVAVARKLSVRISVVLMKQRPYVVREKVHSAPLTQEETSSQGTTRRQAEPGDNS

SEQ ID NO: 459087 - protein, 343 aa, unidentified
MTITTIGLDIAKSVFQAHGTDASGKRLLKRKLGRSEVAAFFGKLERCRVVLEACGTSHHWARVIRDAGHDVKLIPPEMVKPFVKRGKKTDAVDAAAICLAAAHPDARFVPIKDEEQQSLLSLHSTRSLLVKQLTMTINALRALAAEFGLIVPVGNCRLSELMTKIEVSTELPSTMRQTATLLFEQYSRLVESIESLEVQIRTHAKQDEDARRLLTVPGIGPVTASLIVASVTDIGAFDTARHFAAWLGLVPRQHSSGGKTRLGRITKTGNREIRKMLVLGATSMLYRAQKWESAAGAWLCKLLERRPGRLATVALANKLARIIWALLSRKEIYRPAGRSVATA

SEQ ID NO: 459088 - protein, 380 aa, unidentified
MNKIIYIGMDVHSSNFTLCSFEPGYGMSEDKIFGQVQFKDDLIKNTEKYICNLKSQRKDIDIVCGYEAGCLGYVPYRELTRSGINCKILAPSTMAVQKGGKNQKNDFRDALDIARCLASGSYKAVNVPDIEDEDVRDYIRMRDDHQTALKQIKQQLNAFCLRHGFQYDKSKWTLAHIQWIKRLKCTKIQKEIINEYLATYELHKNKIDAFDVRIKDFASGERYAEKVNKLLCIKGIKTNTAMSFISEVGDFKRFRTAEQFAGYIGLVPGEQSSGDKVRRTGITKSGNTHLRKVAVECCNSYRRGNVGQKSVELKKRQKNATSEVINYADKASTRCQRKYYRMVNKGKNSNIAVTAVAREFCCFIWGMMTSNYEYSNNEVK

SEQ ID NO: 459089 - protein, 393 aa, unidentified
MKLVGIDIGKNKHFFCIMDKDSGEVLLQPSSFSNTKDGFDSLIQKLSSYSKDSILIGMEDTGHYHFALLKYLLEKNFTVALINPKTTDYTRKIQNGITKNDKLDTLTICDVLDTPVRKKQYRITKVNSFDLYEQKQLTRHHHNLKEELNVYTNRLQKCIDIVFPEFNSLFSSKYGIIYMNVLKTFGSAENIASTDIRTIRKCFEIKGRGNRISLTAQQLNSAKSSIGISSAAEVIKIKHLISQIELINEQLAETDKKIEEFSIQNNSPILSIPGISHFSGTSILAELGEISNYSKPSKIIKAAGVAPYHYESSQYNAQHTAITKKGSPYLRKTLYQIILPVINNNPVFKQYYDLKISQGKGHRCACGHCVRKLLRIIYHLSSTNQQFDDALLR

SEQ ID NO: 459090 - protein, 589 aa, unidentified
MSKRSTDVGMRTIGLDVGDRKSVGVVLDGAGEVVEEFSVPTTDAGLERGFGHREPCRVALEVGTHSPWMARRLKELGHEVLVANARKVALISRGGKKTDRVDAETLARLARLDPKLLFPIQHRSPEARRDLMLIRSRDALVAARTQLVNHVRQQVKVWGGRLPSCSTEAFARKAAERIPAELRDALCPVLDQIASLSGGIRDYDRQVGALCSDRYPETARLRQVSGVGPLTALCFVLTLEDPSRFVRGRDVGPYLGLAPRKHDSGESAPELRITKAGDATLRRLLVGAAHYVLGPFGPDTALRRWGVELGRRGRKNAKKRAVVAVARKLSVLLLSLWRSGEAYEPLRGVGKEMAASAGSGRDEMTAVHDTIQPPGPGDSDAVAGASRDAGNKMAAPGRTDLSVHRPPKRGPRECEWKPGGGSRVEEGGRHVGLDGRCLLMEAAAADERRGAPGECGSMGCRRSRLSGTTLGAPERGPLSMTCPVCGWDRLPFDWNGRAEEICDCCGTQFGYDDMPDGPTVRVRHVTPRGAVGPEREEPSESSHRSQQAVWASLRQKWIDGGMVWWHGSPPDGWSPNEQLSKLRLKRPGT

SEQ ID NO: 459091 - protein, 328 aa, unidentified
MLDGINLPVPERTGIPGDCATLFVSLELSRSTWVATSLAPSSKKMSKYTLVGGNGRELLDLLARLKTRAEQRIAAPVKIVAIHEVGLDGFWVHRLLEANSVESHVVDPASIAVPRRHRRAKTDAIDGETLLRTLMAWQRGEPRVCAMTVPPSPSEEDRRRISRERAVLLRERIRHTNRIRGLLFGQGIANYNPLNKNRRECLEELRTGDGCPMPARLKAEILREIDRLELVLRQISQVEAERDEMLRPAEASSPAALLMRLKGIGAEFATVLYLEGLFRHFENRRQLAAYAGLAPSPWKSGSIDHEQGISKAGNPRLRTTMVELAWMW

SEQ ID NO: 459092 - protein, 421 aa, unidentified
MKFKSQDKQNQRIENISSLHLVVGVDIAQEAHVARAVSFRGIALGSPLEFGSHDEGFQLFGRWIQDLLKSYTLSKVIVGMEPTGHYWFSLARWLSAKGIEAVLVNPHLVKKNKENRDNTPSKSDRKDALVIADMVKNGYYSPVRFNPEAYEELRILMANRDTVAKRLNSAVNQIHRWVDIVFPELRHVFKILTCTSAIATLRLFPLPKDISQLTTEQVIAGWKQYVKRHAGIHRAEQLIALAKRSVGATQALHAYKLHLGQLLEEYDLAQRQLEQIEHELHYILVRIPYAQKLLAIRGVNATSLAGVLGEAGDLSGYAHGNALLRHAGLNLAEASSGKWRGKMVLSKRGRPRLRRFLYLMTMCMVMTNPDVRALHHHNFNVKKLKKMKSIMKLCGKIARMLVGLAKSSEAYDSNKVFPQAA

SEQ ID NO: 459093 - protein, 398 aa, unidentified
MTESSDYESVQVFIGVDVGKDTHHAVAINRSGKRLFDKALPNDENKLRSLISDLKQHGQILLVVDQPATIGALPVAVARSEGVLVGYLPGLAMRRIADLHAGEAKTDARDAAIIAEAARTLPHALRTLKLADEQIAELSMLCGFDDALAAQTTQASNRIRGLLTQIHPALERVLGPRLDHPAVLDLLQRYPSPEKLASLGEKKLAAQLCKLAPRLGKRLAADIAQALAEQTVVVPGTNAAAVVLPRLALQLITLRQQRDEVALEVEQRVLAHPLYPVLTSMPGVGVRTAARLLTEVACRAFASAAHLAAYAGLAPVTRRSGSSIRGEHPSRRGNKALKRALFLSAFAALRDPSSRAYYTRKMSQGKRHNQALIALARRRCDVLFAMMRDGTFYTPLAS

SEQ ID NO: 459094 - protein, 452 aa, unidentified
MAKKGKRRCDTLPVLHPDAAGIDVGASELFVAVSADRDPHPVRSFPTFTRDLHALADWLEQCGIHSVAMESTSVYWIPIYQILEARGLEVYLVNAQHVKNVPGRKTDVSDCQWLQYLHSVGLLRASFRPPGFICAIRSLWRHRSSLIQMAAEHVLHMQKALDQMNLQIHRVLNDITGVSGLKILDAILAGERDPLTLARLCHGGVKNSEDTIAKSLEGDCRPEHLFALRQSLAAYRYYQNLVLEVDQEIKLQLGELQTAATAERTTPARTKASAYQRRRYEPKTFDLRGELYRVFGVDLTNVPGISAITAQTILCEIGTDVSRFRNASAFASWLGLCPEKKVSGGKVLFTKSRRVRSRVATALRMGAQSLHHAKDYLGEFFRRITRKLGRPQAITATAHKLARIVYHLLGTKEAYNESVFHKSEADTIRRAEYRLRRQAAQLGFQVIPAENG

SEQ ID NO: 459095 - protein, 429 aa, unidentified
MTGSNDTPRGRTLVAIDIAKHYHDVLIEPPTPKRRSRLRLANRREDFEHLAGYLRGLRSSVLVGFEATGNYHRPLAYFLHCQGFELRLIPTLALARTREAMHNSWDKNDPKDAQVILHLLKTGLAQTWHDPMVNDLNDVQELSKTHFQVTLARVRVWHTLRNHYFALYFPEIDRFVRSDHSIWMIQLLASFPTPAAITALSEEEFQTRAWNLVGRKVSKRALLAEIYAAAKQSIGVPVALESAAIAMFRLVLEQYLSLHRLRERISEQAAILLADNPDSRRLMTVPGIGPANALTVLAEAGDLRRFRHHRQFLSFCGLNLSTLQSGKSRGQSHISKYGNARLRTALWLAAQTAIRMRENSFRRKFDNYVRGNPLDADLRRKAYTAVAAKLARVVFGLIKRQVDYRPFFEHQFQVEEPSRASAVGAVSTP

SEQ ID NO: 459096 - protein, 318 aa, unidentified
MMEHIYTGIDVAKDSFVVATKLAGKVTTSLHQNNKKGINSFLKGLPDYSWCIMEATGVYSLQLAIALYEKGIKVSVVNPLQIKRFAQTKLKRTKTDKVDAALIAEYGERMQPKLYEPPAPFMRKLQQQRMSLKLLIKSKRSFLNQLHALAQLEDVDKAAVKACKAVLASIEKQITGLERQMQQTAEEHCQELFTLLQTIPGISTKSAIELIVVSGGFRNFTSARQFSAFIGISPCIHESGTSIRGYRGISRIGDKNIRATLYMCSMTAKVHNKACQELYERMVAAGKAKKVALVAVMNKLIKQVFGMVRSGEVYSAQC

SEQ ID NO: 459097 - protein, 349 aa, unidentified
MLIIGCDFHTRYQQIAMAKEETGELLLERRLDHQSGEANAFYRSLQAPVRVGIEATGPIHWFERLLAELGHELWIGDSARIRASEVRKQKTDQRDAALILDLLLARRFPKIWVPTPGERDFRQLLVHRHKLVCLRTTLGNQLHALAMSQGLCRKKKLFTRKGRVELTGLTLGLWASRRRAELLKLLDQLEPPIAELDRAVLQEAERREDAVLLMTHPGIGPVTSLAFVLTIGPVTRFCRSRKLVSYLGLNPSEESSGGRRRTGAISKQGNTMLRWLLVEAAQKAAQCDPALRQDYQRLKFRRGHAVAKVAIARKLAVRMYWMLRSGADYARLVRMQGSPRGTLVHASTP

SEQ ID NO: 459098 - protein, 561 aa, unidentified
MLATLSLTRPKLIVRFLYRLWRLNSVKGTRRLVIPSVHSGLGQRVEVAGLPVVPRARELGWSREAAATTLVARHDVTPFGRLLSFPPSRARCHYSFCTQEGTMKRDKRKGKRRPSQLAAVNLHAAGIDIGAQEHWVAVPADSDPQPVRRFGACTADLEAIADWLQQCGVTTVAMESTGVYWISLFELLEARGFTVVLTDAREVQRAPGRPKSDVQDCQWLQRLHTYGLLAAAFRPAEQVCVLRSYLRQRAMLVTYASQHIQHMQKALTQMNIKLQHVISDVTGVTGMAILKAILSGERDPQKLAQFRDRHCQHSETEIARALQGNWRAEHLFALQQAVELYEFYHQQITACDRQIEAHLQTFVDKSEGRVLPQRPRKRKRRATEPRFDARTPLFRLSGVDLTAIEGIDENTALVLLSEIGADMSRWPTEKHFAAWLGLCPQHKISGGKVLSRKVRPSANRAATALRLAAHCLHHSHSALGAFFRRLKARLGAPKAITATAHKLARLVYRLLKYGEDYVAQGMAEYERAYRERTVQHLLRKAKALGYKLLPITDGTAQTPVV

SEQ ID NO: 459099 - protein, 427 aa, unidentified
MPYKIAGIDVHKRMLHVVVSDVQIDGEYDFTRRIFGSLPEALRSLAAWLVEQQVQEVVMESTAQYWKPVWGTLERYWKPICQTREGALATSGTLHLAQALSNRGRRGRKKDFRDAERLVKRLVAHELVLSFVPDVEQRLWRTVVRTKYQLTCNRVQLQNRLEALLEEAHIKLSSLVSDLLGASARRMLHAIADGETNRETLAALADRGLRATQEQLQDALGVCRELNPVYRRLIKMVLDEVASIDKRIEQLNQEMANLVRPHEDQIKRLAEVPGLGVDSAQQVIAEVGATAATFPSEKHLSSWVGACPGDEESAEVNRSRRSPQGNRHMRRILNQAANAAVKNKGSIFEILYRRYVPRLGHNQTIGIIAHKLCRLVWKILHRGIRYEERGQEVSKASKQKRTRKMIQALRRLGYRIEPSPSPSAIPA

SEQ ID NO: 459100 - protein, 423 aa, unidentified
MMRLVYPICCGLDVHKKVIVATIVTTDNAGISTYKRRSFSTINSDLKLFHDWLLENNCRHVCMESTGKYWIPVYNYLEADIEVCLTHPKYVKAIKGKKTDKKDSKWIADLYKFDLVRCSFIPPKDFRQLREISRYRFKLVCMKTSEKNRVQNCMTVSNIALANYVSDPFSKTATDIMSYLLQHTSDDICEKDIQKMIRKNSKATADELFASIKGYTIEADQAKKLELARNHLEYLDGMIRSTETELYIRIKPYWDYVEFVSTMPGMTQLSSTIVLAETGVNMAIFDDSGHLCSWCGLTPRSNESAGKKYSSKIMKAGAYLKPMMVQCALAAIASKKQPYFAIKYRRIKKRRGHKKAIIAIARMMMVCIYYMVKDKKPFSPCDYEELMDPQKKPQKVVLNDANVFDYLKAQGYDTSSLVKCNDN

SEQ ID NO: 459101 - protein, 387 aa, unidentified
MSEMFNPHAPATAYDHNTRIVAVLELSGKSWLFGAVAPGLPRRVKRSFAARDVEAVARAIEQVKAQSARANFEAQRIVVGFESGCDGFWIARALQQRGFEVYVMHAASIAVERRGKRAKTDRLDVDLLLTTLIGWLRGEPGRCTMAPIPSEEEEDLREPGRRRETLVKTRLKVENQISSLLIRHGIAGFKPRLKNCETRLDELRTFDGRPLPANMMKSLGLLLAQHRLLSTQLKEIEEARQQVVKVAKPDRWQLMIQTLARVVGVGVETAIVLVYEVFSRSFKDRRALAAFVGLTGTPYNSGGSETEQGISKNGNARVRRMLSQLAWRWLMHQPESALAQWFNARLNGAKGRMKKILIVALMRKLVIALWRLAETGEVPVGARLALR

SEQ ID NO: 459102 - protein, 438 aa, unidentified
MSNKVIFNLDELFISVGIDVGADFSWMSIALPNQQFVGKPYKILHNSIDSLTTAVSKIKEAEELYSLESRIFLESTGIYHYLLFCYLRDKGFNCSVINPIITKNSTNINIRKVHNDRFDSKKAALVGLKPDLKVSLMPSDLALNCRNLCREYYDLMDNRNAYVNKLQGELRMVFPQYLGIFSKVTINTSLTLLETYTSPSAFLKADKQEIIDIIKSTARFGLTYAQNKYNAIIQAATDANQFGYIIDSNIKRIRLYISFIRKYDEEINSILESLHELVDANEDADFVKQIHLIETFKGAGFLSAVSIMGEIGDFSAFSKPKQLFAYFGLDPAVKQSGKFEGTKVQMSKRGSAIARRVIHTLTLQSISISRNGEAKNPVLREYYLKKCDSKPRLVAMGAVSHKVCNMIFAILRDNKPFKIIAPQEHIKQYNAAKCDIAA

SEQ ID NO: 459103 - protein, 345 aa, unidentified
MKTLKQVVGIDVGSKELVVCIVKILSNLDKKLCQYGNFRNTDKGLIKLQEWVQTHTSEESPLHFVMEATGVYHEKLAYFLESKGYKISIVLPNKISNYFRTLEVKTVTDTTCSEAVTLFGLERNLELWHKPDPTYKRLKQLTRERDQLVQERTAVKNQLHAEQAEAEPNKNSIGRIKERIAVLQRQEKEIIAELKLIVKESSALKKHTDNLTSIPGVGLLTAVTVLAETNGFEMIRNKKQLVSYAGLDIKEKQSGTSIQGKPTISKRGNRYLRKSLHLPALAAIRHEEHYANTFTRLVARHGIKMKAAVAVQRKLLELMFIIYKTKQLYDPLYHVQKQSHTIQRN

SEQ ID NO: 459104 - protein, 359 aa, unidentified
MIVIGVDPHKQTHTAAAVDRQTGELLGELTVRGNEEGHARLLEWARELAGERSFALEDCRQVSCRLERFLIGRGERVVRVPPKLMARTRRSARARGKSDAIDALAVARAAIREPDLPAAQLEGASRELRLLVDHREDLVCERTRIQNRLRWHLHETDPELEPPARTLGRLSQLDGLRRRLARREQTAQVRICRELVGRCRELTRQANRLECEIETLVRREAPQLLALPGCGALTAAKLVGEVAGIERFRTDAQLAMHAGVAPLDVSSGRQQRHRLNRTGNRQLNRALHTIAVTQQRVYAPAKEYLARRQADGKTKREALRALKRQLARRVFNILHLIASRTKNPERIQISSAPRVPCLT

SEQ ID NO: 459105 - protein, 373 aa, unidentified
MKKISRLGVEKSKKKEERASKGYTIGLDLGDTKSQYCVLDGAGEIVAEGSVSTTRTALEQQFKSYAGSVVALEAGTHSGWVSRVVKQIGLEAVVANPRKVRLIAESTQKSDPEDARMLARLARVDRKLLFEIHHRSEAAQLDLTVIRARAGLVEARTKLVNSLRGQTKTLGSRLRKCDAEAITVEVLEGLPEAVKGALTPLVVQIQALTVGIEEYDQRIAAGGKQYPEIERLKQVRGVGDVIALTYVLTLGDKARFERSRDVGCYLGMVSQRRNSSESQPELSISKEGDTYLRSLLVQGAHYILSRRGPDTDLKRWGVRLAQRGDQKSKGKKAKRRAVVAVARKLGVLLHRLWVSGEKYEPLRQARQQEQQAA

SEQ ID NO: 459106 - protein, 323 aa, unidentified
MNKGRIYFGIDISKDVFDVMDSSGNYFQFENDFKGFKKFLKLLGEKSHCVMEATGYYHYKLAYYLIENNIRVSVENPLSVKRFIQMRLSKIKTDKSDSKMICLYAQSVDLKLWKGQSKSQIECLQITRLLSLYFKQTTALKNKIHGEDVLGNPSLLVVRSLKRSLKHKQKEIKFLEEKLTQIVKMDHQELLTRLESIPGLGRKTSIMLIVLTDGFERFTSASELCSYSGLTPIIRQSGTSVNGRSRISKMGNKKLRNLLFMCSFTACKNNKACKALYDRIVAKGKSKKLALIAVCNKLLKQAFAIAKSGLIYDETYRSTLVKN

SEQ ID NO: 459107 - protein, 392 aa, unidentified
MYIIGIDIGKNHHEASIVSPEGKQIGHSLRFATTHKGADSLMSFIFNNIGNSSCIFGMEATGHYWYPIYSFLKARGYTIYVINPIQSDSLRKMYIRQTKNDSIDSFLIAEVIRFGQFTTTSMADENILAMRQLCRYRDSVISSRTEIKLRISTIMEQIFPEYEKQFSSLWLSTSMGILEKYLTPENIENAPIDELFEIIKDKSHNKLTMKKAISIREAAADTFGIKIAQDAFSFQLKQLIDRMNFLDKQIEALDCQILEYYEKFDCYLHTIPGIGMIAAATILAEIGDINRFKSSSALVAFAGIDPTVRQSGEFSSTHNHMSKRGSPYLRHAIFLVATTCSFHNSPLNAYYKKKREQGKHHLTATGAVARKLTTVIYAVLRDGKPYEPKSFC

SEQ ID NO: 459108 - protein, 343 aa, unidentified
MAIFVGLDLHRAQITYDALDTDSGQVQTGRIRPANRDTVRAFLSDLAGGEAIVAVEAMTGWRFVVEECARAGIEVRLAEPAETRMRQDRKRRAKTDKLDARLLRELLMQDRLPESWIAPAHILDLRAKVRLRKTLVGQRTEWLQRIHAVLFHHGVPVAPGRVGRLDSRYIHEQLAELQLPAAAMQQITVALGIVEHVNATLHDLDLELERFARRQPGCQALMRHYGVGTLVATAFVAELGDTRRLSSSKKAVRCAGLDVTVHESDVRRRAGHLSRQGSPVLRWAAFEAAQCAARPASPDHAYYLQLKERLGANRAALTIARKLLRRAHHTLRELGEEAIAPAR

SEQ ID NO: 459109 - protein, 363 aa, unidentified
MEQQNRRFVGLDFGVRTYEMCMYDENGKIVRSNGLTTPEGRQKLYSKLKPTDRVGIEMCSLTMKVAREMKSAVGCDVLLLHAGKLAVIYKSLKKTDKEDALKLARLVKTHEDEELPIVPLPSEVDLKRRRMIREAKQLRSDRTKEVNRLHALFVECGITDIKKKNLATKTSREKSLQLLEETQRRQAERICQVIDLVETQIAEVKKEIAIEVESDNNIKNLQTVPGIGELTAVAYSGFVGDGSRFDNGSQVSNYLGLVPKLDISCDQVHYGNITKAGNPEVRSLLIMAAWSHVRFAKEDTVLKSKWQYLTQVRGMSKKKAIVCIARKMAEMMLAILKSGKPYSPKKFSVDQYSELAEKALKSA

SEQ ID NO: 459110 - protein, 412 aa, unidentified
MQVVYARCAGLDVHKKTLSACVSVCEAGGAKQQQMRVFGTFTSDLLALADWLTEHGVTHVAMEATGVYWRPVWAVLEGQFQQMLVNPQHIKAVPGRKTDAKDCEWIADLLQHGLLKGSFVPPTPIQDLRDLTRYRAELRQSQNRVANRIQKFLEQANLKLSSVASNTLGVSGRQMLEAIIAGQDNPEQLAKLARGKLKNKIPQLEQALEGRVRDHHRFLLAEYLDEWEALGQRIARLEIEIDKQIRPFEQAVALWQTIPGVDHVTACNLVAEIGVDMNQFPTDQHLASWAALCPGNHESAGKRKSGRTRDGNKWLRRSLCQAAWAVTRKKNCYLSAQFNRLAARRGVKRAVMAVAHTMLIIGYHMLKTGRGYYELGGDYLERINHDQLQRYYVKRLQRLGLKVTVEPVREAA

SEQ ID NO: 459111 - protein, 359 aa, unidentified
MPTTARTAIAVVGIDIGKNSFHVVGLDDRGAIVLRQKWSRNQVEVRFANMPPCLIGMEACVGAHHLSRGLQRLGHDARLMPARYVRPYSKGQKNDFRDAEAIAEAVQRPTMKFVATKTADQLDLQGLHRVRERLVSQRTGIINQIRAFLLERGVAVRQGLRFLRNELPSILAAPSDALSPRMLRIIEDLAGDWRRLDERVEGLSKEIETIARQDAGCERLLSVPGIGPIISSAIVAAIGAGDVFSKGRDFAAWLGLVPRQISTGDRTILGKISKRGNRYLRVLFVQAAWVVLIKPKSWERHGLKSWIEAARKRLHHNVLAIALANKLARIDWSVLAHGRSFEASKLAAAVTQPPNRREH

SEQ ID NO: 459112 - protein, 360 aa, unidentified
MKYQETCCNNVTTVDFSGKHLFVGMDLHKKKWVVTVRTVDLELRTFSMDPCPEVLDAYLSREYSGGIFHLVYEAGCFGYGTYDYFREKGIDIVVTPPNRLYRERNSIKTDKRDSRQLAMFLSKGMIPAVVVPSKQVRELRQMIRIRDKQKKRKTQIQREIRGMLVFLNYPLGTRHWSKAMLLELKQLTFFEEGLTQALPSLVEEYEFYKEKVIQSERLVKNISEQIPVYRDSLRRLTGIRGIGNLTGFRLVLHLFDRKDRFASAEKLVHYLGLTPSERSSGEKQRKGRSGHRGNPELRAMIILMAWQVVRWDPVLLDKFERVYHSSGSTQKAIVAVARKLMVRLYTIIQRDENYQIGVAA

SEQ ID NO: 459113 - protein, 455 aa, unidentified
MKEKNATMEIVNAHAGGIDVGSRSHFVAIGQNAKDIKEFGVYAADLESIARHLLENGIKTVAMESTGSYWQNLFSTLQDAGLEVILCNGKFTKNIKGKKTDVQDCQWIQKLHSLGLLSGSFLPDAATEQLRTYCRHRGNLIKTSAGTAKKMQKYLRSMNFRLDIAVRDVTGLTGLSIIESICKGEDDPKILSELRHGNCKKSREEIEKALHGNGRGDYLFALQQEFDLYKVMQSKIEQCDMEIEKILNQQISKDETRKLLKTDTKVYKRANKNAPKNIDINQIAFKYFGGIDFMSIEGVSHSTIIALMSEIGPTGFRKFETAKQFTSWLRLSPNNKISGGKVLSSKIPKGSNRLKIALRNSANAIGNLKDTHLSNFFNRVCFRKGRHAAVSATARKLAVIIWNMAVKNTPYNPPTIYEFLDQKRKRKVQEMKKLISKFAITPDEIGLAGGSLSAT

SEQ ID NO: 459114 - protein, 437 aa, unidentified
MPRFVGCDVHKKQITVCILDAEGRVVTRHRIACTRDALARFADRHLQRDDRLAMEATTHTWAVVELLEPCVAKVVVSNPMRTRAIAFAKIKTDRIDARVLAELLWAGYLPEVWQPDAATRRLRALTHRRAGLVADRTALKNRIHATLATRLIPVPYTRLFSDTGLAWLEEIDLDPDGRQALDSDLRLLAGLKAEIQRLEDRLAQLAYPEEPVRLLMTLPGIDFTVAQGILAAWGPVARFPDADHAAAYLGLAPSTRQSDERCYHGPITKQGNSHARWLLIQAAQHLDHHPGPLGVAFRRLAKKKNRNVAVVACARKMAVVAYHMLRNREPYRYAIPATTQQKLARLRVRATGKKRRTGPPKGTAPSLNQGTGRSVRTVPSVHQVYASEQLPPATPLDALPPGERRHLRATKSWPHVEKIRQPQSKPRRSTAKEANRG

SEQ ID NO: 459115 - protein, 373 aa, unidentified
MDRNVIYVGLDVDDTQYHGSALNKETGEVISFQCRPTLSGLLKQLAKLDQVFPDSTLSLCYEASYIGYTLQRDLAKHGYHCDVVAPSSIPSPRGKQIKTDRIDAAQLAQFYANGLLTIVAIPEPEQEHDRDLLRSRKKLVDQRKELRTHILSLLRRNGRHFQQETPNKANWTMPHQYWLEKVVTTSSGSFAVNLSLLVRQLKAVNGILTEYAQEIHAMAKTERYERSVQALTCYKGIKNLFALTMITEIGDIKRFPHPRQLMSWVGMDIREYSSGGKHNRFGITKQGNRYLRSAFIEANQRGYRTARLSNDLKARRKGAEPDLIAIADRCLRRLNKKGNRLLIGGKHPNKVKVACAREMVGFVWESLNKAAAV

SEQ ID NO: 459116 - protein, 370 aa, unidentified
MQKTLYIGLDVHKESIAVSVADEGRNEPIRYLGPIPNTPVDVASMAKRLAKNGMRLEFCYEAGCCGYGIHRQLTTLGHGCMVVAPTLIPKKPGERIKTDRRDSQKLAVLLRSGDLTPVWVPDKVHEAMRDLVRARAAAAAQLTQARQQTLAFLLRHGQVYTVSAKHWTYKHRQWLASQAFEFPAHQIVFQDYMEAVMVAESRCDALLKSIDAQLTNWSMKPLVDALRGLRGMDTISAVTFVAVVGDLGRFQTPRQLMAYLGLVPSEYSSGDRILRGGITKTGNREARRMLVEAAWCYRYPARVAVNKSKVLATLPKYVRDTAWKAQIRLCGRFRQMMARGKNSTVVVAAIARELSGFIWAIGQEVKPAMP

SEQ ID NO: 459117 - protein, 413 aa, unidentified
MSIDPSPTTVRISAGVDWAKDNHAVCVVGGEGEVLHRFAARHDAAGLKAMVGQLLRAGVEHVGIERPDGPVVEALTQAGLIVFVIPPGQVKNLRSRYGSAGNKDDRFDAYVLADVVRTDIRRLRPLIRDSAATLALRSLVRARKDLVTHRVGLANQLRAHLQIVFPAATTLFADLDSAISLTFLERFTTQTQADWLSPKRLATWLSSVAYSGRTDPGVLHAKLLAAPRGASGEHATIHAATTTALVAVLRAVNTQIQTLATSIGEQLSVHPDAPVFTSLPRSGSVRAARLLAEVGDARARFPTPDSLACLAGVAPSTRQSGKVKAVTFRWGADKQLRDALCDFAGDSRHANPWAADLYRKAIARGHDHPHAVRILARAWAHIIWRCWHDNTPYHPAAHGALQTLLNQDQHKAA

SEQ ID NO: 459118 - protein, 398 aa, unidentified
MKGQDIMIYVGIDVASQKHDCFLLKDTGEVFSKTSFTIKNDFEGYKKLHNSILQFVESTKDSNVRIGLESTGHYSKNILLYLIKQGYQTTLINPILTNMDRKASTVRKTKTDKIDAEAICKFLDKNRFDFKPYTLLSYHIDALKSLTRQRFSLVKQMTQQKLIFQRLVNVIFPELLSHFSNDYSESVLNILYSYPTPKKLAKAHKESITKLLHSRCKITSSEILELAKNSIGQSEEYLGFELKHTIDMILFYQSQIEIYNKQIEIELNETEYGKIITSIPGVGIITGAMIIFEIGDINNFTTSDQLLAYAGLDPSVYESGKFESSHNKPSKRGSKYLRWAIHQASSVIWQHDNTFKDYYLKKIKESKHHYVAIGHIDKKLIRVIFSLLKNKSMFIPQK

SEQ ID NO: 459119 - protein, 410 aa, unidentified
MRTLVERACGLDVHQAVIVACLLVGKAGGKVRKEVRRFATTTAGLLTLRDWLTDAGCSHVGMESTGVYWRPVHAILEDDFAVVVGNAQRIKNVPGRKTDVKDAEWIADLMRHGLIPPSFVPQRPLRILRDLMRFRRSLIEARSNCRNRILKVLESANIKLANVASDVFGVSGTAMLEALVEGTKTPAEIANLARGRLRKKLVQLELALHGSLSDDHRFMLDQLLRSLQEEDQRIAATEDRIATKLDPYRQQQLLLMTIPGVDWAVAATMIAEHGVDMARFGTPARLSAWSGVAPGNNESAGKHRRTGARKGNPHLKTALYIAAVSAGRTKDTYLRDKYHRIRARGGPGRAAGAVAHKIVIAAFHILTTGKPYHDLGGDYLDKRTERRTKQRLVGRLQRMGYHVTLQPVAA

SEQ ID NO: 459120 - protein, 363 aa, unidentified
MFTERRSVGLDVHARSVAAAAIDGVTGELVQSKLTPSYEHIRSWIADLPGPVAVTYEAGPTGFGLQRVLRAAGIRCEVAAPSKLQKPSGDRVKTDAKDAVHLARLLRLDEITPVAIPSVDQEAARDLVRAREDCRGDLMRARHRLSKLLLRHGIVYYGGNAWTGKHDTWLRHHAAPQLRTRATRLAFDSDYETVLMVKARRDRLDTAIGEMASESEFTELVRRLGCLRGVSTLTGFALAVEIGDWHRFTGNTIGSFVGLVPSEHSSGNSRVQGSITKTGNTHARRLLVEAAWHHRARYTVGKTMRDRWELAPAAARARGDEGNRRLHQRWVTFNDRKKKSTIANVAIARELTGWCWSLAVMEE

SEQ ID NO: 459121 - protein, 409 aa, unidentified
MFYVGIDIAKNFHVVTIIDDSEKKITTKPIRVTNCIAGFSKFITKLESISSNTNDFMIGLEATGIYGENLLEFLNSHGYDVKLLNPFQTSRYREQHTMKKVKNDNIDSWIIALFLKDGKFSSGYVTDDEYQSLRTLYRNRASIQHDMKEVKKRIITQVTVTFPELENFIDIFSITGLALLDKYPTAHHYKHSSVDRILKIFRHIQGNSFNGEKALKVLELAKNSIYSGKAKDARAVAIKSSIRLLKIYQEELSILEDEILALLEQGGIKEEKDVPRNSLIENLKTIPGVSSKTIAAVISECGDLSRFTTPIKFIGYLGLFPTENSSGNSKSTGRLSRRGSNLAKHALYMASVSCLLHNKELKQYYDTKKSQGKSKQEGIIAVSRKLATIIYSIFRYNTPYNPSRVFSKS

SEQ ID NO: 459122 - protein, 323 aa, unidentified
MEYYVGLDVSLKQTSICVVNQTGSVVREGVVDSDPEAIASFVRSKAPGTVRIGIETGPTTTWLWTELNRLGLPVICIDARHAKAVLKMQINKSDRNDAAGIARIMQTGWFKEVRVKDLDSHAVKALLASRALLVKIKRDLENQVRGLLKNLGLVIGRAKFNVFAARAEGLIENRPELVAAVRPLLEARKAIEQQVDDLDRKVHKLARHDVQVRRFMTVPGVGPITALCFKATIDDPTRFKRSRSVGAYVGLTTRRHASGEIDWSGRISKCGDAMLRMYLFEAAGVLLTRVPKWSALKAWGTRLAKRNGLRKAKVDSTPNRKPR

SEQ ID NO: 459123 - protein, 339 aa, unidentified
MEEVSIIGLDLAKRIFQAHGGDKSGKCLFSRKLSRAQLLGFLKSQKPCIVAMEACSSAHYWGREIAALGHEVRLIPPHYVKPYVKRGKNDAADAEAICEAASRPTMRFVEIRSAEQHSQAMVFRSRDLLVRQRTQAINAVRGHCAEFGLSAPTGHKGYEALKGLIGEARDLPGVAREVLELLMASIDQLEGQIGALEKKMTQLAKRDPVNKALMSIPGIGPITALAVKALGPDAGGFASGRDYAAWMGLVPSQHSSGGKERLGKITKKGNRTLRRLFVICAGTVITSIARSRTVPDPWLAKLLARRPRMVAVTALANKIARIVWALQVKGGVYQSPMTT

SEQ ID NO: 459124 - protein, 409 aa, unidentified
MKTEKYHFVGVDTHKYSHTAAIIDQTFNQSGIVETTALPKHYPAFLKKIRTKAEGGKIIFGLEDTAGFGASLYRFLINNDLDVREINPVKTKRERLHKLHPDKSDPDDALDIAKVLAQEWRKLPSFKRSPEIEALQKLTRQRDDFVGQLITAKNHLHAALHLIYPGYQQFFPEVFEKGAMAFWEKYPTACHLKNIGSQRLAQYLVTWYTCKEADSIATKIMSLIESKDYPQQLADAYERIIPMLVSDIRGIQEKIAIIEKPIEQTIMQLPYQLHTIQGVGIVSAAQLIAQIAPPERFASSDKLARFAGIAPAKYGSANRLRFHRSRTGRRSLHKTFFLIALSQIAINRDGKPRCPAARKYFLRKVEEGKSKMHALKCLQRRLVDIVYAMMKNHTPYNPKFSKNNKKNDG

SEQ ID NO: 459125 - protein, 354 aa, unidentified
MKGTAVTIVEDKPVITGGVDTHADLHVAAALDPIGGLLGVRQFPATAAGYADLLEWLGGFGDVGLVGVEGTGSYGAGLARHLAAAGVAVVEVDRADRQDRARQGKSDPLDAVSAARAAQSGRASGVPKGRDGAVEAIRALMVAKRSARHERTQAINQARALIVTGPDELRTRFAGHGPASLAEAIAALRPRPGDVPGYATRVALRELGRRVQFLDAQLERLDELIGPLVTARAPGLLSLFGVGPDTAALLLVAAGDHPERLRSESSWAHLCGAAPIPASSGKTSRHRLNRGGNREANHALWRIVITRMGSRPGHPATRAYVERRTREGLSKKEIIRCLKRYVAREVYQQLRDGT

SEQ ID NO: 459126 - protein, 466 aa, unidentified
MTSFYLGIDVSKGYADFVILNQHKQTIMENFQLDDTFQGHSQLFEILERFLADNPKSGLYAGVESTGGFENNWYQTLISFQASLPIQTARLNPLGVMHNSKADLKRNKTDKISARSVAEYLISHPEKVQYQKEDSLAGLRKQWGFVQMLSKQCTQFLNQLHSLIYTANPELLSFCRDGMPAWVVKLLLQYPTAKRLAKARATTLAKIPYVTIERAQALIVAAKDSVASSVDDVSAQLIIATATQVLHLKKTIADQTDLMATQCDIPEVRLLKTFIGIGDTLAIGLMIEIENIARFKTVKKLASYWGVHPMYKISGDGSGSFKMSKQGRVQPRRTLFLIALTAVKYNPVIKSLYEYHLQQGRAKMDAIGICMHKILRIIYGMLKNNTAFDPQIDDRNRKRIIRSEKIGPKRDKNRRFQSYDTGAPVSKRQNKKRLEREQSQSVNNTECGISAPVPMASILADVLAKL

SEQ ID NO: 459127 - protein, 413 aa, unidentified
MLKTLLVGIDVHSEKNSCAFTDDRGNRLFKKAFSLPNNLPGAEEVEKRIKAAMKEGAFDKLMIATEASSFLDLHLVDYLTNSKSLSRYSPLIYQFNPKLTAGLKKVYADIDKSDDIDPFVIADRLRFGRLPEPYEESSAYFPLKRLTRYRCHLVNAIAREKNYFLTHLFLKFSSFSSLKPFSNTFGKTSLAVITDFFSVDEIARMDIEKLVDFIIQQGKNRFKEPEEIAEAVKKVARESYRLRPSLASSVNLILGSTLQNIRALCTSLKEVDQAIAQEFKAFPNTLESVKGLGPVYAAGIFVELGNIERFPSQAKVAKFAGLTWRKRQSGKHQSEITRMTKTGNRYLRYYLTEAANSLRVHNEEYKAYYQKKYNEVTKHRHKRAVALTARKLVRLVFALLTKRHLWQPLNGSF

SEQ ID NO: 459128 - protein, 366 aa, unidentified
MEPIYIGVDFHSRRQTICYLKTETGELVITELKHQDKERVRAFYQQFPGPVIVGLEASGYSPWFEAMLEELGREVWLGDATEIRRRARWRYKDDRRDAELIRDLMVHHEFPRLHQPTPQSRDILRMLRYRQKLIKVRTMTKNSLQAIAMQAGLAKGRRLFTIAGQAEFKAVAMAPVLQYQRDHWFELLKPLNQELLETMKWFKVAAKGDATIARLRTHPGIGLLTALCFLHTLQPVSRFRNQRKVVAYGGFDPMVRRSADLSIHLGISKAGSRMLRYLTVEAVHTALRHDEDLKRFYKRVAARRGRPKAKVAAARKLLIRAYIMMRDEIDYAEFNRRAVAARLARNSQGTPCVPEVLIGQSASPGA

SEQ ID NO: 459129 - protein, 353 aa, unidentified
MAKISVAGIRTFVAGSGSKAVHIGVDVHKRSYSVALLRPDGMWKEWTSSSNSKVLESTLLPLRSRIGSVVYEAGPCGFGLARRLIRAGVPVVVAAPSRIPRPVAASSKTDRLDGRKLAEYAASGMLRSIAIPTEEEEGLRSLVRRRHRLTDSIRQVKQRIRGLLLQFGIPEPAGINHWAKAAITEIGKLSLPPGADQTRDSFLRELAFLNQERDAIEETLRQMCRASEPSRRIKAMRSIPGVGEIVATTFAAEVFRPGRFRRPEEVTSYLGLAPVVRQSGDAKARSRICPVGQGRLRSLLVEAAWMWKQRNAEAETLYRRILGRTGVPQKAIVAVARKLAITLWRLSVSPMAA

SEQ ID NO: 459130 - protein, 353 aa, unidentified
MDRIARVGVDLAKNVMQIHAVDSAERVVVRKAIPRERFVSWFANLEPCLIAMEACGAAHYWARKLHALGHEVRLIPPQFVAPYRKGGAHVKNDALDAEAVCEAASRPHMRFVPVKSPAQQSVLVLHRMRTGFVEERTALVNRLRGLLAEFGVFLPQGIRRLHEHLIERIEDGSNELTGPARLALLRGWKQWQVLDEQIAWFDRQIAEHANRDPQAQRCMDVCGVGRLTASAAVATVVDARQFRNGRQMAAWLGIVPKQKSSGGKQRLGSITRQGNNYLRTLLFQGARSAVLTAHRRDDRLSRWIVQLQARVGYYKTLVAVANKHARILWAVLAKGERFDPSYARARTGGATGA

SEQ ID NO: 459131 - protein, 386 aa, unidentified
MHDSTDLPVPERTDIRGDSATLFVSLELSRSTWVATSLAPGSKKMSKHTLVGGDGRKLLDLLARLKTRAEQRIAAPVKVVAIHEVGLDGFWIHRLLEANGVESHVVDPASIAVPRRHRRAKTDAIDGETLLRTLMAWQRGEPRVCAMTVPPSPSEEDCRRVSRERATLLRERIQHTNRIRGLLFGQGITNYNPLHKNRRECLEELRTGDGRSLPTHVKAEIRREIDRLELVLRQISEVEAKRDEMLRPAEASSPAALLMRLKGIGAEFATVLYLEGLFRHFENRRQLAAYAGLAPSPWKSGSIDHEQGISKGGNPRLRTTMVELAWMWVRYQPDSALSGWFRQRVGSERGRTRRIAIVALARKLLIALSRYVTHGEIPAGAVMKPV

SEQ ID NO: 459132 - protein, 337 aa, unidentified
MEKIKEVKQFIESVGIDVSKLTLDVFLYNKKVHKQFANSAKGFLAMQKWLVAEVNNLNDIIYCFEHTGWYCLLLSHFLNDKELFYCCINPLEIKRSMGLKRGKTDKTDAYEIARFAWLRKEELSKSVPMPLNLIELQRLMSLREQFVKQSTALKNLEKGMLVTLEKATGDFSIKLIKQSLKQIEMQISKVEKQMEELIKTDLKMQSNYKLSKSVKGVGRILAIQMLLHTHNYSRFEVWREFSAYCGLVPYPYQSGTSINGRKKTHSICDVKMKSLLSMSAISAIQHDAELKTYYHKRVGEGKPKMVALNIIRNKIVSRIFATIKRGTPYVELSLFAA

SEQ ID NO: 459133 - protein, 346 aa, unidentified
MAETEVDTFAGIDVSARELSVALRRGKGEDKPVLAKFSNHPSGHKALIAHLFRGGRRVRVCLEASGNYSLDLALTLQAHRQVEISVINPRRARRFAESLGQRSKTDPVDARVLCEYAARMPWVAWQPPSSVALHLRAVARAIADLAVIHTQQNNRAHASAASQALPVLVVKEMQRHQKYLEQRMTRLRREALRLIAGDSELERRFRLMLTTTGIAETSALQILGELAVLPDMLDARQWVAFSGLDPRLFKSGKSVEKRPRISRGGSRHLRRALYMPALVALRRDPYLRGFYQNLLARGKARLQAVVAVMRKLLHALFAMFRTNQPYDGSKLCCAVEMAGHAIAACA

SEQ ID NO: 459134 - protein, 426 aa, unidentified
MEQSTRFIGMDVHKDTIVVAVTAAGDVGKAVLYGTFPNTAATVEKLVRRLRQAGSGPLKFCYEAGPCGYGIHRALTKMNEDCMVVAPSMIPRKSGDRQKTDKRDAASLAVLHRGGLLTAVWVPDAAHEAMRDLIRARLAAVRAVRAARQQLSAFLLRHERIYPAGRTAWTKAHRGWLADQSFAQPAQQIVLEESIEAVRLGEQRRDRVDGYLRAQIPAWSLFPLVQNLSALRGLDTIASAGLAAAIGDPSRFVSAPDLMAYLGLVPSEHSTGPKRRIGAITKAGDVHARSLLIEAAHSYRFPARVARHKLTAVDAVPDAVREIAWKAQTRLCQRYRHMMAKGKLKQVVVTAIARELAGFVWSIACIITDPPTKNFAVTTASEKICRTGSTTCSSVPRRQPIKETARRAERPGQIRTASADGKRPDR

SEQ ID NO: 459135 - protein, 395 aa, unidentified
MRRDTKEVLAELVGKLKEKLDPKKVAATSAGDGYPRGELRPNLDRLTVGVDLGDQWSHYCILGLEGETVVEGQLRTTREDITEFFQALNSARVVFEVGTHSPWVQEVIGGCGHEVLVANPRLMEGSKRRKRKNDRIDANKLARLGRVDPQSLHPIQHRSREVRQDLVVLRARDALVAARTELINATRGLVKSMGTRLPKCSSASFAEKVEGTVPAELRDALLPLVRMTAALSDCIQEYEEKIEQLGREKYGHTALLRQVKGVGPITALAYVLTLENPDRFVKSRDVGPYLGLVPKQEDSGESQPQLGISKAGDTMMRQLLVGSAHYILGPFGPDTDLRRYGLRLCERGGKNAKKRAAVAVARKLAVLLHCLWVSGEVYEPLRQGMSATMTPAGAA

SEQ ID NO: 459136 - protein, 460 aa, unidentified
MNEYFIGIDASKGYSDFVMLNAKKQTVIDNFQLDDTFEGHAQLYELLHSFNKDNPEATIYAAVESTGGYENNWFQSLVTFQASLPVKTAHLNPLGVSHNSKADLKRNITDRISAKNVAEYMIAHSEKVSYQHQDSLASLRKQWGFITMLTKQSTQLLNQLESLVYSANPEILTYCKDGSPQWVLKLLTSYPTALRLSRAKVKVLARIPYISLDRAKRLVATAKKSVASASDKVTEQLIVATVKQIVHLKKTIKVQSEVLANECQIPEVALLKTFTGIGDYSAIGLMLQIQSVNRFLTSKKLASFFGIHPEYKKSGDGTYKYRMSKKGRKEGRRVLFIVAMSAIQSNPLIRDVYQQAVERGMEKMSAMGLCMHKILRIVYGMLKHNKAFDPQVDLKNRQKKPSRQRKVGQDKDRRYQNFDSNAPISRRQKMKRKERKQSQNVINVEYGISEASVPSTQLAN

SEQ ID NO: 459137 - protein, 400 aa, unidentified
MLSIGIDVSKGKSTVCGMKPGGEIVYTPFEVQHTREGMLELVSLLRSSGEEVRAVLESTGSYHCPVVTALLENGIFVSVVNSLRMKRFCSQSIRKVKTDRIDAMQIALYGLAYWQELQPAKLPEDTYRELQLLARQYYQMTSMLIKAKVDFNAICDQVLPGMQELMNDHAGRHKLSDFVLRYHHTTHILEMGETRFRKDYCKWAEKKGYRNHERMAALIFATAQNGIPVLPNAPSTQIVITEAIRVLHTVEASRDAILTQMQALAKTLPEYSLVREMPCIGDTLAPRLIAEIGDVRRFHSKRALIAYAGIDAPPYQSGKFCANNRHISKRGNRYLRKTGYEVMQSYVMHKPANDPIFTFIEKKRSEGKSGKLAMVAGLNKFLRVYYGKVTELYRSLPAIE

SEQ ID NO: 459138 - protein, 341 aa, unidentified
MDNCGIDLHLKSSEVCVVDESGETSERATIPTTERSLARWFGGRERMRICIEASGLSPWVARVLTGLGHEVIVANAQRVRLIAESTLKNDRIDAETLARLVRMDPKLLRPIVHRRAETQRLRGMLRVRRILVNNRTACLNTARGLLRSFGYRVPGQKPERLARSLARGTVPEELCGLVAPLVATALELDERIRALDEEVVDAGRGYPEVDRLQQVPGIGPLVALSYVLCIEDPDRFRTSRDVASFLGLRPKMRESAERSRFGAITRHGDAEMRRLLVQAAHGCLRSRQDSDLKRWAEQLGGRVGKKKAVVALARKLAVLLHHLWASGEDYEALRPPTAAAA

SEQ ID NO: 459139 - protein, 320 aa, unidentified
MMAQNDLVVVGIDVAKDKVDACIRRFTLRQTFPNTAQGHRKLVAWLRKYQVGKAVMEASGGYEREWRNVLHNAGIEVRIVDPRRVRSFALSAGRLAKNDPIDAEMIAWFAETFSQAPGQIPDAAREELAALAKARKALVDVKIRLQAQDEHAAPEPARKAYARVLKSLAAEIDKLEAAISAKVKATPEFAERAEIIESVPGLAQATSAVLIAGMPELGQVSDEVAAALIGVAPYDDDSGKRRGERYIKGGRRWVRNAIYMPCLGAATQYNPVLKAFYQRLLAKGKEPKVALVACMRKLIIILNTMLARRQKWNPGRHAMA

SEQ ID NO: 459140 - protein, 393 aa, unidentified
MVCVGIDVAKDKHDCFIISSEGEILADVFTIPNNAEGFNTLLQAIRRSTRPEDKIKVGLEATGHYSYNILGFLLDKGLPTYVINPLHTNLYRKSLSLRKTKTDRVDARTIAAMLMSDVDLKSYTDTVYHNEELKSLTRYRFDKVRERAKLKQSVSRLVTILFPELEKLVSSLHSASVYALLSEFPGAKQISSTHMTHLKAVLKNASQGRYGQEMAETIRNAARSSVGSVMPAKSLELQHTIRLIRELDAEIEDIETAIQAIVDEMQSPITTIPGMGVRMGAVILAEIGDFSRFDSPDKILAYAGMSPSTYQSGQLSLSGAYSHMEKRGSRYLRYALYNATKHVCHWDPTFAAYLAKKRAEGKHYNVALSHAAKKLVRLIFAMEKSQRPYCAAA

SEQ ID NO: 459141 - protein, 397 aa, unidentified
MSVRNVYDMVSAGGMDVHYKFSQVTMRDEQGQVVRRERLDHPDRKQLRDRLAQWPQGVPFVLEASFGWGWVADLMKEVGLTPVLSNCLKVEQMRKARGLAKTNKKDADLLSLLPAEKDDWWKVWMAPPKVRDQREWMRYRSGLVKIGTQTQNRIHAVFHRHGIFHEFSDLFGAKGRVFLAELCKEGRASDVQLAPGALVGLRGLVRLLGHVRGQLAEVAKKLRGQLNRSPLAKRLDGIPGFGLILSHTLMAEIGEIVRFRNHRKLASYSLLSPIADDTGEDAPGRSPMGRHLGQRGNLTLKWAFIEAAHGAVRSGGKWRKIFDSYTDGGKKNRNRGYIKVARELVKVVYVVWSKCVEYTDNPPARPKASGRNKVKRFFGSTRSGTGQPCPAMAAAQS

SEQ ID NO: 459142 - protein, 354 aa, unidentified
MSQKLNSAIAVIGIDIGKNSFHIVGHDHRGAIVLRQKWSRGQVETRLANLPPCLIGMEACVGAHHLSRKLNALGHDARLMPARYVRPYSKGQKNDFRDAEAIAEAVQRPTMKFVATKTADQLDLQALHRVRERLVSQRTGIINQIRAFLLERGIAVRQGQRFLRAELPRILATPTDVLSPRMVRIIEDLAGDWRRLDERVEGLSSEIDAIARQDAGCERLMSVPGVGPIISSAMVAAIGTGDAFSKGRDFAAWLGLVPRQMSTGDRTILGKISKRGNRYLRVLFVQAAWVVLIKPKSWERHGLKPWLEAAKKRLHHNVLAIALANKLARIAWSVLARGRSFEARTLNESAAQPA

SEQ ID NO: 459143 - protein, 387 aa, unidentified
MHAADQSLAPTTIGADLCAIFISLELSRSTWLVTSLSPGRGEKMSKHSVSAGDIAGLLARFSELRRKACARTGKSFPIVVIQEAGLDGFWIHRVLLSEGIESHVVDAASIATSRRRRRAKTDRIDGETLLRALLAHKRGEPRVCSMVRAPTPEDEDRRRICRERKVLIMERVQHVNRIKGLLFSQGASGYEPLRRDRRARLEALQTGDGRRLPPHLKAQVCRELDRLELLLQQIKAVEAERDALLNAEQTKASAPPPMLLGVHGVGPEFASVLWSEGLSRHFDNRRQVAAYAGLAPTPWQSGSVHHEQGISQSGNRRLRTMMIQLAWLWLRHQPRSALTLWFKDRMERNGGRRRKTTIVALARKLLVALWKYVSAGVVIEGAMIRPA

SEQ ID NO: 459144 - protein, 400 aa, unidentified
MGNDDIDVWLGLDVGKQSHHACALDRHGKRIVDKPLGQDEAQIRELLACLGGHGNVLLVVDQPNTIGSLPLAVARDMGVAVGYLPGSAMRKAAQLLPGDAKTDARDAYVIAFTALHMPDTLRDAGSDDETMARLKVLAGFDDDLAFECNRQINRLRSLLLQIHPAFERALKGDRITRDTTLALLEHYGGPTGMRRSGRTRVGKWAKSAGLRRCDGIIDDLFDAIGQQNVTVAGTQAVEEIVPVLASRIRQLREQREQLAAKVETLLEDHPLLTVLTSMPGIAVRTASQILLAISGDITRFNSAAHLAAYAGIAPVTRRSGTSIRGEHPARGGNKRLKNALWQTSFIAAFHDPESHAYHQRKRNEGKRHNAAIICLARRRCNVIYSMLKNATPYQPMHLTA

SEQ ID NO: 459145 - protein, 371 aa, unidentified
MLAERTWVGLDVHARSVVGCAIDDEACEIRTQRVAPQTDAIVAWVLELPGPVAVTYEAGPTGFGLARALAAAGVRCEVVAPSKLERPPGDKVKTDRRDAERLARLLRIGELPAVRVPSEAEEAARDLVRAREDARGDLMRARHRLSKLLLRQGIVWDRSAWTGEHIDWLRRQHFDRRGVQLAFDEALDAVFSVHARRDRLDTAIEEMAETEPLAGPVGRLRCLRGVSTLTAVGLCVEVADWHRFTGSTIGSYLGLVPSEFSSGARRVQGGITKTGNAHARRLLVEAAWHHRRPLRPSRERARRADGQPAAVRARAEAGNRRLHQRWCRLEQRRKRPTVSVVAVARELAGWCWSLAVLDQDGLDEHQHHAAA

SEQ ID NO: 459146 - protein, 343 aa, unidentified
MTEVSTIGLDLAKNVFQVHGVDVAGETVIRRQLRRRQVLPFFRKQPPCLVGIEACATSHYWAREIGALGHEVRIMPAAYVKPYVKRNKNDAADAAAICEAVTRPSMRFVAVKTAEQQSVLMVHRTRELLVRQRTMLVNAIRAHMAEFGVVARVGLPQVKELLTVIADPGDDRIPPLARTCLEGLARQLLSLEREISAAEQRIHAWHRANQASQRLATIPGIGPITASALAASISDPSVFRSGRELAAWIGLVPRQTSTGGKQRLGRISKAGDHYLRWLLVTGAMTVIRHGRRTNFAKRPWLGDLVARKPTKLAAVALANKNARTAWALLANGGTYRQPEITVA

SEQ ID NO: 459147 - protein, 361 aa, unidentified
MGNTIICGIDAHEKTLVTRIGVNQEAAETKRFSNTRSGRQALFSYVKKLSGEYAGGKMVMAYEASTLGYGIYDESVTSGIECHILAPTKMPTARKDRKKKTDERDAQRVFEIVRAYALAGNELPRIWIPDHQTRDDREVVRGRLDAAQKLTGLKCQVQTLLKRTGVVKPAEAGDSWTQRYRLWLKGLCIKPGAQIALQSLLRQIEGIEAEIKILDQAVEQLAEGERYKAVAGALVRKVKGVGLLTAMVYVTELGDLSRFNNRKQVGSYLGLVPSSNESGEVADHKGHITREGSARVRKVLCQATWARVAHDKEEAVVYQRLVKKNPKHKKIAVVASMRRLGVLLWHIGLAAQKEAVKEQAA

SEQ ID NO: 459148 - protein, 316 aa, unidentified
MTTTLSTDSFVGIDVSSQTLDVCLLPTGEAFSENNSGKGLERLARRLKQTKPTLVVLEATGGYERALVLALAEAAVPTAVVNPRQVRDFARARGILAKTDSIDARVLAQFARDLRPATSEAPSERQLELEELLARRRQLIAIRTAEKNRRQQVRGRTVVSSVKTLLRTLDHEVSQLEERIAELLQQCAVAVEKLRLLTSTPGIGPTVGQTLVIDLPQLGRLNRREIASLVGVAPLNWDSGQRRGRRSVWGGRSHVRSALYMAVLAALRCNAVVRRFYDRLRAAGKPAKVALTACMRKLLTILNTMLAKNTPWKNST

SEQ ID NO: 459149 - protein, 400 aa, unidentified
MRAVFGIDVSKTSSEVAILVNGEKVHGYTILNDAFGFNRLLGDLKTVHNPEIIFEATGVYSRRLQAFLEEYGYAYTRLNPLEAKKQLDSLRVRKTDKIDAEKLAKSQLVHNRKPTYVQEEVYQHLRDLSRFYQNLTEDLVRAKNRLHKVLQITFPELENLLSTPTGEQYWNLVMVFPCKEFVLSLSQSDLYEIIRQSTSKRISEKRIAYLTDKLIKLAKQSFCAVKKNSPMLEEVRYYAQELLRLSERRQVVLNDMVTLAQPLPEYDILRSIPGIAETTATSIIGELGDIRRFQSSNQINAFIGIDLRHYESGKFLAKEHITKRGNPYARKILFKCIHNIASASHTNPCHIADFYEKRKRLSTIASTKPHAIASIHRLIRTMYYLITHNKLYDYSLTQNR

SEQ ID NO: 459150 - protein, 317 aa, unidentified
MTVIICGVDVASKKLDARIGREGPFATFDNDAEGVSALAVFCRQHGALLVVMEATGGYERQAFAQLWGLGLKAAIVNPRNVRDFAKAMGWLEKTDKIDAGAIAWYGEVRQVKPTPLASPTQQRLTALVKRLGQLTGLRTAQIQQRRGLTEASLQPMFSDLLAVIARQIRALEAEIAKEIESDPLWKALDTEFRTLKGVADRTVARLMARLPEIGLMAGKSASKLIGLAPIARDSGNSKGKRPIRGGRPDVRALLFVVAGLVAKFDPDFAQFRERLLAAGKPKMVVRVALAHKLLLRLNAKARDVRAELARQQSALAP

SEQ ID NO: 459151 - protein, 445 aa, unidentified
MGSSKTYRSVGVQSVEVSGLVQGHDGQDLVVGVDVGKGKLHMVLYWSFGSCSKPIMVHQPAELRTAIKLLKELSQGRRMRVALEPSGTYGDAFRYGCSQAGLVVERVSGFASKKHSEVMDNTNSQHDGKDAGVIAELAFMGKSKVWPWEQPQGDEEMLRVHADLMVMAREEMIRWVGRLEGRLARHWPEVLSLLDLQSPTLLQALVYYQSPAQLAGDPEATRRLEELGGRFLAAAKVQAVVASARETVGVPVTPGVGYELKVIAEKILALRKQAQEHERMVERLGSQSPVVKLLSPAFGKATAAVLYLECGDPGQYSCGAAYVKALGLNLVEHSSGLQQGKLHISKRGSALARKWLYLACLRFICDEGHTRAWYHRKVARDGGVKMRALIGVMRKLALSIYHCCSTGEEFDKQKVFQTQPRSKSRRRNRQRREPLDLQGACVASQ

SEQ ID NO: 459152 - protein, 402 aa, unidentified
MNPVVGLDISKEESHGQAFLARGKPFRGTFHFEHTRDGLAILHEVLKDVETVSKLRPLLILEATGHYQSPVVQFLEEHHYIYIVINPLISNRLRKSQLRKVKTDAADAYLLGELYYKEEFEPFKIRGVQLLNLRYLTRQYESLSKMCVQTKLQFQAVLDQVFPAYKGVFGAMYSRISLRFLSDFPTSYSVLQTDEITLKAKMKELLSSKRGRSEGWINQRVQRLLHAAKQNPFQQTMYASHLINLKVLITLILQYQEHLAELEQNINALAEEIEEYELIQSIPGIGHKIAATILSEIGEVDRFDHPKKLVAFAGIDPSVFASGKFTATRNRITKRGSRQLRYALVMAVQCGLIRSRNIRIKAFYDRKRAEGKPHKVALIACANKLVHWLYAILRNKKEFRPI

SEQ ID NO: 459153 - protein, 335 aa, unidentified
MKKFDYYIGIDVSKLKLDVTILYQTENIPKTVHYQIENTGKSIAQFVKKTLCKYDLQQILFCFEDTGIYSLPLSYYLSDSKLSCWQVPAIEIKRSKGITRGKTDKIDSKDIAFYAFTHTHKFHPCAMPEQSIRQLRLLFTEREKLLKAISLFKSTAENKDFMPKEVFKVVESENKSVLCKLKQSLKHLEEKMLSIIAPDDKLNRQYRMLASIPGIGMQTAIYLIIATKGFEAFENWRQLACYAGVAPFPCQSGTSIKGRTKVHPLADKKLKSLLNMCAMVAIRHDKELNAYYGRKVKEGKPKMLVLNNVRCKLLSRVFAVVNRNTPFINTFKFAS

SEQ ID NO: 459154 - protein, 426 aa, unidentified
MSNKLVAGIDISKAFSDICILSPKNEIIVHTKINNDYEGMKSIDLTFKKLETDYNTQLVVIMEATAHYHQLLANFFRKLDYEIIVINPIQSNAIKNINIRKVKSDKTDAYNIALLYRLKNYSETETHADIIISIKKLCRQHKELTDEIVEHINRLTGFLDTSFPDFRKVFTDLQGKTALTILAEYPTVTAILDPELDKAKIINQIKTISHKSESYAIKKYDKLYQAARNSSEICISNLSTSILIQTTIAVIFSLQEALRAIDDEISRLSIVDEQFQINVKLLQTIPGIGEYTACVLLSEIGNIENFSKPKQLVAFFGLDPGVSQSGSYNRKNNKISKRGSPYVRTILHMLAKANVYSNRNREYPNPVMRDYFEKKIVDKPYKVVMCAVMRKMVQIIFAVLRDQKPFELRTPDDHQNMIRLNNKQAA

SEQ ID NO: 459155 - protein, 381 aa, unidentified
MLYVGLDLSRKRLDFDARLAGGELVERGAVPPDPDGLAGLVRRLGDSEVLAVIESMNGARFVHDRLELSGWDVRIADAVKAKGLAPLACKTDKIDAWVLAELARRDLVPEIWLPDPAVRAERERARFRLHLVRHRTALKNRVHAILIAHGIPNPSSDLFGLAGRRLLERLELPEPWKSTTAASLTLIDSLDQQINACERELRSLGADHPYVPLLMTIPGIAWILAYTIASEIGDIGRFPTPTKLIGYTGLTPRVDQSGEQDRRGPLRKNGPNHLRWALVEAAHTASRHPLYQPILERNRDRHGRKRGSKIAALTIARKLTEATWHMLSKNQPFAPAGATRPLAPCRPRTELRYRSDSHQLISARRRHREMSRTQNPPRIRR

SEQ ID NO: 459156 - protein, 375 aa, unidentified
MEHHSEAFVALDTAKLRNAVAIADAGRNGEIRYLGEFDNTEAATRKLVTKLASKHSRLTFCYEAGPTGYGLYRLIKSIGHDCIVVAPSLIPSKPGDRVKTNRRDAVNLVKLLRAGELTAVWVPDERHEAMRDLVRARDAAVKDYRIKRQNVSSLLLRLGRRYPGKKTWGRAHINWLTSLTLEHREQRIAFEEMLVAVRQVRERIERLEQAMREAVAEWTLAPVIEAVQALRGIDMVGAVVFLAELGDLSRFENPRQLMAYLGLTPSERSTGESVKRGGITKAGNTRARRLLIEAAWSYRFPPRVSKDMQARIGAAPQTAREIAWKAQMQLCGRFRTLTRKGKRPTIVVTAIARELSAFIWAINREVAGSHATANQ

SEQ ID NO: 459157 - protein, 324 aa, unidentified
MEQFSFFTGIDVSKLWLDIAVYKPIDGIVHQIRINNNVKDIRAFLKGLKKQLKAEITEHLFCMEHTGKYGHAFLNASALEKARVWVELPIQIKRSQGLVRGKTDQWDAARIAQYAYRFADKAVFWKPADKTIQDIKELQVKRSQLVKVHSQLIQENKNDPLFKKPLLALKQAIRDIELKMEQLLEKNEVARHQYDLLKTVPGIGKQTAMALIVVTNGFTRLTESRKLSCYSGLAPFPYSSGSSIKGRTKVSKMGDMKLKVLLNLSAWNAIRSIDAFKDYFKRKVAEGKHKLSVINAVRNKLLALALSVVKRNSPFIKEYSFTFS

SEQ ID NO: 459158 - protein, 418 aa, unidentified
MFKIFRKNCCGLDVHKTWIYACIGITDPNGRTEYHEKRFSSFSKGLRELADWLASYKCYEVCMESAGRYWIPVFNILEKTCWVSLSHPKYTKPQKGNKTDRKDAKWICDLFMCDMTKPSFIPPPDIRHLRDLVRYRFKLTNILTGEKNRAQNCLTVSNLKLDDVFSDVFGKSARSITEHILAHPGETFDVTPFVDRRCKHPIEEIQAAVDGSISPEQAIKLREVLRHMDEIEDHKKRIEAEILRLATPYDSLLKLIRTAPGFSADPMTAVALISEIGVDMSVFPTAKHLSSWAGCCPRNDSSGGKRKSTRISRAGAYLKPLLVQIANAVVKTDKYPECKERYRRLKARRGHKKAIIAVCRMLLTAIWNILSKIEPYNPYGYLADRKTDPSKTITTAQALNLLRLRGYVIIDASVFSTA

SEQ ID NO: 459159 - protein, 416 aa, unidentified
MTKHIVYVGIDIAKARNDVRVEFPDGKIQRFTVVNRKEDYDRLAKYLKSLEDDCQIGLEASGNYHRPLAYYLQKKGFKVYLVSSLALARTREAIHNSWDKNDPKDAQVIVHLLKTGIKQRYYDTFLNGFQDTEELSKTHYQVSLAKMKIQHSLLTHFLPLYFPEAEKYFCSTRAVWFSKVLYHFPSPHHIGEMGQDKFVEKAWDIVGRKVCKEEFLKDFYKTAKNSIGLPVDKDSCALKMFKRTLKEHYDLCIKRQELEDLAHQKLKDDRVYKILRTVPGIGPILALTIISETGEFGRFKHYRQYLKFCGLDLSTCQSGQFRGQSKLSKRGNRRLRCAYWFASTVAVRMRENTFRKKYSRYIQNDPDNADLKRKAVIATAAKMARVCFGLVKNLKEYRPYYDEDIPSGEIRSLCVR

SEQ ID NO: 459160 - protein, 401 aa, unidentified
MESPIVSIDVSNGNSHYMCFIKNNKRFGKVKKIDHDIEGFKRLLEDIQKLEAETNEKVCAVFEATGVYTKPLERFLSKNSIKTYIINPLESARKRKEEIHNKKTDKLDPISISKVYYDKEDMMELKKKDETYNWLRKKNRLYEDQLNHLRKYKVTFQNQLSICFPGYLDLFRDGYSDIPMTILKKYPHPDLLKNKKAETVARYLEKNTCHTHKVSLEYALKIIEFAKKTYPGCEKDDVEVEIFKILLDKVIETQRECEKTLNEMITVASTLEEYRYISSIDGIGPNLAARIIAEIGDIEEFKSREALVAYAGLDPHIYQSGDQDGKHLKISKKGNKYLRCLLFLAVGCSIRGAKDNPVNRFYQKKKQQSNPLNSKAAKTACTAKLLKIIYGICKNKTTYER

SEQ ID NO: 459161 - protein, 344 aa, unidentified
MKINLLGIDLAKNVFQLCALNQANKVLFNRSIRRARFRSSIARLEPTTIAMEACSSAHYWGRAFEGMGHQVVLVPAQHVTPFVRGGKSDARDALAICEAAQRPGLHPVPIKSIEQQDIQLLHRLRQRQVQHSTALANQMRSLGREYGVIFPEGIHSLIARLPEVLEDGSNELSPVARYALADQHRCLIEVRKAMIAFLHQIEQLAAQYPAYANLLRLPGIGPMTASAYIAAIGNGQQFKCGRQVSAWLGLVPRQYGTGGKIQLKGMTKNGDRYLRTLMIHGARSVITRGLKNRPELAQWVQPIIDRRGFNKAVVALANKLARISWVIVTTGEPFDMQQAFKPAV

SEQ ID NO: 459162 - protein, 356 aa, unidentified
MKSQAFKYAVGIDISKSEFHVCLSAIDSLQKVTIKASRSFTNDSRGFQGLANWVQSHHKQSELPIVYLMEATGVYYENLAWFLHHLGCHITVILPKKAKHYFKGIGLKSKNDKIDARGLAQMAAEQNLDAWTPISPQIEQLRALTRHHQVFQEQKTIYNNQIHAIEHSHYQDELILDDLREVVNLIDQKLKAIKKKIDKVVEEDSFLKEKFSLVLPIKGVGLLTIATIVAETNGFEFFENQRQLTSYAGYDVTERQSGKYAGKQAISKQGNARIRKVLCMPAFNVVRFQEKSFANLFERVYQRTNLKMKAYVAVQRKILVLIYALWKKNETYDPNKVAPTSEATLDEVAKQPLLQE

SEQ ID NO: 459163 - protein, 464 aa, unidentified
MAKRKQSRKERLAKKMSRLEVQNPDAAGIDVGSREHWVAVRPDLNAQAVRCFQSFTKDLNELADWLIDCNVTTIAMESTGVYWIPLFQLLEARGFKVLLVNAYKIKNVSGRKDDESDSEWIRKLHSYGLLEGSFQPDAKLRKLRTYLRDRETLVNCASSHIQRMQKALTQMNLQLHHVISDITGVTGIKIIRAIVAGEHNPEVLAQHRDRRIKVGIETIVKSLEGNYLKEHLDSLTRFLQLYDLYQHQIENCDCQIENILKEFPSMKDFPHNEKNKKGLKLCRKKKSSNAPNFDVEKYILQITGVNLFAVDGFNTNNLLGVISETGIDMSKWKTENHFTSWLRLSPNNKISGGKILSRHTQKTKSRANKLFRLAAQSLSNNKSALGAFYRRLRYRIGPSKAIVATARKLAIIFYRMIKEKMEYSDIGAEKYEIKYKNRQIKYLEKNAKLLGYKLIKYEPEIQVS

SEQ ID NO: 459164 - protein, 355 aa, unidentified
MQSNKISFKGQNIYVGIDVHLKTWHVTTLTESGYKYSFAQHSDAKELFDRLNKKFPEAHFKSAYETGFCGFSVHYALTAQGFENIVVNPADIPTTGKEKAMKTDAVDSEKIAWSLKRGELTGIYIKDKCYMDDTNLIRLRQRFIRDLSRQKNRTKHLLYTQGVAYPERFSKKGTHWSRNFMKWLREDVELLSDEKRTLMLLCNQVENIRKDILAITREIRRLSTADKYKENFSLLSSVPGFGLITSMSILTEYDNNLMRFPNERKFVAILGLIPTCHDSGEKKVNGVKTFRGNKQLGPLIVEASWVAIRRDYQLGCYYTNCCQSMNPQKAIIKVARKLACKAYAVMKTKKTYVLS

SEQ ID NO: 459165 - protein, 356 aa, unidentified
MNALHYIGFDIHKKTISFCVKTAAGEIVEEGSLLAQRGALREWASARPQPWRGAMEATLFSGWIYDTLQPYGEQLEMAHPAKMKAISAGKKKSDTIDARTIADLVRCNLLPACYVASQRIRELRRLLRYRSLVVSEAVRMKNKMAGLLMETGALYVKEKLHRKKYFASLLEDLEEVPESVIDLLRFSRGALEMFQSTQKRLVRELLADPALAQRVERLMTIPAVGEITALTWALEIGDPHRFRSGSEAMSYCGLTAALKSSAGKQQRGPISKQRNHRLQTTLIEAAKLAPRWNPQLAALHARELERGHRNRATLAVARKLVTYLLAVDKSGQSFQLRAPMIEDRAEKEGTQKIKTA

SEQ ID NO: 459166 - protein, 371 aa, unidentified
MIGVDLSKNVFQLHCAMMSGHLKFRKKLTRPQFRQFMSNQPPAVVVMEACGSASYWARELNKLGHEVKLIAPQYVRPFVKRQKNDAADAEAIVIAAQRPEMRFVEPKTEDQQARPALFRARERLLHQRTELVNALRGLLYEFGYTIPQGIGHLKRIEPILDDPGCDLPEIVRDECRDLMEQIAKKTARIDARTKIAKSSAEKSDTARRLQTMPGVGPLTALAIEAFAPDMMNFRRGRDFAAWLGLVPRQHSSGGKERLGRVSKAGQADIRRLLIVGGDSRLNWLGRWSIPEGSWLARMLERKPGCWSRSRGPTGWPGRSGRCPPRRRIIRIRHELLHELNSESSLASAKEVREGDNPNGRNDRTDLDRENQ

SEQ ID NO: 459167 - protein, 427 aa, unidentified
MRFIGLDVHRDFCEVAISEGGKARRAGRVPARPAELELFAQSLGADDRVVIEATGNALAIARILVPHVGEVVLAHSRKVRAIAEAKVKTDAVDACTLAELLAADLVPRVWVGDEWTRLLRRLVSRRRQLVKQSTRTKNEIHAVLLRNLKGRPPVSDVFGKTGLAWLRALELGIDERETVDAGLRQLEFVRTELARVDRAIAEQALSSAEIRRLMTIPGIDATTAAALMAAIGDISRFPTPRHLVGYLGLDPRLRQSGVAKPRQGRISKEGSAAARHALVESAWVAARAPGPLRVFAERVAARRGRHIAAVAVARKLAVLAWHLLSRGEDYAYQRPSIVRRKLRRLELKTGAARAKRQAGAAPLWGSRAQDDLERELARQAELAYRRLVTDWQRTRPKSGAGATPGRASSWPSERQAARQETAPPPAL

SEQ ID NO: 459168 - protein, 321 aa, unidentified
MGAKELLVAIERAGVRETAIVLANDADGHRKLIRLATKKGATARVVLESTGVYGLDLAFALHRAKRTEVMVANPRAIAAFAKASLQRSKTDALDAETILEFGIRMPFAPWTPPDPSILELRALSRRIEAMSKTVTQEKNRLHANDQSEELSDFVKEDIRELAELLEGRIHRLRKQALAVIEQTPELARAFGHITSIKGIAEAAGIQLLAELGSLPNDMTTRQWVAHAGLDPRQFQSGTSVHKPARISKTGNAHLRRALFLPAMVASRWEPNVKAFYEKLLAKGKTKMQALVAVMRKLLHAVHGMLRHDRDFEGEKFFAMNG

SEQ ID NO: 459169 - protein, 452 aa, unidentified
MARLELTAFDAIVGFDQGYEAHHLYVINLHGERLFDAKVNSDAKGLQDWLEKLRHTLGHQNLGRVALATESPSAPWLPQMMTLGIAVFTINPAQIAAARKLEAPSAAKDDRRDSRLLAEFLLFKPGCYERLQPPPDVIDELRLLLRRDHQLHKAHHQQAEQLRDQLHNSLPQLLPFSSGADDPWLWQLLAKHAPTLLTVLPPAEACQQVLDAFRVRRLKGEELHQALALGLLPHLTGRRAQTLLDLLVGQVRTLQAVWQEWRAIQTRVAKIMAELLATEPHTAAGPTTTETSSVSMAATGTPSGAGVAVAPEALRPLSVAEVAQLLNSLPGSGPRTLPVLVVEGWLQWSTLDLAHLRSYSGVAPVVEASGKQHRVRMRQACNQRLRDALRFSVDAFRHHDPRAKAIYDGLKEAGRSHWRALRGVGDRYLTLAFSVLRHRTPYDPARRQLAEA

SEQ ID NO: 459170 - protein, 327 aa, unidentified
MFILGCDVSKNKLDCTLFLDPAGDKRKSKTVPNTTDGVSTLLAWVTKQGIPLDQLHVVMEATSIYHEVAAMALFNAKVKVSVVNPAQVRNFARSIGVRTKNDKVDSAVLARFGVLIQPSAWQPAPEEVRELQALLSRREAVATDLLRERNREEKIRTAATVSQYVIQSVVFSIEFLETELSRIQKEIDEHINRHPNLKDARELLVSIPGVGPQVSNTLLSVILGSSFDSAEQLAAYLGLVPVESQSGSSISGRPHISKNGPSHVRAILYMAAVVAKKYNPHIKTLYERLLAKGKSKMSALVAAMRKLVHLCFGVLNTGKPYCSNYGK

SEQ ID NO: 459171 - protein, 371 aa, unidentified
MAALSIADVPANANVIVGVDTHKHTHLARAKDGLGRHLGQLEIATDPGGYAELLAWARGLGRARIFGIEGTSSYGAGLARFLRAHGEQVIEVLRPTRQDRRLRGKSDPIDADAAAQAVISGKANAVPKAGDASVEMVRAIRTAKVSAIKARTQTMNAVKALIVVAPDAIREQLRGLTVAALIRTCCGYRVDQVTDPTSAIKRALRSMCRRYAALDQEVRSLEKELDALTTKALPGLCQLPGVGQDVASAILLAAGDGGARLRSEAAFSMLCGSSPIPASSGIVRRHRLNRGGDRQANAALHRIVVVRLKYHQPTKDYVARRTAEGKSKKEIIRCLKRYVAREVFKTLTKPIAAYGRLRPQTLSRQRSVGLA

SEQ ID NO: 459172 - protein, 440 aa, unidentified
MSDLNEEKVGPEFAAQIGLDWADQKHFWAMRTADGKLQRGELLNTPEAIQVWAAELGQRFGGRPIAVALEQSRGAVIAMLCKYAHLVLFPVHPNTVSNYRKAFYPSGAKSDPGDGHLILELLLTHPDKFRRLQPDTVETRKLQFLAEERRKLVNRHTSEVQRLIVWLKQVFPQIVHWFDDPASVMVGSLLLRWPTLQALQKASPKVLLKFFSHHNCRGEELIRQRIEQIRQAVIATTDEALMQTGLLCIQNSIALLEIMRAGIATFDQQIAEIYRNHPDRAIMESFPGAGAALEPRLIAAVGSVRDRFDTANSMACFAGIAPVKESSGKAAWIHWRWACPKFIRQTFHEWARCSIPTCDWAREFYDRQRAKGKGHHAAVRALAFKWIRIFFRCWRDRVPYSEEHYLKALRHHAPPKPEPTIVEIGWKTTGGFSKLSVVSS

SEQ ID NO: 459173 - protein, 464 aa, unidentified
MAARKQKRMSAQVVEDEDYQLRYEVAAGIDVAKDSAVVCVRMPPAKGKMHRTSHLQTVPATVPAIGKLAELTAAGVQMVSMEATSDYWRIWFAVLEEAGLEVQLVSSSQARNLPGRPKTDKEDARWIARLTEMGMLRSSFVPPPEIRALRVYTRHIWDLTADRTRYWQRLEKLLEDALCKLTSVISRLPGHQTARAVIEAMIAGERDPQVLAALGQGRMRNEKLPALAEALTGMRFGPQHAHAAASLLRSIDLPDAELRDLQERVTAHLAAIPASWGVDAGGVTGPGAGRAAGAAALPAAERLDEIPGLGREAAMALIAEIGLDMSRFPTPQALVSWAGLTPTARQSGPRKGRGKKGHGNTYAKRIAVLAAYAAANTDTFLGERFRRLSSRPGGGGRKKAGCAVGRSILIIVWHLLNDPAARYRDLGADWHARHSDRSRKARNARRQLEALGYDVIITLREDAA

SEQ ID NO: 459174 - protein, 400 aa, unidentified
MTESLIVGIDPGRYGHGVVVLGADGEEVLRERVANEAAAIEVLVDRVVKLAGGAGRALWVIEADGGDGAVLIGELLGRDELVAALTPTEVAVRRKGRRQVHKSDLIDAELCARIGREEQATLRRLVAVPEAVAEIRVLARYQEGLIRDRTRLINRLRFLLSQYWPEFLAARAFAALDGDAVTALLAELPTPSAVRSKTPLELARFLAAQRYRRRPLERAEQILAAAQVGTRPQEAVYGRLVAEVADELRALKQRIEALDVEIRDRFLLQPEAPIILSLPGMSHRTGPRFLAEVGALGRFGSPDALAAYAGLTPTLWQSGRSSGTHFLSRRCNLHLRQACWSAALGSLKTPASRRFYDRKRSEGKSHHQAIIALARTQLRVLWTMLRAGTLFSAERALEAA

SEQ ID NO: 459175 - protein, 321 aa, unidentified
MTGSPVYVGIDVAKDHIDLAVRPTGESWSCPIADPDLSQLVTRLQGLGPTLIVLEATGGYEVPVVSALATADLPVVVVNPRQVRDFAKALGILAKTDAIDAAVLALFGERVQPAVRPLPDEALHALTALVARRRQLVEMLVAERQRRAQMKDSVVRRDISQHIRWLERRLTQTTRDIGGVLEATPAWRVTDNLLQSAPGIGPHTAAVLIAELPELGQLSRRQIAALVGVAPFNHDSGTFAGSRHIWGGRVTVRGALYMAALVATRFNPVIRRFYLRLLAAGKRKKVALVAAMRKLLTILNAMVKHQQSWRTATDVANPLDA

SEQ ID NO: 459176 - protein, 351 aa, unidentified
MIYCGIDWAERTRDVALVDDSGQLLAKRHITDDAAGYKILLDLLAEYGDTQDGPIPVAIETPRGLLVAVLRTGKRQVFAINPMAAARYRDRHSVSRKKSDPGDALVLANILRTDMHAHRQLPQDSDLARAVAVLARAQQDATWNRQQISNQLRSLLREYYPAALAAVETWKNGLCRPEAHEILKPAPTPTTAARLTRPQLQTPLKRAGRQRGVAVDAERLREILRADWVHQPPLVEDALGEQMLALLVQLEAACTAADNLAEAVEEAFPQHPDAEIILSFPGLDTQLGARVLAEIGDDRQRFAGARGLKAYAGASPITRASGKKSSLTRRWVKNDRLNQADYLWAFSAITA

SEQ ID NO: 459177 - protein, 429 aa, unidentified
MNYNTQNAKIASITEKTLIVGIDVGSETHYARAFSWRNYEYSKKPFAFSNDEDGFASFKAWMDDIAEKHEMEKVIPGMEPTGHYWLNLGAYLQGQGMRPVHVNPHHVKKSKELDDNNPNKNDRKDPKTIAGLVNEGRFSYPYIPTGIYAEIRNLSNLRIQTQEEITRIKNRIARWFSIYFPEIKDVYRNPDAVSGLMVIKQAPLPCDIKGLGVDGVNKIWRDARLKGAGIKRAKTLVTAAEHSIGNTEAPRSARKEIRNLLNDYEIYKSRMDELMEEIEELLSEIPYIDKLMGICGIGIKTVSCFIAEVGDIERFDNPKQVQKLAGYAIVADSSGKHNGESRISHRGRKRLRYALYEAAISVIGKNKEFKEIHHYYRTREKNPLKKMQSVIAVSCKLIRIFYTIQTKGIDYDGQKMLRDIVRPGMQSAA

SEQ ID NO: 459178 - protein, 310 aa, unidentified
MKTKAVHLGVDVSKQKLHIDGLASGPVEVANTPGGIRKWVRRLKQLPEVVVCCEATGGYEALLVRLLMEEGIAVALVNPKRVRDFAKSKGILAKTDKLDAGVLRAFSEQNKPICMEALSAELMELRALLLRREQLVASLNSEKQRLDPKPPQVVMQSIKAHIRVLQRHLDKLEQAIQQLVAIQEDLGERVAGYLRVNSIGMQSALYLTAFMPELGRVSDNQAAALAGLAPFNVDSGMFRGRRTTRGGRPRVRKVLYMAAVCARTHNPILAAFYQRLIEKGKPPKVALTAVMRKLVTLANRIAADPTFVPA

SEQ ID NO: 459179 - protein, 339 aa, unidentified
MVEVYVGLDVSDKATHLCVVDGAGEVVWRGSCATDPEVIAKTLTARAPGLVRVILETGPLSAFLYHGLFERGVPVVCVCARHAKGVLSARVNKSDPHDAEGLAQMARTGWFKVVRIKAEATHMDRARLKIREQLVGARQAIQGQLRGLLKLFGLRLGQVTTPGKRRERLRALFARRPDLEPILRPLIESLEALEVQIARSSKALAAQAAADPVTARLMTAPGVGPITALIYKTSIEDPERFNRGEDAGAFAGLAPRRNQSGDRDIRGRISKAGDPMLRKTLYEAANVLLGRLKRPCALRDWGLRLAQTKGAKRARVAVARKLAVLLHRLWLSETDFRWA

SEQ ID NO: 459180 - protein, 318 aa, unidentified
MLNESFVGIDVSKDWLDVGWEPAQQSERLAHDEVAMVGLCERLVQERPCLIVLEATGGLETHLASALAAAGLPVAVVNPRQVRDYARACGRLAKTDRIDALVLAAFARAIRPQVRAPKDDETLELGALLARRRQLIDMRVQEKLRLERASPVQRDSIKEHIAWLTERIARLDTDLTHRLRASSLWRDKENLLKAIPGVGTITRVTLIALLPELGKLNRREIAALVGLAPFSRDSGQHRGERVIWGGRAQVRRVLYMAAVAAIRSNPVIRVFYQRLRAQGKPGKVALVACMRKLLTIMNAMLKHNTPWNPNALDLEHSC

SEQ ID NO: 459181 - protein, 344 aa, unidentified
MNINTIPVFVGLDYHMNSVQVCVISERGDMLANRSCANDWQALVQAVGGPDVSVRAAIESCAGAANLAEQLVSLAGWSVDLAHPGYVRRMKQNPDKTDYSDARMLADLERVGYLPRVWLAPECIRELRKLVRYRQQLVNEVKSAKMRVKAILREQRLVASNQAGGRWTRRWIVWLRQAEGLGEQSRWIVDRHLDRLAALAVEIGQVQQRLHHLTKDDPVVIHLRAQPGIGPVTSWVMRAAIGRFDRFRCGKQLSRFCGLSPRNNSSGEKQAQGGLIKAGDDLLRCTLIQVGHRLIRHEPRWRALAMKMRSTGKPACVTVAAIVNRWMRRLFHELKETSTMTRTA

SEQ ID NO: 459182 - protein, 390 aa, unidentified
MIYVGIDVAKDKHDCFITNSDGEILFKVFTITNNLEGFDSLYQKIKSITTDPKIIKVGLEATGHYSYNLLGYLIDKGLPTFVINPLHTNLYRKSLSLRQTKTDKVDARTIAYMLMSDVNLKSYSDSLYHNEELKSLTRYRFDKVKERAKLKSSVSRLVCILFPELEKLVPSLHMSSIYKMLAEFPGAKHISNAHLTRLTNLLSEASKGHYGKETAITFRDAARNSIGSYMPAKSLELKHTIKLIQELDSEIDEIENEIKTIMDEINSPILSIPGINYRMGAMIISEIGSFDRFDSPDKLLAYAGLSPSTHQSGQLDGAYAHMEKRGSRYLRYALYNATKYVCHWDSVFAAYLAKKRAEGKHYNVAISHAAKKLIRVIYHLEKTKQQYIKT

SEQ ID NO: 459183 - protein, 349 aa, unidentified
MDKITAVGLDLAKQIIQVHGIDAAGRVVLRKAVRRERLLALLAQLPRCVVGMEACSGTHHWARELRQLGHEPRIMAAEFVRPFRKSLAAKNDANDAEAVCTAMLQPNMRFVTNKSVEQQALLCLHRVRQGLIEERTASINRLRGLLAEFGQVAPQSAPALQRALSTLLAAEDPRLPALVRRCTQDLREHVRAVEGRIAALDREIAQHAQGSDSARRLAALCGVGPNTASAVVAMVGNARDYRNGRQFSAWLGLVPKQYSSAGKTKLGRITKRGDAYLRTLLIQGARSALQAALRRAPAKRDRLSAWIVQLAQRVGYHKTLVAIANKHARIIWALLARGETLDRARGGAH

SEQ ID NO: 459184 - protein, 333 aa, unidentified
MKSDTVHIGVDVSKETLDVYVPPQGGGRAGTKQLDNSVAGFRTLRDLARKAKAMVCVEPTGGYELELIAFMHKFGVAVAYADALRVRQFARAEGCHSKNDKVDAALISRFADKIGVRALSPADVESVELKRRTKFRQTLMDSRTALVCRLETETEAGIRSMIREQIRHLNKLIAKVERSCLETVAKNGAMDDLRRRFTEVGGVGDITAVSILAGLPEIGKLPDEKLNRLVGIAPEERQSGTKEWQRRIWGGRRSVRNALYMAAVASIMWNSVLGSYYRRKRAEGHPHKWAIVPTMRKLLSLLNRIAREPSFKPAPEPESTKRDARVGRKKKTA

SEQ ID NO: 459185 - protein, 416 aa, unidentified
MDTMYERCCGLDIHKKTIEACFRSGKKKTHMSFGTTSAELRKLTMWLVENDCQSVAMESTGSYWKPIFNILELSGTDMEIIVVNARHMKNVPGRKTDVHDAEWIAELLQYGLLRPSFIPDREQRELRELSRYRKSLVGERAREINRLQKMLEGGNIKLTSVVSEVTGYSSRRLLDRLLRNDEPMTEDVISGLVHTSLAGKSKELETALDGLLSELQKELLIKVLDHIDDMSRRIADLDDFCRKQMKKYEDALDKLDEIPGIARRTAETILIETGLDMSRFPTAKHFARWAGLAPGNNESAGKRSSGRTTKGNPTLKSTLIQSAKVAARKKNSFFKARYQKIAAKRGANRASVAVAHSMLIAIYHILKSGERFKDLGEDYYNQFNREKKKNYYLKKLTKLGVNLKEATLSISIQTAT

SEQ ID NO: 459186 - protein, 409 aa, unidentified
MKLFVGLDVSSQDAKVCFLNGEGDRLESFTITNDLPGAIILKEKILNTASKLTCEVIKIGLESTSIYSYHPAMFLHNDKELRTYGSQVFMINPKQIANFKKSYPEMDKTDAIDAFVIADYVRFGRRTMSIVKEEQYIALQQLTRSRYQLVHALTKEKQHFLQHLGLKCSQFTQDVGSSVFGNAMMELFLERFSLEELAQMPLQDLALFLQEKGKNRFGNPEEIAKSIQKAVRGSYRLSKVVEDSIDLLLSTSIQIMRTYQAQIKEIEKGIESLMSSLPQTLESIPGIGPVFAAGIVAEIGQIERFTDETRIAKYAGLFWKKYQSGRFTAENTSLTRSGNQYLRYYLVEAANSVRRHVPEYRDYYAKKSAEVPKHKHKRALALTARKFVRLVDALLRNNQIYAPGRSVDR

SEQ ID NO: 459187 - protein, 349 aa, unidentified
MTEQRRSYAGECVYVGVDVHKETYTVTCVCHKQIVKTATVQAEPASLAASLRRWFPGATLASAYEDGFSAFVLHRALTQAGISNIVVNPASLAVAANDKVKTDRRDSKRLAVDLADGRLRGIYVPTEEEELARLLPRTRAQLVEHRATLARQIKAKLHQFGLIAPSSRRLLSHRYLREIESWTLPPELRASLKMLAEQWRFVTRQLLEMRRLLREQATAQAAIDKVYRSVPGIGEVVARTLATELGDMTRFANERALFSYTGLTPSEYSSGAAVRRGSISRQGSSRVRHLLVETAWRALPYDAVLQTMFERIAATRGKKRAIVAIARRLIGRIRACFRQGTMYAVGTLA

SEQ ID NO: 459188 - protein, 412 aa, unidentified
MKDLLEISCGLDIHKEKIVACILTGPLGKPTHSEIREFTTLIPDMLALRDWIISENCHHIAMESTGIYWIPIYEILEDAFSGDITLLVVNARHMKNVPGKKTDIRDSEWISTLLRAGLLNASFIPEKRIREFRDLNRYRKSIIRDITSQKNRVEKFLQSSGFRLSSFISDIFGASGRNIILRLMEHGQIDKMSLDSYLKTKTRKRIDEILMSVNGTLSEHQKSFLKILMCHYDSMKEHLIEIETHLQEDMLPFALQIEQLNTIYGISTTASCAIIAEIGTDMKPFKTAEHICSWAGLCPGNNESAGKRKSTSITKGNPYIKSMLCEIAWVIAGKRNTYLSAWYWRIKQKKGARKAIVALARKLLVIIYTMLKQGTNFDENCFEVRRKNCEQKQLSRYIRELEKHGYTVEAQV

SEQ ID NO: 459189 - protein, 403 aa, unidentified
MFYLGIDVSLKFHRCALLDSEGEKVGASFSVDSSPEGFSRLLETLKERNVPFDQVTAGLEATGHLWENLFSFLERQKIKAVLLNPFQTNRYRELLSKKAKTDDIDAFCIAGLLRSGEGRACYVPDDMVQGLRDLVRARNSFISNLQDYQRQAQALLQVVFPEVVGLLKDPFAKVACEILRQFPTARDLACVHPRTLEKIARACQGNNFNREKAEEIVEAAKKSIYSGKAQKARGQVLSSLVKQIVDLKTAIANLDQIIDDTLNTPSQGPSEVDLITSIPGVGPKTAAVLIAEIGDVSRFASANHLVGYFGFFPQIRESGGRMLGTPKISPRGPKHFRKALYMAAVACLKHNPEMKAVYDRKKSQGKAAKQALIVVARKLLATVYSLLRYQTTYNPLRLNIAAT

SEQ ID NO: 459190 - protein, 416 aa, unidentified
MKIVRPICCGMDVHKNIIVATIGITNKKTRITEYIQETFSTLNPDLLNLKQWLINHKCFDACMESTGKYWIPIFNILEDEINIYLTHPKYVKAIKGKKTDKKDSKWICDLFKHDLIKFSFIPPKEIRALREISRYRYKLVGMRSSERNRYQNCMTVSNIGIGSVFSDPFGKSAQAIMKEVLESDIIEDEKILKCVHGSCKNKDKILDSIKHCNIETDQRFKMNESMTHMEELQVHIDNCEIEMMKRAAPMFDQFMHITQLPGISTLSAILIISEIGVDMKQFESDKQLTCWAGLAPANNESANKKKSVRISKAGQYLKPLLVQCALGAIKDKEGYFGIKYSRIKKRRGHKKAIIAIARMMLVSIYHMILTGETFNPSDYESFRNPNPPIKQQVLTEESAIEFLKKSGFDVSKLTKQ

SEQ ID NO: 459191 - protein, 338 aa, unidentified
MELYAGIDLHSNNSVVVVLDAQDREIFRQRLRNDLTAIVSALKSCVGAVVGIAVESTYNWYWLVDGLQDAGFVVHLVNTAAVKQYDGLKYSGDFSDARHLAHLLRLGILPTGYIYPREQRALRDLLRKRSQLVRQRSTQILSMSNLVARNLGEHASGNEIKRWQVTHIEAMPLFDEQRLALKANLALMRCLDTQIDALERAILAKAKLRADYQALKTVSGIGEVLALTIALETGDICRFESCGNFASYARTVNSRRESNGKKKGEGNAKCGNKHLAWAFVEAAHFAVRYDAAIKRWYQKKCAKTLSVVAIKAVAHKLARACYHVMRSGEPFDVARAFG

SEQ ID NO: 459192 - protein, 305 aa, unidentified
MKSYLGIDISKLHLDLSHPAPAKRLANTEKAILPWLNSLPPETILVCEASGGYEALLLSLAHALHRPVIQLNARQVRDFARAKNRLAKTDRIDAALIADFAQTFQPKPLPPPDPVQEQLLALVKHRSHLLTQITQNNNLTQTLSDKNLLRLIAKTVAFLQKQVAQLEALIQTKIAASPELLAKVNRLRQVQGIGVLTATSLVALMPELGSLSDTQAAALAGVAPFNHDSGQFRGQRHIFGGRAQVRSVLYMAALVASRHNPILRPLYLRLLTRGKAKKLALTALMRKLIVLANQLLKYPEFTLAT

SEQ ID NO: 459193 - protein, 368 aa, unidentified
MQELITGFVGLDAHAESTAIALAEIGRTAPRFVGTVGPRIAELTKALGKLGKPQGLSVVYEAGPCGYVLARELRSLGYRCEVVAPSKIPRRPGERIKTDRRDALNLAGLARAGELVSVTIPDERDEAIRDLSRARVDAVRARLKARQQLKALMLRHGRRYSGKTSWSAAHERYLATVSFAHRAQDIAFTEYRQAVSEGEARVQRLSQSLTQEVEHWRMHSLVSAVMTLRGLDLVAATTVVAELGDLRRFAHPRELMGYLGLVPSEHTSGSKRRLGAITKTGNSHVRRVLIEAAWNYRYPARISRALQVRQERQPTEIRAIAWRAQLRLNHRYRRLKARGLQHNKICVALARELAAFVWDIARHVTPSP

SEQ ID NO: 459194 - protein, 456 aa, unidentified
MAKRKEKQERRSVVLEPDAAGIDIGAEEIYVAVPPDRDEESTRRFSSFTCDLHALADWLGRCRIQSVAMESTGVYWIPLFQILEERGFKVYLVNAHYLKSVPGRKSDVSDCQWIQYLHSVGLLRASFRPPEAICALRTLWRHRGSLLEMAAEHILHMQKALSQMNLQLHHVLSDITGTSGQAILDAILSGQRDPVALAQLCHRRVQSPRDKVAQALVGDYRPEHLFTLKQSLEGYRYYQKLILELDQETARLMQALPSATEDPMPPRTKATAYHRQGNDPQFDLRRELYRIAGVDLTDIPGVSAATAQVILTEIGTDVSRFRHASAFASWLGLCPEKRISGGKVLSCKTRQVKHRAATALRMGANSLCRAKGYFGEFFRRMRAKLGTAQATTATAHKIARILYHVLLTKEPYSYGCGFVSGIASLVGWTAVISPHGQKAKSTRKVFIVLLAVWVGR

SEQ ID NO: 459195 - protein, 405 aa, unidentified
MGKVYVGIDWADDHHDVYVTNDTATALDSFKIAHSREGMEKLISRVAKCCTTDRESVLVAVESHQGLLIYALLEAGYLVYPINPKAMDRYRDRYRMSSSKSDPKDAMVLANILRTDLHLYKLLPRETVDDARLRQLTRAHKSLVQQRVKLLNQLTSQFKSYYPVALRLFSRLDHKITLAFLERFPTPEKATAASLEELRGFFREQSYSHQGRVNSIYESLQQPSLRAPIELEEIHQAIVLSLVAVLRSLVVEIEKLAGKINEEFKHNQAYEVFSSLPTGELTAARINGELGSDGARYPSREYLQTAAGTAPVTRRSGKTLVVFFRWQCNKHLRAALQDLARDSVKRCPWAREYFAGQMKLGHKPSRAYRALANRWAAIIWKMLQTGQRFDQSRLDEHLDKALSTQ

SEQ ID NO: 459196 - protein, 337 aa, unidentified
MRIQKVRRSFDSGKSAIMYDHYVAIDWSLKTMAIGHMSRRDDHPRVFERPAELKEYLGSIKGRKIITLEESGPAHWLYLELLDNADRIVICDPFHNRLLCHGPKTDKIDAGKLCELLRAGLLKEVYHSDNGLYELRTLVSAYQDVVSAGVRALNQKKALTLGHRDNGKSASFIGEILQENIDLYRRSKHQYERRLDDVARRNQLVRFQREIDGIGTIGAVRILATVVDARRFPCAGKYLSYCGLVTHEKLSGGRSYGRRKPRYSRVLKSVYKTAAIAALQGANPMREYYDHLLAQGVAEHNARHAVARHIARISYGMLKSSTRYEPYRWRGKVQKAI

SEQ ID NO: 459197 - protein, 317 aa, unidentified
MNDAFTFVGIDVSKDKLDVFIDSTGQHLTVDNQAKGIGSVLEHLRPLSVKLVVVEHSGRYERRCAVELMDAGLPVALVNPRQTRDFARAINWLAMNDRIDAKLLAEFGRRVQPRLSEKVPENRVELDELIRRRRQLVQMRATEMNRLQQAPIKSVQHSIEKLLRQLDQQVQDLDHRIAKSIENDDDWRGQSQLLQSVPGVGAVVAHTLVAELPELGKINRQEIASLVGLAPFARESGKWKGKRSCFGGRAAVRSVLYMATITAKRCNPVIAAMARRLEAAGKPFKVIMVACMRKLLTILNTLARSGQTWSPKLVSCS

SEQ ID NO: 459198 - protein, 343 aa, unidentified
MKHIGFDVDSTTTHISVFSERGREILHTKIATREADLVAFMMSIPGPKRVTLEESQMADFVTRIIEPHAAKVIRCLPQHNILISESENKYDRADARSLAELLFLNKLKEVHHAPWEYRQLREGVRAYWVASRDLSRTKSQLKAFYLFNGVHCTGEKVYASRYRAAFTKQVEKRSANMQILAQLYLQLDFCRTKKGAHIKILKELAGHFKDDERNLKTYPGIGLIGACSLIAYLENGWRVKNKRKLWQYCGIGVRRHGSAGKGHRKASRQGNRYLKNAVMTAAATIANRKIADNALTKMWRAGIAAGVPGDRMKRNMARKVAVLAQRSLRFKEEYHDDRVASTP

SEQ ID NO: 459199 - protein, 354 aa, unidentified
MEMIGLDIHKKSCQATVLDERGDIIERRRFDSRTDAIKAFIQEHQDSKVALEATGMFEHFYKTIRSCGVQVVVANPLKTRLIADAKVKTDKVDSLILAQLMYADMLPESYVADDETRAVRKDVRERLLMKKISTSLKNHIYAEFLRRGIEYKDGILGSKIGRKWAKKTLAEPRLDQAFELLESTEASIAVFNKDRLLPVFERNEQAKIIASIVGIGYYSSLTIAAELGDISRFSNTDKVVSYCGLNPGVIQSGQHAKYGHITKTGPRSLRWILIEAANMHLLHCRNKKHCKLCLFYHRISERRGENIAIVAMAAKMVRIIYWMLKLNKPYMSQGLEPEGKHATVNGAHLIGSDS

SEQ ID NO: 459200 - protein, 412 aa, unidentified
MNPVVGLDVSKGESQVQAFLDKGKPYRKSFSIKHTLDGLESLLEFLRDIEKLADGKQPSVILESTGQYHMPVIQFLEEQQYVYIIVNPLISHRARSTNLRKVKTDAIDAYHLCELYYKEELEPYKKRGIQLLNLRNLTRQQETVSSIAAQTKLQLQSILDQVFPEYRGVFGNLYSKISLQILAIYPTSEEVLSVSESDLTDKIAELCTTRSEKWAKEKADKLREAALRNPFQNNLYQSHIFNLRMFINIVLQYQEHLSKLAAEIDALAKEIEEYDIIQSIPYIGEKIAATIISEIGEIKRFNHPKKLVAFAGIDPSVYSSGRFPASINRITKRGSSRLRQALFMAVQCGIRDARKQKTSDEILPRNKKLREFYDKKREEGKPFRVAIIACANKLLHWIYALLKRKTTFQNTN

SEQ ID NO: 459201 - protein, 331 aa, unidentified
MYFSQFVGVDISKNTLDAAIYPAKDKKLDLLHFDNTQKGLGEMLSWLKRRGVKPSEMVICAEHTGVYTNPLIEFADKKGIALSLNSPLDIKHSMGIARGKNDAVDAGRIAEYAHNHRDKLRLYEKPSEAIIQLQYLLTERRHYMRQRTALINLNSAMCKYETPEARTRNESAIHHCEKLVKKVEEQMMSVLRSEPEVKQNFDLVSSVKGIGLINAINTVVYTNNFKAFETPRRYACYIGVAPFDHTSGISVKGKTQVSKICRTQQKAELSMAARSAVVHDPGLKRYYQRKMKEKGGGKDAHGVVLNAVKFKLILRMFAVVKSGQPYKVLNY

SEQ ID NO: 459202 - protein, 410 aa, unidentified
MEVIHPRCAGLDVHKQTVVACIRIANNGAPTQEVRTFTTTTSGLLTLADWLAAHGVEHVAMEATGVYWKPVWHILEGHFQLILANAAHVKNVPGRKTDGNDAMWLADLLAHGLIRASFVPPTPVQELRALTRTRKQFVRERASHVQRIEKVLEDANLKLGVVLTDILGKSGRAVLQAIIDGDSDPESLLARIDRRVKASRDQVLEALRGHISSHHRCMLQLHLEHIDALNRAIATLEQEVGAGLKPFLDAAELVSTMPGMSAVASHAVLAEIGIDMSRFQTPGHLLSWACLCPRNDESAGKRRSTRLRRGGKWLQTTLVQAAWSAVRVKGSYLQAQFHRLRARRGAKKAIIAVAASMLTAIWHMLRNGTEWRELGAAYFDRVDAQKTATRLIRRLQQIGYAVQVTAVTPA

SEQ ID NO: 459203 - protein, 343 aa, unidentified
MNITTVGLDLAKSVFHVVCFDERFKEVKKRMLRRYQVLQFFTQLPACRVGMEACAGSHFWGRELRELGHDVKLIPPQYVKPYLRGNKNDYNDARAIAEAATRPSMPFVAIKTVEEQDMQALHRIRSQCLRDRTALSNSTRGLLGEYGITLPKGIANLRNNLPRLLEDAENALNDSFRVLLARRYEQLVEVDGHIAFYTDKLDKLSRQDEACQRLQTIPGFGPIVSSAFRSNIGDGRAYRRGRDAAASLGLVPRQHSSGGKNVLLGISKRGDQYLRSLLVHGARAVVSQAVNKDDRLSRWLNRIRAERGWNKAVVAMANKMARMGWSILRHNTSYQPSSADPIC

SEQ ID NO: 459204 - protein, 493 aa, unidentified
MALGPADKEAEIKTRASGTTVPALLDLWLVEQGCTTVALESTGSYWIPVKNILEDGFQITLVCARKHHPKKGDKTDFRDAIDMVIHHRHGLLTGSYLPERGIVELRDRTRRRKKLLGNLRAEKNRIQKVLETANVKMGNVVSDVFGVSGQEILQALLEDKPLTAEELADKAKKRLRDKIPQLTEALEAHQMNHHHRWLIDQSVEHAKFLDRQIEELEKKIDQHLPPYRRQHELLMTIPGIKQAAAANILAEIGADMNQFPDGDHWSSWAGICPGNNQSAGKRKGSRIKKANKFLLAALVEASWAAVRKKDSALQRKFHRWLRAKGEKKTNVAISHSLLKVIWSVLKHDRPYVEPDVLVLKTLEREKQIRHHAQRLRQLGADEQTIATLIKNLLEAPKPDSTDHPPVATHPYPSDSACASRPKCSPQKQGSPPPRRRPLARGVLGFRIRTAEKKQYSAVQDLPDSPSTTTPPEKNTPPKPSATNNKKGQSTTRH

SEQ ID NO: 459205 - protein, 422 aa, unidentified
MSDRVYRRCCGMDIHKDTVVVCVLPPEGTKSVVARKTYRTFRNDLTRMRGWLKQLHVTEIAMESTGVYWWPVWNVLEGQGFRLLLVNPAQVKALQGRKSDKRDAKRIAEFLQDGRLDASFVPPPEIRQLRQLIRHRLSLLQQRTEVHNQIRDLFERASLKLSSVASDLLGVSGRRIIEAMIAGEDSPELLSGRLRGSLQKKKKLARESLKGYFNDFHRQMLGMHYRHYEFISNQIQELEIEITRRMEPYSPQITLLMSIPGVERVVAWHLIAELGVDMSVFPDADHCASWAGMCPGSWESAGKQLSTRTKKGNKYLRHVLTQAAWAVSHCKHGYLRAFFYRVKARRDWGKATMAVAHKILVFAYCILKTGIPYQDLGDNYFDNLHPERVAQRLLHRLQQLGLDVTVAPSKLLSADPPNASGG

SEQ ID NO: 459206 - protein, 373 aa, unidentified
MQENSKIFVGLDTSKMKISVALAEEGRRGEVRFLGDIDNTSDVIRRLIRKLTGKFCELLFCYEAGPTGYGLHRQITALGHACSVIAPSLIPKRPGEHVKTNRRDALTLARLHRAGELTTIWVPDPGHEAIRDLVRAREAAMEDLRKKRQQLQSFLLRHGRIYPGLRSWTLVHARWLSNLTFEHPAQYLVLREYRQAIEDAEARLERLTQQVADVVSTWSMAPVVEAYQAMRGVAFLTAVTFVAEIADVRRFETPRQLMAYLGLVPSERSTGDQVRRGSITKAGNPRARRVLIEGAWTCRYPARLSRALQVRQERLPKTVRAIAWKAQMRLCARYRRLMAAGKRQTLVTTAIAREMAAFLWAIGHEVEPRSAAA

SEQ ID NO: 459207 - protein, 386 aa, unidentified
METAYDGRQVVGMDLHRRRSVLVRMTEDGRWLGTARITNSPQELRREIARAGKSPRVVLEATFGWYWAADTLTAAGAEVHLAHPLGVKAFTYRRVKNDERDAADLADLLRMGRLPEAWIAPAEVRELREITRYRHKLVHLRTSCKDQVHGVLAKLGVPVTCTDIFGTAGSAWLDALGLPQPYAGKVTSLRQLTGELTTEITMLSEVIADLLRGDRGYQVIQQLPGIGPVLAAVITAEIGDVTRFQNAGQLCSWAGLTPRHRESDIKVTRGHVTKQGSRLLRWALIEAIQRVPRDSVAGAAKNAIIARRGREAKNIAKVAAARKLLTLVFYGLRDGQIRCLSTTPQDSPPVTPGPAGRMNSLPWPAARREAAESSAPPLTLAARAPS

SEQ ID NO: 459208 - protein, 392 aa, unidentified
MVVSVGIDVSKDKHDCFIVSSDGDVLADVFTISNTLDGFHDLLQRIQDCATPQDKIKVGLEATGHYSYNLLGFLLDNGLTTYVLNPLRTNLYRKSLSLRKTKTDRVDARTIASMLLSDAGLKPYTDTAYHNEELKSLTRYRFDKVKERAKLKSSIARLVCILFPELEKLVPSLHIASVYTLLEEFPGAKQVAAAHLTRLKALLVTASKGHYNRDMTLEIRDAARNSIGSRMPAKSLELQHTIRLIRELDREIDEIEEKIHSIMDELHSPITTIPGLGFRMAAMILAEVGDFTRFDSPDKLLAYAGMSPSTYQSGQLKNCYPHMEKRGSRYLRYALYNAAKYVCHWAPAFADYLAKKRAEGKHYNIAISHAAKKLVRLIFAMEKSRQPYCSAL

SEQ ID NO: 459209 - protein, 340 aa, unidentified
MKVHVCGIDIGKTVFHLVGLSKEGHIVIKKRFSRRQLVTFTVNLPTCLIGIEACPGAHFLARILLKQGHDVKLMPAEYVRPFVKSNKNDYVDAEAIAEAVQRPTMRFVPVKNEAQLDLQALHRVRDRWMGRKTAVINQLRGFLLEHGITVGAGPAHLKRQIPSILEDAENLLSPRMRMLLLELREEWKKLEEQIDASNQELAQFAKKEDGCRRLLTIPGIGPLTATALTAAIGNGAAFRKGRDLAAWLGLVPRQHSTGGKARLLGISKRGDPYLRRLFVHGGRAVLAQVKRERHQFGGWLDRLEARSPRNVAIVAMANKIARMAWAILTSGQSYNAAFST

SEQ ID NO: 459210 - protein, 353 aa, unidentified
MHTHQKSSDPVATIGLDIGKNTFHLVGLDKRGAIAMRIKVSRNQLARRLVNLPACLVGLEAGSGSHHIARQIQSLGHDVRLIPAQYVKPFLKGHKNDYRDAEAIAEAVQRPTMNFVAIKTPEQSDLLSLHRVRSRLVRQRTAIINQIRGFLIERGITVRQGPGPLRKLLPEVLSSPPASLSPRILRLIAELDADWRRFDERLEALSAEIQGLSDSDPACQRLITVPGIGPIISSAVVAAIGTGSGFKQGRDFAAWLGLVPKQESTGDRTKLGRISKHGNKYLRTLFVQAAHVVIQRRPAVAMRALWPWIAQASKRLPHRNLLAIALANKLARIAWAVLARGRDYQPRITSNAA

SEQ ID NO: 459211 - protein, 338 aa, unidentified
MYYTGIDLHKKTSFLTTVDESGKMVTKKNLLNDEKTILDYFGSLEQQSRVVIESTASWYWLYDLLEANGFDVVISNPVKTKAIASAKIKNDRVDSHMLAQLLRADLIPTVYVSPLKLRKLKELIRHRQRLVNDATRMKNRIHALLRKNNKIVAVSDLFGVRGLQYLEQVHLPQYHRDQVQSYLSLYQELMKQIEPLTEAVNGAAKNDPIAKLLMSVPGIGAIVAMTIVAEVGDISRFRSYRNLASYAGLVPSLDASGGKQRMGSITKQGSRYLRTALVEAAHVIARMKKCRLNPFFRRRIVRGGYKKAIVATAHKLLKIVYYVWKNQTPYQETYPVCA

SEQ ID NO: 459212 - protein, 422 aa, unidentified
MRAIGIDVHRDFCEVAVSEGGRLRSAGRVPSKPEELELLGVSLSADDEVALEATGNALAIARILEPHVARVVVASARELHAISDAKAKTDRRDARTLAKLLAAGMLEGTWLPGEETRALRRRLAQRAQLVRARTRLKNEVHAALYRNLVGAPSATDLFGAAGRRWLEHLELPVDERETLESCLRTVAFLDGEVERFEQAIARCAMHSPEIRRLVTIPGVGLISAATLVAVVGNVRRFRSARKLVGYLGLDPRVRQSGSSPARMGHISKEGPAAARQALCEAAHAAMRTPGPLRAFGQRVAARRGRQVAIVAVARKLATIAWRLLTSGEDYAFASPGQVRLKLRRIELAAGAPRQQGHRTGVSLESQQERELALTAERAYQRLVADWQAAGRGRAGAAVGRASDGLSLSPAARQTGKPQASVL

SEQ ID NO: 459213 - protein, 403 aa, unidentified
MNNVAGIDVSKGKSMVSVLRPFGEVVAKPFSIGHTGSELKELADYLKSLDGETRVVMEHTGRYYEPVARFLHDEGVFVSAVNPKLIKDYGNNTLRKVKTDKADSRKIARYGIDNWAELRQHTPMDTIRMQLKTLNRQQSLYTKTKTMMKNNLIALLDQTYPGVNALFDSPVREDGSQKWVDFATTFWHVDCVRNMSLTAFTERYRKWCKRHGYNFSQSKAVEVHAGAQDLIAMLPRDALTKTMVRQAIDALNAISASMERLKAEMQALAAQLPEYPVVMAMHGVGDSLGPQLMAELGDVTRFTHRNAITAFAGVDPGADQSGTHEAKSTRVSKSGAPELRRALFLVMDCLLKTQPQDDPVYRFMDKKRAEGKPYLVYMTAGANKFLRIYYGRVKEYLASLEGN

SEQ ID NO: 459214 - protein, 427 aa, unidentified
MKYTQNEKILQLNDQTLIIGVDVASETHYARAFDYRGIEVGKVIRFDNNALGFASLASWVRELRVKHQKQHVMVGMEPTGHYWFNLAQFLKDHNMQGVLVNPYHVNRSKELDDNNPTKNDRKDPKTIAMLVKDGRYIIAYTPEGIFSDLRTTMETRWAIVKQLNAIRNRMKRWISIYFPEFNTVFADWEGKAALVALKKFPLPAQVLEKGADNIVSCWREDKIRTVGMKRADKLIEAANTSIGIRSGMLAAENNLLTLIEDYEMKMLQYERTMAIVDRLVFQIPGTSEMLKIKGVGLVSIAGFIAEVGDISRFEHPKQIQKLAGLNLIENSSGKHKGMTTISKRGRSRLRAILYQSIMPLVSKNPEFMELHRYYTTRVQNPLKKKQSLILLCCKLIRLFYAILVKRIKYDPQKMLSDIRRPLLQKIA

SEQ ID NO: 459215 - protein, 358 aa, unidentified
MAGKVTETAVVGGVDTHKDLHVAAVVDQNNKVLGTQYFSATRQGYRQMLTWMASFGTLKRIGVECTGTYGSGLLRYFQNAGLEVLEVTAPDRMERRKRGKSDTIDAECAAHAAFSGIRTVTPKTRDGMIESLRVLKTCRKTAISARRVALQIIHSNIISASDELREQLRNMTRMQLIRSLGTWRPDAREYRNVTNVYRIALKSLARRYIELHDEIAALDVMIAAIVDELAPELIKRNAIGYESASQLLITAGDNPQRLRSESGFAALCGVSPVPVSSGKTNRYRLNRGGDRAANSALHIIAIGRLRTDAKTKEYVARRVAEGHTKMEAIRCLKRYISREIYTLLRNQNRQVNSIPITA

SEQ ID NO: 459216 - protein, 340 aa, unidentified
MVHVGVDLHKRMSQIAVLTEEGEIAQRRLANDPARLEAFFAQLPPRTPVAIEASGTWWWLVDLLERAGHRPVLSNPKQTKAIAAARLKNDRVDAERLALLLRGDLLPTVWIPPAELREARELIRHRVQLVWLRGEVRNRLLAMLARRNLQPTSGQSWLTVRGQRELHALPLTPIAVTIREDCRALLPLLDEQIRRLDDDLRQRWGEDPRVRRLMTLPGVGAFIAIVLVMELGDIHRFPSAKHVASYIGLTPRVRASADRIRSGHISKEGNRLLRWVLVLAATQAARQPGPLRAWFRAIKQRKGTKIARVALARRLVEIVYHVWKHDCDYFTVLRRGAVRG

SEQ ID NO: 459217 - protein, 354 aa, unidentified
MKGEFQNSKVLVRGKEVFIGVDVHKESWHVTARVDEEEVFHGRIPSQYHALRGLLDYFKDCGVKVAYEAGPCGFWLHDRLSQDGIEVIVVPPSLIPIESGNKVKTDKRDSRKLAKLLESNMLKRVYVLSEEDRADRELLRTRRQVLEHRSDVARQIKSKLLFHGISSPLATERWTKGYIRWLRELTLGRKVLKVSFESLIELYEYLTEHLIKINQEVIELSRSRKYLHKVKLLKSVPGIGTLVGMELLVELSEMERFRSADELASYIGLTPSEYSTGQYVRQGRITRCGNKRVRTCLVESSWILIQKDPLMRLKYNQLKQFKGAKRAIIAIARKLIIRIRRILLNNEPYVIGVC

SEQ ID NO: 459218 - protein, 343 aa, unidentified
MQTVTTIGLDIAKSVFQVHGVDAAGQVVIRRQLKRGQVLTFFEKLPPCLVGIEACASSHHWSRQLQALGHTVRLMPPAYVKPYVKRQKNDMADAEAICEAVTRANMRFVPTKSPEQQSCLMLHRTRHMFIRQQTAVINSIRAHLAEFGIVAPVGRRGVTELLQVVADPNDKRVPEVARACLAALGNQLLRLKEQIVEFDRLIMAWHRSNQTSKRLHYIPGVGPMLATALVASVADPRTFRSGRNFSAWIGLVPKQHSSGGKDRLGSISKQGDRYLRSLFVAGALAVIRYAKIHGTGHRPWLTALLARRPTKVAAIALANKIARMAWAMMARGERYKQPAALAR

SEQ ID NO: 459219 - protein, 326 aa, unidentified
MAMLSFCGIDVSKDRLDVMVLPEQQSFSVGNDAAGWAELIARLRGFTIAAIGLEASGGYERGAMRALLAAGLPACQVNPFKLRQFARASGVLAKNDPLDTRMIASFVAIMPTRPARPRSPALERLAEMLAVRRQLNADKVAAGNAARLLEDAMLQRLSRRRIARLAADIDMLDRHLVEIVETDAALAYRYRLLTSMPGVGLVVACTLIALLPELGTMSRKQVAALVGVAPYAFESGKFKGRRCIWGGRAPVREALYMAAMSAGNWNPVLKAFRKRLKGAGKMAKVVIVAVMRKMITMLNAMVRDDVVWADHLHGRHSVPTAWQPLR

SEQ ID NO: 459220 - protein, 388 aa, unidentified
MKKRSTGTSGIERTVTRSDWTRRSKSCRVVTVLPAVGPTWTVGMDLGDRTSHFCVLDEGGMVVERGKVQTTLEDLRKRFKGQTRMRIALEVGTHSPWVSRLLKELGHEVLVANPRKTRLIYENRGKQDPVDAEALARIARLDPKLLYPVEHRPESVAQDLAVLRARDALVRTRTLLVNHVRGAVKATGHRLKKCSTRTFSDQAVDQIPEEVCEALSSVLTTIEVVSKQILALDRRIGELERKKYPETALLRQVGGVGPIVALTYVLTLEHPGRFQKSRAVGPYLGLVPARSQSGDSDPQLRITKAGDAFLRRLLVQSAQYILGPFGEDCDLRRFGQALSVRGERNAKKRAVIAVARKLAVLLHRLWRTAEVYEPLRKAGTAHDAAAAA

SEQ ID NO: 459221 - protein, 368 aa, unidentified
MRGWLVLGNPQKGKVMDKITRIGVDLAKNIIQVHGVDSMERVVVRKAISRQKFLEWFANLEPCLVAMEACSAAHYWGRKLRALGHEVRLIAPQFAAPYRKGGKHVKNDRLDAEAICEAAGRPHMRFVAVKTADQQNVLVLHRMRDGFVEERTALVNRLRSELVEFGVFLPQGIDAFRAHFVEALEDGATELNGVARTALLRGWEHLQALDQQIAWCDAQVATHVKHDSNAQRVMAVIGIGPLTASATVATVGDARLFKNGRQFAAWVGTVPKQKSSGGKTRLGRITKQGNTYLRTLLFQGARSAVTSAHRRTDRLSRWIVQLQARVGWYRTLVAVANKHARILWAILAKGERFDPSYVSTPSTPGQPR

SEQ ID NO: 459222 - protein, 326 aa, unidentified
MKLYLGIDIGKLLFTAALCNDDLGFKTIHPELSNDLEGWKILKQWTSKYSNKMKIVNIHLGIESTGGYEKPLVEWFRKNSDFEITILNPVQAKRFNQSELTRTKNDTNDARLIAQYMAIRKPKSTKVNPIELEELKLKVRHLEHLTRKQADEKTYLESCREINIRQQIQNIIKFYQSQIDQIKDEIQKHIDLNPNLRSKSKLLESIPGIGKITSAIILSECIPSLTPKQQVAHAGLAPRHNQSGNFNGKTQLCKTGNKRLRTALYLPTLCAIRHNPVIHEFYYRLLGRGKPKMVAVGACMRKLLHIIVGVQKNQQIFDPNFKQKFA

SEQ ID NO: 459223 - protein, 403 aa, unidentified
MILDQQDVDVFIGLDVGKSGHHAVALDKSGKKLFDKAMPNDEARLRQILADLSGHGKILLVVDQPATVGALPVAIAQATGAAVGYLPGLAMRRIADLHPGESKTDARDAAIIAEAARSMPHTLRSIALADETLAELGVLCGFDDDLAAQITATSNRIRGLLTQIHPALERALGPHLDHPAVADLLTRYPTPAALKAAGRGQVKARLKKHAPRAAERLTDAVFTALAEQTVVVTGTGAAGIVLPKLAEQLLSLRRQRDEIAAQVEALVEAHPLHQVLTSMPGIGVRTCARILTEVACKEFASAAHLASYAGIAPVTRRSGTSIRGEHTSRRGNKKLKRALFLSAFAALHHPPSRAYYDRKRAEGKRHNQALIALARRRSDVLFAMLRDGTLYQDPEPGKLPSTA

SEQ ID NO: 459224 - protein, 348 aa, unidentified
MIIIGVDFHPEFQQIASVDSETGEFQEKRLAHPAEAEKFYRALVGQKVRVGMEASGHARWFERLVAELQFELCIGDAAEIRTKRVRKQKTDRQDAQLILRLLLEDRFPQIWVPSWENRDLRQLLWHRHRMVQARTRIMNQLQAVALNEGLRCKKKLWREGGRQQLESFRLAPWASRRRRDLLELLDRLTPTIAELSQAIEQEVEKCPAAQRLRTHPGVGSLTALAFVLIMGEVNRFRCGKQVASYLGLVPLEESSGNRRRLGHITKQGSSMMRFLLVEAAQVTVRSLPEWRNKYLHLVLRRGRKIAKVAMARRLAVHLFWMMRKDWNYQQLKKFGSHAGEPGNRHGVR

SEQ ID NO: 459225 - protein, 431 aa, unidentified
MELHAIGIDLGKTVFHLVGLNRSGEVVVRKKFSRIQLLRFTANLHVDLIGMEACAGSHFLGKALREQSHEVRLIPAQYVKPFVKTNKSDYIDAEAIAEAVGRPTMRFVPVKTDEQLDMQSLHRVRERWIMRRTAVVNQIRGLLLERGITLRKGRCHLDAALPGILEDATTTLSGAVRFLLVELKLELAQLAMHLEQAEALIQKAAEESEACQRLDAIPGIGPLTATALIAAIGNGAAFKKGREFAAWVGLVPREHSTGGKQKLLGISKRGNPYLRKLFVQGARAVLQFREKQSSGLRTWLAATHIANTLQRRRCGAGQQAGPDGLGRARQGRGLSASDTGRRCSCLTAEKVMISCQVCWRTTRWHYGRTRRSQNPKPEEVFRDCVTKWDQSAAHSILARSFHSNKGRIHLRRPNRQSHFSLATRRRTIHSG

SEQ ID NO: 459226 - protein, 358 aa, unidentified
MNYIGCDCHISTLDCAVVNERGQETKKQKMHTGVKGLMEFVKSIPKPRKIIIEEGTLASWLLEVCSDYGEDLIITDPKINRWIGRAGQKNDEIDAAKLAQLARGGYIKEIHHPIGHRRRFRELVTIYHSTVKSQTRIKNQLKGKFRQEGIKCSGKTVYSAEFRNEWKKKLPQDKVVQIMVEGLWRQLDQVHEVQEELLGHIRKQSKQYPEIKRFKKIPGIGTVHAATISAIVENPHRFANKKKLWMYAGLGLAERSSGEKVYSRSLTRNYNRLLKNGLKQATEAAIIAKDNQFRRQYLRLTIEKGIPSHRAKLTVARSILATIYGIWKSGEDYDASIDKKRIESDKTQVRAYHLVRNG

SEQ ID NO: 459227 - protein, 389 aa, unidentified
MQSPRRGRSAKSSGRQTVKEPITSYVGLDIHKDSVAISIADAGRAAARFVGTINPYPAELCKTLRRQRCRPESTLVVYEAGPCGYGWVRYLRKQHWACEVIAPSRITRCPADQRIKTVRRYSLLLARESRAGNLTSIVVPDERDEAMRDLSRAREDACAARLRVRLQMQALMLRHGRHYQGRSNWSQAHDRYLSTIRFEHPAQELAFNEYRLASKEACERVQRITDAMRELCNGWRMNPLVKALMCLKGFDFVAAVTFVAEMGDLSRFPHPKALMSYLGLVPSEYSSGASRRQGAITKSGNKHARRILVEAAWNNRFKAQVTRTLQVRQEGQPMILREISWKAQLRLSKRWRSLAMGRKLPQNKICVAIARELCGFIWDLARHVTIKAA

SEQ ID NO: 459228 - protein, 414 aa, unidentified
MIRENYLYVGMDLHSRQHTAVLVNCWNEKLKVITIENKPSEFTKLMQKVNRVAQSLGVQPIYGLENVYGYGRALAVWLIEKGYVVKDINPSLAYDQRKSAPTFKKDDEYDAFCVATALINHLSKLPDAKPDDEYWTLSQLVNRRDVLVKDGIRLKNGLHNQISVAYPSYHKFFSTIDRKTALYFYKTYPSPRFLQGKSADELLGEFKEIMPGTRKNKAELILESVLNDGDTHRNYQEQRDFITRSLVRCLETQKEEISFVDAEIERMLPLFGYKLQTLPGVNTVTAAKLIAEIGDISRFRNANKLAKYAGVSPVKFSSAGKGKETSSRQGNRTLNGVFYFMAVTMVCVVPGTGRPYQPIFREYFLRKVSEGKTKPQALVCIMRRLVNIVYAMMKNKTEYRPYVANEQDFCIKDS

SEQ ID NO: 459229 - protein, 366 aa, unidentified
MRKLLLQEVGKQGQRSRPRAPEAGEVVITGVDLSRSKWVYACRWGGQEQRRLSSPGELRHLQSLVREYQQRGCEVHVVYEACGFGYQIAWWLEGNNAQVIVVAPSRVEKAPGAQVKTDGLDAGSLALKYERGMLKGIYIPSREQHEYRQLSRTYAQALKDRHRQQVRLRMLLQEHGYTPPAGGSSWGALEHWVRAQPWPAPLGVCVTELLELRASASGSARRLAKELRTVGGLPQYAELRDALAEQCGVGRFTAIRFILEIGDIHRFGSADSLPNYLGLTPQEYSSGETVHRGRLRKCGPGSLRAWLVQCAWVAVRTGKDRALVECFRRLAPRVGRKRAIVAVARRLALRLRARWLAFEQEVKQAA

SEQ ID NO: 459230 - protein, 341 aa, unidentified
MNSSKTVVGIDIAKRVFQLHWIDMETGEIVSLQLKREQFLEHFANRQKCLIGMEACGGAQHWARKLTAMGHQVKLLPGKAVKGFVIGNKNDRQDARAIWTAVQQPHVKAVAIKTEEQQAILALHRMRSQLVKFRTAQINGLRGLLTEYGEVMPQGKAGVRKGISDALGRLADRLPAMVIDTLREQWARIEKMDQEIATIEQRIKHWLKQDDACKRIAEIPGVGPLTATAAVAMMGDPKAFKSGREFAAFAGLVPRQVGTGGRVKLLGISKRGDTYLRTLLIHGARSVLTHAKDPGPWVTELRLRRPLNIAVVALANKMARTIWAVLAHERTYQKGFVSRPA

SEQ ID NO: 459231 - protein, 348 aa, unidentified
MKYYCGLDVSLNNTAICIVNHDGDVLREGEVTTEPDAISQWLKASGFTMERVGLEAGGLSPWLCHELLAADWPAICIESRHAKAAMQAQQVKTDRNDARGLAHIMRTGWFREVHIKSHQSQKLRLLLGNRRCLLDKRLDIDTHIRGTLKVFGLKTGKVTRHTYERRIRELVKDDEELQSYIFPMLEARCHLVQQCNVLEKKILDHVRGDQICKLFMTIPGVGPLTSLAFKTFVDRPERFRHSKSVGAAVGLTPRKYASGEVDYDGHITKCGDAFLRSHLFEAAKVMLSRAGKPSALKSWGLRVAKRSSKKNACVAVARRLAVTMHAMWRDGTVFQPNEEPDVALAKAA

SEQ ID NO: 459232 - protein, 340 aa, unidentified
MKRFFIGIDFSKLKFDAALFDGDANRLLSSSTFENNETGFKEMMKWIKTVTKSDSKEWLFCGEHTGLYCLAMSKFMLKKGCDLWLEPGLRIKYSQGMTRGKSDKADAIQIADYAFRHQDKAVSYQGLDPILEQVKDLMAYRNRLIESKKSLEVASKEIMRVKGTDPTVNYIYNDSQKMIQSLIDSIKSVELKIHDLIHQDASISENYNILTSIKGIGMVNAVLVLIFTGNFTLFTDARKFGCYCGVVPFEHTSGTSVRGRNKISHLANKSVKTSLTQAARTAAMHDPVLKQYYQRKKLEGKPDRLIINNIRNKMIHTMFALIKSRQKYESNYHHPLQTAA

SEQ ID NO: 459233 - protein, 353 aa, unidentified
MNSLTDLREMVDVVIGVDTHVHTHSAAVLDTATGGVLDEVTVEATAEGYVELVEFANGYPMLRAWAIEGTGGHGAGLSRHLLETSEIVIELDRPKRAARRNGAKSDPLDAIRAAREAMARPRLGSPRSGGERQALSVLLAARRSAINASTEAQQQVFSLVIAAPEPVRARFRGQKLAAMLNTAAKLRVRSSWDVETTATVVALRTLARRAHAMLKEARELQKAMVAIIRSWRPDLLEEFGVGPIVAATVLCAWSHPGRIHSEAAFAMLAGVAPIPANSGQVTTRYRLNRYGDRNLNNALHTVVQSRIQYQQSTRDYVARRTAEGKTSREIKRCLARYVARDLYRLLESGAAAA

SEQ ID NO: 459234 - protein, 337 aa, unidentified
MNYCGIDLHSNNCLIVVIDDHDKVLLEKRVPNDLAGILKLLAAYRHDLAGVVVESTYNWYWLVDGLIDAGYEVKLANPSAIKKYEGLKHSGDEADARYLAHLLRLGILPTGSILPPALRATRDLARKRMQLVRSRTQHILAAENITAREYGSRISSNQVMQLDAEDVDVMPLPEDVKYALKANVAVVKAISEQIKMLEKRIQEQVISSAQYRLLRSVPGIGKTLAPVILLETGPIERFKEVGNFVSYARCVDSEHSSNGKKKGEGNTKNGNKYLAWAFIEAANFARRYNDQARRFYERKKAKTNTAVATKALAHKLARACYHIMKDGKPFEVGRCFA

SEQ ID NO: 459235 - protein, 424 aa, unidentified
MHLTVLSPSTTPATIACDVSAYKLNLVCRELSIPGAAAEWEIPNRTEPIISTLTAIRERALARGVTELRVVVEPTGIYHKLILRIARSLGFGTGLVDAGHVKKMRSVLFGDDGKTDQRDPYAIEAVAAQGRLIADRRHDEVYQLLRQWGKLYHDAELALIDAKSRVHRALTLLFPDFDFSTDFLYGPSGRAIFRCLGLDPHAIAAASVSRLLERLRKHSTIRRSSVVRLLTQARQTIVALTRSRVTDLLAHELALAWEDFELAARRRQTARAELEALYDEARIADPFLPDTTGSAISKLAMARLLGEAGPLSAYSSWRQLLRMGGVNLRERKSGKYVGQTKIARTGRPLFRSIVNQMALPLVKRDRLYGSYYHHKTGVQKMPGAKAMTAVGRKIVKMIWGWYRSGAVFDARRVFTCHGEHRHAA

SEQ ID NO: 459236 - protein, 428 aa, unidentified
MKNRMKFDHLSTLCVGLDIGSRTNFITALNFDSDRLINMRPVPNATSGVEAMESMILAVLEPNPQFRYLLIAMESTSFYGVHVANSLSTSDRLKPYGVKVFCLNPKTIANYRKSFTGLGKNDGIDSFIVADYVRAGRIDTDPWRGAQYLALQRLTRQRRHISEAIAREKNYVLNNVFLKFSEFALLNGEESPVSDKFSATAEAILTEYKTTEDIANAPLEELIDFISVSGHGRFSDPDQAASLFQKAARNSYRLDKALYEPITTSIACSFNCIRAFEKEQKALDKAIAATVSGLNPTEYQILKSIPGIGPVYAAGILAEIGSVRCFNNNNALAKYSGIIWRDNQSGEFDSEDTPMMKAGNRYLRYYLIQAAGSVVRYCPEYTDYYNRKFAEVPKHQHKRALALTARKLIRLIFGLLDKNQLYSPAKSR

SEQ ID NO: 459237 - protein, 342 aa, unidentified
MEEVSIIGVDLAKNVFQLHGAAADGVVVFRKKLSRLQFARFMTDHPACDVAMEACPSAHHWARELSAYGHSVRLIAQHYVKPFIKRQKNDAADAEAIVEAAMRPTMRFVEPKTEAQQARAVAFRAREQIVKQRTEAINALRAHLYEFGHVAPEGVGYIPRLAKVVEDPGSGLPDLARDICRMVLEQIELLTSRLTAVSAKLAAASRAAAMPRQLQTMPGVGPITALAVETFAPPMDQFRRGRDFAAWLGLVPRQHSSGGKQRLGKTSKMGQRDIRRLLVTGAMAVVRWALRRGAPQNPWLERMLERKPPMVAAFALANKMARGIWAMLTRGEDYRDPVMATA

SEQ ID NO: 459238 - protein, 482 aa, unidentified
MIKSVGIDLAGTGEHKVRCLDERAQMCDGLTFQTTPEGLSKLEERIFREGSNPVIVFEPTGLAWLIVAIYLKARHPDCHLVRVQARKVVALRKYLRRSSKSDKIDALTLAKMPFIDSEQLEEIYLPPAKIYAIQRLARQRKRLECEIGSRKKRIGSIVDGYFPGIRQAFSNPWSAHARAFLRSCLNPLEVVHSGEKTLHALLTKARRHSKADAVESHLVYLACQDAATLYKLSSPVGTIDEDFFAALQDEISRELRLMEMAEAESEAIAKRLEQLYHELHPSDNLRTIPGVGEHTAPILLAVVGDPARFRSQSAFANYTGVVPAAKQSADAEAKGLKMTKAGPAVMKWSLYQSGQIGRRFDPQLAWVYYREMVHYGKNHRQAMGAVMSHIGARVLAVLREDKPYELRDIDGRPVTGEEARRLILLKYQVPEEIKRERRRRKQTAGKAAKSGRRNREMAAHRTNEAATAPQPVEVMAVSRQPV

SEQ ID NO: 459239 - protein, 388 aa, unidentified
MYYCGIDVAKRKHSAMVLDERAETVQQNFTFKNDREGFDKLLSILEPYVGQVVVALEATGHYWLSLYECLTKAGHPVVVLNPLQVHAYQRSGVRRRKNDRIDSFWIADYARISNSQATEQSEPVFLQLRELTRFRFRLSENFGDCKRKLLAVLDRVFPEYESLFSSVFLSTSRQLLAQAVSAQEFADFDLGELTALLTRTSRGRFGREKAELIVTQARHSIGVSLFADTARLQVQCLLAQLDLLEQQCQQIDQEIESLMAQLHQHITSIPGVGAVTGAAILAEIGDIQRFAAPEKLVAYAGLDATVYQSGDFEATETHISKRGSPFLRIAIWQAACMAALYDPQLRQYYERKKAEGKHHGTVIGAVARKLLARIFIILKEDRPYEIRY

SEQ ID NO: 459240 - protein, 350 aa, unidentified
MRTAISVLGIDIGKNLCSLVGLDASGKVAMRRRAKRETLIAMAAKLPACVVAMEACCGAHHLGRVFAARGHDVRLMSPEYVRPYVKAQKNDDRDAEGIAEAATRPTMRFVELKGQAQLDMQTLHRARDRLIGERTALINQLRAILLERGVSVAKGKHSLETFVAGLLEGPDDHGLSERMRFLVDDMRAQWMELDRRIRAFDSEFVGFVRQNEDASRLVTIPGVGPLIASALIAAIGDGETFESGRDLAAWLGLTPRQATTGGKPKLLGISKRGDRYLRKMLIHGARSAMASVAKYKTPLGHWLNGLLARAHKNVAVVALANKLARIIWAVLRHNEAFVAKEQRSMSIAAA

SEQ ID NO: 459241 - protein, 344 aa, unidentified
MGEVITVGLDIAKNVFQVHCVDGSGAVVTRKRVSRSKVLKFFAALPSCLVGIEACPSAHHWGRELQSLGHTVKLLPPSYVKAYLKRSKNDANDAAAICEAVTRPSMRFVPLKTREQQAALMLHRTRHLLVRQRTMLSNALRGHLAELGIVSAKGRNGTGELLGIIADAGDQRVPPAARAILQVLARQYHAIAVEIGLIDKSILAWHRTCAASRRLAEIPGIGPIVATALVAEVGDWQSFSSGRNLAAWIGLVPKQHTSGGKERLGHITKQGNRYLRWLLVVGAMAVIRYAKQRGAKNRPWLARLMERRPAKVAAVALANKIARIAWAIMVRSERYNEPKLSMAA

SEQ ID NO: 459242 - protein, 461 aa, unidentified
MAKKAKKVKTAKGAELRIVNPDAAGIDIADGIMQVCVPADRSKDNNRAFGAYTSDLHAISAWLRECGIKTVAMESTGVYWIPLFCRLQEDGLDVVLTNARDVKNITERKTDESDAEWLMLLHQYGLLKASFQPHNDAKRMRTLTRHRDTLSREASSIVLRMQKAMQQMNIKLTLVLSDITGKSGIRIIEAILAGERDPKRLADLADIQCKTPKEEIAKALEGNWEEDPMFVLRQNYDTFKHYCTQLGECDAELEKLMENYRAEVAKVEDTSYSPAKKRRDYKKTRHTVGFDVERKAYEMWGVNVFEIPGISHLTALELMSELGHDFTRKFPSSKQFCCWCNISPNTKISGGKRISSHVPHRRNNVGLIFRSIASSLANAKNQLGNFYRRIRSRAGGKAAVIATAHKVAEIFFAMVANQTTYNPERVGIDEKVLLEKRITRYKRELERITGTHIEIGNACVP

SEQ ID NO: 459243 - protein, 358 aa, unidentified
MADKVTVAAVVGSMDTHKDLHVAAVVDQNNKVLGTQYFATTRQGYRLMLAWMTSFGALKRIGVECTGTYGSGLLRYLQNAGLEVLEVTAPDRMERRKRGKSDTIDAECAAHAAFSGIRTVTPKTRNGMIESLRVLKTCRKTAISARRVALQIIHSNIISAPDDLREQLRNMTRMQLIRTLGSWRPDASEYRNVTNVYRISLKSLARRCLELHDEIADLDVMIAAIVDELAPELIKRNAIGYESASQLLITAGDNPQRLRSESGFAALCGVSPVPVSSGKMNRYRLNRGGDRAANSALHIIAIGRLRTDDKTKEYVARRVAEGHTKMEAIRCLKRYISREVYTLLRNQNRQVNSIPIMA

SEQ ID NO: 459244 - protein, 448 aa, unidentified
MRQQNDKQSKGLSIQIVHQNAAGIDIGDMLISVAVPPGRDEVCVKEFGAFTSDLHAIAQWLKNCRIETVAMECTGVYWKNLFTMLIQYGFDVCLVNARHTRNVSGRKTDEKDAQWIQRLHTCGLLNSCFLPDDHTQTLRTLVRQRRSLTQDSTRYILRMHKALEMMNIKLHAVISNITGKTGSSIIKAIISGERKPENFLQFVDRRIKADQETILKSLQANWRSEQLFLLEQSYRMHLSAQQEIQLCERQIESALQTFTAPASQGVIEQAAPRIKKAKTNNQPTFNTREYLKSIYGVDVLDIYGISEIGALEILAETGTDLGKWPTEKHFVSWLNLCPNNKISGGKLISSHMLKKKPNPASQAFRTAANSLQRSNHWLGDYFRRMKSKGGNKYAIVASSRKLAIIYYKMVRHKQPFQPFDNDEYKQKCQRAKIAYLERALARLKGDAA

SEQ ID NO: 459245 - protein, 310 aa, unidentified
MELIIVGIDVSKDRLDVAVRPSGEVFAVERNGAGLEHLVQRLREVSPHLVALEATGGFETVAAAALAAAALPVVVVNPAQIRAFAKAVGQRAKTDPIDAAVIAHFAEATKPAVRPLPDAATLLLADLVARRRQIVEMIGAERQRASRLTVPHLRKSIARLLKALEKELASLDADIDDAMRSSPAWREKEDLLASVPGVGPTIARTLIAELPELGQLNRKQIAALAGLAPFTRQSGQWRGRSFIGGGRTAVRTVLFMGAMVAKRHNPVLKAFFDRLVTAGKPKMAALIAVARKLLTVLNAILRDNRPWQSA

SEQ ID NO: 459246 - protein, 338 aa, unidentified
MELYAGIDLHSNNSVVTVLDEADRTVYAKRLPNDLDTIMAALRSCEGTLCGVAVESTYNWYWLVDGLQEAGFTVHLVNTTAVKQYDGLKHSGDFSDARHLAHLLRLGILPVGHIYPRAQRAVRDLLRKRSQLVRYRTAQILSVQNLLARNLGARARSGDVKRWQARSIDAMELLEEQKQALKATLAVMRCIDAQISVVERSVLAKVKARADYQALKTVSGIGEVLALTIALETGDIGRFAGPGNFASYARTVKSTRESNGKKKGQGNTKCGNKYLAWAFIEAANFAVRYDATIKRWYQKKCASSLAVVALKAVAHKLARACFYVMKDGRSFDAARAFG

SEQ ID NO: 459247 - protein, 415 aa, unidentified
MIPAVVERCAGIDVGKKTLAVCVMTGAASEEPQAELRKFGTVRAELIRLREWLKSAGCTHVVMESTGCYWKPILNVLEDDPEFQLHIIVANSQQVKAITGHKTDPHDARWLAHLLRHGMIRPSFIPSRAVRDLRDLTRRRKQMIETGSEERNRIQRVLEDANVKIGDVLSDVFGLSGQLMLEALLEGKATHLEIAQLAKRGARKKISELEAALEGHQMRNTHRVLISNALRHMAFLEREIEQLDGEIASLVRDAGLEQQWQLLQTIPGIRETAAATILAESGGDMKQFPAPSNFSSWSGVAPGNNASAGVRRRAPTVRGNPRMKAALVESGWSASRTKNSEFQCNYERLKPRIGHRRAIVAAAHSLALVIYQVLDTAQPYEPRRPGFRPREVNRLRRHHSRRLRNLDKWLREDVV

SEQ ID NO: 459248 - protein, 345 aa, unidentified
MPSIVGGLDIHRKQITFDYLDLDTGEVQCGQIAPADRGQVQAWLAGRFAHPEQVAFAVEACTGWRYVTEELAAAGITAHLAEPADTATLRGRKRRAKTDRADARLMRDLLAQGRLPECWIPPAHVVECRALLELYHDLRAEHTAWVQRAHAVLFHQGAPAFYDLSRAQAPAELAAVARACLSPAGQAQIAACLRMLAVLEAELAAARRRLLAAARRLRGAKILAEQVYGVGPVTALALTCWLGGAGRFSSSRKAVRFAGLDITVRSSDGKRSPGHLSRQGPPVLRWALYEAGKTHARPAAPDHGYYAQVKDRKDGKRAALAEARKIVRRACHILAELGDDALVML

SEQ ID NO: 459249 - protein, 344 aa, unidentified
MSEVSIIGLDIAKHVFHAHGADERGRAILSKRISRGKLLDFFAAQPRCMVALEACGGAHHWARQLTQLGHKVRLIPPAYVKPFVKRQKNDAIDAEAICEAAQRPSMRFVAVKSEQQQAAGLVFRTRDLLVRQRTQLINAIRGHLTEYGWVAPKGPSHVAMLADLIEEEEMASSLPEAARAMFRVMLDLLAGLNSKIADLDKEIARRAREDEVSRRLMTVPGIGPISATAIAALAPPAETFAKGRDFAAWLGLTPLQRSTGGKQKLGATSKMGERTLRRLLIIGSSAVVKQASKRGAPRGSWLEQMLARKPRMLVTVALANKMARIVWALLVKQENYRAPVAAKA

SEQ ID NO: 459250 - protein, 337 aa, unidentified
MRFCGIDLHSNNSVVVITDEMDKVLASRRCPNDLSRIVAVLEPHKAELAGVVVESTYNWYWLVDGWMAAGYEVKLANTVAMKRYDGLKHSGDEDDAAHLAHLLRLGILPTGYIHPPSERGLRDLARKRIQLVRSRTQHVLAVENILARELGATLSSNAIKRLRIEQVDTLRLSADVALAVKSNVAVIEVLNREIERLEVCLLESAKLRPEYALLKSIPGIGEVLAIVIMLETGDISRFAQVGNFASYARCVDSAHYSNSKKKGAGNTKNGNAYLVWAFIEAANLARRFSDEARRFFDKKKTKTNSVVATKALAHKLARASYHILKEKQPFDVKRCFA

SEQ ID NO: 459251 - protein, 337 aa, unidentified
MEYFAGLDVSMEETHVCVVDRDGVVTHQAKVASTPADIAQELAKAPACRRVVFETGRMAPMLFHGLADHGVPVVCVESRQAYQALKSLTTHKTDRNDARGLAHLARTGFFKPVHVKSLPAHAVRSLIIARKKLVGQRVTLENQIRGLAVVFGVRLPRALSPAFIEQALRSSEGIAGLSAAMRGLIGARAAVLAAVAAIDADIKRMVRASDACRRLMTIPGVGQLTALAFTAAVDDPERFRRSRDVGPYLGLVPRRYQSGEVDYTGSISKCGDRRVRTLLYEAANVMLTRCRQPLKLKAWALAIAKRSTMRKARIALARRLAIIMHAMLRQGTEFRPA

SEQ ID NO: 459252 - protein, 383 aa, unidentified
MLLAQLQAWRSAKEYPSKTLYVGLDVHKDSIAVAYAPEERGTEAVSRGAIGTRQCDIDKLIRKLQAKGALLVFVYEAGPCGYWRYRYLTRKGLRCAVVAPSLIPRKPGDRVKTDRRDAITLARLMRSGDLSSIYVPGIEDEAIRDLSRGREDTLRDLKATKYRLKAFLLRQDIRYEGRANWTAAHLRWLSEVVCPTRAQQIVFQEYVRAVTEQHERRQRLENELHEEVKGWRLSPVVEAIQALRGVDLTGAVILIAELGDLTRFDTPRKLMSYLGLTPSESSSGQRRRQGGITKAGNTHARRALVEGAWAYRYPAKVSRHLQLRLETLPAEGQAMSWKAQVRLCRRYRQLIARGKHANQVVVAIAREMAAFAWAIARTVPLAS

SEQ ID NO: 459253 - protein, 411 aa, unidentified
MRVLHERCCGLDVHKNSVVACAITPQGQKTRTFGTMTGDLGKLARWLKEQGIRHVAMESTGIYWVPVFNVLEEELNPEELMVVNARHIKAVPGRKTDVKDAEWIAELLQHGMLRGSFIPDRKQRELRELVRHRRNVINQHAQVLNRIQKVLEGANIKLGSVASTISGVSCREMLWEIVRGNQDPVALANLARGRMKSKREELERALSGSVRPHHRFMLSSLLRQYEFLSEEIAALDLEVAERMRPFAAALRLLDQVPGIGRRVAEAIIAELGTDMSRWLTHAHLASWAKMCPGNNQSGGKSRTAHTGRGNRWLRQTLIEAARAAVRTKDSYLGAQYRRLKGRRKDADNRAIVAVAHSILVIVYHLLRDGTVYQDLGADFFQKRDREQVAKRAINTLKRLGYEVSLEEAVAA

SEQ ID NO: 459254 - protein, 338 aa, unidentified
MKVYVGMDLHATNTYVGMVDEENKVLNKQRFRNELPLILAGLDPFKKDIEGVVVESTFNWYWLVDGLMDQGYRVHLANVSAIKQYEGLKQIDDQRSAFWLANLLRLGILPTGYIYPKEERPTRDLLRKRLQFVRHRTSHVLSVKNILARNLGLRMKSEDVKKITDAEVKRFFPDREMQTMVLASVGLIRHLEDQISTIENMITKKLKVRKEFARLMTVPGIGKILTLTIMLEVGDIHRFPTVGDYSSYCRCVKSIRTSSGKVIGYGNRRNGNKYLSWAYVEAAQAARRFHETVRSYYEKKMAKTNRVVAIKALSHKLTRASYYVMRDRVDYDPARLFG

SEQ ID NO: 459255 - protein, 400 aa, unidentified
MLSIGIDVSKGKSTVCGMKPGGEIVYAPFEVQHTREGMSELVSLLRSSGEEVRAVLESTGSYHCPVVAALLENGIFVSVVNSLRMKRFCSQSIRKVKTDRIDAMQIALYGLAYWQELQPTKLPEDTYRELQLLARQYYQMTSMLIKAKVDFNALCDQVLPGMQELMNDHAGRHKLSDFVLRYHHTTHILEMGETRFRKDYCKWAEKKGYRNCERMAALIFATAQNGIPVLPNAPSTQIVITEAIRVLHTVEASRDAILTQMQALAKTLPEYSLVREMPCIGDTLAPRLIAEIGDVRRFHSKRALIAYAGIDAPPYQSGKFCANNRHISKRGNRYLRKTGYEVMQSYVMHKPANDPIFTFIEKKRSEGKSGKLAMVAGLNKFLRVYYGKVTELYRSLPAIE

SEQ ID NO: 459256 - protein, 414 aa, unidentified
MEVLYPRCAGLDVHKESVVACIRIASGGEVVTEVQTFNTTTASLVSLSEWLASNGCTHVAMEATGVYWKPVWHILSDSAFTLVLANAAHVKNVPGRKTDINDATWLADLLAHGLIRASFVPESETQDMRALLRTRKQLVREKASHIQRLQKTLEDANIKLDSVVADIVGKSGRAIIDALIAGDSDPAKLAALADTRIRSSQNKLREALSGRIRRHHRFMLNLHLQQINALDAAITEIDREVDVNLAPFRTGVELLTSIPGISTLSAQVILSEIGTDMSRFPTAGHLISWAGLCPGNDESTGKRRSTRLRKGAPWLKTTLVQCAWSASRKKASYTQAQFHRLRARRGAKKAVCAVAASILTAAYHMLKDGTQYRDLGPDHFNRRSKQQQTNRLLKRLADLGFAAELTPIPIAVSL

SEQ ID NO: 459257 - protein, 402 aa, unidentified
MNNVAGIDVSKGKSMVSVLRPFGEVVAKPFSIGHTGSELKELADYLKSLDGETRVVMEHTGRYYEPVARFLHEEGVFVSAVNPKLIKDYGNNTLRKVKTDKADARKIARYGLDNWAELRQHTPMDTIRMQLKTLNRQQSLYAKTKTMMKNNLIALLDQTYPGVNALFDSPVREDGSQKWVDFATAFWHVDCVRNMSLTAFAERYRKWCKRHGYNFSQSKAVEVHTGAQDLIAMLPKDALTKTMVRQAIDALNAVSASLERLKAEMQALAAQLPEYPVVMAMHGVGDSLGLSLWRSLGMWPGLPTERHYRFCGRDPGADQSGTHEAKSTRVSKSGPPELRRALFLVMDCLLKTQPQDDPVYRFMDKKRAEGKPYLVYMTAGANKFLRIYYGRVKEYLASLEEN

SEQ ID NO: 459258 - protein, 341 aa, unidentified
MQVTTIGLDLAKNVFQVHGIDATEKVVVKKQLRRGQLVKFFETLAPCLIGMEACATAHYWARELTKLGHRVRLMPAKDVKAYVKRNKNDAADAEAICEAVRRPTMRFVAVKSAEQQGRLMQHRVRDLLMRQRTQLINALRAHLAELGIAAAQGREGVKELLAIVAQDKASRLPVDAHASLIVLAAQLQAVQTMIGLIEKRIVSQHRSNADSRRLATIPGIGVIGATTIAAVVPDPKVFRSGRDFAAWIGLVPRQDSTGGKQKLGPISKQGDRYLRRIMVVGACSVLRRARQQPEKYPWLTQLLARRPFKVVAVALANKMARVAWALLAKGGTYRAPQLKAA

SEQ ID NO: 459259 - protein, 341 aa, unidentified
MIVIGIDPHKQMHSAAAVAEQTGELVGERTVRARRAGHEQLLVWGRGFAGERCWALEDCRHVSIALERFLLASGERVVRVPPKLMAAARRCGRQRGKSDRIDAVAVARACLREPALPSASLAGGEREIRLLCDHREDLVGERTRIQQRLRWHLHELEPELQLPAGCLDRRCWLERISRRLARREQSLQVRICLELVARCGELSRRADELERELARILQRQAAPLLALPGCGVLTAAKLIGETAGASRFQDEARLAMHAGAAPLPASSGNKQRHRLNRSGNRQLNCALHRIAVSQGRHHPPAQASLRCLKRHLVRTVYHRLRSLEDEQTRSTSRLTPAPALT

SEQ ID NO: 459260 - protein, 403 aa, unidentified
MIFVGDDWAEQHHDVYLMDGAGKRLASRRLPEGLAGIRQLHELMATHAEEPDQVVIGIETDRGLWVGALTGAGYRVFAGNPLAVARYRDRHHVSGAKSDASDAKLLADLVRTDRHNHRLIAGDSPQAEAIKVLARAHQSLIWTRNRHTNALRNALREYYPAALEAFEDLAHGDALGVLHRAPTPTLGAHLDVAAIQSALKRGGRKRNIAARAREIRATLRTEQLSAPAPVADAFGATTRATVGILTELNRQIGELETSLAAHFETHPDADIYRSLPGLGVVLGARVLGEFGDDPNRYTDTKSRKNYAGTSPLTIASGKKRAVLARHIRNRRLYDAIDHWAFTALTKSPGARALYDQHRAAGDLHHQALRALGNRLVGILHGCLRHRTLYDEHTAWAHRMPAAA

SEQ ID NO: 459261 - protein, 317 aa, unidentified
MTTPDTEVFIGIDVSKHALDIAQWPGERTWRIAQEDAAILALVEELRTLHPVRIVLEATGGLEAPVTAALAQAGLPVAVVNPRQARDFARATGHLAKTDAIDATLLARFGQALAPPVRALKDEETRELTALLTRRRQIVEMLTMEKNRLHTVSKAVRRDITAHIAWLTKRLKDVDGELRGMIASCEALRVKDAILRSAPGAGRVLATTLLSSLPEIGQLNRREISALVGVAPLNCDSGTLKGTRRIWGGRAAVRTVLYMATLSAIRCNPDIRAFHTRLVAAGKKPKVAITACMRKFLTILNAMVRSNTPWQTRIVVS

SEQ ID NO: 459262 - protein, 490 aa, unidentified
MDFPVINANASGCDVGSEWVYIAVPPDRSDTEVRRFRTFTQDLREAVQWMLACGITTVAMESTSVYWIPFTQLLEESRIQVFLVNPRHVKNVPAAFKTDNRDSRWLRNLHAVGLLSASFRPEQAVCKVRSLARHRDNLTKQASRCVLHMQKALSQMNILLHEVIADVTGVSGLAVLDAILAGNRSPEHLARLFSPRVKATDEEIKKALVGDWRDEHLFTLRQSLASWRHFQSQIAECDTEISRLLSEFGDPPDPPDPPDPPDPTDTFVQAAAPEAPVQTEAPLEGDTSATCMASAESDASSKPKRKKPGRPANPTGTRAQERKKRDLLIRLFGIDITQIPGIGVGCAELFFTELGRDLSRFHSAQHLASWLGLAPNNNESGGKILSRKVRRMKNRLATQLRLCANTLGSTNTYLGAYLRKMKSRLGAPKGITATAHKLAVILYTVITRRTPYDETVFARQEERHREKRLNYLKQQAAAMGFDFVPRECVS

SEQ ID NO: 459263 - protein, 416 aa, unidentified
MAEEVKKSCGLDVHKQFVIATVLSRGNEGKIQKRFERDDNGILSLKSFVLSENCDVVACESTNDFWMPIYDSLCDHVTVIVGNARDIKGQTHKKTDKVDSEHIALLALNGMIKPSRVFSRELRQIRSHVRLRHKIVRKRTDFKNIISSILSSEQFNLKSKLTDIFGKTGQTILEGIICGLPVDTIIQKFPACMIGRGDEFRELLQREFSQEAILRLKECMESISQLNRSIKHLGDQIFKWAHTNCKRKMDILMSVPGIGEIGAITLIAEIGDFNDFPDSDRLSSWLGIVPNVYQSANKHYNSCITKRGSKVARWILIQIAQVVASRTKDNVLRDFFHRKKATIGFNKAIVALAHKIARTIWHLVVNNEFYSDKIGYEKKIKKFSHPIGLKEIPIDECISVIFQANAVLRQKDPDIL

SEQ ID NO: 459264 - protein, 383 aa, unidentified
MRAVCGLDVHKDTIYLCILCSDGLIFEKVYGVLTKDLKSMCSDMRRHGVTEATMESTATYWIPVWRVLEPHFRLKLVNPYFIKQLPGRKSDVKDAQWIAECTLKDLARGSFVPPERIQQLRQYDRRIFDLDAEIVRKLAKLDGIMQRCNIRLSNYVSNTDTKSYKDVVDDLCNGITNPEELIKKVHGRIVNKHGRETILASLTGVVSDAEKDTMRQLRAEITLAEEHKQECQQKMIAICKTFYPKEFARLMTIPGIKERAATSLIAEIGVDMTKFQTAAHLASWSGLKPRNDVSNGKFKSRRITHGNVYLRKTIIECAWGASRTKDCFFCRFSYHQTVVRKKNKMKVLVAVARKLLIAVWHVLHDEKDYVDFNPDCKVPIKNG

SEQ ID NO: 459265 - protein, 326 aa, unidentified
MEHELHYIGIDTAKEKLDVDVLRPDGRHRTKKFANTTKGHDELVSWLKGHKIDHAHICIEATGTYMEPVAECLYDAGYIVSVINPALGKAFAQSEGLRNKTDTVDARMLADFCRQKRPAAWEAPHPLERALRALVVRHQALTDMHTQELNRTETAREVQRPSIDAHLLWLEAELKRLEKQIKDLTDDDPDMKHRRKLLESIPGIGEKTSAVLLAYIGLKDRFAHARQFAAFAGLTPRRYESGSSVRGASRMSKAGHVSLRRALYMPAMVATSKTEWGRAFRDRLAANGKKGKVILGAMMRKLAQVAYGVLKSGVPFDASRHNPVAA

SEQ ID NO: 459266 - protein, 351 aa, unidentified
MEIVVGLDLHRSQITFRTVDLRTGEVQRGKIYPGAREAVREWLERFEPDSDAHFALEGTTGWRFVVEEIERGGFTAHLADPAELSTLRGPKRRAKTDHADCELMVNLLLEGRLPESWIPPAHILELRTLVRLRKTLVDQRIEWQQRLQAQVFHQGVVPGLHLLQEEDRRRLLKMQMSAAGRQTMQTGLLMVDAFDSQLQPLGTQLVGLAKTQPGCRALEHNLFGVGWLTSVAILSELGDCRRFHSADQAVRASGLDITVYESNGKRPGGHLARQGPQVLRWALFEAALCAARKSSPDHDYYVKVKDRIDHNRACLSVARKICRRACHILKDLGDAAMAPPEPSASHGPKAA

SEQ ID NO: 459267 - protein, 317 aa, unidentified
MKKRPSRFVGIDVSKDYLDLACRPEDTRWRVAHDSAGIAQCLAQLRQLKPTLIVLEATGGWQGSLVAALAVSTLPFAVMNPRQIRDFAKATGELAKTDALDAGVMAHVAEAMRPTPRPLPDEMTPQIDALLQRRRQLLEMLVAERHRVALAHPAVRDSLARHLDALQGLINATDEEVAAIIRTSPAWREKDDVLQSAPGIGPVLSATLQAALPELGVLNQREIAKLVGVAPLNDDSGKRSGTRHIRGGRAAVRAVLYMATLTATRCNPVIKAFYQRLLGRGKSQKVAITAAMRKLLTILNAMVKTHTPWNARLQNCA

SEQ ID NO: 459268 - protein, 350 aa, unidentified
MSVKYVGLDVHQSSTSYCVKSEKGKVVSQGMLETSPAYLKDFVRGLSGEVHLTFEEGTQASWLYDLLKPYVAELVVCDPRKNATKHKGNKSDRIDAERLAELLRLGSLSPVYHGEHGTRALKELVRAHRDLVRDVVRVKNRIKAVYRSRGISCAGNGVYGREGREEHLSQLAGGGLRQRVEWQLEQLDKLEDLRVQSEKLMQKEARRHRGCRVLRSVPGIGPIRAAQLVGVVDTPHRFRTKRHFWSYVGLAVVMRSSSDYVSTAGGFVRKNWQSTRGLNRQCNRFLKGVYKGASKDAIAQYPGWRAYYEKLVDRGLSPEVARVVVARKLASISLTVWKKGERYTQSKAFK

SEQ ID NO: 459269 - protein, 337 aa, unidentified
MRFIGVDLHSNSLTACYLSEDGSEEMGTFDLKELRQFQTSLEATDQVAVEATGNTRHFREAIKHLVSKVVVVNPSQFEVIRKSVKKTDRHDARTLALFLSKDMLPESRLKQPAHAQLNSVAHTRDKLVKLRTTLINKIHALHVASGIKSKKSSFSSRRGLQAALNRSWDELTRTELEIIVSQIGSLNEGIKQLERQLIAHGQRLAGHRNLTSIKGIGDKSAAVLLSVIGDVSDFAGEDKLASYFGLVPRVANSNETIHHGHITKRGSKLGRTTLVQCTLIAVRYSSYLKKFYERIKQKKGAGKAIIATARKFLGIIYRTLKYNWVFADFPNFVLAED

SEQ ID NO: 459270 - protein, 418 aa, unidentified
MDTIYSRVAGLDVHQKSVEVCVRCRQQTGKLFSQVRSFGTMTRDLRALADYLESLDVTHVAMEATGVLWKPVWNIPDGRFVMLLVNPHHLKKVPGRKTDIKDAQWIAQLLECGLLRGSFVPPRPVRQLRDLTRHRAQLAGEHTRVANRIHKVLEDANVKLGAVASDVLGKSGRAMLRSLLDGEEDPSRLAELALGQLRKKIPQLRLALEGHFTEHHRFLLRQMLSHLNYLEEQSEQFSQQITPQLRELLDLRDQGRLDAIDGVNITTIENVIAEIGADMSVFPDEHHLSSWTGICPGNEESAGKRKRSRTQKGNRWLRRALAEAAWAASHTKETYLAAQYRRLAARRGKKRALLAVGHTILVIIYHLLKNKEVEYHDLGGDFFDRLEPERLRRYLVKRLQTLGWDVTLKPKEADDQAA

SEQ ID NO: 459271 - protein, 345 aa, unidentified
MEIRTIGIDLGKTVFHFVGVNARGEVVVRKKGSRTQLLRFTSNIRACLIGMEACGGSHFLGRALREQGHDVRLMPAQYVKPYVKTNKNDYIDAEACAEAVTRPTMRFVPIKTDDQLDLQSLHRVRERWVVRRTAVINQIRGMLLERGITIRKGRIHIEESLPGILEDPDNKLSGALRVLLTQLRSEMQYLHGQIEETDKLIARICCELEQCRRLVAIPGIGPITATATVAAIGNGAAFKKGRGFSAWLGVVPGEHSTGGKQKLTSTSRRGNKYLRKLFVQGAHSVMLQSTKQSVGLSMWLSHLTARKRKQVATVALANKMARMAWAVLFKGEDYRPPTVSQVIAA

SEQ ID NO: 459272 - protein, 317 aa, unidentified
MSQASVFIGIDVSKNQLDVAVRPHQVSFSVINNDAGIQELVQRCAELKPVAIVLEATGGYENMAALALGAAGLPISVINPRQARDFAKALGKLAKTDKIDAACLAHFAQLLDPLPLPIPTAEQEKLSSLTTRRRQLVEMITMEKNRREHAPPQILSHIQRHIAWLQAELKQLERQIDDFIKKTPMWQEKLKILKSIPGIGVVTSSILLAELPELGVLDNKKLASLVGVAPFNHDSGKFKGRRRIKGGRKVVRDKLYMATLVATRWNPVINEYYQKLLQAGKLKKVALVACLHKLLNIMNILLKKKSLWQPNLSSQTS

SEQ ID NO: 459273 - protein, 410 aa, unidentified
MQAVVERGCGLDVHQATVVACLLVLRKNGTVHKQVRSFGTTTRELVSLREWLLAEGCTHVGMESTGVYWKPVYAVLEGAFQIVVANAQHVKKVPGRKTDVKDAEWLAELLCHGLLRPSFVPPKPIRELRDLTRYRRKLVEAQAAERNRLLKVLEGANIKLSSVATDVFGVSGRLMLRALIEGMANPQEMAGLAKGRLRTKIQKLEPALEGKLEPHHRFLLKLQLQRVEAAEADLTTLEQEIQRRLEPYRAQLALLDEIPGVNLDLAAAIIAELGVDMKVFETVSQLASWAGVCPGNNESAGKRKSSRITKGNVYLKTALVEAANAAAKKKGTYLRDKFYRLKARRGYKRAVVAIAHKILGSIYHMLSQNVSYNDLGDLYLDKINKHHLTRNLVHRLERLGFQVTLQLKAA

SEQ ID NO: 459274 - protein, 332 aa, unidentified
MAEPIVKPVVQRCAGLDVHRKIVVATILVEQADETVQEETREFGTFRKHRKELAKWLKSNGIELTVMESTGIYHQCIYRDLEAAGLTVHLVNARYVKQVPGRKTDVKDSQWLASLARLGLLKASFVPPVDLRELRLITRYRVKLQNTLASEKNRLHKVLDDSGIRLGTVVSDINGVSARAIIAGLIEGKPLKELVQCAKGRLKEKSQELEDSLEGELSSRHRFLLKQIHAHIDYLEQEVAQIDQHLAEAMKPYQEEWELLQTLPGMDRVSATLVIAETGVDMSLFGSADKLASWAGLCPGTHESAGKKKADQDERAIPPCNASSVRLPMPLE

SEQ ID NO: 459275 - protein, 415 aa, unidentified
MPTILNVQHKACCGIDIHKKNVVACVLKTDEFGEYTDCIRTFSTMTSELENLRDWLKKEKVEKVAMESTGIYWIPVFNVLEKDFKVILSNARHIKNVPGRKSDPSDSRWASKLLAVGLVNGSFIPPKDIRELRQLTRYRTKLVSMRTSEKDRVHNILESCNIKLSCVATDIFGASGMAIMGALIAEESDPEELAQFAKGRLRNKIPDLVQSLNGKMSKHDIMVLKMVLDHLAFLNEQLAELDQMIAEKSKPYQQEIELLDTIPGIDITTAQAVVAEIGTDMSVFETPERLASWAGLSPGSNESAGKKKSTRTRPGNQYIKSITCQCAHSASHTKNTYLSSKFHSIKARRGPQKAAIATARHIMVAVFHIIKNKTPYKELGGDYLLKLRPQNVARSMIRRLKALGYEVTSANGIQF

SEQ ID NO: 459276 - protein, 412 aa, unidentified
MEVMYPRCAGLDVHKETVVACVRIVEGGDVSRSVRTFATTTASLIELGEWLEVNGCTHVAMEATGVYWKPVWQVLVDSSLELVLANAAQVKNVPGRKSDVNDATWLSELLAHGLVRASFVPEPAIQQLRGLLRTRKQLVREKASHVQRLQKTLEEANIKIESVLSDVMGRSGRAMIQALIDGESDPAKLAALAHWKVRASAATLREALHGRIKRHHRFLLRLHLQQVDALDAAIAEIDREADAGLACFRDAVKQLSTIPGVSELSAQVILSEIGTDMGRFATAAHLRSWAGLCPRNDESAGKRRSTRLRRGAPWLKAMLVQCAWAAARTKATYLHAQFVRLRARRGPKKAICAVAASILTAAYHMLKDGTFYEDLGAVHFDRRRPETQARRLVKRLAELGFSVELKPVAAVA

SEQ ID NO: 459277 - protein, 287 aa, unidentified
MTTKPTQPYVGLDVSKKVLELAIHESDYRHCYPNNPSGFAELIAELITLEPALIVIEATGGLEKPAVAAMNTAGLPIVVINPRQVRHFAKALGQLAKTDRLDARVLAHYAAAIKPPLRPIKSVPEQDLDALVGRRGQLVGMLIAEKNRRATAPNDRVRAEIDEHIEWLEGRIAALDRQLQELMKSSATWKHTNQILRSVPGFGPVVSFTLLADLPELGKLNRQQISKLVGLAPLNRDSGQKHGPRHIYGGRASVRSMLYMATLTAIRYNPVIKAFYERLIANHKDSR

SEQ ID NO: 459278 - protein, 341 aa, unidentified
MQDVALIGIDLGKHGFHVHGQDRHGKAVLRRKFDRKHLITFLANFQPCTIVMEACASAHWMARQLSALGHEAKLISPQFVRPFVKGNKNDFIDAEAICEAASRPSMRFVTPKTEAQQCLSALHRTRESLMRDRVKAINQIHAFLLEFGIGLPKGPAIIRRLPSVLAEHALPVRLVSLIERLRAHIKYLDEQLDELEKELGRQLQEDDLGQRLMAIPGVGPITASALSAEMGDGKQYGCGRDFAASLGLVPQQHSTGGRANLLGISKRGDKNIRRLLVQCARSYMRGLDRHTDRLAQWARSMLERRHSNVVACALAYKLARTAWAMAAHHTEYKMQEAVTSL

SEQ ID NO: 459279 - protein, 342 aa, unidentified
MKHYVGLDVSQRETSVCVVDDAGKIVFQGKAKSDPGALAELLRKRAPYAERIGFETGAMSSWLWHELQRVGLPVVCTDARHAKAALSVRLNKSDENDARGLAELVRVGWYREVKVKSGESQAIRSVLVARSRLVAIRRDLENQVRSMLKEYGLQFGRSIGAQFRRLVREQLSGGHRLTSVVEALLAVHEQVCEEQDKLDQQVRSLAREDATTRRLMTVPGVGVITALTFRHTIDDPSRFHSANDVGAYLGLTPRRKQSGETDVNGRVSRWGDRLLRAYLYEAASVLMHRTQKWSALKAWGMHLSKRIGMKKAKVAVARKIAVILHCIWVDGTSFEWGNEKTA

SEQ ID NO: 459280 - protein, 337 aa, unidentified
MKRYLGVDLHRTQMTVCTRLESGEESVREWAIKDLPEFAEQLRAEDEIAVEATGTTGRFYDAVVGRVARLVVVNPHKFKIISESVSKTDGKDCRELALFLSKDLLPEVRMKPKKQRELAHMTETRDLLVKQRSALKGKINNLLAMQGINLKREARSSKVALERGMGLEVSAMVKLELRVLVEQIRALSASIGELEELIAEEGEQLPGHRNLTSIKGIGSLSATVLLTTIGSVGDFADENKLAAYLGLVPRVQNSNATERNGAITKMGNKLARTALVQCGLVAKRYSPYLNRFYQRIKERRGGGKAKIALARKMVKIVYDTLKNNWVFDDFPSFTLAA

SEQ ID NO: 459281 - protein, 386 aa, unidentified
MPKHMDASNAVAAFDHDSTLVAALELSGQRWEIGAVVPGVARRPRRRLAARDMMGLLAVLGDWRREAAAAGRPVRRVVLTYEAGRDGFWIARCLQAQGIEVHVMHPASIPVPRRQRRAKTDRIDLDMLLRTLLAWLRGEPRVCTMAPIPSVAEEDERRPGRERERLVGERLQLENRIEGLLSLHGVADFNPRLKKAAGRLEALRCFDGTQLPDNTMAALRRMLARHRLACAQIAEIEAERDRVASDPAPDAAVRTIQQLMLPVGVGGETATALVREAFCRPFAGPGPLASFCGLTGNPFKSGGLDREQGIGGGHARLRRLMVQFAWRWLRFQPTSELSLWFHTRTQGAGRRSRKIMIVALARKLLVALWRYVRTGEVPAGARLHAR

SEQ ID NO: 459282 - protein, 446 aa, unidentified
MPRDVREIEADEQEETLERVAAIDVAKASATVCTRVVHPSVAQRRVTKVWDVGSTTNAIMALADELAGAGIERVVLESTSDYWRPFFYLLEARGLVVWLVNARDAKQVPGRPKTDKLDAVWLAKLNERGMLRPSFVPPKEIRELRDYTRLRVDLTQERGRYAQRLEKLLEDALVKLSSVASDILGKSGRQMIEALIAGERDLVVLAEMAKGKMRIKRAALVEALTGRFDDHHGELARILLDQIDALSEKIEILTRRAGELIDQIPEAQALPSEEPSGPGASGGSLRVVERLDEVTGIGVLSAQAIIAEIGLNMAQFPSAGHLVSWAKLSPRTIQSGPKTRSGKTGQGNPYLRRALSEAAAATARTDTFLGQRYRRLVKRRGKLRALVAVARSILVIVWHLLADRTARFIDLGPDFYDGRINNDRRTRDLIRQLQALGHQVTLRPAA

SEQ ID NO: 459283 - protein, 371 aa, unidentified
MTHYAGIDVSLETSSICIVDGSGAVLRELKAESEPEALAAALSGTGLAFARIGLEAGPMSQWLHAGLRAAGLPVVLLETRHLRAATRTMPVKTDRTDARAIAQMVRTGWFRAVHVKSELSQELRALLTARKLLVGKLRDIDNGIRGLLRGFGLKVGTVGERAFSGRARELAADRASVAAAIEPLLQVREVLLSERERLHRLVLLATRDDAVCRRLMTVPGVGPVTALTFCSAVDDPARFSRSRAVGAHFGLTPRPTNQARRTVWATSASRATGLPARRSTRPRTSCSLGRAAGRRSRPGVWPSRSARACAAPKWQWPASSLSCSTACGATGPNSAGARRQLWRSHRRPQRPTSRRGDAAGRDRNRPGAGIR

SEQ ID NO: 459284 - protein, 343 aa, unidentified
MDYFAGLDVSVKETSVCIVDDTGKIVRETRVASEPEALLQVLTNTIYRFKRVGLEAGPLSQWLYSVLAEAGLPVICVETRHMRAVLKAQINKTDRNDARGIAQMMRVGLYRPVHVKTLRSQKLRMLLTHRKLLQSKAIAIENDLRATLRNFGLKVGIVGTVKFEARIKELVENLPDVAVLVEPLLVVRRVLREQVGMLHRRLLAIVRDDDVCRRLMTVPGVGAVVALTYRATVDVPARFRNSKAVGAVFGLTPSRYQSGESDRIGRISRCGDEMTRTMLYEAAQSMLVRSAKWSWLKAWAMKIARHRGMNKAIVALARRLAVIMHRIWVDGTEFRWTREVAAA

SEQ ID NO: 459285 - protein, 424 aa, unidentified
MSVNNIHPSRPAPLSNPGPGDLAREGVTAGVDWASTEHAVAVVDQQGVELRRATVPHTKAGLSQLVGMLDRAGVREIGIERGDGPMVDALLEAGFVVFVIAPNQVRNLRRRYGAAGNKDDHFDAYVLADTVRTDRHRLTPLAPDTPPTVTLRMSVRARQDLVAARVAMGNQLRAHLAIVLPGAIGLFRDIDSAITLAFLTRFPTQAKVNWLTPRRLENWLRSQRYPNPRRAELLHAHLAGAARGTTDPQADTRAHITAALVAGLQSLRTQIAALEDDIGQQLLIHPDAQIFTSLPKAGTMRAARLLAEIGDCRSRFPTPQALTSLAGATPSTRQSGKVTVVGFRWAVDKQLRGAVMDFAGDSHHANPWAADLYWKARHRGKDHSHATRILARAWLLVIWRCWQDHEAYDPARHRAYQALQNTVA

SEQ ID NO: 459286 - protein, 343 aa, unidentified
MKLHVLGIDLGKTVFHLVGLDSIGKVVIRKRCSRRQLLALTANLQVELIGMESCSGSHFLGRALREQGHQVRLMPAQYVKPYVQTNKSDYLDAEAIAEAVQRPRMRFVPIKSEEQLDLQALHRVRERWVMRRTAVVNQIRSLLLERGLTLPKGRSHVEQMLPRILEDAEVKLSGSFRVLLSQLGVELGQLGERIAEMDGAIEQRAREDDACQRLTTIPGIGPVTATALVAAIGNGAAFRKGRDLAAWVGMVPRECSTGGKQKLLGISKRGNVYLRRLFVQGARSVLQYHQKQAPALAAWLKQLLARRHQNVVIVALANKLVRTAWAVLCTNQPYRAITPMIDL

SEQ ID NO: 459287 - protein, 413 aa, unidentified
MERIVERCAGLDVHKSSVTACVRISEASEDLHQEIREFATTTRGLLLLRDWLASFEVTLVGMEATGVYWKPIYYMLEDDFELWLLNARHLKNVPGRKTDVKDAEWICQLVEHGLVRPSFVPPKEIRELRNLTRYRKAQIEERTREIQRLEKVLQDAGIKLSSVATRVLGASGRAMLDALVGGTTDPEVLAELARGRLRSKLPALRDALEGSFSSHHALMVGKILAHIDYLDESIGELSAEIERVIAPFSEKVELLDTIPGVNRRTAETLIAEIGVDMSQFPTHRHLASWAGMCPGNEESAGKRRSGKTRKGSKWLRSALTESARAAARSKGTYLAAHYARLRGRRGSKKAAVAVGHSILVICYHVLERSVSYEELGEDYLDRRRSGEAYTKRLVRQLERLGHKVALEPLPQTA

SEQ ID NO: 459288 - protein, 384 aa, unidentified
MPRRMKELTEVEHLVATLFASLELSQTSWLVTSLSPGSVTMSKHSISAGDGAGLLGLLARMRVKAESVAGVPVEIVVIQEAGLDGFWVHRLLEANRIKSHVVDAASISVPRRRRRAKTDAIDGETLLRTLRAWTRGEPRVCAMVAPPSPEQEDQRRISRERAILLRERVRHVNRIKGLLSSQGITDFEPLHKDRRIRLDALRTGDGRPLPPRLKAELLREIELIELLLLQIAEVETERDSAAEFGTAQNPSPIALLTRLRGIGSQIASVLYFEGLYRHFGNRREVAAYAGLAPTPWRSGTIDREQGISKAGNPRLRHIMVELAWLWVRHQPDSALARGFRARVGTETGRVRRIAIVALARKLLIALWRYVNLGEVPEGAVLKSA

SEQ ID NO: 459289 - protein, 344 aa, unidentified
MNYYAGIDVSLEFSSVCIVDATGEIVKEVKVESYPDALLKFFEAFGLPLTVIGLEAGPLSQWLYAGLTEAGFVTTLMETRHVNAALSAVTVKTDRRDARGISQLLRMGWFRPVHAKSAGSQEVRALLVARNQLQHKLRDIELSLRGILRGFGLKVGKVTDKTFEARIRELVTGHPMLEQIAEAMLAARAALLAQFKKLHKAVLDSVRQDEVCRRFMTTPSVGAIVAITYKSALDDPRRIKKSRNAGPLFGLTPKRYQSGETDVTGGISRVGDQMVRTALYEAANVLLSRVTRFSALKRWGLEVAKRRGLKRAKVAVARKLAVILHRMWIDGSTFRWTKTEAAHA

SEQ ID NO: 459290 - protein, 388 aa, unidentified
MDVLYQSCAGIDVHQATVVVCILHGPLTSTRPKREMAQFDTTTKGLKACHDFLSQFHVEAVGMESTGVYWRPVWHELCDDFELILAQPAHMKAIPGQKTDKKDAHWIAQLTRIGLLPRSFVPDETIQELRELTRQRKHYVESRNRETNRIHKILQSGGIKLTTYIEDIMGASGRNLLQLLIDETPITPRIVHQSVYTSLKRKVPQLLEALDGYFSAHHRFMLAQSLEIYDFYQKQIDCLEERMNGYLNLYERPVEILDSIPGIDLITASVIIAEIGVDMSQFPTAGHLASWAGLCPGNNESAGKKRSTKIRHGNSYLKRCLCQTVFAAKKQKGSPLAERYYQIQSRRGPQKATIALAHQLLKIAYILLKENLTYQEFVLQKRLLETSQ

SEQ ID NO: 459291 - protein, 422 aa, unidentified
MLGVGIDFAEEFHLVALGRPGEGVIEVVRVDHTPAALEALVARIAALEPDPAEVRVVLETSHGALVERLLDAGYVVVPVNPDLVARRRGPARKKDDAEDARIACLLALDRHASLRPLIPHGELAAELRAVARDDERAARDERRLLNRLRADLIATFPAALAIAGDDLGAPTMLRLLGRWPSAAELRSAERSELVAFARGAHHGWPERFADHVEAGLAIEQFVARDYLVRAKAATICLAASQLLLLGAQRRAWERRMGEILLGAPRTGRAREPRADERGERFPGGEIYLSFPGLGDRLAARVAGEIGDHPEMFTSPNGLQCYAGKAPVTRRSGKSELVVSTRLACNGHLRDAVQQWAFCSLLYSGWAREFYDGQVAKGKHHHAALRALGNRWLEILWHCLTRGMHYDEAIHVANRNRALQRAA

SEQ ID NO: 459292 - protein, 429 aa, unidentified
MVDVDALEESCGFVERVAALDIGKASVMACVRVPHPSRPNRRIQEVREYLTLTSALLELADWLRCERVSLVSMEATSDYWKPIYYLLEAEGFTCWLLNARHVRNVPGRPKTDKLDAVWLAKVTERGMCAPSLVHPKPIRQLRDLTRYRRSLIRERTREKQRCEKLLEDAQIKLSSVISDLFGVSGRAMLEALIAGQRNPRALAQLARASMRAKIDVLTEALTGHFDDHHAFLAQRMLNRIDTLSADIDALSAQIQAVIAPFATHVTQLDEIPGVGMIGAQELIAELGVDMTRFPTAGHLASWAKFAPVDHKSAGKGKAAATGKGNPWLAGTLGEIVAGFARTNTFLGHRYRRLSKRRGTNRAIVAAGNSVLTIIWHLLANPQAHYHDLGPHLRHTTAHTAHRQRDLIRQLEGLTGKKVTLHPRSEPTAS

SEQ ID NO: 459293 - protein, 339 aa, unidentified
MSGTESKGFWLGVDVGQEQLEAAVSPEGVDPTAWRELRTRAFANTAEGLTDLVAYTDRQVGPNGTLRGICVESTGPLSRRLAEQLARLRPSWPAVSIINPKRSVDFGRSAGVRDKSDRIDAPILAVYGAIYKPAPKAPSSAGHLALRELYRVREQVLAKKQDLANLLRTQDHPVARRALQQAIQALQKQVAALKRAAGDIIENAPALRGDLALLTSIKGIKFIVAWALLGELGDLRRYSRGQIVSYAGIYPRRHDSGKTVHLAPRLVKGGCRRVRKALYNAARCLFRSKNNTLRRYLDRLLEGGKKPMHCITALMRKLLLIARSVLIQGVPYDPCYSQG

SEQ ID NO: 459294 - protein, 359 aa, unidentified
MGNGTFVGLDVHARSVVAGLIDEATGEVRTTRAPHATDALVGWLGALAGPVRTTYEAGPTGYGLARALERAGIECLVAAPSLIPRASGDRLKNDRRDAERLARLLRAGELVGVAVPAIADEGARDLVRAREDARADLMRARHRLSKMLLRYDRVYDRRAWSGAHDAWLRRQRLDEPAAQAALSDYYDAALAARLRRDRLDAAITELAERPDLAPLVGRLSCLRGVSTLTAVGLAVEIGDWHRLSGASIGAYLGLVPSESQSGARRTRGPITKTGNGHARRLLVEAAWHHRKAHRTSIELERRRAGARPEVRARAEAAGLRLHRRWANLESRRGLRSTIVAVAVARELAGWCWSLAVMDD

SEQ ID NO: 459295 - protein, 399 aa, unidentified
MRTNRRVAQVGCDCHRMFSRITARDDDGRIICRQRLEHRDRDKLREQLRGWPKGTPVILEGTFGWGWLSDELLAAGLDPHLASSAKMAAWRKARGLAKSDRIDADLLSELWTQQPRWWEVWLAPPAVRDQREWLRYRMSLVQMQTAVKNRIHAVLHRHGIIHGFSDLFGLGGRRYLSLLLVADDGRLPESGRLTLKGHLQLLDQLRRQIASATRVFRKQVRRSSTAMRLRTLPGICWILGYTINAEIGDIKRFRSAKHLCSYSMLAPRANDSAVEGEDEDTPKGRHVAHVGRRTLKWAWIEAAHGAVHKGGRFRAIFDRYTDGGKRNCNRGYIVVAHELCRIGYMLLKKEVDYDPSALPLRPGSKKRKTVKKKSIKMLKSSASRPGTGQPQDPMVAVVV

SEQ ID NO: 459296 - protein, 322 aa, unidentified
MKTYAGIDLHSSNSFIGVINQNDEKLHSRRHENNLKEIMKVLGKYKKSLQGIVVESTYNWYWLVDGLLEKGYKVHLANPAAIQQYKGLKNRDDKYDAFWLAHLLRLGILPQGYIYPKSLRPIRDLFRRRIIFVKQRTAQILSLQSMIARNKGVEQSASAIARFRDDFINQMFDSPHLVSTARHQMETIRFLENQIKEIQAEVDGIVEIDNAYQKLLTITGVGRILATTIMLEVGDIHRFKNVGNYSSYCRCVKAQSTSNGKKKGNNNRKNGNRYLAWAYVEAANHNKRNFLRARKFVERKTAEKNYTVAIKAQWLSRPLLIN

SEQ ID NO: 459297 - protein, 285 aa, unidentified
MQQDEVMVGVDVSGTQLDVALWPSGENFSVSNDMQGVEQLLTRMVEVHPRAVVVEATGGLESLLVGELCAAQVPVALVNPRQVREFARSLGQLAKTDRLDARVLAQFGHSAHRSGRLKLTQLLPAADAELKALVRRRRQLIEMLGAETNRRQRASKVVKKSIVATIRSIKRTLAELEQQLRETVKNSPAQQKKAAILEQVPGVGPQLARTLIAEVAELGQLGRRQIAALIGVAPHAHESGQFKGRRMIWGGRAGVRRTLYMAMLTATRYNPLGNLCTGGCAGAIG

SEQ ID NO: 459298 - protein, 358 aa, unidentified
MKYIGCDFHPSFQQIAMLDKETGEWIERRLLHAEEARAFYEELKGPVLVGIEASGNTHWFESLLARCQHQLWIGDAAEIARQDGRKQKHDRRSAKLILKLMLENRFPRIWVPTVAERDLRQLLIHRQHLVRMRTRVKNQLQHIALNQGWQKKHKLWSEAGLELLRSLKLDPWTQQRRDTLLEMLEELNEKVRPLDQAVEKEAQAREAVRRLMTHPGVGPVIALATVLTMGDVGRFPNSRSWVSYVGLNPSEESSGQRRRLGSISKEGNPFLRYLLVEGAISAARGDKSLARMYVRLKAKKHHGVAKVAVARKLAVRLYWMARTEKSYPEVVRTQGSLSHPVAEVMVEALNRPPASHQK

SEQ ID NO: 459299 - protein, 471 aa, unidentified
MDCIRNQVVRFSGADKPAKESGREAWRHNELSPLSMTVSTRGRLSIQKASSGRIPGGSTMQVVYARCAGLDVHKKTVSSCISVCESDGSKRQQVRVFGTFTSDLLALADWLKEHGVTCVAMEATGVYWRPVWAVLEGQFEQMLVNPQHIKAVPGRKTDAKDCEWIADLLQHGLLKGSFVPPTPIQDLRDLTRYRAELRQSQNRVANRLQKFLEQANIKLSSVASDALGVSGRKMLEAIIAGEDNPEQLAQLARGRLKSKRAELEQALEGRVRDHHRFMLAEYLDEWVALGERIKRMEVEIDQRIRPFEQAVALWQTIPGVERVTACNLVAEIGVDMHQFPTAQQLASWAALCPGNHESAGKRKSGRTRDGNKWLRRSLCQAPWAVARKKNCYLSAQFRRLAARRGVKRAVIAVAHSMLIIAYHMLKTGRSYHELGGDYLEQINKDQLQRYFVKRLQKLGLKVTVEPVLAAA

SEQ ID NO: 459300 - protein, 412 aa, unidentified
MEVMYPRCAGLDVHKETVVACVRVAAGSDTSHVVRTFATTTADLIELSEWLEENGCTHVAMEATGVYWKPVWQVLADSSFELILANAAQVKNVPGRKTDVNDATWLAELLAHGLVRASFVPEPAIQELRGLLRTRKQLVREKASHVQRVQKTLEEANIKLESVLSDVMGRSGRAIIQALIDGETDPAKLAALAHWKVRASTETLSEALRGRIKRNHRFLLRLHLQQIQALDAGIAEIDREVDDGLACFRDAVDRLSTIPGISQLSAQVIVSEIGTDMSRFATDAHLRSWAGLCPRNDESAGKRRSTRLRKGAPWLKSMLVQCAWATIRSKGTYLHAQYVRLRGRRGPKKAICAVAASILTAAYHMLKDGTFYNDLGPTHFDRRRPETQARRLIKRLAELGFSVELKSMATAS

SEQ ID NO: 459301 - protein, 364 aa, unidentified
MKKISTTTAKAFRKMEKLTIGLDLGDRSSWYCVLDERGELVLEQKVSTTPKAMEEVFGGMPRSRIALETGTHSPWVSRLLSELGHEVIVAHARNVRLIGESRRKDDRLDAKTLARLARIDHQLLCPVKHRSAKAQAHLTVIRARAGLVRARTALINVARGLTKSYGERLRGCSPRNLNKRAEGLSVELRTALGPLLEEIESLSERIREYNQRIEGIAQEHYPETALLKQVKGVGTLVALTYMLTLEDPHRFSKSRDAGCYAGLQPGRRNSGQSQPQMRISKEGDAYLRGLLVQSAHHILGPFGADSDLRRWGLKLAERGGKNGKKRAIVATARKLAVLLHRLWVSGEVYEPFYSSSRRVLVAAA

SEQ ID NO: 459302 - protein, 424 aa, unidentified
MKFKMQDKQNQLIERISDSHLVVGVDIAQELHVARAVNFRGIIVGDPLTFENNEEGFAKLLQWINQLKTLRGFSSAIVGMEPTGHYWINLSKWLYDQDIEAVTVNPHLVKKNKENRDNSRSKSDKKDALVIADMVKNGYYSFIRHSSETFEKLRVLMSNRDMTVKRLVSAINQINRWVDIVFPELRQVFKDVKGKGAMATLRLFPTPLELRSMKPVDVVDGWKSQMKRQPGIKKAQALIELAVHSVGTRQALDAYKLHLEQLIEEFDLATVQLERVEQEVTSLLKQIPFARKLLAIKGISEIALAGILGESGDLSGFAHGNSLLRHAGLHLSEASSGKWKGLIVLSKRGRSRLRRFLYLATMSLVMNNPDFKELHANNVNVKKMKKMKSIMKLIHKLARVLVGMARKNDSYRSEKIQSISPIAA

SEQ ID NO: 459303 - protein, 331 aa, unidentified
MKINETVGIDVSKLKIDAFIHNNKKFKVFENSRKGFKQTLKWVFKENKCAIANTLFIFEHTGIYSDNLSVFLSEENIQFSIVPGLAVKRSLGIARGKNDKVDAKRLALYAYRLREEIKQYVMPSDKLIKLKKLLSLRERMVKQRAGYKSSLKELKHFLKKTENYVLFSTQKKLINSMSKQIKVVDNETNKIIREDDELNELFRLLTSIKGIGAQTAMFVIVYTNGFTKFKTWRKFASFCGTAPFPNTSGTSINGRSKVSNLANKKIKSLLDMCAKSAIQYNPEMKIYYQRRVAEKKNKRSTINIIRNKLIARMFAVVERKSPYVDFMKYAA

SEQ ID NO: 459304 - protein, 338 aa, unidentified
MRVYAGIDLHSSNNYIGIMDQDYKRLFGRRQPNDLNNVLKVLEPFKADLEGVIVESTYNWYWLVDGLQEHGYTVHLANPSAIKQYEGIKHTDDKWDSFWLAQMKHLDILPEGYIYPKERRSVRDLLRRRLFFVKHRTANILSLQSTITRNLGIKISNNDIKKLNMDDAYKLFDSSNLVFMAQNNISAIKHLGKIIKGIEKEVKSQVQLRKEFVMLLTIPGIGTILGLTIMLEVEDIGRFSKVGNYSSYCRCVSSKRLSNGKKKGENNKKNGNKYLAWAYVEAAHFATRYIPRAQKFYQQKMAKANGAVATKALANKLARASYFIMRDQVPFDEDMLFK

SEQ ID NO: 459305 - protein, 387 aa, unidentified
MARKRTLSTLDTSIAYEAVGLDLAKEDAAIAAFGPDHEGPYLIDRIPYDKLYELLADMAPTLVAMEPCSGAHQIAEQIQELGHEVMMISGRHVQAWVKDHCNGQKTDLNDAFAILNLAYDRWLTPIRGKTREECRLLALQASYRQLKGQRTKTMVHVKATLHAWGFPIRAGSFNQKVLHELIDANREAFGDEVVETLHLMINRVHDLDHDIATVLKLLTEATKRDPRASLLRSIPGFGVLTTSRWCAVIGDIARFDFPKQTMAFIGLVPNNRITGHHTETSSGREARGQGRMSKRGDKMLRSLCILGAASLCLMVRNDRLPDCPFVASIKERLASPRPWFKVLVYVAAKLVRIATALLKYGETFSYEKAGISKAVLKQWELEQAKAA

SEQ ID NO: 459306 - protein, 387 aa, unidentified
MAQPNDLSKSLTPFVQGNTLVAVIELSLTSWLVGGLVPGLERQPLKKLEPGETALLRLLGRWKEDAVKSGRRIERVVVAYEAGRDGFWLARWLWTHEIEAHVINSSSVAVSREHRRAKTDRLDTAMLLRVFMGWLRGERGHCGMVAVPTLDEEDAKRPHRERENLVGERTRIINRMKAALIRLGIRGFKPELRKASVKLEFLRTPEELPIPPNTLDEIRRDIARLTIVRDQIKAIEQDRLERLEHAPSTGPCAMVRLLASVIGVGIETADMLVQEVLSRNLRDRRAVARYAGLTGAPDESGAKRREKGLAKSGNARVRRGLIQLAWRFLLFQKDSALALWFRSRTEGPSGARKTKMIVALARKLLIALWQMVTSGEVPHGVVLRPAV

SEQ ID NO: 459307 - protein, 385 aa, unidentified
MQKLNDLSRSLTPLNPDGTLIAVIEMSQSSWLVAGIVPGIERHPLKKLEPNEGELLRLLMRWRAEATKMGCTITRIAVAYEAGRDGFWLARWLRARDVETYVIHPTSVAVSREHRRAKTDRLDTGLLKRVFIGWLRGEPDHCHMAAIPTLAEEDAKRPNREREGIVRERTRIVNRMKSCLARFGVRNFKPTLRKAPERLATLVTPEGVPLPPNTLLELRRDMARLRFVMDQIKEVEEARAQRLEQAPQEKTHAMVRLLARVIGVGIETADMLVHEILSRSLRDRRAVARYAGLTGAPDESGSKRQEKGLAKAGNARVRRGMIQLAWRFLLFQKDSALAQWYRTRTERGGKKRKTMMVALARKLLIALWRLVTTGEVPAGVVLRAA

SEQ ID NO: 459308 - protein, 416 aa, unidentified
MEEPAHFAAHIGLDWSDQKHDICLVDAATGSQELSSIKHQPEALDEWARALRTRFGGGRVAVCLEQSRGSLIYALLKYDFLVLYPINPKTLARFREAFTPSRAKDDPTDAAYLVELLLHHRGHFKAWLPDDERTRELQLLVEHRRRLVGDQTRTSNRLTSLLKGYFPQVLQWFPDIRTELVCDFLLRWPSLAALKGVHRVTLLKFFRAHNSGRRDTLETRLRAIKEATPLVTDRAVVNSSVVMVKALAAQMKVTLAAVGEFDRQIAALCQAHEDFRIFASLPGAGRVYASRLLAAVGSNRGRWSSADELLRFSGVAPVIERSGKSSWTRWRYFCPKFFRQSFVEYAGESVRHSEWAKAFYLSQKAKGKSHQAAVRALAYKWIRIIWKCWQTRTNYDEARYLECLRKKGSALVPATT

SEQ ID NO: 459309 - protein, 376 aa, unidentified
MKKTVRFLGLDVHAETIAVAVAEADGTVRSLGTIANREEAVRKLVKKLGLAEDLRACYEAGPTGYVLYWQLTQLGVECSVIAPSLVPVKAGDRVKTDRRDAEKLARSFRSGDLTAVWVPDAGSEALRDLVRAREAAKQDQLRARHRLNKFLLRAGRRPAMGVKAWTLPHMAWVRALRFEQPAQESTRLDYLHEVEHMGERVKRLEQAIREAVKLAAPQIQTVIAGLQALRGVAELSAVTIVSELGSLTRFAGPRQLMAYSGTVPSEDSSGKRTRRGGITKTGNAHLRRIAVESAWSYRLRPGIGPELRRRQQGVPEEIKEIAWKAQNRLHKRYVKLSLAGKDQRKIVTAVGRELLGFIWAIGVRAEAAGRQMAAAG

SEQ ID NO: 459310 - protein, 353 aa, unidentified
MADKYVGLDVHQSSTVAAVHDEKGKSVMESILATEAEAIRDFLKGLRGTIRVTFEEGAQATWLYEMVKPLVAEVIVCNPRMNKLLAVGNKADRVDAHKLAELLRCRQLKPVYHGTPGVRLLKELVHSYDSLVSDTTRVMNRMKAIYRGRAIRCAGRDVYYQRNREQWLEKLTEPGVGQRARILYQQLDTLRGLRREAKKAMLKESRRHAAYGILKQIPVLGPIRIAQILAKVASPHRFRSKRQFWAYCGLAVVTRSSSDYQFREGKAEKRKRAPMTRGLNPNFNHRLKYVFKSAALDGIHQAPFESYYDRLMAKGMRSERARLTLARKIATVTLTLWKRGEGFDELKVNEQAA

SEQ ID NO: 459311 - protein, 371 aa, unidentified
MNHVTSIGLDVHARSITAVALDSTTGEVRSQRFGYSPAELASWILGFESPKAVYESGVTGFHLVRTLRALGVDCVVGAVSKMHKPAGDKRRKNDRNDAEFLARQLLAHNVVEVFVPDEETEAARGLSRALEDIREDLTRAKHRLTHLLIRWGHVWDERTPEGKRRGTWTKAHWQWIRRVELPEPAANETLDFYISEVRHMEAQKRAIEKRIAQHASRPRWAGRVEALRCMKGIETMTAFAITVEAGVFSRFDTARSFAAWLGLVPSEHSSGERVARGGITKAGNSHLRKLLVEASWHYTRATEERKRALNDPGVPFAISSHAAAGIKRLVKRRRHFTRDLRKRPVVANVATARELACWVWALGRMSEGALA

SEQ ID NO: 459312 - protein, 357 aa, unidentified
MRVIGLDIHRTFAQVAIFNDGKLQDHGRFAMDREAVLGFAAKVPHKDDDVVIEATGNTAIVARLLQPYVHRVVIANPLQVRAIAWAKVKTDKIDAATLARLHASGFLPEVWMPTEEVELQRRVVAERTQLVSQMTRLKNRIQSILHANLLPRETGHVYRLNGQARLQSLPLPADQMRTALRHHDECNVWAESSLLLTARLAQRALHDPDVQRLMTIGDIHRFSGPDKLVSYLGLNPSVHQSGDHPAFHGHITHQDRGHARGMLVEAPWTLSSSPGPLSAFFHRISVKRGKQVAAVRSLQSPQHVSLRYSSGTCLPRSRTMPGPDRHCFNSNSERFSLLPAINLGLAERSRGLPVTTA

SEQ ID NO: 459313 - protein, 377 aa, unidentified
MSNVRFIGLDVHAETIAIAVAEPGGEVRSLGIMPNRPESVCKLMKKLGPAAHLRVCYEAGPTGYVLYWQLTALGVQCEVVAPTLVPVKAGDRVKTDRRDALKLARSYRAGDLTPVWVPDAAHEALRDLVRAREAAKKDQLRARHRLGKFLLRHGRRPPTAMKAWTQAHLAWVKSAVHFEHAPQEATLLDYLHEVEHVAARIERLEAAITVAVQTAPVRMRAVIDALQALRGIALVSAVTIASEVGELSRFTKPRQLMGYSGAVASEDSSGERTRRGGITKAGNAHLRRVVVEAGWAYRHRPSLGPALRKRQATISAEVKEIAWKAQHRVHHRYRTLTARGKCKQQVVTAIGRELLGFIWAIGVHVEARMDDGRRIAA

SEQ ID NO: 459314 - protein, 475 aa, unidentified
MNIKGTKKKNQVVTANIFEQQELLKKAEVVKENLTASTWRELETNGKFDKNKKLSFISDDMLILGCDIGSETHYMRAIDTRGRELSKSAYSFNKNQEGFQSAKEWAVRIAAEHDKSQIVLGLEPTGHYWFCLATWMIANGISVVQVNPYAVKQTKEVEDNSQLKDDRKDPKLIANLVKDGNFGMPYLPEKIYAELRRLSMFRDQLNEDRIRTINRMHREMKIYFPEYKDALGKVDGAFSLELLKEAPFPDELTALGEEGIRQIWHAAKLRGRGYSRAREILQYAKASVGIKDGSIASKAAVKWFVQKIMELDVELAVIENQINQKCQEIPHTGNVLEISGIGENTLSGILAEMGDISRFDDVKEIQKLSGLGLVACSSGKHKGETKISHRGRKRLRYWLFQAAKSAVAHAEEFKELHMYYTTRADNPLKKMQSLIVIACKLLRIIYTILNTGTKYAPKKMLMDIRRPENKEAIVA

SEQ ID NO: 459315 - protein, 423 aa, unidentified
MDTMHERVAGLDVHKATIVACVRIWAGAKVERECRTFDTTTDGLSALLAWLVDCRCSHVAMEATGVYWMPVWKILSDGAFSLIVANAAHIKNVPGRKTDMNDAMWIADLLACGLIQASFVPEEDVQELRSLMRTRKQLGREQTRHVQRIQKTLTEANIQLDSVLSDIMGASGRRIIEAMISGVRDPRKLAALASVQIKATPKQLYDALHGRLTDHHRFLLKLHLQQWDGLDATIREIDREVEARIARGDKEVKAGEAPFRDLIKLLSTIPGVSILSATTILSEIGRDMSRFPTAGHLVAWAGLCPGQNESAGKVKSTRLRKGAPWLKTMLVQCAWAAKRKKDSYYKAQFFRLQSRRGPQKAICAVAASILTAIYHILKDGTPHRDLGPDHFNRRSTEGQAKRLVVLLTKLGFDVQLQRKAEAA

SEQ ID NO: 459316 - protein, 364 aa, unidentified
MKEDGGIGEQYEMANAEDSWAEFRTRYLYLKPEISLEVSTSGKYVARMLRDMGFSVHLADPVKLALIFNTAKKNDKEDSYKLAKLLRLGELPEVHLPTRFSDDLRSIVRYRKSLGEEITMIKNRVHAILTKNGISINATDIFGKRGLREIDSRSYKLTTAERIIMSDLLSRVSDLMGKEIALEDQIAVMVSGNEDVRLLMTIPGINLYSAACIISEIDDVSRFGSKEKLASYAGLVPRQDQSGNIDRRGHITKHGPSMLRFILVNAAHIAIKYSKRMRTKYLSLVRRLGKNRSIVAIARHLLEVVYAMLSKRVEFVDNIDSLTERKIAAMYMRSRNPHRIRELEQSIRILRENRLGRLSEEHFS

SEQ ID NO: 459317 - protein, 338 aa, unidentified
METYAGIDLHSSNNFVGVINDKDKILYGKRHANRLDDVLRALDPFKDRLTGVVVESTFNWYWLVDGLQEHGYRVHLANPSAIKQYEGLKHTDDKWDSFWLAHMYRLGILPEGYIYPKEHRAVRDLLRRRLLFVRQRTAQILSLQSMISRNLGFKMSNNEIKKLKPEDIEKLFDCANLMFMATNSWAAIEFLKHIIKGIEKRVKSQVKMRKEFEMLLTIPGIGNILGLTIMLEVGDIGRFPAVGDYSSYSRCVESKKISNGKKKGENNKKNGNKYLAWAYVEAAQFSRRYCVKAQSFYQSKAAKTKPVVAIKALSNKLSRASYYIMRDQVAFDEDKLFS

SEQ ID NO: 459318 - protein, 342 aa, unidentified
MTYYAGIDVSLECSSVCIVDASGKIVREAKVASEPEALIGWFGSLGFEVRRIGLEAGPLSQWLFAGLKEAGLAVELLETRHVRAAFKTMPVKTDRKDAHGIADLMRLGWFRPVHCKSMGAQEVRAVLTARTLVQAKLHDIEMSLRGILRGFGLKVGRTTSNRFAGRIKELVGGHASLQVIAEALLGVHAVLLREFKGFEKRVRMMAREDGNTRLLMTTTGVGSVVSLTYASAIDDPGRFKRSKMVGAHFGLAQKKYQSGETDITGGISRCGDESVRTALFQAAHIILTRPVKSSVLKSWGHRLARRIGMKRAKVAVARKLAVIMHRMLVEQKPFNPAAAAAA

SEQ ID NO: 459319 - protein, 317 aa, unidentified
MQQHITEDVGIDISKSKFDVSFPDRPKGVVYKYTPAGMKKFIAVLIKFQPKRICLEATGGWENKLVACLHKHNFPVSVVNPRLIRDFARAKNQLAKTDQIDARIIREYAQVMNPRLTPPLTDAQQKMREFTSRREQTSKTIIQEQNRLETTVDREVIKMIEQSIEFHKEQLRLIEKKLKELIDADEESRNRSKILQSVPGIAGITAALLISDLPELGSLNRKQIARLVGVAPTNRDSGTLRGRRTIGGGRVRIRNGLYMPTVVALRHNPIISAFYKRLVKNGKPKMVALVAAMRKLLIILNTMLKEGKQWEANMIKL

SEQ ID NO: 459320 - protein, 397 aa, unidentified
MYIVGIDIAKRKHEAAVIDGEGTVIIKPFSFTNNCSGYNRLLAMLTKAKLPLDEVSFAMEATGHYWLALFTRLQKEGFRVQVINPVQTNSIRSFYIRQAKTDPRDALLIAEVIRFGHFSESTLHPENIYELRELCRGRHAIVSMQADVKRKVVALLDQVFPEYETAFTNMFSDTSMAILQTCPTPKELSEMPLEELCHLIEVSSHKRFRMAKARELQELARNSFGFAMAGDVFSTMIRLYAKHLDFLKQQVREMDHKIAEIMETLDTPITTITGIGPTLGAYILSEIGDISRFSSAAKLAAYAGIDPTMRQSGEYNGVRNRMSKRGSPYLRHAIWLAASSAVLHDPALKLYFQKKRDEGKPYMASVGHACRKMVSIIYAVMRDNKAYTPCIPNEISA

SEQ ID NO: 459321 - protein, 344 aa, unidentified
MNSVYHTELSSLEETRGQFNGGKADIKLGIDVHQDFYVVVMQEGGSNPKPPQRFQKQAFLLWAAKLKSRSAEVHAVYEACGFGFSLQRQLSQLSIHCYVSCPQKLDEHNKRVKTDSLDAKALCLRLDRFVRGNREALAMVRVPSEEEERSRAIHRQREQLVKVRKMLEAQGRSLMVNHGIEPVKNWWKGNNFAALPLPAWIKELLQNSQPILIALQQKISALTLQLQVAAAFNQPRGLGAMTSVMIDREIGDWHRFNNRRQIASYTGLCPGEYSSGHTRLQSCVTKHGNPRLRAALVELAWRLVRFQPNYSAVRKWKERLAKGTLTTGAARKKAIVRSGPPAGH

SEQ ID NO: 459322 - protein, 401 aa, unidentified
MKYVLVLDVAKSKSMFMLSSDVGEVLLEPTEYIHNKSDFERIDSYISKLNIKDNLTVIMEATSIYHKAPERFFKENNYHVIVFNPLIGKEITNTIRKTKTDKQDCIKLTNLFWKGSIPDRNYTEDEIYTKLNELSRQYYHLDEGLTRHKNRYKELLHLCFPEFELCFKDGKIYDLTALNFIKEFPHAYIIKDKRVDALAYNMANTNDRHFNYYKRKANIIKEYAINSYPGVSENSKDVDNLKQLANIIIEIAKQKEIIKEQMIELAKQTKNFECINSLFGIGELSASLIIAELKDITRFNNIKQINASCGLDPTIVQSGKSIDYHGPISKRGNRYARKILFNCSRNIVTLSAKCDKENPIYVYYQKKKQEGKHYYACLTACSTKLIRIIYALCMNNSTQQN

SEQ ID NO: 459323 - protein, 428 aa, unidentified
MNCNTQNAKIASITEKTLIVGIDVGSETHYARAFDWRNYEYTKKPLEFSNTEAGFQTFKAWMEDMAEKHGKTAVIPGMEPTGHYWFALGKFLQDNGMKLVHVNPHHVKKSKELDDNNPNKNDRKDPKTIAALVNEGRFSYPYIPTGIYAEIRSLSNLRFQTQEELTRIKNRLARWFAIYFPEYKDVYGDLKAVSGRMVLKEAPLPEDIRKLGVEGVNRIWRDAKLRGAGMKRAKTLVTAAEHSVGSKEAPEAARMELKNLLDDMDVYTARQEGLLRNIEEKLKEIPYIDNLLAIKGIGMVTVSGFIAEVGDIGRFDNPKQLQKLAGYAIVANDSGKHNGESRISYRGRKRLRYVLYEAAISLVGKNAEFREIHEYYRTRKENPLKKMQSVVAVACKILRIFYTILTKGVEYDPKKLLGDIRRPQVQAA

SEQ ID NO: 459324 - protein, 349 aa, unidentified
MASMVGGLDLHRGQITFELADAASGEVWRGRLWSPDRQRVRRWLAEEVAPRAQGGEVEVAVEGCTGWRFVAEEITAAGFGVQVAEPAETMARRGRKRRAKTDRADAALLRQLVAAGDVPQSWIPPPIILEWRERVGLYMTLAEQRTAWVQRIHAECYQHGVAVPEAEIRSPTTRSWLQGATLELSAAARQRLATAYCMIDALDAQAQPLKKQLTVFGTHQPACRTLAATHYGIGGLLAVAIWSELGDCRRFSRSDQAVRHSGLDITVDQTDRRRAHGHLSRQGSPLLRWALFEAAKNSSRRTAPDHPYYAAVQDRHDGKIATLSIARKLARRCYHTLRALDPPEVYALP

SEQ ID NO: 459325 - protein, 435 aa, unidentified
MHYIGLDVHKRVVEAAILDEAGQLVHRERLACTREALERFAEERLTAQDALVLEATTNTWAIAAILAPHVGRLVVSNPLLTRAIAQAKIKTDRIDASVLAQLLRAGYLPEVWIPDPATRARRELTQRRAALVAQRTAIKNRLHAVLHQRLLHPPVADLFGPTGRAWLAALPLDELGRTIVDAELRLLAASEAEIEALTQRLARDGYDEPGVRLLMTLPGVDLAVAQTLLAALGNVRRFRTPDHAASYLGLVPSTHQSAERCTHGPITKRGRSQARWMLVQAAQHLGRHPGPLGVFFRRLAKKKNRNVAVVATARKLVTIAWHVLTSGEPYRYALPRTTDAKLARLRVAATGKPRRGGHTKGAPRPAAYGTSQGTRAIPALDDLYARENVPGLQPLAPGEVRMLRDTGTADFAQSVRLTHRVPRRGKDAKKELTRS

SEQ ID NO: 459326 - protein, 461 aa, unidentified
MLGRDENTSSGNSRRQLAGLPIIRGNVAGIDLGSERHWVCAPTRDRNGREVASFGATTAELLSMAEWLKARQVESVAMESTGVYWIAPHEVLEGQGLQVLLVDTRQLAQVPGRDKKSDPTDCEWIQRLHSCGLLRGSFRPEEAVCMLRTLVRDKANLVAERSDWVRRMQKSLEQMNVRLHRAVSDSDGVTGMAILRAIANGERDAHKLAQLRDRRCSKTEPEIAEQLSGHWREDHLFSLQQALKMYDAVQERIAAYEQEILRKLGEMEREEPHEPTPPLQNANKARTIKNRGQEAKRQALYRMSGVDMTQIDAMGVETVEVVVSEYGSDLSRFPTESQFVSHVTLAPRVPKSGGKPIRKKKPNSASTRVAAALRMAALSLRHSQTALGAYYRRIAQRRGGDIAVFATARKLATLVYRLLRWGQPYVDEGAEAYENRYRQHRIARLAATAKQLGYQLTPVTA

SEQ ID NO: 459327 - protein, 356 aa, unidentified
MQTQGTKKIDFTGKELFIGLDVHKKSWSVTIVVDGMEHRTFTQPPDPETLQNYLQRSFPGGNYHSAYEAGYCGYGIHRRLNELGIKNMVINAADIPATQKEKLQKRDPVDSRKIARGLEKNSLHGIHVFDRNLEELRSLNRTRFYLMRDLRRSKNRIKSFLLYYDIPLPGEFDNNQWTLKFIAWLKQVKMQTSGGQDAFSHLITSYEHHRQQLLILSRMVRLRISQHDKELYNLLKNISGIGPLTASALITEIGDINRFPHIDDLGSYVGLVPRVRESGDTTHTGGITFRCNNFLRVLIVEASWQAIRHDPALMQYYHHRLVNSKGHKVIIKVARKLLNRVRYVMKNRKPYVTGVA

SEQ ID NO: 459328 - protein, 314 aa, unidentified
MATPVQTTFIGIDVSKEYLDICYDPEVPIERIANRPRDLNRWLKSLPTGPVAIALEATSTYHLELAMRAHKAGHTVYLLDGYRLSRYRDSIAQRAKTDAADARLIQRYLAHEQPALRPWNPPSKAYSRLQSLLRRRAVLVKARTALSQSFAVLPELRRTGKALVKQLNNIDKRIVRELIKTLNEAGWGKHYQRCKDIEGFGEVVSTAVVTAFHRGDFKNSDAFVAFFGMDVRVRDSGKARGKRKLSKKGDPELRRLLYLAAMQAIKHETWKPLYQRYLDRGFTKTQALVIIARKLLRIAFALMKNQDEYRPKAA

SEQ ID NO: 459329 - protein, 337 aa, unidentified
MDYFAGLDISMDETHVCVLDREGVVVYESKSESTAAAIAIELSKAPSCRRIVFETGRMAPILFHGLSQLSLPVVCVESRQAYQALKSLATHKTDRNDARGLAHLARTGFFKPVHVKSLQAHALRSLISARKKLVGQRVTLENQIRGLAVVFGVRLPRALATAFIDNALRASEGIAGLSAAMRGLIAARTAVMTAVAAIDADIRRMTRASAACRRLMTIPGVGQLTALAFVAAIDDPSRIRRSRDIGAYLGLVPKRYQSGEVDYTGGISKCGDRRVRTLLYEAANVMLTRYKGQLKLKDWAFAIAKRSTMRKARVALARRLAIIMHAMLRDGTEFGSA

SEQ ID NO: 459330 - protein, 317 aa, unidentified
MSNPESFVGIDVAKAWLDVAWLDGATLRIDYTDEAVAGLVERLRSQWPTLVVMEATGGMETALASALVAAGGAVAVVNPRQVRDYAKACGRLAKTDRIDAQILAAFAAAIRPQVRALPDEHTRALSDLLARRRQLIDMRVQEKLRLPRASSVQRTSLREHIAWLDERIDRLDVELTHALRSSPAWRDKDDLLKAIPGVGSLTRATMLGLLPELGTLSRRQIAALVGVAPFNRDSGRQQGQRVIWGGRAQVRRTLYMATVAALRCNPVIRGFYEHLRTQGKPAKVALTACMRKLLIIMNAMLKHHRAWSPALDTQHGC

SEQ ID NO: 459331 - protein, 407 aa, unidentified
MNAVGIDISKGKSTVAALRPMGEVALLPQEFLHTEVGLEQMAYAILALGENTRVIMEATGRYHEPVAAALHAYGIYVCVLNPLLIKQSGGGSIRKVKTDKADALKIAKYGLDNWVDLREYTPMDTIRQQLKLCSRQYNLYMKTVVSLQNNLISLTDKTFPGVNELFSSPERADGHQKWVDFVMTFWHCDCICRASEKAFTERYQKWCKRKGYHFSAEKALDIYAGSCGHFTTLPKNENTKLLIVTAAQQLLAGKTTLATLRAEMTRLASQLPEYETVCAMYGVGKITAAQLMAEIGDVRRFPRRSSIVGFAGVDPGVDESGKHSAKSVPTTKRGSPHLRKTLYQIICTYLKKSPADEPVYQFLDKKRAEGKPYFVYMTAAQNKFLRIYYARVKECLEAFDTEPAKQS

SEQ ID NO: 459332 - protein, 518 aa, unidentified
MARPRYSKKPRGFLVQKPLGQFTDRVRAVGPEHFGVVSIDCAKARSKFLLCDFYGNVLIEPTPVEHTQSELRAACERVRSAMGVHALTDIVVAIERTGTYHRPVQDAFRRAHFETRLVHPFASKQFRQPADPDNKTDDADLGGIFRAAVNGFGLLQPLWPDVYLELQQLSRQRRDLVCKTTILRCQIKETLHQLMPGYAELFRDHFFDTPVALPLARVTGSAQAVLDAGLNGLRQRVPQGLHYRMATLARILDWAGTAAPSQNPWQLLREQLDHLADDFLQKAKEIRGLEQRLAHLLVMTPYVQLLALPGICVVSSGELAAEMGPIEHYADGNRITGRAGLCPSRYQSDKVDSHGPLRRRANRRLRAALLRIADNLIRHNHHYRARAERWQRQNKDPRWIRVKVSKSFSRLVFVMLTGRCLVQHPACQPRHSICDKLLGFHCERQTDIQCALADIERLSAQLSGRTQQEERQMLQNQLDDPRCRRHRGPQAIGKIIPLVLARLGIRIVQSQTEGEDPN

SEQ ID NO: 459333 - protein, 370 aa, unidentified
MSESTTIRYVGLDVHKDSIAIAVASSDGKPPVSLGSVPGDIPALIKRLLRLGPAASLRCCYEAGPTGLGLVRRLKEAGIACQVIAPSLVPVQPGARVKTDRRDAVKLAQYLRSGDLTPIHVLDPATEAIRDLERARDDAKRAERAARHRLSKFLLRHGRWFEGRSTWGPAHLAWLAKQQFDNSAHQDVMDDYREAVELATARVGRLTVRLAERVATWEEAPPVTALQALRGVDLVSAATLVAEVEDFRRFGSATELMSFVGLVPSEHSSGGSRRQGRITRTGNGHVRRILVESAWHYRRRPRMSKAIRARNDKVSAGVRAIAWKAQHRLHKRLSRLTGNGKPATRAVTAVARELVGFVWAIAREEVLLAG

SEQ ID NO: 459334 - protein, 353 aa, unidentified
MNNIKYVGMDVHKLVTVIVVINEQGQVESLTQIKTKVENFRDYFRGLSGTTHIVFEEGSWSAWLYKLLKPLVSSVTVCETRHNKLIGAGNKTDNEDAEILARLLRLGELKAVYKGDDQLQQLRDLFRAYDNLVEDSTRVQNRLKAIYRGRGIECDGHNLFRLDQRPDWIAKLPEQAARFRAESLLKELDALQDLRKEAKTKLLIESKQLPDYSLLLKLPGIGPIRAASLLAIVGRPERFRTKRQFWPYCGFAVVTHTSAEYIDIGGRILKQQKKASTRGLNRNHHPRLKALFKGAALTTLQNETWRAYYDGLVKKGTKPELARISVARKLAAITLALWQRREEYDQNKVFAKA

SEQ ID NO: 459335 - protein, 418 aa, unidentified
MADGTVSWFAGVDWGSERHQVCLVDAAGKVVGERAFRHGGAGLAALCDWLVSIAGEPGRVAVAIEVPHGPVVDALLDRGFAVHAINPKQLERLRDRVSLAGAKDDRRDARVAAGGLRTDPHLFRPVEAGDPAVIALREWSRLAEELQQERVRLGNRIRQQLWRYYPQLLAVSDDVTAEWLLDLWTLAPTPAKAARLREATLARLLQEHRIRRLDAERALGILHQPAIAVAEGVTEAAVLHLRSLVARLRLANREFHQAERKLDELCAILRESPAGASGAPPDATVLSSLPGVGTVTLATLLTEAAGPISRRDYAALRTLSGVAPVTKRSGKSCLVTMRYAAQIRLRNAVFHWARVAVLNDPTCRSRYAALRARGHSYGRALRSVADRLLGVACVLLQRQALFDPAHDTRAASQPRAVS

SEQ ID NO: 459336 - protein, 401 aa, unidentified
MEGPIVSIDVSNGNSHYMCFIKNNKRFGKVKKIDHDIEGFKRLLEDIQKLEAETNEKVCAVFEATGVYTKPLERFLSKNSIKTYIINPLESARKRKEEIHNKKTDKLDPISISKVYYDKEEMMELKKKDGTYNWLRKKNRLYEDQLNHLRKYKVTFQNQLSICFPGYLDLFKDGYSDIPMTILKKYPHPDLLKNKKAETVARYLEKNTCHTHKISLEYALKIIGFAKKTYPGCEKDDVEVEIFKILLDKVIETQRECEKTLNEMITVASTLEEYRYILSIDGIGPNLAARIIAEIGDIEEFKSREALVAYAGLDPHIYQSGDQDGKHLKISKKGNKYLRCLLFLAIGCSIRGAKDNPVNRFYQKKKQQSNPLNSKAAKTACTAKLLKIIYGICKNKTTYER

SEQ ID NO: 459337 - protein, 354 aa, unidentified
MLKYSLGIDISKKDFHACLSAIDKEQQVKVKASRKFANQQGGFKELLAWLNNNKKESAIPLVVVMEATGVYYEGCALFLFQAGMSVSVVLPNKAKKYIQAIGLKTKNDKIDAAGLARMGAEQCLELWEPMDSFFYNLRALTRHHQSLQELRTNTNNQLHADRHSIYSNKVVMKQLKKLITTIDKEIEVLEPEINKHLYSKPEVAEKVKHITAVKGLGTLTVATILGETNGFALFKSIPQLVSYAGYDIVENQSGSHKGRTRISKKGNSRIRRVLHMPAFNMIRYDSGDFKPFFERILSRHNQKMKAYVAVQRKLLILIYTLWRKNQAFGQNTSGDENTVSSFALAYGQNEVAPA

SEQ ID NO: 459338 - protein, 449 aa, unidentified
MEGNGLPVLRRNVAGIDLGSTTHWVCAPTVDGTAREVECFGATTPELERLAQWLQQRNVESVAMESTGVYWIPPHEVLERHGFEVVLVCTREFAQVPGRKKTDRIDCKWIQRLHSCGLLRGSFRPPEQVCMLRTLVREKATLVAERADWVRRMQKSLDQMNVRVHRAVSDIEGTTGMAIIRAIVKGERDPGQLAELRNPGCRKSAKEIAEQLSGHWREDHLFSLEQSLKMHDAIDERIQAYQTETQRRLAQMERADCEEQQAPQLKNKNKAKMIRQRGEEPMRQALYRMSGVDLTAIDAVGVGVVQVVLTEYGPDLSCFPTEKHFVSHVTLAPKKAVSGGKPLKKKKRGSASSRVSAVLRSAALSLRHSQTALGAYFRHTAQRLGADVAAFATARKLATLIYRLLRWGKAYVDEGAAAYEKRYQTARINRLHSTAAGLGYQLVAKPMNP

SEQ ID NO: 459339 - protein, 342 aa, unidentified
MQITTIGLDIAKNVFQVHGIDASEKVVVRKQLRRSQVLAFFRAMPPCLVGMEACATAHYWARELTKLGHLVRLMPAKDVKAYVKRNKNDAADAEAICEAVRRPTMRFVQIKTAEQQGRLMLHRARDLLMRQRTQLINALRAHLAELGIVAAQGREGIKELLRIIAGEEDARLPVDAHTSLVVLAAELQAMQTLIGSIEKRIMAQHRASEASKRLESIPGIGVIGATAIAATVPDPKVFRSGRDFAAWIGIVPREDSTGGKRKLGPISKRGDRYLRRILVVGACAVLRYARQQPEKYPWLTQLLARKPFKVVAVALANKMARMAWALLAKGGTYRAPALAAAA

SEQ ID NO: 459340 - protein, 401 aa, unidentified
MSKKNTRNALDPSLSYAVIGLDLAKADCAVAAVPCSDDELGLIDRMDYESLFEQAEKLEPTLFAMEPCCGYSQISLRLQNMGHEVKVISGHAVKNWIATHKSNQKTDLNDATALAKLALYDHDLQPIRVKNVEECRIASVQAIRIQLRTQATKSLGCFKSLCQCWGIVIRRGSLNTKKMAEAVAAVEKLLGAEVASSLMILRDAYKFTMKKINALDKLLDALVEANEQARTMKTVLGIGTQTAARLAVTTGDIKRFPMPRSYVAYFGLAPRNIITGHSGTPSPSKRGALKPVSSRGQGKVSRRGDRVARSFIIQGAATIYMLYCKDMLPECQLRRWLHEQIKRGKPYGKIIVSLAAKLLRIVWALLTYGEKFDSHKAGVPRSVLAAMEKPLKHDAAAESAA

SEQ ID NO: 459341 - protein, 407 aa, unidentified
MPEQVVTTHVVGIDIGMESCTMSCLTLDKRQVIKSTPFANTLQGFDRLFERLEGLGVAPKEMLVGLEATSRYGENLLQVLLKRGYQVCLLHPAQMHAFAQQRGLRAKTDQLDAVTIARALLSGEARFGYVPNEQVATYRELMRLQKQLSDDVVRYKNEIHALLVVLFPEFMQVFADPTRPTALAVLKRYPSAQAVAQTEVEVLGKFLRDLAPRHYGQPTAQELVGLAKASISSGVAIAARSSSLRILCDQLEHTQKNLEQLQREIDQLLGQDPKATGLLSVPEFGSTTVAVLRAELGDLARFRRIDQVVAYVGLDLQVKQSGKWKGQTKLSKRGSGRVRRILYLAALRSIHLEASPFGAYYQRLVARGMKKGMAVVAVMRKMLIVAVHLIQTEESYDPGKVAMQAGS

SEQ ID NO: 459342 - protein, 345 aa, unidentified
MIIGCDFHPSWQQVSWLDTETGGCGERKLVHATGDAKMFYQQLAAPALIGMEATGNSQWFIELVQDLGHEIWIGDAAQIRASYVRKQKTDKRDAAHILKLVVEERFPRLWAPNREQRDLRQLVLHRHKLVEIRSRVKNELQHLSLNKGMQRKAKLWSQAGQKLLRELPLKPWAACRREDLLGLLAMLNEQIGKLDQAVQQAADEHPQARLLMTQPGVGPNTALAYVLTIGDVSRFPRGKQVASYLGLIPREESSGGRQKLGAISKQGNRLLRSLLVEAAQIAVRFDPGMKKQYLHRCHRKPKGVAKVAAARRLAVRLYWMLRTQKPYPEIVRIESSPRVPLVGAS

SEQ ID NO: 459343 - protein, 348 aa, unidentified
MNALHYIGFDVHKKTISFCVKTAAGEIVEEGSLLAQRAVLRRWAAARPQPWRGALEATLFSNWIYDTLQPYGGQLEMAHPAKMKAISAGKKKSDTIDARTIADLVRCNLLPACYVATPQIRELRRLLRYRSLVVSEAVRMKNKMAGLLMETGALYVKEKLHRKKYFASLLEELEEVPESVVDLLRLSRGALEMFESTQKRLVRELLAYPELAERVERLMTIPAVGEITALTWALEVGDPQRFHSSSDAMSYCGLTAALKSSAGKQQRGPISKQRNRWLQTTLIEAAKLAPRWNPQLAALHARELERGHRNRATLAVARKLVAYLLAVDKSGQPFRVRAPSEVPTQKAA

SEQ ID NO: 459344 - protein, 320 aa, unidentified
MSNTTLGIDVGKFELAIALRKDGKFTDKLVENNSKGFQKILKFLEKNAPEAEVYLEATGRYGESITNFLFAHGFDVKVVNPLKIKAFSQLKMSRQKTDKVDAQIIAEFGAKFGGRSYTPIAENLKELRELYRTNCALKDELTSCKNHLENKELIALSVREIWENIVQKLEEEIKNCSEKMKKIIEEDKELKVKKGLLIEIPGVGEETARAFLAEVPRLNEFRTARELAAFIGLTPQHRFSGSSVRGRPRRSKMGLKGLRKALYLPAITAMRFNPSLKIFSENLRNRGKKGKQIICAVMRKLVHIIFGVLKYDFHKLALDL

SEQ ID NO: 459345 - protein, 323 aa, unidentified
MDQQRILGVDVGRDHLDADTLPPSPPRRFANDAAGIAELVAWARQFRPDRIIFESTGPYQKAAVGALLAAALPAVVVNARQVRDFAKALGILAKTDAIDAAVLARFGQVVPTVVRPLPTPDLQAFQELYDRRGQLVRMLAVEKNHRHAATSAKIIQNIDTHLRYLEKQIRSLEDRMDRFVETAEAFRAKDDLLQSIPGVGPQVSRTLLAYLPELGRGTRQQITALVGLAPFNDDSGTASHTRHIRGGRGKVRLGLYQAAVVAIRHCPSMKDFYVRLKQRGKASKVALIAVARKLLVLAHALIRSMQPYNPANSGCPKKCLTAI

SEQ ID NO: 459346 - protein, 332 aa, unidentified
MMAQNDCVVVGIDVAKDKVDACIRSLSQRQTFASTAEGQRALIRWLRKHRVGKAAMEASGGYEQDWAKALREARIEVRIVDPKRVRSFARSAGRLAKNDAIDAEMIAWFAETFGEAPSQAYDAARDKLVQIVRARQSLLDLQTSLQNRGEHAAPEVVQKMQARLLKTIALEVAKLEAAITAMIKATPHLAELAEIIESVPGLGKITSAGLVAAMPELGQVSNNIAAALLGVAPYDDDSGQRRGDRHIKGGRRKVRNLFYMACLGAATRHNPMLKAFYDRLIAKGKKPKVALTACMRKLICILNTMIARREKWDATRYKMTDPARLPPSACPA

SEQ ID NO: 459347 - protein, 423 aa, unidentified
MNSSTLCVGADIHQDEIVLRAVDKAHGHEVIERFRVTNNLPGAQSAIATIAEVARQGGYTRIEIGWEATGMLWIPFHRTLSASLLLQPFELQLVCFNPQLVANFKDGLVLRKPKNDQRDAWDVAARLRFGELPISYVPDDFWQGLRRLTRYRFQLSRNLAREKMRFQSYAFLKCSDWKRVRPFADLFGATSIALLTEFTVAELKAMTHDQLVDLICHRGRGRFHDPTATARAVREALQTSYPIDPVMDEMVTATLAAAWEHIRSIRRLMKRLDQQIARSIDPVPNPLLSVKGLGSVITAGILAEIVDISRFPEHKQLAQYMGLAWEKRSSGRFVSQNTRLTKVGNKYLRYYFILGADRLRQYNLEYKAYYWRKYNEVSKYQHKRALVLTARKLVRLVHALLTKNVPYVRPRTPLSFPGDELLR

SEQ ID NO: 459348 - protein, 477 aa, unidentified
MNKKQGDNLQPPKAKSKRRRRNKGMCLEDRPVLEPNAAGIDVGAREMFVAVPPGRDENPVRVFATFTEDLERLTDWLEQCGVTTVALESTGVYWIPLFEILEQRGIRPCLVNARHMKNVPGRRTDWHECQWLQFLHSVGLLRAAFRPGQDVCAVRTILRHRNELVAAASQHVQHMHKALTQMNLQIHHVISDITGLTGRAIVDAILAGQRDGAELAKLRDPRIKADTETIRKSLEGNWRPEHLFTLGQSRDLYRIYQQQIVNCDLEIEKMLQGFAPRIDPGEKPLPPDRKRNRAGSKRRRKNGHPHPEFDLRTEAYKLFGVDVSQIPGLEENALPLFSEVGRDMSRWPSAAHFVSWLALCPDNDISGGKLLWRGARRVKNRAGHLFRMAAYALHRSLTPLGNYLRRMKAKLGPQAATMATAHKIAVIFYTMVKNQVEYDETLWATRDAQREKRLEAKLKRQAKRLGYELVPIELKAA

SEQ ID NO: 459349 - protein, 383 aa, unidentified
MKTETTLRDEYNLSQRYLYMAFELGQSEWKLGFTIGYGQKPRLRTIKARDVVALQDEMRAAKKRFGLPEDAPVLSCYEAGRDGFWLHRYLDENGIQNLIVDSSSIEVNRKAKRAKTDRLDARKLLTMLMRYHYGEKKTWSVVNVPGSETEDHRHLHRELNTLKAERTKHINRIKGFLTGQGVCISIGKDFLSRLETIRLWDGSPLPPGLRSRLEREFARMLLVNEQIKILEAERRELLCNSTRPDVELVRQLMRLKGVGVGSAWLWVMEFFAWRQFRNRRQVGALSGLTPTPYQSGADSREQGISKEGNAYVRSIAIQIAWGWLRYQPESKLTRWYQERFGHGSKRLRKIGIVALARRLLIDCWYYLETGLVPEGVELNQVRS

SEQ ID NO: 459350 - protein, 447 aa, unidentified
MCKEEGIRHREYCQLRRDIRGSKEHLIVGIDIAKKAHYAFFGTAVGKTLRKRLIFKNTHQGFQELVEYAGSLQARHKLPKAVFGLEPTGNYHKPLGSYLIENGHHLVLVSGEAAKSNRKLLDGRWDKHDTKYAANIADLISQGKCLFYEKPSLQIQELRDLLSLRRRFKREEHRIKMRIRNTLIAKHFPELDQYYERCESEGLAILRWCHDPRQIAGMEYEQFYQMVTSSKKGLAQEKRLRAIHKEAGQTIGLDVARSSKYEARILVGSLHQIRKAIKEIEGLMHEVSLFFPEYKYILTIPGFGPYISAVVLARIGDPHRFQNTSQLIKLAGYDLCADRSGQNSNQATPIISKKGNSELRYALYQAALVATSFNPNFKKYFHEKLSGRERERGIKTKMRVKMSAKLLVIAWTLMKKREPFNPAHVFINMKNFPSNPCQPNENERGLS

SEQ ID NO: 459351 - protein, 414 aa, unidentified
MAGIINKACGLDVHKKFLIATILSIFGEKKQLRFDRTEKGILELKKWVLTEKCDVVACESTSDFWVPIYDSLINHLTVIVGNARDMKAFTHKKTDKIDSEFIAQLALNNMIKPSRVFSKNHREFRSHVRLRHKLVQKRTDIKNVAHAILSSEMFHLNDVLTDIFGKNGIMILSGISSGKNVDQIIGSLSPNVRKKSGKIREVLDREMSLSAAIRIQTCLSLIKNIDEQIDILEAEIFWYAYQNHGREMKLLMSSPGVGEISAATIIAEIDDFNDFSSGDKLASWLGLVPNVYQSADKYHNGRITKRGSKIARWILIQVAQAAARKNGSKLKQFFERKKKTIGHSKAIVALARKIVTILWHLITNDEMYEDELGYKKGEVKRRKIVESEAISVDERISLISEMFAIMGKEEAEDT

SEQ ID NO: 459352 - protein, 351 aa, unidentified
MVNVPRPFDFIAKPEQLPMSNLNLQGGVSSVGERPNCGIDVAKEHLDVLVGADVERVANDSKGRAQTVARLKAANVDLVVVEATGGYERGLVCALQEAHIAVARVNPRQARDFAKSMGVLAKTDRVDARVLRDFADVLSRHKDRAKYVTQMLEPERLALRELVVRRRQLVEMRVAESNRLDQAGKLTKRGILSVIKLLDKQLREIDDEIDDNLEDHFKPQKELLDSVKGVGPATIMTLTAALPELGRLSRRSIGKLVGVAPLANDSGKRSGKRITWGGRAEVRAVLYMAALVAKQHNPVIKAFYERLLAAGKPKKVALVACMRKLLTILNAMLRDSQPWNAAKSPQNVLVA

SEQ ID NO: 459353 - protein, 344 aa, unidentified
MQITRVGLDLAKRVFQVHGVDVHGKTKLSKKLARGEMLQFFAQLPACVVGVEACGGAHYWARELGKLGHTVRLMAAQFVNPYRKSGKNDVNDAEAICEAVGRPNMRFVPPKSEEQQALLMVHRARSFVVANRTAQVNQIRGLLGEFGLVVPVGLRRLRTQLPQILEDAENGLPILARHVFAELLQELHALDEKIQKIQRYDRQLQELARQSEPARRVMALEGIGPITATAFVASVGDARVFKNGRQFAAWLGLTPRQYSSGGTTRLGRITKRGDRYLRMLLVHGARAHLRFVERKNDPKSLWIKGLRARRHVNVAAVALAAKHARIIWALLAKGTTYRLPAAAT

SEQ ID NO: 459354 - protein, 307 aa, unidentified
MFIGIDVAKDRLDVHVRPGGDAFSVPRDDEGVASLAKRWAKDSPTLIVLEATGGFETIVAAGLAAAGLPVAVVNPRQIRDFARATARLAKTDTLDAAVIAHFAEAVKPVARPLADPQTRLLGELMARRRQLVEMIVAEGNRRRQLTAKRALKSVDRVLAILKAQLTAIDHDIDSSIRGTPAWREAENLLTSVPSVGPKIARTLIAELPELGTLDRHQAASLVGVAPFNRDSGTLRGRRTIAGGRPVVRAALYMAVLVALRRNLPLAQTYHRLRTAGKPAKVAIVACMRKLIILLNAILRDKTPWQPA

SEQ ID NO: 459355 - protein, 462 aa, unidentified
MNGKSRRRSAQRARREQRILEKIHLNAAGIDIGSESHWVAVPDDRDDRPVREFKSFTHELLALADWLEACGVDTVAMESTGVYWIPLYEILEERGIEVLLVNARHVKGVPGRKTDILDCQWLQQLHTFGLLRGSFRPDAPVAALRCLVRHRDQLVEAAASYVQRMQKAMVLMNLQLHNVISDVTGVAGIAILRDIVAGQTNPSVLARHRHPRCKASEEEIAASLTGHYRDEHLFVLRQALELYDLYQEKIRSCDEQIEARIHILEATCEPPGTLLPKSRRTQGRSSNEPFFEIRSPLFTLCGGVDLSELPGIGPYGALKLVSEIGLDMSRWPSEKHFASWLTVAPRNQISGGKLLSSRTQPSANRAAKILRMAAMSLGRSDHALGAFYRRMGARVGKAKAITATARKLALLVYRMLRYRTPYHEPSAAGYDRQQRSRILRGLRKRASSLGFELVDSSTGLVM

SEQ ID NO: 459356 - protein, 349 aa, unidentified
MKIIGCDFHPGYQQIAMLDKNTGEVVEKRLSHSNAGEEAKKFYSQLSGPVLVGLEASGQSQWFERLLGELRHTLWIGDAAKIRACTERKQKTDRRDANLLLDLLEQQRFPRIWVPTPAERDVRQLLLHRAKLVRVRTQVKNQLQALALNQGMQRKWKLWTAVGRKQLENLPLLPWASRRRAEVLKLLDELEGSITALDEAVCQEAYQRPAVRRLMTHPGVGPITALAFTLTLGPTERFRRGKQVASYFGLIPREHSSGGKQRLGHISKQGSSFLRGLLVEAAQSAVRHEPQMRREYQRLAQRKCRALAKVAMARKLAVRLYWMLREEVDYAQLLQGSHAGQPESFRGRG

SEQ ID NO: 459357 - protein, 356 aa, unidentified
MRYAKIDSQYYCGIDLHARTMYVCVMDKQGNILLHRNMDNNFNEFKNYLEPFIPDVAVGVESSCYYYWLSDACKKENIDFYLGHAFYMKAISGGKVKNDRVDSRKIADLLRANLFPLAYPYPEKMRATRDLLRRRHYFVRRRAGTYTHMQILCMQHGMYDVSSKIVKDEKDRLKLIKFFDNPDLKLMLQIDIDYIESLHPIIERLEKRIRKQAKHHNQRDYQLLMTIPGVGEMLGLVILYETHDISRFEKVQHYSSYCGVVKCERSSAGKIIGSKNNKIRNPYLKWAFGDVIIKAQQVEPKIDKLYQRLKSKYGLGRAKSIIAHRFNVAAYFIFIKKLGAYFFVNLIKRTGKIHTL

SEQ ID NO: 459358 - protein, 312 aa, unidentified
MDSKTVEFEQVIERGCGIDVHKSLLVATVRGTGLKEETREYGAFTQDIESMSGWLKDCKITHIAMESTGVYWKPVFNILEEDFEIILVNARHIKNVPGHKTDKKDSRWIAKLLLSGLLKGSFIPKQPIRELRDMTRYRRKVVEQISSEKNRIQKILEDGNIKLSSVVSNMSGAVASKIVEDLIAGEEDITKLVAYRHGKMQASETDLAKSLVGKLTAHHRQMLQLIKQSIKDKEMLKANIDKLIDEHLKANELELDRELLSTIPGVGKEGAEYLIAEIGNDMSVFEDEQHLSSWAGMSPGNNESAGKKKAHE

SEQ ID NO: 459359 - protein, 339 aa, unidentified
MEEYDGRQYVGVDLHRRRSVIVRMTPDGQRLGTTRIDNDPFELAQQVSLWGESPEVVLEATYGWYWAADVLADAGAVVHLAHPLGVKGFAYRRVKNDERDAADLADLLRMGRLPQAWIAPPEVRGLREAIRHRSKLVALRSGLKASVHAVLAKQGVRVTVSDLFGVGGQRLLDELRLDAPFNARVGSLRRLIDAFTFEIDILTKRTSAQLRTHPGFQAVQAIRGVGPVLAAIFVAEIGDVRRFTRPQQLCSWAGMTPKHHESDTKVRRGRITKQGNPLVRWAAVEAVQTLRDGPLGQARVRIGQRRGANIGKVAAARKLLTLVFYGLRDGHIRCLTRPA

SEQ ID NO: 459360 - protein, 349 aa, unidentified
MSHKSAPPTVSTIGIDLGKNSFHLVGLDQRGAVVWQLKCSRAQLERRLANIPCCLIGMEACSGAHYIARQLATLGHDVRLLPAQYVKPFLKGHKNDYRDAEAIAEAVQRPTMHFVAIKTPEQMDLLALHRVRSRLVSQRTGVTNQIRGFLMERGIIVRQGVVPLRRALPDILSANTGALSPKIVNLIAELVQDWRRLDERIAAVSADIESLVEQDEACQRVMTVPGIGPIISSAVVAAIGNGAGFTQGRDFGAWLGLVPKQESTGDRTILGKISKRGNKYLRTLFVQAAHVVLARRPNAAMRGLWPWIEQASRRLHRNMLAIALANKLARIAWAVLARGRAYQPSIVAI

SEQ ID NO: 459361 - protein, 413 aa, unidentified
MDSLVERCAGLDVHKDSVAATVRVPGGGGGKREQETRTFATTTRGLLALADWLGSYGITLVGMESTGVYWKPVYYLLEERFECWLLNAQHLRNVPGRKTDVQDSAWICQLVEHGLVRASFVPPKPIRELRDLTRYRKAQIEERSREVQRLDKVLQDAGIKLTSVASKTLGVSVRLMLEALVAGTHDPDLLAELARGRLRAKLPELREALEANFRSEHHGLLVSQILAHIDYLDETIATLSQRIEQVIAPFSAERELLMTIPGVARVSAEVLIAEIGVDMSVFPSAAHLASWAGQCPGNHESAGKRRSGQPRKGSKWLGKTLTESAKAAARTRGSYLAARHARLRGRRGPGKATGATRHAILIAAYHILAGTVPYHELGPDHLDQRRSLEQRTKRLVRQLEQLGHTVTLEPLAA

SEQ ID NO: 459362 - protein, 369 aa, unidentified
MQDSMFIGLDVHKATISVAVADGKRGGEVRSWGVIPNRADEVKKVVEKLAGRARELHFCYEAGPCGYGLHRQLVEHGHDCIVVAPSLIPVKTGDRVKTDRRDALMLARLHRAGELTAVWVPDEAHEAMRDLIRARATAVRVVGKARQHLQGFLLRHGRIYSGKRGWTQAYRRWLTTLRFQHPAQQIVFQDYVHAIADAEARIERLTKQIKDLAPSWSLWPVVEAVQAMRGVAFIVAVTVVAEVGDFQRFDNPRKLMAYLGLTPSEHSSGSSVRKGGITKAGSGLARRALIEGAWTYRMQARVSRKLHDRIENVPQAVRDIAWKGQLRMCQRYRQLTAAGKAKVVVTTAIAREMAGFIWAIARATAGTPA

SEQ ID NO: 459363 - protein, 314 aa, unidentified
MQDVFIGVDVSRDMLDIAGCPVREHLTIANRHRDIEQWLKGLPAGACVAMESTGRYHQLLAKLAKAAGLHVYVLNPKRVWYAARGDGRRSKTDRIDAQVIAKFLRDHIRDLHEWCPGTSLQSEIAMLERRRHCIERHCTAMSLSLRDVDGLEDEIEQFQKSIKAMRRAIDQRIQSLLGKDKEMARKSALLITVPAIGKVGAASLAALFARVPFKRSDSVVAFVGLDVRVSDSGTHRGRRRLTKLGPAHIRRQVWLMGFAACHTNLYKPIYESLKARGLKSTEAIMILGRRILRIAWAIWRTDQPFDAQLVGKRA

SEQ ID NO: 459364 - protein, 331 aa, unidentified
MSVWVGIDVAAKTVEMVWRSQGNNSKPSSFEQTPAGHRRLIRQLKGLAPVRVVLEATGVYYLDLAVALDEAGLAVAVINPRSARRFAELKLKHTKTDAVDAALLAEYAQRITPQRWSAPTASQLALRDLGRQINRLSGARTQAKNRLHALRAKRTTLKLLIDDERDGIARLNRRIEKLQQAAVQMIGESPELARHMRELTAARGVAVATAIAVLAEFCVVPQTLKAPQVARHAGLDVRLCESGTSVKRPGRLSKAGNSYLRAALYLPAMSAIQHDPRAKAFYRALLARGKKKMQALCAVMRKYLMGLWFCFTHGVPFDSAKLFDECHLANA

SEQ ID NO: 459365 - protein, 340 aa, unidentified
MFYVGLDIHTTRISICVLGEAGQLVRRCQVRGIADMLGILKGLPDRFEVCYEASCGYGHYHDLLKPLAARVLVAHPGRLRLIFRSRDKNDRKDAERLAKLLYLGEAPAVHVPALDVRTWRELINCRSQVIAKRTRAKNALRALLRGAGVVPPRHPALWTKAGLAWLRQLELPTPSQQLRRDLLLEEIETLLRQGRRLEQQLNHQAQHTPAVAQLRSIPGVGIRTAEAVAAFVDDPDRFRNAKAVGRYFGLVPCQDQSGDKNRLGHITREGAPVVRQLVAEAAWQAQRRSPTVRAYFERVQRDDPQRKKIALVATAHYLVRVMWALLKRGTTWEENPAQAK

SEQ ID NO: 459366 - protein, 414 aa, unidentified
MFAVGVDVSNGRSTVAVLQSKSIVTLKPFEVSHTPEALGKLVEKLNSLGGETRVIMEHTGRYYEPIAMFLDSSGFFVSALNPILLNRYQESPSLHNVKTDKADAVKIAKFGLDNWDELRQYEPMDTIRYQLKTMHRQFQLASKSEVAFNNNLIALLEQTYPGIRKLLSSPARPDGSQKWVDYVGTFWHADCVRKLSLKAFTERYQKFCERHKYYFSEEKAAELYRHAQNVVTLVPKSDVTKMMVKEAISQLNAISRTVETYRAEMNRLASQLPEYETVMGMYGAGPSTGPQLMAEIGDIRRFPKKNSIIAYAGIDPRKNDSGDVTRKSNKSSKRGSPYLRKTLFVIMDVLIQRKPVDDPIYQFIDKKRSEGKPYYVYMTAGGTKFLRHYYGKVRDCLKEKGLWDQSVNDSQDSE

SEQ ID NO: 459367 - protein, 368 aa, unidentified
MDAGSIHVVPGAAAAAAPAELEEVPMSIVGGLDIHRKQITFDYVDTETGEARRGQVCPADREHLAKWLARFAGQDAHFALEGCTGWRYVAGEIIAAGLTPHLADPAETAHLRGPKRRAKTDRADARHQRVLLEQGRLPECWIPPSRVLECRALLETYLDLREQRTGWVQRIHAVLFHHGAPHIAGQRLGTAEGAAALQAAAARCSPAGQLQLAIAVQMLAVYDERLHQVRRELLDQARHLRGAAELTARLYGVGPITGLAITCWLGGAGRFSSARKAVRFAGLDITVYSPDGKRAPGRLSRQGPPVLRWCLYEAGKAHARKGAPDHACYAQVKERTDGKRAAISEARKIIRQAAHILAGLGDDALAAC

SEQ ID NO: 459368 - protein, 346 aa, unidentified
MDQIIRIGMDTSKHFFQLHGVDAAERPVLRRKLRRHEVLVFFAKHPPTIIGMEACGAGHYWARELCKLGHEVKLIAPQHVKAYIKRNKNDGRDAEGLCEAMSRPTMQFVPVKTEEQQAALMLAGVRQQLIIRRTQLSNAIRGYAAEFGLITAKGLVKVEPLLAQIVQDESLPELAREMFRLQGRDYARLQVELKAVEARLMAWHRANPDSWRLAKIPGIGPIGATTLVMKAPDPRLFPSGRHFAAWIGLTPKDHSTAGKTRIGKITRAGDEMLRSVLVAGATSVIQQAKKSRGRPSPWLVALLARKPPKLAAVALANKTARIAWKLLMTGESYDGARMPVASKLAA

SEQ ID NO: 459369 - protein, 358 aa, unidentified
MNKVAQAKVSGKSLAVVVGDVVHVGLDVHKRTIDVAVWFNGRVARHWVMPADGGKILRTLEPLRAALKQVVYEAGPTGYGLARLLRGAGLPVEVVAPSKTPRQADDSAKSDRLDCIALAEYSAAGLLRAVAIPSEQEEADRQVLRLRDQVMKKQRRVKQQIKSLLLEYGIAEPAGLKNWSRTSIAALRKLALCDELRFCLDELLAELAELQSRLAQVNKRIKELAGEERHAAAVALLSSHPCVGPITAMTFRTELHQARKFRDGSEVARYFGLAPRVRQSGASRRDGPISKTGRGHVRAILVQAAWRWIKQDARARTVYDRLVHNTGLPQKAIVGIARRLAVCLWRMTVTGELFRQAS

SEQ ID NO: 459370 - protein, 377 aa, unidentified
MKRLKFVGLDVHAETIAVAVAEQDGEVRSLGIIPNREESIRKLVRKLGPVEQLRFCYEAGPTGYALYWQLTRMGAKCEVVAPTLVPVKAGDRVKTDRRDALKLARNYRAGELTPVWVPDATHEALRDLVRAREAAKKDELRARHRLNKFLLRQGRRPPMGVKSWTMKYLEWIKREVHFEQMAQEATLLDYLHEVEHADARIMRLDGAIEEAVKCVPPKMRAVIEALQALRGIARVASVTIVAELGELSRFARAKQLMGYGGIVSSEHSSGECTRRGGITKTGNAHLRRVVVEAAWTYRHRPAVGTSLRKRQEKVSEEVKEIAWKAQQRLHQRYRKLLAKGKNKGIVVTAVGRELLGFIWAIGIKVEAAQKESLQQAA

SEQ ID NO: 459371 - protein, 343 aa, unidentified
MKLFVGLDVSLEKTAICVVSEHGKIMREAQAASEPEALVRWIRDLYGTIAAVGLEAGPLSQWLHRGLTEAGFDVVLMETRQVKGALKAMPIKTDRRDAEGIARLLHLGWFRPVHCKSVSAQEVRAVLNARKAVQQGFIALEMSLRGLLRNFGLKVGIISRGKFEQRIRELTSGNPMLIAATEPMLRARAALRQELAGLERRVRQLAQEDSVCRRLMSMPGIGAVVALTYRSAVDDPGRFTSSKKVGPWVGLTPSRNQSGERDVSGGITKAGDVNLRRALCQAATVMMHRGRATWLGTWAAQVARRRGSKRAMVALARRIGVILHRMWIEDADFRSDGPALNVA

SEQ ID NO: 459372 - protein, 429 aa, unidentified
MSYRIAGIDVHKKMLAVVVCDVEIESEYEFERRKFSSSPEQLRSLAAWLLEQEAEEVVMESTAQYWKPVWEALERYWKPLCEKREGARRKSGTLHLAQALSNRGRRGRKRDFPDAERLVKRLVARELTLSFVPDAEQRLWRTVTRKKYQLRCDRIRLQNQLESLLEEAHIKLSSLVSDLLGLSARRMLKALAEGATNPATLAALADERLRATPEQLCDALGACTELNAVYRRLLKMALEELRLIDEQIGRLDQEMASLLSEHQDAVQRLAEVPGLGVDSAQQIIAEVGPTAATFPSEKCLSSWVGACPGDDESAGVNYSHRSPKGHRHMRRLLNQAANAAARTKGSIFELAYRRSVPRLGHNQAIGAIAHRQCRLIWLILHQGVRYEERGPAVGKRSKQLRTWRMIRQLRNLGYRIEPPNPQPSQASAQ

SEQ ID NO: 459373 - protein, 326 aa, unidentified
MMHPAEAFKPAPTDALITIGIDVSKDHLDAARHPSGDSLRVPNTRKGHTELLRWLGNSGSIARVVFEPTGPYHRMLEERLASVGLQIVKVNPRQARRFAEAAGRLAKTDRIDALMLARYGALLEPVTRPVRSDVQNQLAELVAARRGLMRDRTATLNRLKTLTIELLKRHARHRLRQIEAQLTSLDAAIDAIVLGDPVLCRRRDVLASIPGLGLITAHTLLADMPELGAMDEGQAASLAGLAPITRQSGTWRGRSFIQGGRASLRQALYMPAIVAMRFNPDLKRVYDRLIAVRKHTKIAITAIMRKIIVLANALLRDNRLWSPKAS

SEQ ID NO: 459374 - protein, 348 aa, unidentified
MAHFVGLDVSVKETSVCVIDDAGKVILEQKVPTEPADIIALLTSLGVTYGRIGVEAGPLSQWLVNALTASDLPVICVETRHMKALLTAQQINKTDRNDARGIAQMMRVGLFKPVHVKTLAAQEQRMLLTSRKLLQRKLLDLECELRGTLRNFGLKVGVVSGSRYEARIRELVAGFPRLAAIAEPLLNVRRVMRQQLAVLHKMLLNTVRDDPVCRRLMTAPGVGAVVALTYRATVDQPQRFVHSRAVGAHVGLTPKRYQSGETDYDGRVSKTGDALLRTMLYEAAHSLLIHSGKWSWLKAWGVRVAQRRGMRRAIVAVARRLAVVLHRMWVDGSEFRWSKDSAAVPTVA

SEQ ID NO: 459375 - protein, 322 aa, unidentified
MAETTSSLLVGIDVSKERLDVGLGANGESWTFENSLAGLSTLKEKLRPLKPTLIVLESTGGFESLTLAELYTAGLPVARVNPGRVRELAKSIGQLAKTDRLDARVLARYAEAVRPELSLLPTAAEQELAALVSRRRQLLEMKVAEENRLSTAPKHVHTLIHEHLDWLTAAIRKLDKNLDDFIHGSPLWKEKGDLLRSVPGVGKITAFTLLAELPELGCLDRKEIAALVGIAPFNHDSGRHSGKRHIHGGRSMVRNVLYMATLSATRFNPVIRSFYQRLLNAGKCKKVALVACMRKLLVILNAILCSHSPWRPPLASCQALDI

SEQ ID NO: 459376 - protein, 358 aa, unidentified
MSFNGTSVGLDVHALSVVAHAFDEETGQIQRARLCPDHGEILGWLSRLRGPVRVAYEAGPTGFGLARALAGAQIDCVVAAPSKLIRPAGDRVKTDAGDAAHLTRLLRLGEITAVTVPEAAVEAVRDLVRAREDARADLMRVRHRLSKLLLRQGRVYSGGQAWTGVHEIWLRRQRFDDAHTAAAFDHHFDAVLSATAGRDRLDEQIATIAASPRWADPVNRLGCLRGISALTALALSVEIGDWTRFTGASIGAYVGLVPTEYSSGTSRVQGSITKAGNAHVRRLLIEAAWHHRAAYRNPGPTMRLRWAKVSPALKARGHAGNQRLHRQWCRFNERKKPHVVANVAVARELAGWCWSLAT

SEQ ID NO: 459377 - protein, 427 aa, unidentified
MNCTQNEKLLQITPETLVVGVDIGSEYHFARAIDFRGYEYSKGAYKFSNDGNGFKAFDNWVADLMKQQGKTKVIVGMEPTGHYWYGLGNHLEDTGISLGMVNPFHVKRTKELDDNSPTKNDRKDPKTIAMLVKDGRYQVPYMPTGAYRELRNAMELRRQCVTQMVAIQNRVKRWLVIYFPEFNTVFKKWTGKAALMTLRNFPTPQAVLEAGQEKIVTVWKQEIKRAVGRKHAQRLVKAAENSIGLPHGQGTARLEMELLLEEYENCSRRYRRIMDLVEKHLQDIPYAEKLLGIKGIGIVAVAGFIAAVGDITRFKAPEQVIKLLGLNIRENSSGKHKGKTTITKRGRADGRYAIFQAVLPLVAKNAEFREIHYYYTHREERPLKKIQSIVAICCKLIRIFYAILKTGRDYDAVKMLNDIKRPMREAA

SEQ ID NO: 459378 - protein, 351 aa, unidentified
MEFVGIDWATRRAAWCAVDAAGRRLGEGAVPADEGGLLRLVADRGLEVTAAVEMMSGAAWIAETLRSVGWTVRVADARRARALAPLAAKTDRIDARVLAELARRELVPEVWVPAVADRALLEQLLRRMHLIRLRTSAKNRIFGLLSQWGVRAGVTHLRKPGAVDALGERGVPEVWRASITEAIAVIDMLDARIAPIDAGLVQLARDDPRAALLRTIPGIGGLLGLTFAAEIGDISRFPSASKLVGYSGLVPRVRQSGESSRTGRLAKAGSPLLRWAAVEAAQHAWRAQNPWHRLYVDVRARHGHGNAAKSAVARKILIAVWHVWSRQQPFKPAASCAASIVPASSGQPLVA

SEQ ID NO: 459379 - protein, 342 aa, unidentified
MTFVGCDLHTRMQQVAVLDTGTGEVSERQLAHDGSAIEEFYAALPGPVTIGIESTGYATWFHTLIQRLGHTLLVGDAAKIRAMVVRKTKTDRRDARHLLDLLHHDRFPTIWIPDPATRDLRALLMHRMRLVRIRTMVKNGLHAIALNYRLTRGSRLLRQAGLAQLHALALPPHTAQRRDQSLELLAGLTSQIRALDDAITTAALAHPDAPRLITHPGVGALTALATVVVLGPVARFHDSKHVVSYVGLAPALHASAEKYHLGRITKQGSPLLRFVLGQAAAHAARMDPDLKRTYGALVHRRGRPKAKVAVARKLLVRLFIMLRDQIDYDEFCRRGRPAPASA

SEQ ID NO: 459380 - protein, 338 aa, unidentified
MSAKVIGLDIAKHVFQVHGADTRGKAVLKRRLRREQLTDFFGSIPRCIVAMEATRGAHYWARVIATFGHNVKLISPQFVKPYARGQKNDMQDVAAICEAASRPEMRFVPQKSIAQQDMQMLHRIRSRLIANRTQVGNQIRGLLAEYGIIVPLHLSHLRKHVHALTADPHPQLTAFAQRLFVGLYDELCQLDERIRSMEERIQEAFRADEACQRIARIEGIGPVIATAIVAAIADGKAFRNGRQLSAWLGLVPRQHSSGDKQRLLGISKRGDPYLRMLLIHGARAVVYRSNNKMDARNRWIADKQKKLGTTKACVAVANKNARIIWALLANEEEYRQAA

SEQ ID NO: 459381 - protein, 423 aa, unidentified
MRCIGLDVHREFCEVAIAEGGEVRPAGRVQTEPEALALFAQSLSVDDQVALEATGNALGIARIIEPHVGRVVLANPKAVKGITRAGAKTDKIDARTLAKLLAGGFLPTVWLPDEQTRILRRRISARAQLVRQRTRAKNQVHATLVRNLKGKPPVSDLFGARGRRWLAEQDLPADEQETITACLRQIAFLDGEIALVERALAEQVLASAEMRRLLTLPGVNFVTAAALLAAIGDIRRFATAGQLVSYLGLDPRVSQSGAEPARHGRISKQGPGETRHVLVEAAWHASRTPGPLRAFHQRIAARRGGNTATVAVARKLAVIAWHMLSRGEDYAFARPSLTREKIRKLELATGAERQKGRRIGVFATKEQHDLDKQLAAQAEIAYRRLVQDWQPAIKGAGAAPGRASRRPSSGQAARQETAPPPTL

SEQ ID NO: 459382 - protein, 367 aa, unidentified
MKRHTATNQSQALNDLSACTTVAVDLAKRVFQVAGEDALGQVRYEARIKSREAFYEFLCKLPPSVVVLVETGPGAQAWARQLQGQGNLARILPARLVEGHRSGAKNDRNDALSILRAGRDSKISAVPIKSAASLAMQALHRARQGYVRRRTAMSNQMRGLLLEHGVALAQGDAAISHVIPRVLEDATQPLPEILRELIDELLGEWRQLGERINVLSGRLEAAANADKTAKRLMTVRGVGPIIATALLAKQTEPERFANARLYAAYFGMVPDQHSSGEKIRLGKMSKRGDGYLRSLMIQGAHAVLQQLRPDSQQPDDRRLLGWLSRLGRKEAAVRLANRNLRIAWVLLQNEQTYQRQPVNDRQAEMSH

SEQ ID NO: 459383 - protein, 434 aa, unidentified
MKKHAYRARNINQFSFEKLQGRLRGERIIVAVDVAKHDFAAGIAGDDGLVLEHFKFKHPKQTHQFLDLLEQPRRLGSRVEVVMEPTGTYGDAVRYQVSARGIPVFAVSPKRCHDAAEIFDGVPSLHDAKASTILARLHAQGLSKPWPEGESSRRALRAIVERRELYHDPLERDRGRLEGILSRHWPEYGEHLDPQQQKTALALLAEYPGPATVAQNAEAASEFMVRTSRGNLSRDKIAGVIDSAKTTLGTPMVEQEQTLLKELADQMLALRGELDRIDAQIEELIQSEPEAATLASTVGAVTAAVLIAMLGLARSYPSAGAYVKAFGLNLTEHSSGQSKRPGSGLHISKRAPGIVRKYEWLAVLRLIQSEPLARAWYEGRKAFQCDQKPKAVVALMRKHVRALWHVGKGEAFDVEKMFDTARLKVPVAAQAADG

SEQ ID NO: 459384 - protein, 341 aa, unidentified
MSIMTIGIDLAKNVFAVHGVDENGKAVLVKPKVTRDQLLPLIAQIPPCLIGMEACTGAHHWARLFRQYGHTIRLMAPKFVTPYRMSGKRGKNDAADAAAICEAVTRPSMRFVPIKEEHQQNILCLHRTRQGFIEERTATYNRLRGLIAEFGIVLPQKVTLLRQGIYLHLEDLPGWTNRCVGDLLAHADQLDARIAEYDKAIATIAKEDVRSKRLMQLRGIGPTTASALLASLGIGHDFDSGRQVAAWIGLTPGQYSSGGKSRLGRITKAGDGYLRSLLVLGARAVLNSLGNKQDRFSRWARALVERRGYWKAAVAIAAKNARLAWAVLKYGEDFRMIESAV

SEQ ID NO: 459385 - protein, 348 aa, unidentified
MDTIGLDLHKRESQLCIGQADGTITEQRIVTSRERFTAVLGHRPPARILVEASTESEWVACHLESLGHEVIVADPNYAPMYATRARRVKTDRRDARTLMEACRAGTYRPAHRLSAARRHVRAELAVRDAVVRTRTRYVALAKALVRRDGLRVPSSAAERVGAHLEALAGSPTLAAELAPLLTLLPPLNATIAAADQRLAELEHTDPSVALLMTAPGIGAVTASALVATIDDVQRFASAHQFEAYLGLVPGERSSGELRRIGPITKAGNRRARWLLVEAAWRILRSKDAAGAPLRGWARPIVARRGSRIAVVAVARRLAGILYAMWRDGAPYDAGKIRRPRSARQSPAA

SEQ ID NO: 459386 - protein, 333 aa, unidentified
MSNVTTVGIDLAKNVFSLHGVDERGQVVLRKTVNRARLLALVAQLPACTIGLEACSGAHEWARQFERFGHTVRLMAPKFVAPYRKSGKNDGNDAEAICEAVSRPSMRFVPLKTLEQQSALCLHRVRQGFVEERTATINRLRGLLAEFGHVLPQRAIEVRRGVPGLIEQLPSRAARCARDLLEHAHVLETKMREYEREIETHAKHSDLARRAQARRGIGPITASAIVATVGTAREFRNGRQFAAWLGLVPRQYSTGGKVRLGHITKRGDPYVRTLLVMGARSVLQRAARERDPLSRWALALKERRGYHRACVAVAAKNARIVWALLAKESPLAA

SEQ ID NO: 459387 - protein, 483 aa, unidentified
MRLRITNNPTPTVDVFSFSFEFAGALEIVNEYSGFAVISARYIAFAELKQCTSHRITLSLWEVFMSSLTQEFTAFIGIDWADTKHDICLQPANSQQREFDQLPHQIPAIEQWAYSLQKRFGGTIAVVLELSKGPIVYALQKYDFFVLFPVNPSTLAKYREAFKPSRAKDDPTDAELALDLLLCHGDRFKPIKPQSVEMRTLTYLVEQRRQLVGDKTRFVNRLCDTLKQYFPQTLDWFEHRDTVLFCDFMTRWPTLTQVKRARKASLETFFKTHNVRFDTVIATRISGIRAATPLTLDVAVLTAHQLQAMAQVNQLRTTLQAIDQFDDAIAKLAPTLPDYALFNALPGAGPHLAPRLLVAFGEQRERFTSAAQFQQYSGVAPVTERSGKKCWVHWRWQCPTFLRQTMVEWAAQTINKSFWAGAYYRQQRDKGCSHQTAVRALAFKWIRILYRCWQNRTPYDESKYLNALKRRNSPLLKQVTTTS

SEQ ID NO: 459388 - protein, 438 aa, unidentified
MSNKVIFNLDELFISVGIDVGADFSWMSIALPNQQFVGKPYKILHNSIDSLTTAVSKIKEAEELYSLESRIFLESTGIYHYPLFCYLRDKGFNCSVINPIITKNSTNINIRKVHNDRFDSKKAALVGLKPDLKVSLMPSDLALNCRNLCREYYDLMDNRSAYVNKLQGELRMAFPQYLGIFSKVTINTSLTLLETYTSPSAFLEADKQEIIDIIKSTARFGLTYAQNKYNAIIQAATDANQFGYIIDSNIKRIRLYISFIRKYDEELNSILESLHELVDAHEDADFVKQIHLIETFKGAGFLSAVSIMGEIGDFSAFSKPKQLFAYFGLDPAVKQSGKFEGTKVQMSKRGSAIARRVIHTLTLQSISISRNGEAKNPVLREYYLKKCGSKPKLVAMGAVSHKVCNMIFAILRDNKPFKIIAPQEHIKQYNAAKCDIAA

SEQ ID NO: 459389 - protein, 343 aa, unidentified
MQTVTTIGLDIAKSVFQVHGIDAEGKVLFRRQLRRRYVLAFFQKLPSCLVGIEACASSHHWSRELQALGHRVRLMPPAYVKPYVKRQKNDAADAEAICEAVTRANMRFVATKTPEQQSCLMLHRTRYLFIRQQTAVINAIRAHLAEFGIVAPVGRQGVEQLLGIVADPNDKRLPEVARVCIAALGTQLRVLKAQILEFDRMIIAWHRSSEASKRLDEIPGVGPALATALIASVADPKAFRSGRDFSAWIGLVPKQHSSGGKDRLGSISKQGDRYLRSLFVAGALAVIRYAKIHGTRHRPWLTALLARRPTKVAAIALANKIARMAWAMMAKGERYKEPVALTA

SEQ ID NO: 459390 - protein, 344 aa, unidentified
MYFIGVDHHKQVSVMTVLDEDGQERKNGRVSNLRRYVERFLEDCRPFTAVLEAGRSSYVMADLLRELGGEVKIANALQVRAIAHARIKTDKRDSRTLAQLLRADLIPEIYQRGEWNRRAQRVMRMRAYWVRKQTEVKNKIRALMAQQREEIRLEVEKREAGLLSLRGMEFLIKLPMEGQDKMVLDDLLQGYREAQAHIKKSDALVRVLFGEIKEASRIDTVPGFATTLSVLVAVEIADIKRFPSAADLHSYAGLIPSTYLSGERTSHGRITKQGSAWLRWAALEATYPAIKKDLGLRALYSRLARRKGPNVAKIAVARRLLTIIYRMLTEKRDYIPEIMKQSAA

SEQ ID NO: 459391 - protein, 428 aa, unidentified
MSYRIAGIDVHKKMLAVVVSDVEIESEYQFERRMFSSNPEQLRSLAAWLVEQKAEEIVMESTAQYWKPVWGTLERYWKPLCEKREGARRRSGTLHLAQALSNRGRRGRKRDFVDAERLVKRLVARELTLSFVPDAEQRLWRTITRKKYQLRRDLVRIHNQLEALLEEAHIKLSSLVSDLLGVSARRMLKALADGETNPAALAALAHERLRATPEQLCDALGACTELNPVYRRLLKMTLEHLQILEQQIGQLDQELATLLHPHQDAVERLAEVPGFAVDSAQQIIAEVGPAAATFPSEKCLSSWVGACPGEEESAGVNYSHRSPKGNRHMRRLLNQTANAAVKAKGSIFEIIYRRCVPRLGHNQAIGVIAHRQCRLIWLILHQGTRYEERGPAVTKRSRYQRTWRMIRQLRNLGYRIELPNADASQVQA

SEQ ID NO: 459392 - protein, 416 aa, unidentified
MAGAVADGSPARPGAAKPVPQRGSPSVVPSNPNSRLGRQKRELASPVAQGRVKLDPIVIGIDVSKDKLDIAIRPCGEVFATSRDAAGLDALIARLVPLSPMAVAVEATGGFETVVAASLASAGLPVVVVNPAQVRAFAQAPFDLDVSIDRHRCKRAKTDPIDAMVIARFAEATKPEIRPLPDTATRLLSDLLARRRQIIEMIVAERQRQRRFDDAHLLKSIARLVKALEKELAALDRDIDDAVRGSPAWREKEDLLASVPGVGPVVARTLIAELPELGRLGRKEIAALAGLAPWTRQSGRWKGKSFIGGGRACVRAALFMGAVHGRSLRGAAQSGARGLQTTLDRGRQTEARRDHRGGAQAVDHPRCRAARQKTVERRRTGAGSCPTFDLMASRGLHRLDGSRPRAAPAGARTRSP

SEQ ID NO: 459393 - protein, 317 aa, unidentified
MIHLGIDIAKLKFDVALLAQGKFKTKVFANDSAGISACLKWLGTHADGPVHTCLEATGSYGEALACALHDAGHTVSVINPARTKAYAQSLGLRQKTDAVDAKMLARFVQTQEPAVWTPPPAELRALQALLRRLDALVEMRTQEKNRLGVAEPTVSASIAQHLDYLQSQIDALKAQIENHIDQHPGLKQQQDLLDSIPGIGAATSAWLIGELNLTRFDSARQAAAFVGLTPRKDDSGTSVRGRPRLSKQGNSLLRKLLYFPALTAMTHNPLVRALCLRLKAKGKHNMAIIAAAMRKLIHIAFGVLKSGKPFDPTLADT

SEQ ID NO: 459394 - protein, 462 aa, unidentified
MPGREERETSDRSTRPIEGLPVIRASVAGIDLGSERHWVCAATRDRSAREVASFGATTAELLRMAEWLKIRQVESVAMESTGVYWIAPHEVLEGQGLQVLLVDTRQLARVPGRDKKTDPTDCEWIQRLHSCGLLRGSFRPKEAVCMLRTLVRDKANLVAESGDWLRRMQKSLDQMNVRVHRAVSDIDGVTGMAILRAIAGGERDAQKLAKFRNARCSKTEQEIAEQLNGHWREDHVFSLQQGLKMYDAVQERIVAYEQEILRRLGEMEADEPPQPTAPPLQNTNKAKAIKKRGQEAKRQALYRMSGVDMTQIDAIGVETVEVVLSEYGSDLSRFPTEQQFVSHVTLAPRVPKSGGKPLKKKKRNSASTRVAAALRMAAVSLRHSQTALGAYYRRMAQRRGGDIAVFSTARKLATLIYRLLRWGQPYVDEGAAAYENRYRQHRIGRLAATAKELGYQLTPVSA

SEQ ID NO: 459395 - protein, 381 aa, unidentified
MNTETTLNNQYNRLGDCLYLAFELSQKQWKLGFTIGIGQRPRIRNMMARDLPTLEHEIQAAKQRFGLPGDALVLSCYEAGRDGFWIHRYLKICDIQNLVIDPASIEVSRRARRRKTDKLDVTKMLAMLIRHHGGERKIWRVVHVPSRQAEDARQLHRELLALTTERTRHINRIKGLLISPGVSVPVRIGFPDLLESIRLWDGSRLPEALSMRLQREYQRWLFVNQQIDQLAAHRKELLKISQQPSVEQVRQLMRLKGIGINSAWLFVMEFFSWRDFRNRREVGACAGLTNAPYQSGDTRKDQGIEKAGNRFIRSMAIEIAWSWLRYQPESKLSQWYQQRFGHGSRRMRKSGIVALARKLLVALWRYLETGTVPAGALFKTA

SEQ ID NO: 459396 - protein, 421 aa, unidentified
MDRTRRCIGLDVHRDFAQVAIWQAGQVVQAGRFDATPQGVREFAAGLGPDDEVALEATGNTWAMVTVLASHAGRVVVANPAKTRAIAEAKVKTDKVDAAILAQLLAADYLPPVWRPDAATGALRRQVLRRAHIVRQRTRLKNQVHAILHRNLVPRCPAADLFGLKGRSWLAAQDLPPDEQAALTALMRQLDFHARELALIDADLGQAALARPEVLRLMTIPGVDATVALSIVAAVGDFTRFRSPERLVSYLGLNPRVRQSGGQPASHGRITKAGPAHARGMLVEAAWSAAKAPGPLRAFYQRVQARRGMQIAVVATARKLAVLCWHLNIKGQDYAFALPSLIAHKQRKLELRAGASPARGRKGRSASYSLKAVRAAERDLAAQGEAAYRTMVAAWQPARPARKKAAGAAASKGTRLFKPAG

SEQ ID NO: 459397 - protein, 408 aa, unidentified
MFAGIDWASTEHAVAVNDDAGRALASFMVEHSAEGFDKLVARLRALGEPGGLTVAIERPDGRLVDRLLEAGHPVVAVSPNAIKAWREGEVVSGAKSDPGDAAVIAEYLRLRFHLLEPLQPFSDHTRALRAAVRARGDLVAQRTAAHNQLEATLDAFWPGAKKVFSDVTCKIALAFLRRYPTPASAAKLGEKQMAAFCRKHGYSGGRSAAELVERLRRAPAGITAVAETAARKAAVLAYVGVIASLNAAIKDLDKEVATALGEHPDGEIFASLPRSGLINAAQMLAEWGDCRQAYGAPEAVAALAGMSPVTKRSGKYKAVHFRWACNKRFRTAVHTFADNSRHGSDWAAGIYAQARARGADHPHAVRILARAWIRVIYRCWSDGVGYDPAKHKAAVALAARDKPASQAA

SEQ ID NO: 459398 - protein, 345 aa, unidentified
MVEYVGLDVSKEETAYCVKDADGKILAQGKVATDPDALFAVLKKHCVCPKRIVMESGTQSNWLTRALRKRGLPVECLEARRAYAVLRLRHNKTDGNDAEGLAELARLGFLRTVAVKSETAQLDRVLVKARARLVSGCRGHENALRGLLASLGLRFPKGVGKFARRVRALVSDHPELACVVEPMLSAREALLESIAALDREVADRAKQRPACQLLMSAPHIGPVTSLAYCAAIDDAHRFGSSRSVGAYVGLASRRWQSGEVDYGGRISKMGDSQLRSLLYEAANSLLTRVGRAHPLKDWARKLKKRTSHKKACVALARKLAVILHKMLITGEPFRWPHQEETSAKA

SEQ ID NO: 459399 - protein, 388 aa, unidentified
MAVTTQHEESIATVGGRLLMSMELGRRQWKLGFTTGVGQRPRRRTLSTDAWDRLPEEIAAAKKRLQLPADAPVISCYEAGRDGFWIHRYLTGLGIENLVVDSSSIEVNRRARRAKTDRMDVEKLLAMLLRYTGGERTVWRIVRVPSEADEHRRHLHRELVTLKQDRTRVTNRIAGLLATVGVLVKVDAKLGVRLDRLLQWNGQPLPEALRVRLVREWQKVELMTTQIRDLEGARRAMIRESRDDAVKLVRRLLELRGIGNSAAWLYVMEFFAWREFRNRRQVGGSTGLVGTPYQSGVLDHEQGISKAGNRRVRAMAVQIAWGWLTHQPQSALTQWYNRRFAHGGPRARKIGIVAVARRLVIDLWRYLDAGVIPDGAVLKGRSIVASGE

SEQ ID NO: 459400 - protein, 423 aa, unidentified
MSYRIAGIDVHKKMLAVVVSDVEVDDEYQFERVRYSSSPEHLRFLAEWLMAQQVEEVVMESTAQYWKPVWGALERYWKPICQKREGAGPMSGTLHLAQAQSNRGRRGRKKDFPDAERLVKRLVADELVLSFVPDTEQRLWRTVTRRKYQLTRNHVRLQNQLEALLEECHIKLSSLVSDLLGASARRMLKALAEGETNPATLAAMADKNLRATQAQLCDALGACTELKPIYRRLLKMFLEELQFIDQQISELDQELASLLSRHHDAVVHLAEIPGLGVDSAQQIIAEVGAGAATFPSAKQLSSWVGACPGEEESAEVSKSHRSPKGNRHMRRILNQAANAAAKSKGTIFEIVYRRLVSRLGHNQTIGAIAHRLCRLIWIILHRGVRYEERGPSVNAKTRRHRTNRMIRELRNLGYRVEPLVNTV

SEQ ID NO: 459401 - protein, 366 aa, unidentified
MTKILITHKSRTMGKVKELSFNGETIYCGIDVHKTNWKVNCIMGKIDLVGFSQDPDPEQFKKYMDKNYPGAEIKAVYEAGFCGFGVQRSLSKSGINCIVVNAADVPTSDKEKKRKDDKRDARKLSRELQDGSLHPIYIPSIEMEHFRSLVRQRHRLAQDQTRCKNRIKSMLMFSGIKLSDIKERWSMKMIKELKEMKCETNGLRLALNYTIEEYLQIRKLLKDSTLAIRKLSKEEPFKSVQEYLQSIPGIGLITGMVIQTEIQDINRFKTLDRFCDYAGFVPDISSSNDNTVVRGITHRCNEFLREALIESSWTMIRKDPAMLMKYNEYTKRMKPSKAIVRICKHLLSRIRYVWKNQKKYELGIVK

SEQ ID NO: 459402 - protein, 309 aa, unidentified
MNLEQKVYCGVDVSKRYLDAFIAGQTVRFENTAKGAKELMNRAGDVHYVFESTGGYERTASWLLLAEGNTVSVVNPGRVREYAKSMGQLAKTDRIDARMITEYAAVAAPKPAELPSVEQRKLNVLVERRQQLITMQVAENNRLDTAGEPALQKMIQKHLSWLKKQVEKLDQDIEQLIHDHREMSEKAKRIQSIKGLGKVCAATLLAHLPEIGTLSRREIAALAGLAPYNRDSGSFRGQRHICGGRKRLRACLYMAAVCAIRSNPHMKSFYTRLVVDNHRPKKVALTAIMRKLLIAANSAVKNPDFIIVT

SEQ ID NO: 459403 - protein, 410 aa, unidentified
MNAVGIDVSKGKSKVAIIRQFGEVVAKPFDIEHFPDQLADLAEYIHSLDGESRVVIEYTGKYSDPIANFLCEAGIFVCMVNAKLIHDYGGDTIRRVKTDKVDALKIAGYCLDKWAKLSRYEPVSEERKLLKTYNRQLSEYTKIKSMLKNNLISLLDQTFPGINELFSSPAREKDGHEKWIDFVLKFPHCNNVSTLSRQSFAIKYEKWCRKNGYNFCPHKADQIYSVALNCLPTLPDNDFSQTLIIQTVNQLNSLCETIATVKAEMSKIASALPEYDTVLAMHGVGKTLAPQLIAEIGDIRRYPKRSSLARFAGIEPPENQSGTYNQHSRRISKQGSPHLRKTLFQVMSCVLQNSNPGEPTFQFIDRKRAEGKPYKVYMIAGANKFLRIYYARVSECLDALKAYQSMVVSA

SEQ ID NO: 459404 - protein, 387 aa, unidentified
MHTETPATVVATTVPTDANTLFASIELSKSKWLVTVNSPGGEKFSRHVVEGGDSQALLGLIARLRAKAQSRCDQPVDVLIIQEAGLDGFWLHRLLVETGFESFVVDPASIAVNRRHRRAKTDSIDGEALLRTLMAFARGERRVCSMVRVPSPEEEDRRRLTRERATLIKERIQHTNRIKGLLNGQGIRDYDPLGRDRFTQLDALKTGDGRLLPQMLKEEIHRELDRIDLLMTQLAVVERARDALFQLEAADQDNPAALLIKLKGIGAQFASLVWLEALFRNFANRRQVAAYAGLAPSPWQSGGVDRDQGISKAGNPRLRHTMIELSWFWLRHQPESALSKWFVARVGAARGRIRRIAIVALARKLLVALWRYVAQGVVPEGAVLKAT

SEQ ID NO: 459405 - protein, 430 aa, unidentified
MNYKQNEKISQVTEKTLVIGVDIAKETHYARAFNYRGQEIRDGYRKVLKFKNSSDGFAYFKDWITTLMGSYDMEKVIVAMEPTGHYWFNLRQYCKKNDLKVVLVNPHHVKKTKELDDNSPTKNDRKDPKTIAMLVISGRYSEPYFPEGIYADLREIMKAYERISCGLITVRNRITGWLDEYFPEFTDVFSDIEGKTAMKTLREFPFPAKIVELGAENILSEWKKEVRRGIGIKRAKQLVEAARDSIGCVEGISSAMMSLGMLLDEYNMYKSQYERTVAVIEELLKQIPYADKIIRIKGIGNITAAGIIAEIGDISRFEDAKQVIKYAGLNLVENSSGKHKGSTRISKRGRRRLRSVLFRAMMPLVAKNAEFRELHRYYTGRRDNPMKKKQSLIVLCCKLIRVLFAMITKNIEYNGEKLMKDINRSMAEAA

SEQ ID NO: 459406 - protein, 413 aa, unidentified
MLREPYPPVRTDSSWNGRLRKPASAWIVHHVRETEPHTGEEPAVSSVSHRGFTHLGLDVAKDSIAVAVLEPDRDRAPVNKIFHDEASVRRLIGRFEDRSKLWACYEAGPTGYDLYRLLLSMGVRCDVIAPSLIPKRRGDHVKTDKRDARHLAGLHRAGQLTPIGIPSPAQEAVRDLCRTRGDMVEDLTRARNRLTKFLLRHSMVWRDGSNWTFKHQRWLAGVRFDDPALATTFAHYRATVELRDSSLAAVEQDLACYCDSALFGDDVHRLAAYRGVTRMGGLCMGAEVFDWRRFPAARSFMSFTGLVPSENSTGLSEHRGNITHAGNRHIRSQLVEAAWAYQHRPHVGAGIAARHDGLAPDVIARAWAAQVRLSSRFRKLAARKNIRSVVAAAIARELAGFLWAEMTANSIAA

SEQ ID NO: 459407 - protein, 400 aa, unidentified
MLSIGIDVSKGKSTVCGMKPGGEIVYTPFEIQHTREGMSELVSLLHNSCEEVRAVLESTGSYHCPVVAALLENGIFVSVVNSLRMKRFCSQSIRKVKTDRIDAMQIALYGLAYWQELQPTRLPEDTYRELQRLARQYYQMTSMLIKAKVDFNALCDQVLPGMQELMSDHAGRHKLSDFVLRYHHTTHILEMGETRFRKDYCKWAEKKGYRNCERMAALIFATAQNGIPVLPNAPSTQIVITEAIRVLHTVEASRDAILTQMQALAKTLPEYSLVREMPCIGDTLAPRLIAEIGDVRRFHSKRALIAYAGIDAPPYQSGKFRANNRHISKRGKRYLRKTGYEVMQSYAMHKPANDPIFTFIEKKRSEGKCGKLAMVAGLNKFLRVYYGKVTELYRSLSAIE

SEQ ID NO: 459408 - protein, 444 aa, unidentified
MIGPQVSKVKLSTQPFGDRPTMTKRSSNPTDAVLVAIDMSKHRQEVLIERPEGGRRRRMTVMATKADYDRLATDLSDIGRPIIVGFEATGNYHRTLAHRLLSAGFELRLISSVALARTREALHNGWDKNDSKDAQVILHMLRIGATQRYVDPLAAGINDLQEMSKTHEAISKAKTQTWHRILTHYLPLYFPEIERFAGNSRSDWFLALLERFPTPTSMTVLGQETFSREAWDLVGRKVSKARLINDIYETACASVALPVDEDSVSIAMFRMVIAQARNLIRQRDEIERTAHAMLAENRDYQLLRMIPGIGPINALTILAEAGDLRRFSHHRQFLKFCGLDLATRQSGTFRGRTMLSKYGNARLRRTFWMAAQVAARQRNNSFRDKLGRYTAGHADDADRRRKAMTALTAKMARVAHAVIKTGTEYRPFLERSDARWKDPSLQVP

SEQ ID NO: 459409 - protein, 328 aa, unidentified
MKLQHIIGADLSKESIDLFSHEFQAHLKIENSFKGFRQMLKWLRDQKISCSNVMIVMEHTGLYSYHMEAFLHKHQISFTKVSALAIKRSLGLVRGKNDKIDARRIARYGFEKKDVLVVTSKPDKAIERLRMLHSTRNRLVRHRASLICAIKEYKNILKQSDLIIKSQLSLVKSFTGQIKKIEAEISQLITKEQLVNQNFQLLKTIKGVGKVVATAAIIKTRNFTQFSNARKFACYCGTAPFEHSSGKTIRRKTRISHLADKEMKTLLDQSAKSAIQYDKELKSFYQRRIAIGKSKKSTINIVRNKILYRMFAVIKRQTPFIENYLKTA

SEQ ID NO: 459410 - protein, 401 aa, unidentified
MDHCTAGLDWASEAHAICIVDTAGMIRESFTAAHDAKGLSELVGRLRRYPDLRLAIERPDGLLVDTLVDAGVRVVPIHPNKLKAARERYSSSGAKSDPGDAYVLADLLRTDGHRFRELAPLSEATRALRALVRSRDDLVKARVALTNQLAAQLAVFWPGAAAIFYRLDSDIALAFLERYPTPESAAHLGEGRLAAFLRRNAYSGRRPASELLARLQEAPRGLVGGVESAARGGCVTALIRALTVLLPQISRLEGAIAVALDEHPDGAVFQSFPRAGLVNAAQLLAEIGDVRERFPSDDVLAMEAGVVPVTKRSGKAKSVGFRWACNKRLRRAVTTWADNTRHASSWARDLYDRARARGADHPHAIRILARAWLRVLWRCWQDRTRYDDVRHLAAAAARFAA

SEQ ID NO: 459411 - protein, 280 aa, unidentified
MKTIGVDLHACSLTATAFDDQGKVVERRDIPTKCRRQAAACFASSGSSCQVTVESVGFSQWFWNDVRSRVGKLVLTDPAGVKSFVGRKAKTDRNDSLLLANLLRADRLPMAYVPADPVRQLRDLVRLRHRVARTLASERRQLRGVMLKNNLPGSSVLTSDRSPKWLLAPPHHLRVPNRLAAEMRLDHITRLERDVTEPGRHIDKAGKAGPEFDRQARLIASVPGIGKLTAVTILTERGDRIRFKNIDPFGASAGLAPTVSQSGESIRHGHISKRGPPVLR

SEQ ID NO: 459412 - protein, 355 aa, unidentified
MNTIKYIGMDLHSATISVAVVNDAGKLSLEATIATEASAVLDFIGGLQGTLYVAFEEGIQAPWLYDLLLPHVAQVVVCDPRQLPRHRGENKNDRIDAQQLAQWLRLGVLKPVYHSRTRLRTLKELVRSYLALVSDTTRAMNRLRAIYRARAIPAKGTRVYAPRFREGWLKQLHEAGVHHRAELLYRQLDALLPLRHEAKRRMIAESRKHPAQKILLSIPTLGPVRVAVLMAVIQTPHRFRTNRKLWTYAGLGLVCRSSANYRIVEGQLTRAGKPALILGLNLNHNHVLKALFKDAAATAVSRPGPLREFYARQLAQGSDPEIARVTVARKLVTIALTLWKKGERFNAEHLKPQAA

SEQ ID NO: 459413 - protein, 404 aa, unidentified
MTVYCGIDWAEHHHDVAVVDYRGNLLGRRRVSDDIAGFTELCELVYQRAVDPDQVHVAIETDRGLMVRAVRGAGFRVFAINPKAVDRYRDRYRVSGAKSDAWDAVILAELLRTDEIRHRRIPADTVGAEVVSVLARAHQDAIRERLRDTRRLRSLLREYFPAALEAFTDLNTLTAQAVLSAAPTPARAAALSAEEILNLGRTCGRWGMSMREANRIHAVLHAEQLHHPDEIEDAFGAAAMAILLPLRIANLSIAELEAQLGRHFELHPDAEILRSLPGLGMVLGARVLSEFGDDPTRFADADGRRRYAGTAPITKASGKSRVVQRRRARNERLSDSCRMWAFSALGQSPGARHYYWRRRTAGDSHEAALRRVANKLLGQLHVCLARRQHYREEVAWPGGDNLAA

SEQ ID NO: 459414 - protein, 311 aa, unidentified
MFQKCRWILCLIKRLDHSASNDVDGFDAIIAELKQHSIALVLMEATGGLEAAVACSLQAQGFDVAVINPRQARDFARSMGYLAKTDRVDAAMLAQLAEVINRHPERARFIRNLPDAEREMLNTMVVHRRQLITMLTAERNRLYPSHPQSRKSISTIIGVLQDELKRINKSMEVHISTHFKTLAEILGGVKGIGAATIATLLAEVPELGHLSRREISALIGLAPFNRDSGNMRGRRTIFGGRANVRSALYMATIVATGHNPVIKQFYNRLVESGKAKKKVALVACMRKLLTILNAMIKKNEPWDPSHHYLPQ

SEQ ID NO: 459415 - protein, 404 aa, unidentified
MKQLLYAGIDWATKTHAVGVVDDHGGIRARFHVANTGKGFGGLIRRLTKLQVAGVAIERPDGPLVEAMLDAGLRVVVITPRQVKALRSRYRAAEAKSDAADALLLADVLRTDGHRLASLCPDSDATQVLRALSRTRKDLQKARVALCNQLTAQLERCFPGAVGLFADLHSATAIAFLRRYPTGQAAAGLTQARLAAFLRRIHYSGRTPVAVLLERLQTAPPANLSPDQAAGRAVCVTALLDAIQACHGRERELEAEIIERLELHADQAVFTSLPKAGRGVRAAALLSELGDVRTRFPDEEALAALAGVAPVTRASGKLRSVGFRWACDKKLRAAVVDFADDSRHGSPWAAKVYADALARTRRHPQAVRILARAWIRVIWRIWQDHTSYDPAKHGGAVRLLATQG

SEQ ID NO: 459416 - protein, 407 aa, unidentified
MKVIFGIDVSKSTSTVCELINDSKSITTITNDRAGFLELLNDLKAFTQHPQIIFEATGVYSKRLQTFLDDYGYEYVVLNPLKAKKEMNLGLRHNKTDTTDAYHLALIQKLYHHPVNQLQAEQYCQLNALSRFYDQLTSDIVMAKNRLHKILQFTFPELESLFSAAKGFNYWSIVKMYPHCELVNGSTNLEIYNKLIELPGFQDKKAKKFTLNLISSARRAYPAASCNSVESSEAKYYAQRLIDLNKKRKNLIAQMVKIAEDLPNRDLEILESIPGFAQVTAVRVLGELGDLRRFSSPNKINAFIGIDPGRYQSGEIDASLSITKHGNAVARKILYRAIGQIDNASKTHPCHIADYYESKKLSSQTKGFKKIAIASIHKLIRTMYALINNDQLYDYDVAKHNQKRLLS

SEQ ID NO: 459417 - protein, 407 aa, unidentified
MEVLYPRCAGLDVHKDTVVACIRCVTEPQHREVRTFGTTTSELFALGDWLESHGCTHVAMEATGVYWKPIWHMLEGRFELVLGNAQHIRNVPGRKTDVNDAMWIADLLAHGLIRGSFVPPTQIQELRDLTRTRKQIVREISQHTLRIQKVLEDANLKVGSVLSSVVGTSGRAMLDAIITGEGDPERLADLAVGTARKKKAELVEALRGRVTPHHRAMLKLHLGLITALQGALAELDAAAGKLLAPIQERAALLTTMPGVSDIVAQVIVAEIGVDMSRFPTAGHLVSWGGLCPRNDESAGKRRSTKVRKSANWLKTALVTAAWSAVRKKESYLRAQFLRLKSRRGAKKAVLAVAASMLTASYYMLRDGVEYQDLGAAHFDRRDKTKTIRRLVRRLSDLGCEVEVRHAA

SEQ ID NO: 459418 - protein, 264 aa, unidentified
MAGGLYIGIDVSKAVLEVAMGSAGEVRAIANEDRAIGELAAELVALKPELVVMEASGGYERLAAALMWEAGLPVVIANPRQVRQFGQGMGEQAKTDWLARMIARWAEHRRPEVRALPDAQGRELRELLIRRRQLSEMLVAERNRLAQVLSKLIRKELTASIRSLERRLKQLDDELEQRIKESDLWKRTRELIQSVPGVGKLTSFMLIAELPELGQSDRRHLASLVGVAPFARDSGKLRGKRMNRRRARRGPQRAVYGCAHGVTL

SEQ ID NO: 459419 - protein, 343 aa, unidentified
MLRTNVIGIDLAKNVLQVCHISRQGELLSNKAVSRQKLKELLAKSKPSLVALEGCASCHYWGRYAESFGHEVRIINPKKVKAYVDGHKTDANDALAIANAALQIGIKYSKPKSMEQQTLMSLEANRQFLSKTIVSLGLHIRGIINEYGIVKAKGTKGLAALVTSTLYESDVLPVSLVTTLSILWQQYLNLKEELSKLQKSMNSTTRQIESCKRLMALEGVGETTASMLYATLGNGTQFTNGRQASAFVGLTPKQYSSGGKVTMLGIDKFGGVKDLRSMLYLGAMAYIYRLPESPKNQKQAWLIKLVDRVGFKRACIALANKTVRTAWAMLHYETEYQPKPLSI

SEQ ID NO: 459420 - protein, 322 aa, unidentified
MSQPGSLCVDIDVSKAILDIAASSAIEQFSVGNDSDGFDAIIAELRMYAIALVLMKATGGLETAIVCALQAEGFELAVVNPRQARDFARAMGYLAKTDSIDARVLSQMAEVLNRHPERERFIRALPDTECQVLTAMVVRWRQLITMLVAERNRLHPAHPLNRKSINIIIKALEDELARLDADMNSHIHSHFKELAKRLSSIKGVGTMTAAALLAEVPEQGNLSRREISVLVGMVPVNRDSGTMRGRRTIFGGRAGVRTALYMAALVATRFNPVIKVFYMRLLAAGKPKKVALVTCIRKLLTILNAMLRKNEEWNESYHHVAP

SEQ ID NO: 459421 - protein, 407 aa, unidentified
MPRTSRAVIGGVDTHKDVHVAAALDDLGVLLAATSFPTTSAGYENLRRWMAGFGPLQRVGVEGTGSYGAGLTRHLRAAGIDVVEVNRPNRQLRRRRGKSDTVDAEAAARSVLAGQAAGIPKSSTGPVEGLRALRVARRSAVKARTQAGNQIRDVIISAPQELREQLGRLSLGAQVARAATWRPGPASDLLQATKRSLRHLARRHRALSTEITELDRDIAGLCAQTNPALLATDGVGPEVASTLLVAAGDNPDRMHSEAAFAALCGASPVEASSGKTIRHRLNRGGNREANNALWRIAMVRLAHHHPPTATYVRRRREQGKTDREILRCLKRYIAREIFNVLTNPNKVPRATELRQHRLAAGISLTAAANQLGTTAIRLSRLERGILHAAELATTYQNWLNAQPPHAA

SEQ ID NO: 459422 - protein, 312 aa, unidentified
MTDYTIGIDISKALLDVYLLPDGIAHQFSNDRRGFAALIKWIGRRKITRIVYEPTGAYHHAFEDALSKAGLPLARVNPLQARRFAEARGTRAKTDKVDAEVLAVMGIALKPGISTIASEMLRNLKALQIARQALIKDRTAAKNRAKNLTLALLKRQNARRMRQIERDLASIEKEMLALIHGNEQMAQTFQILCSIPGIAKITAATLIVEIPELGTLTSKAVASLSGLAPFARESGKWKGARFIGGGRRFLREALYMPALVAMRFNPDMKTVYQRLTQAGKPAKVALTAIMRKLIILANTLVTQNRKWRKNIA

SEQ ID NO: 459423 - protein, 355 aa, unidentified
MSQEKYIGMDVHQATISVAVMDASGKLIMECLLETKAATMVEFIQGLHGTLSLTFEEGTSAAWLHDLLKPHVSRLVVCDPRKAALLKDGNKSDRIDARKLAEMLRTNQLKPVYHGEHGIRTLKELGRSYLTITKDVTRSMNRIKALYRSWAVPCGGTSVYAPRHRAEWLAKIVEPGVRIRAERLYQQLDGLQPVRLQARRELLRESHQHAAVQLLRQIPSIGPIRSALLVALLQTPHRFRSKRQLWAYSGFAVETHDSGEYRSVRGKLQRNRERITVRGLNDNHNKDLKNLFKSAAISASTRPGPLQDFYVALVAKGIRPTMARLTLARKMAAITLTMWKKGVSFDPKQLHRQAA

SEQ ID NO: 459424 - protein, 344 aa, unidentified
MEYYAGLDVSLRSCAVCIADTKGKVVFERELACEVGDISNCLREFAHPIERIGFEAGTMSQHLFFGLQAEGFVVVCMEARQVNAALSAMRNKTDKNDARGIAQILRTGWFNPVHMKSREAHGQRALLSSRKALLNKTIDLANEVRGLLKIFGLRLPKTVSHGSFDGVVRPLVQMDDVLTHALLPLLDARVALYQHYLELDRRVKRAASHDEVCMRFMTVPGVGPIAALTFKAAVDDPSRFKSSRTVAAHFGLTPRRYQSGESDNPGRISRAGDRDVRSTLYSAANAMLMRTMAASQLKSWGMRLMRTKGRRRAVVAVARKLAVLLHRMWIENTEFRLEGVEGIK

SEQ ID NO: 459425 - protein, 372 aa, unidentified
MNYNTVYVGMDVHKESFTLCAYTIDAEKGSHFQRTEADYKNVLKYLEFLRTVYGNDANFICGYEAGCLGYTLYHQLTEHDVNCVILAPTTMLEQRSKRRIKTDRRDAEIIGKCLAQHNYSPVHIPTATDEETKEFLRMRDDHKLALKKVKQQILAFCLRHNYRYDGNSHWTAAHIKWLKSLNPEALYKEILDEYLLTYTTLSDKVERLDKRIEELASKDEYRESVKKLCCFIGIKTHTALSVLVEVGDFQRFASAQNFASYLGLVPGEDSSGDGQTRLGITKAGNRHVRMLLTEASQCYARGQIGFKSKELKSRQAGNSPQVIAYADKANERLRRRYYKMVLGKSKKHNVAKTAIARELACFMWGMMTEHIA

SEQ ID NO: 459426 - protein, 358 aa, unidentified
MKYVGVDLHKNQFTAYDSSTGRYRNYGSNAIGIMSFIRDCKDTTTGEQIVVGVESTGNTRYFKRLLEAERIQVKVINTMKFKVITESVKKTDKHDASTIAEFLGKDMLPEAWLCSEYSERLRRLLHVRKTLVKAIVTTKNQIHGMVTAYGYEDKKSSLQSKRGRHMIMNTLASTEIGLVVQLLMDTIESLSENVKNIEKKIEELVEGDTRIELLMSIPGCGRITAWTIRAYTDDMNRFKSAQQYAAYVGVVPYVHNSNTLIRHGRITKHGPEPLRTAFVQLVMGINRMRALHNYRIMKRYRFIKENKGSGKAIIATARKLTHIVWHILTNNEPFNPDLQLRSSWESNRHMQFEEKRFA

SEQ ID NO: 459427 - protein, 420 aa, unidentified
MDEITEEPGALVERIAALDIGKATLTACVRVPHEDKPGARRQEVRTYATRTPALLELRDWLICQGVTLVVMEATSAYWKPPFYLLEDDIECWVVNARDVKNVPGRAKTDKLDSVWLCTLAERGMLRASFIPSRPQRQLRDLTRYRRTLTQERTREKQRAEKLLEDAQIKLSVVISDIFGKSGRAMLDALIAGQRNPHELAALARRNIRAKTSVLQEALTGHFTDHHAFMLGMMLARIDALTTQIGTLTTRIEQATAPLSAQIAQLDEIPGIGTTAAQDLLAEFGTDMSRFPTPGHLVSWAKFAPKARQSAGRSKAAATGKGNPWLGGTLGEAAAGAARTKTFLASRYKRIVRRRGKQRALVAVGNSILTIAWHLLSDPAAHFTDLGPDWHDRLTPLRRKHHLIAELERLSGKKVTLHDAS

SEQ ID NO: 459428 - protein, 457 aa, unidentified
MSQTKRTRRSRELSPVHPAAAAIDIGAAMHVAAVGSNRDKEPVRTFRTFTADLHRLADWFSECGIKTVAMESTGVYWIPVFEILEQRGFEVMVVNARDAKHVPGRKTDVCDAQWLQRLHEYGLLRASFRPQAELAALRAYLRQRDRLLDYAAAHIQHMQKALMQMNLQLHHIVSDITGVTGMSIIRAIVAGERDPKVLASQRDRRCHASVETVCQALIGNYREEHIFALTQAVELYDVYQTKVLTCDTQIEAILKRLKKNARPPKSKLPPARRRARQSNEPAFDVRGALHAILGVDLTQINGLGPSLALKLVGECGTSLTAWPTAKHFTSWLGLAPHNKISGGKVLSSKTRRTGNRAASLLRLAAGTLGRTDTALGAFYRRLSARVGKAKAITATARKIATLFYNTLRHGMAYTDPGAGYYEDRYRQRVLSNLQRRAKSLGFVLREMEPDAVQVGVS

SEQ ID NO: 459429 - protein, 341 aa, unidentified
MQITTIGLDIAKNVFQIHGIDAAEKVIVRKQLRRGQVAAFFEALAPCLVGMEACATSHHWARELTKLGHEVRLMPAKDVKAYVKRNKNDAADAEAICEAVRRPTMRFVRIKSAEQQGQLMLHRARDLLMRQRTQVINALRAHLAEFGITAAQGREGIKELLAIVAQEEGSRLPSDAHASLTVLATQLQAVQTMIGSLEKRIVAQHRSNEASKRLETIPGIGVIGATTIAAVVPDPRVFRSGRDFAAWIGIVPRQDSTGGKQKLGPISKQGDQYLRRILIVGAHAVLRRARQQPETYPWLTQLLARRPFKVVAVALANKMARIAWALLAKGGTYRAPQLVAA

SEQ ID NO: 459430 - protein, 418 aa, unidentified
MTKRKDSTLIQIVHPICCGLDVHKDKISACLITVDDTGAEQHELREFTTFTHDLQKMKKWLIENKCPIIAMESTGVYWHPIYNTVGDAMEVTLVNARHIKNVPGRKTDIADSKWLAGLLRHGLLKGSFIPPEKVREWRELSRLRKKYTESLADYKRRVHKLFITANIKIDSVVSDLFGMTGLNLIDLLCNDSELTMEKVQECTKGRLKKKVPELYSCLHGYFKDHHRFQLVGMMETINMFKKRIEQINIRLESLMCEHKDLLERLDEIPGIDKKSAQSILGEIGITLDDFKSMSAFVSWAGLCPGNNESAGKRKNGRNAVRNHPFKTILVQVAWAAIKKKDSYYKAKYYKLKARRGAKKAIVAIAHRVAKAIYNIVKNGESYKDLGEDYLCKPTKQRVLKNLMKKANELGMKLVPCEN

SEQ ID NO: 459431 - protein, 440 aa, unidentified
MAMRKRDDEVFPNAAGIDIGASSHWVAVPPHSSDAPVREVGTMTDDLNALADWLLGCGVEVVALESTGVYWIPVYEVLEQRGLEVWLVDARQVKYVPGRKSDVQDCQWLQKLMSYGLLRAAFRPGAEVCVIRAVARQREVLLTQQGSWVQRMQKALLQMNLQLTEVITDVMGQTGQAIIRDIVAGERDPRALARHRHRRVKASEQDIVRALTGNWREEHLFVLTQALAMYDDIARHLHECDQRLQALLAERSAATVELGKTPRAGTKARAGFDARQTLANWAGVDLTRINGLGLDSVLKILSEIGTDLSRFDNVKHFCSWLGLCPATKISGGKVLSARTKRSANRVRQALKMAAMTLSHSDSALGAFYRRLCSRMDKPRANTATAHKLARMVYFMLTRGEAFVDQGQQRYEEQQRQRSIAALKRRAASLGFQLQLAAVPA

SEQ ID NO: 459432 - protein, 489 aa, unidentified
MQTAKRLWQNRKEKKEWTRRLQSEDPGLEVVHPHAAGIDVGNSAHYVAVRPDRDPEPVRRFECFTADLYRLSDWLKSCGVNTVALQSTGVYWIPLYDILEERGFEVYLVNARHTKNLPGRKSDVQESQWLLKLHTYGWLNNSFCPPSAIRTLRTYWRQRAEHVEGAATCILRMQKALTQMNLQLANVISDLSGVTGQKIVRAIVAGERDPRKLAELRDARIQASQEEIAKSLEGNWRPELVFVLKQEVDMYDTYQQRIAECDQRLQKHLATFANNATPGQPPSPQGESKKKKKKPTQNAPAFDLSHELERISGVDLTRIDGIEVIVAQTILSEVGLDMGRWKTEAHFSSWLGLCPDNRISGDRVLRRGTRRVINRAATALRMAATTLIRSRSYLGAQYRRLRSKLGAPKAITAMAHRLARLVYRMLKYGQQYVDKGMEYHDQRYRNQQIHLLQKKGKRSSETALTTHLGSEVSTRIRKWTFIFWGSIAG

SEQ ID NO: 459433 - protein, 409 aa, unidentified
MQQLFERVAGLDVHRQTVAVCVRVPGAAAERAQHIRTFGTTAADLITLRDWLEAHAVTHVAMESTGVYWKPVFYVLEEAMTCWLVNALHVQKVPGRKTDVQDCVWLAQLLEHGLLRGSFVPPPPLRELRDLTRYRKVLIQERTREANRLHKVLEDAGIKLATVATDILGVSGRDMLHALIAGTTDPVILADLARGTLRKKLPALRQALTGRFRPHHAFMVSQHLSHLDYLDEAIAALSAHIEDALRPFAREQQRLDSIPGVAQRTAEVLIAEIGVDMRQFPTAQHLASWAGLCPGQNESAGKHRSGRIRPGNRWLRMALIEAASLAARSRTTAFGARYRRIARHRGHKKAVVAVAHAMLVTAYHLLARQLEYREPGVDYFERRHAERTTRRAVRALERQGYRVTLDPAA

SEQ ID NO: 459434 - protein, 448 aa, unidentified
MMAPQEIDDEEYEQVLERVAAVDVAKGSGMVCTRVPHPSRPGKRQSRVWQVDADTGSVMELADHLASEGVAKVALEAGLRLLAYLVLPAGGTRPGRAAGQRPRRGECPGRPKSDKLDCVWQAKLTERGMLRPSFVPPAEIRRLRDYTRLRTDLTRERTRHWSRLEKLLEDVLIKVTSVASKTGSKPVRDMLEALIAGERDPEILAGLARGKMRARHDRLVEALTGRFDDHHGELARMLLDQIDALTAHIDQITGRAGELIMAMPGAWGVDADGVTGPGAGLDVGAPVLPAVARLDEITGIGRDAQVLIAEIGLDMGVFPTPGHLVSWAKLSPRTIQSGAKSQAGRTGKGNPYLKGVLGEAVAAAGRTDTFLGERYRRIARRRGKLRALVAVARSILVIAWHLLADPATRFRELGAGYYASRIDKNRKTRSHVRQLEALGYTVTLAHAA

SEQ ID NO: 459435 - protein, 435 aa, unidentified
MEEVEDEPLFAERVAGIDIGKAAIMVTIRVPGDGGRRRQQETREFRAVRKDLLALADWLRCWGVTKVGMEATGDYWKPAYFLLEREGFDCVLYHASQVKALPGRPKTDKLDSVWLAKITERGQLPGSFVPPEDIRRLRTHTRYRRHLIQARTAEKERCEKLLEDAHLKLSSVIRDIHGVSGRDMLTAIIAGQRDPKVLAQLARGRMRVKIRELEEALDCSFFTSQHAFILAMMLANIDHLTAQVSELSAKIEVLCEPYARQIAQLDAIPGFGIITAQDIIAETGTDMTVFATAGHLCSWARQAPQVSQSAGKRKGRNATGTGNPYIGAALGEAAIGAGRTQTFLGAKYRRLVRHMPKKKAQGAIMRTQLALCHVLMSDPDAAYEDLGPDYYERKANIRRRARDHIRGLERLGYKVTIEALSPDPETRELPISKAS

SEQ ID NO: 459436 - protein, 373 aa, unidentified
MVLRKNRHYEEEVSMSTITIGVDLAKSVFSACEMDAGGHVLRRQDLRREPFGLWLAQRPAGTVVAMEACSGAHHWARRCLDYSLEPRIIAAQFVKPFRKGRKTKNDRADAEAIATAARQGNMRFVPIKSVDQQVRLSWHRVREGYKVESLAIGNRIRGLLAEFGVIVAQGDVALRRLLADLDAQAGLPAEFKELIRDVADHWAQLRTHFDACDARIEAHAREDEQCVRLRAIVGIGPITADAVVATVGNAREFKQGRQMAAWLGLVPAQHSSGGHARLGEITCRGDAYLRTLLVQGARSSLQRAQAVAIEKATPEQLWIRSLDGRMLFGKVIVAIANKHARQIWAMLAHDVDYDPCACLNHPMHRQTRTEHAA

SEQ ID NO: 459437 - protein, 313 aa, unidentified
MKKTTCGVDVSKAKLDAGIEPGHLFASFDNDAGGIAELIAFCRDNDVELVVMEASGGYERRAFIELWGHGISCALTNPRSVRRYAEAMGILEKTDRIDAFVIARFADAKNLAPTPLPNQTQQRLKALVARLRQVTDDLTVQKQRRSSMFDNAEMQASIDEVIALLKRQSRSLEGEIASMIDDDPLWAKLAGAWRKVKGVAGRTVARLHAELPEIGILSNKAIAKLAGLAPIADDSGKRKGRRSTRGGREGVRTILFLVAATAARYDEHLGQFRDRLIKAGKEKMVVRIALARKLLVILNAKARDARAEYARAT

SEQ ID NO: 459438 - protein, 373 aa, unidentified
MDTIYIGVDFHARQQTICYLKTETGELVTCELKHQDKQAVRAFYAQFRKPVIVGLEASGYSPWFERMLEELGCEVWLGHATEIRRRARWRQKNDRRDAELILDLMLHDEFPRLHRPAVQSREVLRMLRYRQKLIKIRTMSKNSLQALALQAGLAKRSRLFTKAGQQQLGAAEMSPVMHWQREHWLQLLEPLNQQLLETMVWFKAQSKDDVCIKRLRTHPGIGLLTSLCLVHTLQPVSRFRNTRKVAAYAGFDPIERSSAERKCFLGISKAGSRLLRYLLVEAAHTAIRKDEDLKRFYQRLAERRGRPKAKVAAARKLLIRAYIMLRDEIDYAEFRHRAVAARLARRGQGPTNVPEVLIGQPASAECRDHTSQL

SEQ ID NO: 459439 - protein, 343 aa, unidentified
MQTVTTVGLDIAKSVFQVHGIDAKGDVVIRRQLKRRYVLAFFQKLPSCLVGIEACASSHHWSRELTALGHTVRLMPPAYVKPYVKRQKNDMADAEAICEAVTRATMRFVPTKTPEQQSCLMLHRTRHLFIRQQTAVINSIRAYLAEFGIVAPVGRKGVAELLHVVADPSDKRVPEIARACLAALGAQLRILKEQIVKFDRMIMAWHRSNETSKRLHYIPGVGPMLATALVASVADPRTFRSGRNFSAWIGLVPKQHSSGGKDKLGSISKQGDRYLRSLFVAGALAVIRYAKIHGTKHRPWLTALLTRRPTKVAAIALANKIARMAWAMMARGGRYKEPAALAA

SEQ ID NO: 459440 - protein, 337 aa, unidentified
MDYFAGLDISMDETHVCVLDREGVVVRESKTESTAEAIAGELAKAPTCHRIVFETGRMAPILFHGLNQLGLPVVCVESRQAYQALKSLATHKTDRNDARGLAHLARTGFFKPVHVKSLSAHAVRSLIIARKKLVGQRVTLENQIRGLAVVFGIRLPRALTAAFVNQALKASEGIAGLSAAMRGLIAARTAVMTAVAAIDADMRRMTRASAACRRLMTIPGVGQLTALAFVAAIDDPSRIRRSRDIGAYLGLVPTRHQSGELDYTGGISKCGDRRVRTLLYEAANVMLTRYKGQLKLKDWAFAIAKRSTMRKARVALARRLAIIMHAMLRDGTEFAFA

SEQ ID NO: 459441 - protein, 377 aa, unidentified
MIAQTRATHDVTGLGEVDRFLSRHGEVVGIAIERSEGLLVERLQHQGHRLFCVSPKMSARARERYRLAPTKSDAFDAFVLADMLRHEHRHWRSLSVPSPLLAELRALTRDRERLVSNQRDVENQLRAVVLTYHPGVLHLFSSLDRDITLAFLRDYPTPEQAGRVGPARMAAFCARHGYSGRTRPELLVDRLRTNLVSASAGTTAGKAFSAGLFVDQLELLNTQVRSITKRIRELVVQHPDAAIFLSFPGMGHVTAATMIAEMGEDRTRFPTADVLLAETGTAPVTRSSGRTRTVRFRYAANKRMRHAIDWWAFVSVRENDWAHDAYQQARSRGQLHNRALRGVGARWTRILWRCWTDHTTYDPAVHIKNQPATTLTA

SEQ ID NO: 459442 - protein, 341 aa, unidentified
MDITIVGLDLAKNVFQVHGINTAGDVIVRRRLRRGQVFEFFAGLKSCLIGMEACGTAHFWARELVALGHEVKIIPPSYVKAYVRRGKNDAADAAAICEAVARPNMRFVPIKTEDQQAALMLHKARQLLIRQQTMLVNALRAHMAELGMTAPQGRGKVENIIAVIEDDEDESIPALARAALKPLVTQLRANEDATAALDAEIKAWHKGNAASQRLATIPGIGFLTASAIAATVPDPSFFRSGREFSAWLGLVPRQNSSGGKDRLGRISKQGNPYIRRLLVIGATSMLRYARAKTAPGANWVNGLLERRPARLVTVAMANKTARIAWALLSKGETYRAPIAAV

SEQ ID NO: 459443 - protein, 344 aa, unidentified
MKRCRGGDVGELLSRFAHLQEKVRGRTGHLFPIITIQEAGLDGFWIHRVLQEHGVESHIVDAASIAASRRGRRAKTDRIDGETLVRALLAFKRGEPRVCAMVRAPSPQDEDRRRVCRERRVLIAERVERVNRIKGLLFAQGIGGYQPLRKDRLMRLEELRTGDGRTLPPHLKAQIIRELDRLELLLDHIAVVERERDLLVSAADENTTITRPAALLCAIKGVGAEIAAVLWTEGLSRHFDNRRQVAAYAGLAPTPWQSGTIDREQGVSKAGNPPLRTTMIQLAWLWLHNQPSSALSEWFFRRVQSNGGRHKKSTIVALARKLLVALWKFVRFGVVIDGAAMKAA

SEQ ID NO: 459444 - protein, 343 aa, unidentified
MEHYAGIDVSLERSSVCVVDATGKIVREAKVAGEPEALVGFFAGLGVAMTRIGLEAGPLSQWLHAGLSEAGFEAVLLETRHVKAALSAMIVKTDRKDARGIAQLLRMGWFRPVHRKSPPAQEVRSLLVGRKLLQGKLLDVELSLRGILRGFGLKLGEVSKGRFAARVRELVAGQPTLERVAEPMLRAREALRAEFHVLHRAVLAVVREDAVCRRLMTVPGVGALVAVTFASAVDDPGRFARSRAVGAHFGLTPKRYQSGETDVTGGISKAGDAMVRAALYEAANVMLTRASRFSTLKRWALGVAQRRGMRRAKVALARKLATVLHRLWVDGSEFRFGKEAATA

SEQ ID NO: 459445 - protein, 400 aa, unidentified
MLSIGIDVSKGKSTVCGMKPGGEIVYTPFEVQHTREGMSELVSLLRSSGEEVRAVLESTGSYHCPVVAALLENGIFVSVVNSLRMKRFCSQSIRKVKTDRIDAMQIALYGLAYWQELQPTRLPEDTYRELQLLARQYYQMTSMLIKAKVDFNALCDQVLPGMQELMSDHAGRHKLSDFVLRYHHTTHILEMGETRFRKDYCKWAEKKGYRNCERMAALIFATAQNGIPVLPNAPSTQIVITEAIRVLHTVEASRDAILTQMQALAKTLPEYSLVREMPCIGDTLAPRLIAEIGDVRRFHSKRALIAYAGIDAPPYQSGKFCANNRHISKRGNRYLRKTGYEVMQSYVMHKPANDPIFTFIEKKRGEGKSGKLAMVAGLNKFLRVYYGKVTELYRSLPAIE

SEQ ID NO: 459446 - protein, 315 aa, unidentified
MTISSQKYYIGVDVSKTTLDVFILPLNKTLSFENNDVGIDLLQKQCASHHPVLFIVEATGGYEQTLAQRCMKANLPVAIVNPRRIRDFAKASNQLAKTDKMDAKIIALFGQAFEPKPQPMADDKSLPLADVSARRRQLIDMMTQEKNHLEHASKYTKKSIQTILKALQKELKAIDSAQTKIIAQDPSLAAKSECLQTIQGVGAVVTATLLADLPELGKLSHKKITALVGLAPYNRDSGTLRGKRSIWGGRASIRRACYMAALVAIRHNPQIKQFYQRLCAAGKQKKVAIVACMHKLIIIMNAMIKNQQSWKFTVN

SEQ ID NO: 459447 - protein, 347 aa, unidentified
METNMETKRYIGIDLHRNCFTACLRLENGRKYLKKWRLEDMDKFVAKLRPTDQVAVEVTGNTRLFHDAVAPHVERVVAVNSSQFKVITHSVKKTDPNDARNLALYLAKDLLPEVRMKDKTRAQIASLTQTRDSMVKLRTALKNKVNNLCSAQGVNLNKESLASEKGLKAVLEMHFDPLVNLELKIIVDQIRSLNKSIAELEETIGQEGQKLEGHRNLTSIKGIGGLSGGILLSIIGDIADFADEGKLAAYFGIVPRVSNSNETEHTGRITKRGTKLGRTTLIQCALIAQRYSPYLKSYYEKMKSRRGTGKAIVALARKFLGIIYRTLKNKWVFEDFPNFVLAEEATA

SEQ ID NO: 459448 - protein, 352 aa, unidentified
MDKGNKLNFSGQHIYVGMDVHKKSWSVSIQSEQFEHKTFTQPPEVEKLTGYLEKTFPGATYHTVYEAGFSGFWLHDQLREKGIDCMVVNPADVPTKDKERAGKTDRVDCRKLARGLRNGDMKGIYVPPRVKVEDRTLVRTRQSMVRKQTRCKNQIASILFFYGITIPEEGRWTRRFIHWLESIRMERASGDFSLKAHLEELNHLRQIIANLNRAILSLSRTEEYRSDVLLLKSVPGISTLTAMILLTELSDISRFSSLDKLASFSGLVPDIKSSGETEYATGITFRRNPALRALLIESSWVTVRKDPALMMAFNKLSLRMKKTQAIVHIARKLLNRIRFVLKNRQKYVLAVV

SEQ ID NO: 459449 - protein, 262 aa, unidentified
MFVGIDVSKARLDVAFRPEGTSFEASNDEAGIGDCVRRLQALRPELIVVEATGGFETALVAGAAVVGLPIVVVNPKQVRHFAKAIGRLAKTDSIDAEVIAHFAEAVRPEVRPIQNEAGELLTALLSRRRQVLDMVVAENNRLTTTRERQVRQRITHHLHFLKQELRELDKDLDKEVRSSPAWREKEDLLKSVPGVGPVLARTLLAELPELGRLDRKRIAALVGVAPMNGKTGKVALVACMRKLIVILNALVRSGERWNAEAT

SEQ ID NO: 459450 - protein, 387 aa, unidentified
MSQTIAAPIPAAVDYDKTLVLAIEVSNKSWVLAAQVPGLPHTKAKRTINPEAEALLAAIDGYRARAAATGRSIERVIAVYEAGWSGFWLARWLMRHGVEVYVIQPSSVPVDRRMRRAKSDGIDSELLLRTLLAWLRGEPRVCSMVPVPDEADEDARRCVRERTELVSDRICLTNRIGAVLATLGVSDYNPLLQNRRRRLTELRTGLGEPLPANAHAKIKRLLTRLELVLTQIAELERERDAVVETETPDKAGKMIQQLIGLRGIGVQSATVLVREAFVRRFANGKALGSYAGLASSPYSSGGIDREQGIGKAGNRRLRTVMIELAWLWTRYQPGAAQVCWFGERVGSTGRRVRKVMVVALARKLLIALWRFVVDGVLPEGAVFKPAA

SEQ ID NO: 459451 - protein, 416 aa, unidentified
MNAAGIDVSSRKSTVAVLRPFGEVVRLPFDVAHNTEGLASLAEQLKALDGETRVVLEHTGRYYEPVAKALHEAGLYVSAVNPLLIKEYGANSLRRVKTDKADAVKIARYALDNWADLRDYTPMDTIRYDLKTLNRQFQLASKQRTASANNLIALLEQSFPGIRKCFDSPVRSDGTQKWVDFVHTFWHVECVRKQSLNAFSERYRKWCKRHGYIFKQGNAVEVYSLAKNAVVLVPKSEVTKVLVQEVANQLTSISRSVETYRAEMERLASTLPEYPVVMAMYGVGKSFGPQLMAEIGDVRRFERKQSLVAFAGIDPMPNQSGDKNVRSNKSSKRGSPYLRKTLFNIMGIYLKCSPQDEPVYQFLDHKRSEGKPFYVYMTAASNKFLRRYYAQVRDYLSTLDDLPPVDMDSTGLKTSD

SEQ ID NO: 459452 - protein, 354 aa, unidentified
MSQTLNAAIAVVGIDIGKNSFHIVGHDERGAIVLRQKWSRGQVEARLANMPPCLIGMEACVGAHHLSRKLRALGHDARLMPAKYVRPYSKGQKNDFRDAEAIAEAVQRPTMKFVATKTADQLDLQALHRVRERLVSQRTGIINQIRAFLLERGIAVRQGQRFLRAELPRILATPPDVLSPRMVRIIEDLAGDWRRLDERVEGLSNEIEAIARQDTGCERLMSVPGIGPIISSAMVAAIGGGDVFIKGRDFAAWLGLVPKQISTGDRTILGKISRRGNRYLRVLFVQAAWVVLIKPTVWERHGLKPWIEAARKRLHHNVLAIALANKLARIAWSVLARGRAFEARKMDQAANQSA

SEQ ID NO: 459453 - protein, 397 aa, unidentified
MYIVGIDIAKRKHEAAVIDGEGTVIIKPFSFTNNCSGYNRLLAMLTKAKLPLDEVSFAMEATGHYWLALFTRLQKEGFRVQVINPVQTNSIRSFYIRQAKTDPRDALLIAEVIRFGHFSESTLHPENIYELRELCRGRHAIVSMQADVKRKVVALLDQVFPEYETAFTNLFGDTSMAILQTCPTPKELSEMPLEELCHLIEVSSHKRFRMAKARELQELARNSFGFAMAGDVFSTMIRLYAKHLDFLKQQVREMDRKIAEIMETLDTPITTITGIGPTLGAYILSEIGDISRFSSAAKLAAYAGIDPTMRQSGEYNGVRNRMSKRGSPYLRHAIWLAASSAVLHDPALKLYFQKKRDEGKPYMASVGHACRKMVSIIYAVMRDNKAYTPCIPNEISA

SEQ ID NO: 459454 - protein, 344 aa, unidentified
MVACGLDRETGEVLERRLTPDHREILEWIGGLPAPVAVTYEAGPTGFGLARALAGAGITCAVAAPSKLIRPPGDRVKTDARDAALLARLLHLGEIVAVTVPSVVQEAARDLVRAREDCRADLMRCRHRVSKLLLRQGIVYYGGNPWTLAHERWLRQQSFDCPGLGTAYREAFDAVLATRDRRERLDAAIVALAGDCEFTPVVQRLGCLRGVSTLTAFALASEIGDWDRFTGRSIGAYLGLVPTEYSSGGTRVQGGLTRTGNSHARRLLIEAAWHHRKPYSPTVVLRRRWDVASAAARTRGHAANRRLHHRWERFDERRKRSVVANAAVARELAGWCWSLAVLEE

SEQ ID NO: 459455 - protein, 356 aa, unidentified
MTISTKYIGLDVHKESISIAVRNSVGKVLMDCVIETKASTILQFIDGLRGDLHVTFEEGTSAAWLYDLLKPHVTKLVVCDPRKNKSMREGNQNDKIDARRLAELLRLNHLNPVYHGEHGLRTLKELVRSYLTVTKDLARVMTRVKAIYRSWAIPCSGKQVYARCHRAEWLGKITEPGVHRRAEFYYQQLDALRVLRQEARRDLLAESKKHKAWKRLCQIPAIGPIRAAVLLGILQTPHRFRTKRQLWNYGGLAIEMHSSADHRSVDGELQRSRKNVLVRGLNRNCNHDLKNLFKGAAAVASSKPGPFEKFYAALVAKGIRPEMARLTLARKIATIVLIVWKKGVSFDPQYLKPQTV

SEQ ID NO: 459456 - protein, 394 aa, unidentified
MILVGIDIGKNQHTFSIIDKGTGEILSNHSVFNNNQEGFLSLIKKLCSYAKSNLLIGMEDTGHYHFALLKYLLDNRYTVALINPTTTDLTRKLQGGITKNDPLDSLTICDVISSNQRKKPYRITKVNRFDLYEQKQLTRHHHNLKEELNTYKNRLQKCIDIVFPEFNSLFCSKYGVVYMSILKTFASAEKIANADIRTIRKCFEYDGRGRRISLSAEQLKASAKTSIGIPSVAEEIQIRHLVCQIEMIEEQLSEIDKKIEEFSLQNNSPILSIPGISHFSGTSILAELGDICNYSKASQIIKFAGVAPYHYESSQFTAQHTAITKKGSRYLRKTLYQIILPVINHNKVFNVYYNKKLAEGKGHRCAQGHCIRKLLRIIYHLLSTGQTFNPALLI

SEQ ID NO: 459457 - protein, 372 aa, unidentified
MARITRFVGMDVHAETIAVAIAEGRNTVRSVGTIANRPEAVRKLIGKLGDPGSLRVCYEAGPTGYVLYWQLTRLGVHGDVIAPSLVPKMSGDRIKTDRRDAEKLARSYRSGDLSTVWVPDAHHESLRDLVRAREAAKEDELRARHRLSKYLLRYGQRPGTECRAWTAAWWQWVRGLKMPHSEQNTVLLDHILEVDHQAQRIERLEGSIDRAIQSAPEHLRAIVEALQSLRGVAKITAITLATEFGTFRRFEHASAVMSYTGLVPSEHSSGARSRRGKITKSGNSHLRRVLVESAWHYRHRPHLCLRQRRLQQSLSPKVAAIAWRAQERLHRRYWSLSNKSKPTGKIVTALARELVGFIWAIGTEVETSGARH

SEQ ID NO: 459458 - protein, 362 aa, unidentified
MGTTPVQSETPTAVRTDLGAIFVSLELSRSTWLVTSLSPGGGEKMSKHVVDGGDVAKLLDRFGELQQKARLRTGKSFPIVTIQEAGLDGFWIHRVLEANGIESYVVDAASIATSRRRRRAKTDKIDGEALVRALLAFKRGEPRVCAIVKAPSPEDEDRRRICLERKVLIALRVRHINRIKGLLFAQGVSGYEPLRKDRRNRLEELQTGDGRGLPTHLKAQINRELDRLELLLEQIAAVESERNSLLVAHEDPSVETPAPAAMLLAIKGVGAEFAASLWSEGLCRHFDNRRQIAAYAGLAPTPWKSGTIDHEQGVSKAGNRRLRTTMIQPAWLWLRNQPGSALSRWFADRCAAIRMRRRRQSG

SEQ ID NO: 459459 - protein, 394 aa, unidentified
MRFIGIDVAADEHVVASVDAAGGVQLKPTAFAEDADGYAALFTRLGPPADTLVAMEATGHYWKNLFAALVARGFAVAVLNPLRTHRFAGEDLQRTKTDAIDAIRLARFAAQKRPAATRLPDPALEALRELVRFRDRLVQDFGDRVRQLHRLVDLGFPEFPHHVRDLGSELATTILHAYPTAAAFRGVPSRRVAGLRYDGRHRVGDALATQLRDAAARSVGQHHAEVYRVEVRYTCEDLDVLRRRLRTLERDIERLLEAHEVGRLLTTIPGIGPQTSARLVATFGDFSSFSSGAAVAAYVGAIPGLSQSGQRRSMRAGLTAIGAADLRAKLWMPVLVAVRRNPWLRAYYHRLLARGKLPKVALIAAMRKLLHALYSVATHRRPFVPQLPAPGTRP

SEQ ID NO: 459460 - protein, 342 aa, unidentified
MDHIGIDVHKRESQICIVTADGEVVEKRIRTERERFAAVLGGRAPTKILIEASTESEWVARCLEELGHEVIVADPNYALMYATRSRRIKTDRRDAKALADACQHGHYRAAHRTSSEQRRVRSQLTVRETLVRTRTRMIVVCKALLSRHGIRVSGGESEQFGKRVRAAGLLASVQEELEPLLLVLEQLQMQVDALDRALERLAKEQAPVRALCTVPGVGPVTAAAFVAAVDDPKRFRHAHQVEAYLGLVPSERSSGDKQQRGPITKSGPPRVRSLLVQAALGLLHHRRSSSVHLRDWALRIRQRRGHGVAIVALARRLAGILWAILRDGTSYRPQVSQLAASS

SEQ ID NO: 459461 - protein, 359 aa, unidentified
MSSIPVFVGLDYHQDSVQVCVLDAQGKKLFNRSVRNDAQAVAGVATQFGQPVRIAIEACCGAANMAEELVVKRGLPVELAHPGYVARLKRSPDKTDLGDAHLLADLARVNYLPTVWLAPESTRQLRRMVHHRAQLVNRRKDVKLRIRGLLRENRVRYVEASAWTKIWMAWLKNEAPLLEGDRFIIDDHLAELMSLTVRIAAVEARLKKAVENDPLVAQLLSMPGVGLVTAVTMRAQIGRFDRFQTGKQLARFCGVTPRNASSGARQADAGLIKAGNPELRVVLIELAHRLIRGLDDRWAGLAAGMLQRGKPKNVVVAAVANRWVRWLHHELRRGSQQLGSSSTKGVPPHPSSPSLGRKR

SEQ ID NO: 459462 - protein, 313 aa, unidentified
MIEERTFVGIDVSKLRFDGYAHPCGRRLSAGSCAQDRAALIRQVAALSPAAVGLEASGGYERKLADGLHASGLEVHILPPARVRGFARALGQAAKTDAIDAAMIAQYLAAAHHRLKPYVPDPARARLSALAAHRRRLVAEKSGLASQLDTIDEPVVRSMIEARRLAIAQDVKALDKAMRDLLAATPNLRRQYGRLCQVAGVGPVFAITLLADLPELGAVSPKAAAALLGVAPHARQSGNTHRPGRCSGGRKHLRDIAYMGTLSAIKARDPVLHPFYARLRSKGKPFKIAIVATMRKLITILNAIARTDNAFQQ

SEQ ID NO: 459463 - protein, 392 aa, unidentified
MIYVGIDVAKDKHDCFITNSNGEVLFKSFTIPNNRAGFETLFQRIEAVSDDLTKVKVGLEATGHYSYNLLGFLLDKGLTTFVFNPLHTNLYRKSLSLRKTKTDKVDSRTIATMMMSDMNLKSYSDTSYHNEELKSLTRYRFDKVKERAKLKSSVSRLVCILFPELEKLVPTLHMASVYALLFEFPGADAVANAHLTRLSNLLFDSSKGRYGKDTAVMFRDATRSSIGSHMPAKSLELKHTIKLIWELTIEIDEIEAAIKRIMDEEIQSPILTIPGISYRMGAMIIAEIGDFSRFDSADQILAYAGMSPSTYQSGQLDNCYSHMEKRGSRYLRYALYHATKYVCHWDKSFGAYLEKKRSEGKHYNVAISHATKKLVRLIFAMEKSGKAYLPAT

SEQ ID NO: 459464 - protein, 423 aa, unidentified
MGTCAGAGTAKPSSQPVLDDSPGKNDKACETAWDLRTPSGQSPASGSIVKGGHGRSMSGRSSGKTVVQQDRRVRKSGASLRQLQGHKDRTPQGGSSVGSTPLYKAEVGMTTSNGKFVGIDVAKDKLDVAVLGEKKASQVGNDEVGIAKLIKQLQALKPELIVVEATGGYQRAVVLGLYEAGLPVAVVNPSRVRQYARASGLFAKTDKLDAFNLAEFGKQMKPRKFEAKSEGGQYVSALLVRRRQLEEMLKAEKSRLRTVPPKMRGSVERMIETLKEEIKRLEKELDQFMKENEDWQAGEQILTSAKGVGRITATTLLAELPELGKLDRKKIAALVGLAPMNADSGKKRGYRKTKGGRVEVRNVLYMSTLVATRYNPLIQAQYQQMLKRGKVKKVALTACMRKFLTILNAMMRDQVPFKQRPSA

SEQ ID NO: 459465 - protein, 408 aa, unidentified
MRIIGLDIHRAFAEAVAWKDGKLSRLGRVIMRREQLEEFAKQLSNSDIVVIEATGNAASVAAVIGPHVSRVVIANPKQVRLIAHAKIKTDKIDASVLAQLYASGFLPEVWIADEATQALRRQVTRRNQIVRQRSRLKNIIQSILHAHLIPSCPHQDLCGPTGRAWLSEQILPGDERLAVERHLREFDRLTDDLKVIERDLAQSALADDRATRLMTVPGINMVVALALIAAIGDITRFAKPEQLVGYLGLNPSVRQSGPGPAYHGRITKQGRGHARGMLVEAGWVAARCPGPLRSFFLRVQSRRGQHVAAVATARKLAILIWHLLTKNENYLWSRPALHARKLRDLELKAGHRSARGQKGTAHAYNLKSQRDQERRWVEQAEAGYARFVAGWNARGPKARTGAAKEERQ

SEQ ID NO: 459466 - protein, 337 aa, unidentified
MKRYLGVDLHRTQFVVCTRWENGEQEIRQWRIGELAKFVEQLQSQDQIAVEAMGTTARFYDEVAGRVARVVVVNPHQFKVISESVKKTDRKDAQALALYLEKDLLPEVRMKPKQNRELMHLAETRDLLVKQRSALKGKINNLLAMQGIELKREALSSKIALARVLALPVSGMVQLELRILVEQIRALSESIVELDERLEEEGQQLPGYENLTSIKGIGSLSATVLLTVIGKISDFADENKLASYLGLVPKIANSNESERSGRITKQGNKLARTALVQCGLVAKRYSPYLSRFYDRIKQRRGGGKAKIALARKLVKIVYDTLKNQWVFEDFPSFTLAA

SEQ ID NO: 459467 - protein, 364 aa, unidentified
MSTLHYVGMDVHKETIDVSMYKENDPRPYCEKRIPNRDASIKKLFKGLLQTGSAVACYEAGCMGFTLQRTLEGMGITAVIAAPGKIPRRSSERVKTDRRDARTLATYLRNGDIEAIRVPTEDEEVVRDYLRGREDVRLDLGRTKQRLQKFLLRHGYVYESVRYWTGRHEKWLRSLAFKNRLMKETFDEYHLRVQELEGKLMMMDKRVEEIALSELYAPKVNKLRCFKGIDFLTALTLVVEIGDFKRFKSAEAFMAFLGLVPREYSSGEKRRQGGITKAGNTHVRRLLVESSWHYRYSSPPSKRLMERRYGQPADVIAYADRAMKRLQHKFFKLILRGKTSQAAVTAVARELAGFVWGMMVGCTA

SEQ ID NO: 459468 - protein, 341 aa, unidentified
METQRHIGIDLHRNQFTCCMRLENGRNYLTEWKLEELPRFVKKLRPNDAIAVEVTGNTRLFRDAVAPHVARVVAVDPNQFKVISHSVKKTDSNDARNLALYLEKDLLPEVRMKDKAEAQLASLTQTRDTLVKLRTALKNKINNILSAHGINLQKEALTSEKQLHEVLAMKFDAMVKIELEVIVEEIRSLNQKVAKLEKTIGDEGRKLKGHKNLTSIKGIGPLTGSILLSVIGDINDFADEGKLAAYFGIVPRVSRSNETDHSGRITKLGSKLGRTALVQCALVAQRYSPYLKRYYEKIKARRGTGKAIIALARKLLGIIYRTLKNNWVFEDFANFVLAEAA

SEQ ID NO: 459469 - protein, 323 aa, unidentified
MYKVIGIDISKASFDVSFRKEEGVYVYFKFSNDAKGFNKFIKYVDQSDHCVMEASGPYYLFLAHYLFEKEIAVSVVNPLQIKHFVRMRMIKAKTDKKDAQMIAQYGESEALGAWQPNQEQVVHLQQINTAVEGLNKQVTMLHNQMEAFTKVPAKDMEVIKTLRSLKKSIKLKIEKLVSRANDIAENYYSQTKEVLISIPGIGPKTAIMLIAITDNFSKFQSSKKLSAYVGLSPRIYQSGTRINGKGHITKMGNRHMRKLLYLCAWSAKRHNKQCKEMYQRLKEKGKPEKVIKIAIANKLLRQAFAMATTLNKYDENYQYKFGF

SEQ ID NO: 459470 - protein, 345 aa, unidentified
MKIVGCDLHTRYQQIAMLDTETGELIERRLEHANGEAQAFYAALSAPVRVGIEATGYTRWFERMLAELGHELWIGDAAEIRASVVRKQKTDARDAAHVLELLLSDRFPRIWRPSMAERDLRQLVWHRQKLVWMRNAAGNQLHALAMGEGVCRKKKLFTKKGRVELEGLKLGPWASYRRHELLTMLDQLDASLHELDHAVAEQAEQNAEAVLLMTHPGVGPVTSLAFVLTLGPVKRFERSKQVVSYLGLNPREHSSGGRQRLGAISKQGNPMMRSLLVEAGHSAARLDGELRQDYQRLKLRRGSGVAKVAMARKLAVRMYWMLRGQASYAQLVRMQGSPWATLVKE

SEQ ID NO: 459471 - protein, 341 aa, unidentified
MDKVISVIGIDLAKNVFQVCAANDSGKRLFNRSISRAKLLPMLANIPKCIVGMEACSSSHYWAREIEKLGHEVKLMPPQYVKPYVKTNKNDATDADAICEAVVRPSMRFVAIKSVEQQALMLLHRDRRGLVRDRTSLVNRLRAMMGEFGVIAPVGLHKFRSWLKEEYGAVESQLPELLRRHIHVMVSRLWKTDEHIKLLESEIHGNSSSAEDCKRLGEVPGIGPLTASALVASLGDIKSFSNGRAFAAWLGLVPKQHSSGGKSKLQGISKRGDSYLRSMLIHGARAVIRHLNPKRTVSRWLRDLLCRRHKNVVIVALANKLARIVWALLSKGTKYQESYSC

SEQ ID NO: 459472 - protein, 404 aa, unidentified
MINAVGIDVSKGKSTVAVLQPAGVIIKKPFNVLHTASGLRGLSDYIASLEGDTRVVMECTGRYHEPVARALSSAGLFVSAVNPHLIKDYGNNSLRKVKSDPADAKKIARYTLDNWADLRQYAIMDETRTQLKTLNAQFDFFMKMKVAAKNNLIALMDQTYPGIDKLFSSPVRSDGSEKWVDFAYSFWHVDCVRKIGLKAFTERYKQFCKRHGYDFQSNKPEEIFKASKELVAVFPKEQAYRNMIRMAVDQLNMTSTHVELLRMEMDSLASTLPEYETVMGIKGIGSTYGPQLMAEIGDISRFPHRSSITAFAGVDPGVNQSGQMDSKSNRASKCGPPRLRKTLFQIMSTLLQLQPKDDPVYEFLDKKRREGKPYYVYMTAGANKFLRIYYGKVKECMAAQAKSE

SEQ ID NO: 459473 - protein, 373 aa, unidentified
MANVEKDFAKGKPIYVGLDVHKRQWVVTVLCQGEELYHGTVVPDPAALIRLLKRFQASEVHTVYEAGPTGYWLHDALAEAGFDSMVTPPSLVPRVGGKVKTDRRDSRKLGSMLASGFLRRVHVLTAEERAHRQLLRTRNQIERHRRRTQNQIKSLLLFHGKHVPASVRERWSDAYVHWIETLTWDHQALKVSIDAMLKMYRDVTEQYKQLTHEIELLALTDKYRERARLLTQIPGIGIFTAMAVLVELQDIERFRRADQLASYLGLTPSQHSSGERIQMGHITRCGNYEVRTRLVESSWTLIRYDTDAKATYERIKHQTGSGRKAITAIARRLALRVRRVLLDKAPYRLANGGQLATGRDKRREARRFVLRSL

SEQ ID NO: 459474 - protein, 367 aa, unidentified
MKKISTTAAKQTKNFREHKLTIGLDLGDRSSWYCVLDEAGSVLLEQRLSTTPKAMGEGFGAMPRCRIALETGMHSPWVSRLLGELGHEVIVAHARNVRLIGESRKKDDRLDARMLARLARIDPQLLAPVRHRSARAQADLTVIRARAGLVRARTALINTARGLAKSYGERLRGCSPRNVNPEKAQGLSPELQTALEPLLAAVESVSERIREYKERIEQLAQQSYPQVALLKQVKGVGTLIALTYLLTLEDPHRFRKSRDVGCYLGLQPGRRNSGQSEPQLHISKEGDPYLRTLLVQGAHHILGPFGADSDLRRWGLKLAERGGKNGKKRAVIATARKLAVLLHRLWVSGEVYEPLRNSSQAPVPAAA

SEQ ID NO: 459475 - protein, 418 aa, unidentified
MKNIKTKKFKTVNGKTLIVTVDISKDKHTGYSRCPDGTEMKPFDFFNNGRGFGEFWDRISKTKREHNLEEIVFGFESTGPYAEPLLQYLRKRSVRIVQVNPMHTKRLKELQGNSPNKTDYKDPKVIADIIELGHALTVVVPEGVAAELRRLTQARERSMQRRIVLLNQLHDLAYLLFPEFLQVMKDIKTKTAQYLLRHYPTPQRLVQYGLGELTKTLKKVSRGKLGKGRAEALYEAGRTSVGIIEGQRSMVLEAKEILTHIEASEQFIDSIEKEMAHNLKQIPYSRFILSLKGIGDVTAAGLIGEVGDFSKFTTIAEIEKLAGLDLFEISSGRHKGTRRISKRGRSLMRKLLFFASLNVVRKGGVLHEAYQRLLKGGKPKLKALIAMARKLLRIIFALVRNHSVYVTDYCKPHLKMAA

SEQ ID NO: 459476 - protein, 356 aa, unidentified
MNSTKYIGMGVHKEATTIAVMNAAGKLVMESIVETKAATIVQFIEGLRGELYVTFEEGTWAAWLYDLLKPHVTKVVVCNPRKNALLKTGNKSDRIDARKLAELLRAGLLSAVYHGETGLRTLKELSRSYLAISKDLARTMNRIKALYRSWSIPCGGASVYAPRHRAEWLSKITEPGVRRRAELFYQQLDGLQKLRQEARRDLLTESRKHGATDLLQRIPYIGPIRAALLIALLQTPHRFRTKRQLWAYSGLALETHSSAEYHYVQGQLQRSKRPVALRGLNQNHNHDLKSIFKGAATKAGSAKGPFHDFYSALLAQGMKPTMARLTLARKIATITLIVWKKGVCFDAQQLKRQVSV

SEQ ID NO: 459477 - protein, 343 aa, unidentified
MQAFTTIGLDIAKSVFQVHGIDAEGKVLIRRQLKRRYVLAFFQKLQPCLVGIEACATSHHWSRQLKALGHTVRLMPPAYVKPYVKRQKNDAADAEAICEAVTRANMRFVETKTPEQQSCLMLHRTRQLFIRQQTSVINAIRAHLAEFGIVAPVGRKGVEQLLAVAADASDHHVPEMARACVVALGAQLRMLKAQILEFDRRILAWHRSNEICQRLDELPGVGPALATALVAGVADPKAFRSGRNFSAWIGLVPKQHSSGGKNKLGGISKQGDRYLRSLFTAGALAVIRYAKTHGTKHRPWLTALLARRPTKVAAIALANKIARMAWAMMAKGERYKEPVALAA

SEQ ID NO: 459478 - protein, 335 aa, unidentified
MTPTFLGIDISKKDFHVFLLKEERGSKPKNFTNNTEGFESLNQWLKKQGVEELHACMEATSIYGDALAEFLYEAGYQVSVVNPARIKGFAKSELLRTKTDSVDAALIARFCAAIKPSFWKPTPFEVKELQALLRRLESLTQMYQQEENRLETATVSVAKLTRAHLEYIKEQQAEIKKMISDHFDQHPHLKQQRELLTSIPGIGEQTAAVLLAEVGRIEDYKNARQLAAYAGLTPCERSSGTSVHGKTRLSCTGNVRLRKALYMPAVVAMRCNPLLKAMTERLLGRGKVKMQVIGAMISEVGAFGFWYFKVPKAFRSNLFARYPLTDQDSIYKNYM

SEQ ID NO: 459479 - protein, 386 aa, unidentified
MPQSKDDLSRSLVAFDQNSSLCTVIELSLDKWLVGAIVPGLARDPLKTLVPDPEAVLKLLHRWRDEAIKTGRKIKRIIVAFEAGRDGFWLARWLRAKGIEAYVIHPSSVPVSREQRRAKTDRLDVGLLQRCLMGWLRGEKRHCSMAAIPSLEEEDAKRPHREHEHLVNKRTSSINRMKATLVRLGIRGFNPKLHKAPQQLATLRTLEGCPIPPNTLAELQREMAHFRFLSDQIKQIEKTRLTQLKQVPQQGLNDKVWQLQRVKGLGLETSDMLVNEVLWRNLRDQRAVSRYVGLTGSPDESGRRRREKGLAKAGNRRARRGMIQLAWRFLRHQKDSALAVWFQTRVAEGKHRKTMIVALARKLLIALWRFVTTGEIPQGAVLRPAS

SEQ ID NO: 459480 - protein, 369 aa, unidentified
MGKCITYVGLDVHKNSIAVAFADGGCDSEVRSYGTIDSDLASLDKVARKLVSGGSEPRFVYEAGPCGYEIYRHLKRRNFACIVAAPSLIPKKSGDRIKNDRRDARMLARLYRSGELTPVYVPSSEDEAMRDLSRAREDAKKAERKARQQLGAFLLRHGHRYSGLSNWTLTHWRWISDIKMAHAAQQFTLQEYVDAVRSSAERVERITEQIRLLVCNWRLGPVVEALQALRGVSLIIAVAVVSELGDLSRFDNPRQVMAYLGLIPRENSTGERIKRGPITKTGNGHARQMLTEAAWSYRMPARVGRRLRDRQQKLPEKVWQIAWKAQVRLCARYSGLFARGKPSQLVITAIARELAAFMWAIARTVEISA

SEQ ID NO: 459481 - protein, 305 aa, unidentified
MKAVGIDVGKSALDVAVHGEAQVQRFANTKAGIGRLMRELSRWGEIRIVVEATGGYEEGVLAGCAKHGLWIARVNPRQARSFANATGQWAKTDRLDARMLAEMAHTLHARLRAHTPLTDWQHELRGWLRRRHQVTEAIQRTRQQLATTLPAIRALVNRTLAALRREQTLIDRTLKDLLQAHATPAMRSSKGMGPMFQASVLALLPELGQLTRRQIAKLVGIAPLNRDSGQSQGVRRIYGGRAEMRSALYMATLSAVRWDAVMKAHYQQLRARGKVAKVALVACMRKLLTIVNAKRRDELRIAPAT

SEQ ID NO: 459482 - protein, 325 aa, unidentified
MQTQTHYTGIDISKSFFDVAVAEAHGYRYYKFDNNEAGFSALFKILPEGSVVVMEASGPYYLPLVCYLSAKGIAVSVINPLVIRRFCQMRMSRAKTDKKDARMIAEYGHAEKPGLWQVPQEHVIALQQMETLLAGLHKEYTATSNQLESFTSSGMLDKRLEKLIKKELKHKQELIDQLTVEMEELAKKHYARMLADLESIPGMGRKTAMMLIVLSGGFSRFDDYRKLSSYIGLCPRIFESGTSVKGKARICKMGMSRIRAMLYLCSWSAKRCNKACRQLYERLIAKGKAKKLALIAVANKLLKQAFAIATSKTTYNENYIKNICF

SEQ ID NO: 459483 - protein, 420 aa, unidentified
MTRIQTKKTQAVNQKSLIVTVDIGKKTNMGYYRFSHNRGAKPFPFGNHAHGFGLFWDRIAQVQRQNQMEEIVVGFESTGAYGEPLMHFLKRKGVKLVQVNPMHTKRLKELTGNSPNKTDRKDPKVIADIMELGHALTVIVPEGSAAELRRLTQARERNVVRRTGLLNQLQDLVFLVFPEFLTIMKGVKSKTARYLLNRYSTPGDFVACGDLDLLCSRVKKISRGRIGRERIEPLYLSACSSVGIQEGRDSLVLEIRQILSWIELVDGFIARLEEAMIPHLRQISYSDSILSIKGVGPVTTAGLIGEVGDFGSFRTIPEMEKLAGLDLFEISSGLHKGRRKISKRGRPLLRKLLYFGAINVVRRGGILHGWYHRALDRGMPKTKALVAVARKLLRIVFAVVRDHREFTYDYMNQPKLRMTA

SEQ ID NO: 459484 - protein, 406 aa, unidentified
MSTDSDRRLLAGIDWATKTHAICIINDAGVAVTSFEIANSGKTFTGLIKRLTKLTVEAVAIERCDGPLVEALLDAGLRVVVITPRQVKGLRSRYTGSGAKSDAGDAYLLADVLRTDGHRLTPLTQDSDATQVLRSLSRTRKQLVEARVGLMNQLHAELEHCFPGAIGLFSRLDSDITIAFLRRYPTQHATVHLTRARFAAFLRRIAYCGRKSVDDLYTRITEAPPAGLSAEEADGHAVCVHALLKAMETIRNQERELEAEIIERLDAHADAHIFTSLPKAGHGVRAAALLAEIGDVRARFPDEESLAALAGVAPVTRASGKIHSVGFRWAADKKLRNALIDFADDSRHASPWAARIYQDAIARGKRHPHAVRILARAWVRVIWRCWQDHTAYNPQLHGGAMQQIAA

SEQ ID NO: 459485 - protein, 463 aa, unidentified
MQQSRTLSVGMEVHKDAMAVAYGVHDHGAAVVALGHLGTRQCDSDQLLRRLQATRPRLVFVSDAGPWGSWLSRSLTTNGQGCWGVAPSWIPTKPGERGKTTRRDAMKLARLRRSGDRTPVYGPQGEEAAMRALCRAREDALHALKAAPLRLQAWLLRHDSRSTGRATWGPAHLRWRSEVLCPTPAQHIVFPESVRAVTEPPARLERLEPARPDQGQPWRLRPVVDALHALRGVQGTVAVSTGAALGDLTRVATPRPLLSSLGLPPAESSPGARRPQGGLPQAGNPQARRARIEGAWASRSPATGSRPLPLRLAKVPKPSQDLRWTAQGRRGKRYRPWRARGKNATQVVGAIARARRAFRWAMAQEVPRTPETETVDSPQSLARAFARALAETRPRFRATLAGVTRRQQTLVPRARPAPDGRTEGGRQPTEISRINRRLLLAPARPRDAGHKDEEHAKQSVAHS

SEQ ID NO: 459486 - protein, 315 aa, unidentified
MSKETLDTNCARGQRKQSRTFENSPDGWKLMLAWFKAMGGKQAHVCMEATGRHSLGVALALHDAGHVVSVVNPAQIRDFARTKLGRNKTDKVDAALIREYAELFKPAPWTPPSPAMRRLCELQTVRAGIVNNRAEWKNRIGSGLGDSTATSLAAATIEHFSAQIVAVDKAIRETIDQDDALHRRRELLLSVVGVGETLAASLLVEMPEPGVLRRSGEMVAYAGLNPSHHRSGTSIDRPTRISKVGNATLRSSLYMPALSAMRFNPAIIALVARLKSAGRLKPKQIVVAAMRKLLVICFGVLKTGKPFDAAMAMPD

SEQ ID NO: 459487 - protein, 316 aa, unidentified
MTSYNNLIGIDIGKFNFIVALHGDKKVVEYENNLTGINSFLEDYQQLFPSSLCILEATGGYELELLFTLSQRSVAVHRANTRKVKNFIRSFGNSAKTDALDARALALYGYERSNQLELFVPQSSQALELYALVQRRSDLKQILVAEKNRLKSPKLGTTAMIIKDSHNSVIKVIANQIDSITLKINAIITESPILAAKKKELKTIAGIGDIVANELLALLPELGRLNRRQIANLTGLAPKANDSGKFSGYRPTGHGRSLVKPLLFLAAMAARNSNSSFKIFYQDLINRGKKKMVALTALMRKIIVIANAKLRDLYAQ

SEQ ID NO: 459488 - protein, 387 aa, unidentified
MYFVGIDISKYKHDCFICTETGEVIESNFSFPNTSDGFEQLLNLLKSIDNFKEIRIGFEATGHYGMNLKLFLEKNNYSFMEFNPKLVKEFISGQTLRKTKTDKKDAYQITKYLISVDYKPHPKQFYHKYSLKSLSRMREKLVKQRSYYEVALTNVLDHIFPEYKPFFNNTFSASSIFILSKYKSPDKIKNMKDYDSIRKISRGKFTSAQFFLLKDLAKNTIGTSNEIFELELETLLILRSQIEFEIKKLESNIEEIIKELNPPILSIKGIGYILGAGIVSEYGDVSRFKSADAMVAFAGIEPSICQSGTESHTGHMVKHGSGHLRYYLLNAADCIFLHEPIFTEFYYKKRNEGKSHRVALNHVAKKLIRIIYKLETENITFDSSKVK

SEQ ID NO: 459489 - protein, 319 aa, unidentified
MAQDDRVVVGIDVAKDKVDACIRALRLRQVFPSTAQGRRKLVGWLRKHKVTKAVMEASGGYERNWAKALRQAGIEVRIVDPKRVRHFALSAGRLAKNDPIDAEMIGWFAETFNEAPAQAHDAAREELSALVKARQHLVDLKTRLQSQNEHAVPGLVQKAHERILKSLASEIAKLEVAIAASIKTTPEFAERAEIIESVPGLGEIAAANLVAGLPELGQASDKIVAALVGSAPYDDDSGRRRGERHIKGGRRWVRNALYMPCLGAATLSNPVLKAFYRRLIAKGKEPKVALVACMRKLIVILNTMIARRQKWDPSRCAVS

SEQ ID NO: 459490 - protein, 353 aa, unidentified
MKGYIQKVVEGKDIFVGIDLHRRKWHVTARTDDDEVYSNSLPGEWEALRKVLLRFKGARSITVTYEAGCFGYWLHDRLVSRGYACLVAAPSRIPRESGNRVKTDSKDSRKLAYLLATNGLKSVWVPSRQELCHRQVIRRRGQLMGDRVRVQNRIKGELLFFGIPLPDVPGHWSKAFVKQLWEIDLGDRFAQESFKRLLEHYEFLVKQINEQTCLLRELSETQKYKDRVQIARSAPGIGLLSAMQVLLELQDMSRFRRGYRLAAYVGFTPSQYSSGERTRMGRITRCGKGAVRAALVEASWVLIRKDEAMKEKYERIKAHRGGKRAIVAIARMLLLRLRRMLLDGTPYVMGLVG

SEQ ID NO: 459491 - protein, 440 aa, unidentified
MTTPCLPVLDPTAAAIDVGSEQLHVSIAGGPPKIFGTTTDQLYALRDWLKENGVRTVAMEATGIYWLCPYEVLEKGGLAVVVVNGKYVKNLPGRKTDMKDCQWQATLHAHGLLQPGFVPPEHIRRLQDYLRLRTDHITLAASHEQHMQKALERMNLKIHDVISDLTGVSGLKMIEAILEGQRNPVALLALCDAQIQKNKANRLRQALEGTWKAEHLFALRQAYELWQCYQKKIAECDQAIEAVLKELAGPEDPSQPAVPPATKRGGVNAPQIAGLHGLLWRLCGQKDPTQLPGVADYVLLQLLGEVGTDLGRHWKTEKHFTAWLGLAPGSRQSGKRRGSQKRSRNRAGRLFCVIARSVGRSVDKALGGFYRRLKGRRGGLLANLALARKLAEMFWRLMVHGRAYVEEGLKKYEEKVAQTEQRLLRKLAQKYNLVLQPKAA

SEQ ID NO: 459492 - protein, 474 aa, unidentified
MKKKNIFQNRSQQLLRLFEKAGNRLKMMCVPIDYAKKDHMVMFCNGYGDILRKPFSVKNTLEGVKYLIDQVMRSCRQRYIKKEYVFFGGEDVNSYAENFANAIRAKGFLVANVNAHDAKKQRENLQASTDRIDLMGIAMMLLNLRAKCSPAQDGIYRNLRTLVRHRKKLVVMKTEVKNRVHTLVDRLFPGFLNEKNTGINAFSKSSLVLMENRFSAQQIRRRRQPTLIKILKRCATPGAENIAAKLHSYAAQVITTPDEYAATLQLSLQHHIQHYRCLQENIDQLLSEIALLLAQTQGAFLTSIKGVGIVLAAGVEQKPLNNLTSYSGIIPRVKQSGGIEGHTHIGRVSKRSNHLLKDSVVQSAFQIGIRGPEPLLQDYKRREAAGQHADFGIGRRFLRMAMCLMRSSQVYMPPKLRSPKTQMHERAGYYLTAWPLLRDKWKKAHAHKAAFAKDQPLGQWRQMVQELYEIKLKL

SEQ ID NO: 459493 - protein, 301 aa, unidentified
MSIVGGLDIHRKQLTFDYVDTVTGQVARGQITPADREHLRAWLARFAGREDVAFAMEGCTGWRHVAGELAAAGIAAHVAEPADTAFARGRKRHAKTDKTDSRHLRQLLAEGRLPECWIPPPQVLECRALLETYHDLRREHTAWVQRIHAVFFHQGAPRLGEGALRTAQGLAALRAASAAHLSPAGQLQVATALDMLACLEARLDVLRHQLLDAARHMSGAKVLAARLYGVGPVTALALTCWLGGARRFSSSRKAVRFAGLDITVYSSDGKRSPGRLSRQGPPVLRWAVYEAGKGPRPHRRP

SEQ ID NO: 459494 - protein, 410 aa, unidentified
MKIAGIDVHKKVLMVVVMDAGVPEAKPVRRRFVTLPSELQRLRGWLQEQGVEEAVMESTAQYWRSVWLELEAHMRLHLAQAFSNRAPRGRKHDFKDAERLVRRLIADELILSFVPNGEQRIWRSLTRMKVQLTRDHVRLQNQMECLLEEMRIKLSVVVSDLLGASGLRILQALAAGETDPKKLAQLGDERLQCTEEQLVDALTGRVQPMHREMLALQLQRLELIDQQMAQLNRMIAQAMKSQQDAVIRLAEVPGLGVDSAQQIVAEVGAQASTFSSAAELTSWVGTCPGKQESAEQNHSSRSAKGNKYLRRVLNQAAHAAAAKKGSHFQIVFRRLLPRLGYRSAIWAVAHRLCRVVWKILHEGVRFIEYGPSVTPREKKKRAQMLARALRKLGYQVTITPINQVAAEPAT

SEQ ID NO: 459495 - protein, 367 aa, unidentified
MVRTTMTQPASSGVVVGVDTHKDAHVARAKDALGRRVGEQLVTTTPAGHRQLLAWAHGLGEVAAFGVEGTGSYGAGLARYLRSEGEVVIEVIRPNRQARRRNGKSDPADADAAASAVLSGDAAGLPKGADGQVEMIRTLRVARSTAVKARTQAVNALKALVVTAPADLREQLRASSTARLVYACARLRPGELVDPTAATKVALRSLATRHEALEAELERLDAALARLVGEAAPELVARFGVGPDSAGALLVAAGDNPGRLRSEAAFAMLCGASPIEASSGKIARHRLNRGGDRQANAALYHVVMSRLRWDKRTQEYMARRTAEGRTKREVIRCLKRYIAREIYLALQLALKGMASDRVTTTLAHEVA

SEQ ID NO: 459496 - protein, 354 aa, unidentified
MLIIGCDYHPSFQQIALVDTDTGELQERRLEHREEAEKFYREVAVQGMKVRVGMEASGQARWFERLLAELKIELWIGDATEIARKRERKQKTDRQDAQHILHLLLKDDFPQIWVPSWENRDLRQLLWHRHRMVQARTRIMNQLQAVALNEGVRCKKKLWREKGREQLESFRLAPWASRRRHDLLEWLDRLNPTIGALSQAIEQEVEKCPEAQRLRTHPGVGPLTALAFVLIIGKPDRFQCGKQIASYLGLVPLEDSSGNRRRLGHITKQGNSLLRFLLVEAAQVTARSLPEWRSKYVHLTMRRGRKIAKVALARKLAVRLYWMMRKGWDYEQLKKFGSHAGQPGNRDGVKQNIE

SEQ ID NO: 459497 - protein, 302 aa, unidentified
MTQHKIIGIDLAKNIFFLFEINHKGKNLCRKKLQRSKLLSYIANKETCTIAMEACSGAHCWAREFSQFGHEVILHAPQHVKTQRRKQKNDYNDAEAIAEVALYKRPHPVPHKSVEQQDIQSLIRMRRLLVTERTRIVNQVRGLISEYGIIMPKGAAAFRKAIPEILENDENKLSCILRELLPHQYERYLYIDEQVKWFDDKLNQTIKQFENAKRLMSIPGFGPLTSQAVAVWLGSGQQFKTGRDASAAMGLVPKQDTSGDKVILLGITKRGNTYIRSLLVHGARAALRRAKFKSDNLSKWML

SEQ ID NO: 459498 - protein, 354 aa, unidentified
MSRKRTDAALVFIKPDRLQAPNTSAHAQAGDAKTMSESQVVVGIDVAKAHVDCAVLGADFGARQFANDIDGHSALAAALQPLSVALVVMEATGGYESALACALQAAGLAVAVVNPKRARDFAKGIGRLAKTDRIDAEALAELAATLARRRDLARFIRPLPDAQQQELAALVTRRRQLLTMLGAERLRLQLATVKVRPSIDALIEAIRAQLEDIDAQMQAHLQEHFAALDDLLRSARGIGPIASATLIATLPELGRLSRREISALVGVAPMANDSGTSHGRRRITGGRFRVRRVLYMATLTATIHNPTIKAHYQRLLAAGKLPKVALVACMRKLLTMLNAMVRTQRRWSDEFHRA

SEQ ID NO: 459499 - protein, 423 aa, unidentified
MSTKNYLYVGIDVSLKSLMTCIQDISGENIFKPKNFSNDPDGVNKLLDTILCFANSLNITNILLGVEATSVYGTHLLYTIADSSVLNDFTVQLYCFEPKIIKNFRNSLGDLPKNDKMDSIVIASRLRLGNLPNEFYINFNQLGLQRLTRFRQHIVKSITREKTYLVSNLFLKFSKLTQTKVFSDNFGATAEMLLTDIYSTDEIASMSIDDIISAIAEAGKKHFANITETANLIKESASNSFSLKNELNNSVNIVIKACFENISALEKSLKAIESSIQKQVKQYFKNEYTILTSIDGIGPVIAAGIIAEIGDINRFRNDDALAKFAGLVWSQYQSGEFQAEDTFIRKTGNVYLRNYFCQAASCLRIHNSDFAIFYSRKFKEVSKHQHKRAIVLTARKAVRVIFALLHDNRLYTLPKKGELPIKN

SEQ ID NO: 459500 - protein, 340 aa, unidentified
MEKRFIGIDLHRNRFTCCIRLENERTYVTEWELEDLGKFVKKLRPSDEIAVEITGNTRLFYDAVVPHVARVVVVNTNQFKVIRQSVKKTDPHDARALALYLSKNMLPEVRMKDKEHGQLASLTQTRDTLVKLRTALKNKVNNILSARGLNLPKEALGSEKKLNQVLALPFDEIVRIELRVIVEQIRSLNKSIAELEETIGEEGSKLEGHKSLSSIKGIGKITGAILLSVIGDVNDFADEGRLASYFGIVPRVSNSNETEHSGRIHKRGTKLGRTALVQSALIAANYSPYLKRFYEQVKARRGAGKAIIALARKFLGIIYRTLKNKWVFEDFPNFVLGEAS

SEQ ID NO: 459501 - protein, 411 aa, unidentified
MSVEMMHQRYAGIDVHLRFLVVCLIIVEAGKRRKEIRTFRNETADLLALRAWLLQEGCTHVAMESTGVYWMQVYRRLEGFFELIVANAQHIKAVPGRKTDVQDAEWIASLLQYGLLKASFVPSQQQQDLRDLTRTRVSLVRERARLVNRVHKVLEEAGMKLSTVLSDIMGLSGRAILQGICEGESNPERLARRVHPSVRASREQIVAALTAEVREHHRFLLRELLSLISAQDRSIRHLEEEIERRLQPFEEQIKRCEQITGVSRHVVHVLMAEVGTDLQRFPDAEHLSSWAGVCSGHQESAGKRQSGRCKKGNRYVREALVQAAHGVRRSRSYLGERYRRLKKRRGSKRAALAIGHNILVIYYHMVKTGQDYQEKGEEFFQQRDRSKVERQLVRRLERMGYRVTPSSQPAA

SEQ ID NO: 459502 - protein, 411 aa, unidentified
MNAVGIDVSKRKSTVTIRQPGDKVILAPRDYRHTQSSINELIATIKSLDGETKVCMEHTGRYYEAVASWLSAAGIFVSAVNPWLIKDFGNESIRAPKTDKADAKKIARFTLDRWAKLRQYSRMDELRNQLKTMNRQFGFYMDQKTAMKNNLIALLDQTFPGANAFFDSPARPDGSQKWVDFVYTYWHVDCVRGKSLAAFTEHYKSWCKRKGYNFSASKAEEVYRAASDLIAVFPKDDNTKMLVRQAVSVLNVTSETVEALRVKMDQTASQMPEYDVVLGMDGVGPTLGPQLIAEIGDVTRFEHRGALTAFAGVDPRKKESGDKERKSNPTTKKGSPYLRKTLFQIMDGLILRSPMDNPVYVFMDKKRAEGKPYYVYMTAGANKFLRIYYGKVNAFLSPKEDGEAEAEEADS

SEQ ID NO: 459503 - protein, 438 aa, unidentified
MSNKVIFNLDELFISVGIDVGADFSWMSIALPNQQFVGKPYKILHNSIDSLTTAVSKIKEAEELYSLESRIFLESTGIYHYPLFCYLRDKGFNCSVINPIITKNSTNINIRKVHNDRFDSKKAALVGLKPDLKVSLMPSDLALNCRNLCREYYDLMDNRSAYVNKLQGELRMAFPQYLGIFSKVTINTSLTLLETYTSPSAFLKADKQEIIDIIKSTARFGLTYAQNKYNAIIQAATDANQFGYIIDSNIKRIRLYISFIRKYDEEINSILESLHELVDANEDSDFVKQIHLIETFKGAGFLSAVSIMGEIGDFSAFSKPKQLFAYFGLDPAVKQSGKFEGTKVQMSKRGSAIARRVIHTLTLQSISISRNREAKNPVLREYYLKKCDSKPKLVAMGAVSHKVCNMIFAILRDNKPFEIITPQEHIKQYNAAKCDMAA

SEQ ID NO: 459504 - protein, 301 aa, unidentified
MKHVLGIDVAKTKLDVALLFPDGKCHTRQVDNTTAGFEVLSAWLAKRAVVDLHVGMEATGTYWEAVAEYLIDAGYRVSVVNPAQIKDFGGASLVRTKTDKVDARLVARFCLAQNPEPWSVPPPARRELRALVARRDALIAMRTQEHNRLLVAREVVREGIEAHLSQLEQAITEVEAAIRQKIDDNPDLKEQRELLDSIPGLGEKTLPVLLSHFGGEPRFTKAKQAAAFAGLDPRQHESGRSVRGKPRLSKVGHSALRKALYMPAMVTITKTTWGKAFRDRLAAAGKPPMVITCLPAGRSAP

SEQ ID NO: 459505 - protein, 347 aa, unidentified
MNFYNNLHPYYCGIDLHARVLYVCIIDQNGQTLVHKEISASPDKLKSLLEPYLGNIVVGVECMHCWYWVADFCEEIGVDFILGHALYMKAIHGGKAKNDKIDSFKIANLIRGGNFPLAYVYPKRMRATRDLLRRRMKIVRHGADLKAHVVNTTSQYNLPPNTVNLKNVSAREQLRSAFPERSVQKNIDLDMVILDCYAEQLSKVEWYIQQQAKQHKPNHFHLLKSVWGIGPILALTIIYEIGGIQRFDSVQKFASYARLVKCKAESAGKTYGTQGNKIGNAHLKWAFSEAAVLYLRGNEKAQHYLLTLQKRMSKAKALSALAHKLDRCVYFMLKNETVFDESRFLKG

SEQ ID NO: 459506 - protein, 450 aa, unidentified
MRMQPEEIPDDDHELVIERVCAIDVAKASGKVCVRTPHPNRPDRRTSRVWDVSATSRAVTELAEHLIGEGIERVTVESTSDYWRIWFYLLEAAGLDVQLVNAREVKNVPGRPKTDKLDAVWLAKLTEKGMLRPSFVPPVEVRQLRDYTRLRVDLTRERTRYWQRMEKLLEDALIKVSSVVSRLDSMSVRDMLEALIAGERDPRRLAELARGKMRPKRAALIEALTGRFDDHHAELARLLLSQIDALSSHIDTLTRRIDELLAILTDPRRGPDDGYRIGDDGAAPFVNGLQAAERLAEITGIGPVSAPVILAEIGTDMTRFPTAAHLVSWAKLSPRTIQSGATQRGGKTGKGNPYLKGVLGEAAAVAARTDTFLGERYRRIVKRRGKLKALVAVARSILVVVWNLLADPTAHFHDLGADYHTRRADTDRRLRNHLAQLAALGYRVTVEPAA

SEQ ID NO: 459507 - protein, 457 aa, unidentified
MDTRIIGIDLAVRAAHKSIVLDQSSNCFVSNLLTFHTDPAEMDRVLTAARADAPDDVHLIAVLEATGMAWYSVGLYLDRHGVDVYRVNGQQVADLRRVFKRHAKSDRIDARVLARLPLLCPERLHRCPFPSASQMALQRACREVALLKEQIIADKNRLLATDQFAWLGLAGIVPDYSDAAFWIRAQCYDPWFVLQAGEADIATAWRAASPEQPADTSWIPALMHRAQRVITLYGDPEQVPYALLQAHLHRVQERLRTAQTQAHQLRLKIVRPLYRQLHPSRYLESLRGVGQDSAAVYIAFIGDILRFPSLHDFRGWSGMIPFSRQSGEGQAKGLRITKAGPNLVKAMAFIDAQVARQWDPQIAAVYYKQMMSYGKHHLQAVCACATHLLDRIYVVLRENRPYELRDIDGTPLDRHLARQICQERYIVPDEVRRRNNHRVRKERRERTIERRRNRRKS

SEQ ID NO: 459508 - protein, 371 aa, unidentified
MTRMTLRRDDVVVGVDTHKDEHAAVVLDGLGGQIAELVVPATTGGFAHLLTVATGHVGPHGRVVGFGVEGTGSYGIGLARFLRRRGHQVHEVNRPPRKGERRLTGKSDLLDAEHAAREVLAGAKLATPKTADGSVESLRLLKIARDTAVKARSAAMIALKATLVTAADELRAQLEPLTDHKLIHACAALDSAPTLAAPDTAMRHVLGSLARRWLQLDDEITVHSRHLKTLTRAAAPQLLELVGIGFDIAAEMLVTAGDNTDRVRSEAAFAKMCGACPIPAGSGRTNGRHRLYRGGNRQANAALYRAVIVRMRWHQPTIDYVTRRTAQGLSKREIIRCLKRYLAREIYRRLPPTAGQPRLVAPVDTPTGRAA

SEQ ID NO: 459509 - protein, 351 aa, unidentified
MRTSQKITGIVATIGLDIGENTFHLVGFDQRAAIILQQKVSRSQLERRVANTPRCLIGMEACSGSHHIGRRLAEIGHDVRLIPAQYVKPFLKGHKNDYRDAEAIAEAVQRPTMHFVTIKTPEQMDLLALHRVRSRLVGRRTGVINQIRSFLIERGITVRQGPMPLRKALSEILGSDTGALSPRMVGLIADLAQDWRRLDERIAAVSAEIEALAEQDHSCQRLMTVPGVGPIISSAVVAAIGNGTGFKQGRDFGAWLGLVPKQESTGDRTILGKISKRGNKYLRTLFVQAAHVVLERRPSAAMRGLWPGAEQASKRLHRNMLAIALANKLARIAWAVLARGGTYQPRITHAA

SEQ ID NO: 459510 - protein, 388 aa, unidentified
MYYVGIDIAKYKHDCFIFTSEGEIVLESFTFENTREGFSKLKLILDALDHSQKIKIGLEATGIYGKNLKLFLSSIGYDFDELNPLQVKRFTNALSNRKTKTDKIDASQIARFVSTGASRTYVYSSYHTEALKQLTRARNSLIDERSKHQTVLTGILDVEFPEFKGFFNNKFTDTALYLLNKYKTVKRISRLSHNDCVLLHNKSRVISTSRFEELRESAKNTCGHHFDYNDSLISANLQIIKCLNNEIDKIEKEINSIMSTINSPVVSIPGISAISAASIIGEFGDFARFDNAKQLCAFCGVEPSIYQSGTSYHEGKMVKHGSSNLRRTLFNAVPYIIMHNETFKTFYNKKRSEGKAYRVAQSHVVKKLLRVIFTLEMTGSTFDPSKLY

SEQ ID NO: 459511 - protein, 346 aa, unidentified
MILIGCDFHPSWQQVSWLDRATGEAGDQKLVHEAGAPEKFYRQFPTGSRIGMEATGNCQWFLELMAKLGHEVLVGDAAKIRASDARQQKHDKRDARLLVQLLAENRFPRIWVPSREEKDLRQLLIHRYKLVRIRAQVKNALQHLALNQGLQRKKRLWSEAGQRLLCELPLAPWASRRREDLLKMRSELDAKIGLLDQAVAAVAAKDKRAQLLMTQPGVGPITSMAFVLTMGDVRRFPRGKQVASYLGLIPREYSSGGKQRLGAISKQGNSFLRMLLVEAAQGAARYDSGMRSAYLHRCHTKPKGVAKVAVARKLAIRLYWMLRSNTPYPEIVHVESSSRVPLVGAS

SEQ ID NO: 459512 - protein, 413 aa, unidentified
MTLHVIDWFAGIDWGSERHQVCILNCSGEIVAEHNFPHTGNGLAEMGRWLANFTAETRNMAVAIEVPHGPVVDLLLDRGFVVYAINPKQLDRLRDRFSIAGSKDDRRDALVAASSLRTDSHLFRRVQASDPAIIELREWSRLAEELQQDRVRLCNRLRQQLWRYYPQFLELVDDMAAEWLLELWTMAPTPERAIRLRPATISRILTRHRIRRFDAASVLDILRKPTIRVAAGVAEAAVLHVRSVIARLQLANQELRAAEKKLDQLLQSRIDDTGCNQNQEPSDAAILNSLPGIGRVTLAIFLGEGFDPLIRRDYAALRDLSGVAPVTRRSGKSYIVSMRYAAHPRLRNAVFYWMRAAVQNDPGTRNRYEALRKRGHSYGRALRGVADRLLEVACILLQRRQLFDPARHNSTTG

SEQ ID NO: 459513 - protein, 320 aa, unidentified
MTKHSTVCAGIDIGKLKLDVALTGCKARLEADNTPAGHDRIVAWLKHHKVDRIGVEATGGYEKSVVRVLRGAGFVVVVLQPLQVRAYAQFRLKLAKNDTIDATMIAACVASVEELRDPPDPRFEAFAAAQTLIDQLNEDVVLYKTRLEMAQDETSRTFWKQQIVSRTAQARAARKTLRDAMRAHADLAAKLDLIASVQGVAEKTAIAILIRMPEIGMLSREGVAALAGLAPYDDDSGTRSGPRHIKGGRTRLRTSLYAAAFAATFHWNPLLKTFYERLRRNGKTHKMALVACARKLLIFVNTVVARLRQDAPRRVALQAI

SEQ ID NO: 459514 - protein, 391 aa, unidentified
MEAWTVNNLPPAGTHDDAVRCLLAIELSKKSWIVAVNTSLSDKISRHTLKPCDGKELLDLCERIRTRVARETKKRVEVVSCYEAGYDGFWLHRLLEAHDIRNYVIDPASLQVDRRARRAKTDHVDAERLLRSLIAYLRGEPKVWSVVCVPSVAEEDDRRLHRERSRLINERIQHVNRIKGLLAIHGIYDYQPLRRDRMQRLERLCTAADGRTLPPRIKAEILRELQRLELAIRMIKTIEAERDAIASAAKTETKHTSAKKIQHLAKIKSIGPEFATTLVGEVFYRSFDNRKQLASYVGLTPAHFQSGAMSRDQGISKAGNAKARTVMVELAWLWLRHQPESPLSVWFRERVGKLKGRIRRITIVAVARKLLIALWRYLETGLVPEGAALKV

SEQ ID NO: 459515 - protein, 352 aa, unidentified
MTKMVVKNVVGIDVAQQELVVTVGSMDADLNTQIIGSKVFKNTLTAFEKLVQWVNKMTKNSPVPRYVMEATGVYHESLAYWLDKRGLEVSIVLPNKISSYARTLTVKTVTDKTASEAIMLFGLERKLDRWSRPDPTYKKLRQLCRERGQLIVERTGLKNQLHAENAEAEPNKQSIERTNKRINLLNKQEKEISQEISVLIKEKPELNNNITLICSIPGVSVLTAATVLAETNGFELIKSKRQITSYAGLDVKEKQSGTTVKGKPRISKKGNRYIRKAMYMPALAALRYNDRFKAVYARLVARHGIKMKAGVAVQRKLLEMMFTIFKTQTPFDRNYLKKQNNRLQKISGTTKM

SEQ ID NO: 459516 - protein, 369 aa, unidentified
MDHHSVAYVGFDTSKTKQAVAVAEGGREGEVRYLGEIEAAPAAVERLLRKLACKYKILHVCYEAGPTGYGLYRHIRALGHVCDVIAPSLVPTRPGDRVKTNRRDAVTLARLLRAGELTPVWVPDAVHEAVRDLVRAREAAARDLRRKRQQVLSFLLRHGRIFTGHRHWSRAHLRWLAGQAFDHPAQQIVFQDKVDVVADAQARLERLDRQLAELVPTWSMAPVVAACQAMRGVSFLVAVTFVAEIGDVRRFESPRQLMAFLGLVPCERSTGDTVRRGGLTLAGNRRVRRALVEGAWSYRHPARITETIRGRLEGLPKVVREIAWKAQVRLCSRYRRLMAAGKRAPVAVAAIAREMAAFLWAIGRVVEPT

SEQ ID NO: 459517 - protein, 387 aa, unidentified
MYYIGIDISKFKHDCAVIDDSGEIVTPSWSFTNDAEGFSQLKLLLNSLDTETRIGLESTGHYGMNLKLFLESNNFSFMEFNPLLINRFVKSKSLRKTKSDSIDCMMIAHYLMTVEYKPYPSSFYHTEKLKSLTRFRDSLIRLRSRQLVELTNILDKVFPEFKPFFGSRFSVTALYILSNYSSPEKIANMNSKSYESLRKLSRGRFSTVDFAKLKQLAKNTIGTTEDYLLLQMQIVLDIYRQLDSKVDETEVSIKECVSDMNPPMLSVPGIGIESAAVILAEFGDFSKFKNASQMLSFAGLEPGYFQSGTSETTGKMVKHGSSYLRYALMNCAQTVVNYEPTFAMFYSKKRAEGKPHRVALSHVVKKLLRVIYTLQTKNIAYDADFVR

SEQ ID NO: 459518 - protein, 352 aa, unidentified
MNEITTVGVDLAKDVIVVCAADASGRTVFFKQLGFRGFGEWAANLPPCTIAMEACSSAHFWARTLSALGHHPKLLAPDLVQPFRKSKGAKNDRNDAQAVLIAALQADMRFVSVKTVEQQAVLACHRMREGWKVERTALINRVRGLLAEFGIWIGRSAPNLARSLPRLIQDEELPARVRGLLVQAQEHLARLESLMGQCELEICEHARQSEPAQRLCALNGIGPITASALVVSVGNARDFRNGRQMAAWAGLVPQQSSSGGKDRLGKITKRGDTYLRGLLTQGARSTLNAALARAPEKRSHLEHWIIALHHRAGYHKTLVAIANKHARICWAMLARTESYDPRAWQRVTPAAA

SEQ ID NO: 459519 - protein, 362 aa, unidentified
MTFFIGVDLHKTQFTVHVRTDEMTETLKQIRQYKTDKSGYAEFIERIQAYRESGACVKIGVESTGNTRFFKHQVEKAGAEVTVINTLKFKVINESAKKTDKHDAATISEFLAKDMLPESYLCSKETENIRRLLKSRERLVRSIVGQKNEVHALLVSMGLKDEQRSLQSKKGRQKILDVLESNNDYVLEAQSVKLMVEIISQMEAAVKVIEKQLSELTKDDQMVNRLLTIRGCGKITAWTIRAYTEDISRFSSAKKYAAFCGLVPWVSDSNETIRHGKITKRGPQELRVSFVQMVMGIRRCKDTANWRIMQRYDYMKTHKGSGKSIIAAARKLAEIVWAMLSNNNDFDREKMYGKYKPAPLAV

SEQ ID NO: 459520 - protein, 352 aa, unidentified
MAKNDFNELKSVGVDIGKDVFHLVGFDKEGQLVLRKKIKRMALIATFEELPRCIVGLEACMSAHFVSRTLRELGFEPRIIPAVYVQPFNKGQKNDYNDAEAIAEAALRPNLKTVSEKTQEQLDLQALHRVRSRLVSRRTATMNQIRAFLIEQGITVRKSVAALRTSLQAILDNRNGEMSLRMRKLILGLQQDWIWIDKRIEMTTSEIEAVSKSEASCQRLMTIPGIGPIISTAVVAAVGTGEAYDRGRDFAAWLGLVPRQHSTGGRTILGRITKRGSRYLRMLFVQAAQVIMMRPKNWHKFSFGPWLEAAATRMQHNKLGVALANKLARIAWSVLNSGKDFDWKEKELATAI

SEQ ID NO: 459521 - protein, 426 aa, unidentified
MEIGNVVYPICCGVDVHKKFFVATLIITEGLMPRYQKRRFSTFNNQILAFKQWLLDSNCYDVCMESTGKYYVPVYNLLEGSIRVTIANPKWVRAVKGHKDDAKDSKWIGNLFRLGLVPGSFIPEKDIRILREYTRYRFKLVSCKSSEKNRYQNVFTVCNVALDAVVSDMFGVSASSITDYLVNSDTFDPEYCVSLLKSSLKKKADEVVASIEGFQMTAAQKTRARLVLEHYKYLLAQIQKLDDVIEALAAPFEGTINLLCSIPGIDRSSAITIISEIGTDMSQFGSSKRLCCWGGLTPGNNESAGKKKSVRITRAGVYLKPMLVQVAHAAVKDKKNSYYRIKYEQISKRRGKKRAIIAIARMILTAVYHMMSTGEVWNPCDLQQVDMPPELREKELQKSLRRAAKLLIAHGAVSLDAISIPVSDSA

SEQ ID NO: 459522 - protein, 412 aa, unidentified
MKLDNTSYQVFCGIDVGKASHYAVALNRDGERLAGTDVHQDEASMRRLFADLSRHGKVLVIVDQPRNIGALPVAVARDCGIDVAYLPGLRMRRIADLYPGNGKTDAKDAFIIADAARTLPDTLLPIGENNDLVEGLRMLAGFDADLAVDENRLINRLRSVLLSVHPALERAIGAQMHRPIGPGLLAKFGGPVGFSAASRRDIESQAEVLAPRLWKKIVDSILTALAEQTVSVPGTAQADVVIKHLAGQLLDVRVARRDLAAHFEQALTVHPAGPILSSLPGVGVRTGVTMLVEITDIGRFRDGGSLAVYAGVAPRTHRSGTSIKGEHRQHSGNARLKRAMYLSAFAALKDPVSRAYYDRKRAEGKNHRSALICLARRRIDVLHAMLRSNTHYQPMANLGPSESRDQDRVDAA

SEQ ID NO: 459523 - protein, 377 aa, unidentified
MAQFPLSTSNEQSIHAALELSKNSWLLAIQVPGRDNPSLHPIKGGDAEGLMAKLDAARDRVAKLTGETPKVTLCYEAGYDGFWLARFVQQRGIECLVMEPASLQVNRKARRVKTDRIDVESILHTLIAWCRGERHVCSMVVIPSVEEEDLRRSHRERDRLIRERTAHINRIKGLLFGQGIRGINVKARYKSLQPAALVTGDGRDLPERLAREITREIERLALVQMQIAAIERERDKAPTPCVATERKRHDLMRLKGLGPALSSTLTREVYYRRFVNRRQIASYIGIAPSPYDSGAGHRSQGISKAGNRLARVAMVEAAWLWVRHQPDSALTRWFHDRTQGQKGRIRCVMIVALARKLAIALWRYLETGLIPEGAVVK

SEQ ID NO: 459524 - protein, 415 aa, unidentified
MEKIYDKCCGIDVHKKLIVACLRSGRKNEIREFGTSTKEILSLTDWLMGESCEMIAMESTGSYWKPIYNIIESCGLQAIIVNAQHMKAVPGRKTDVKDAQWIADLLQHGLLRASYIPDKAQRELRELVCYRKSLIEDEARELNRLQKMLEGGNIKLSGTVSDINGKSSRNMLEVILSGEVLDLKKLESMVSEKKVSKRLKAPKQKIVDDMDGVLTALQRKMIRELLKHIDELERHIKNLSDDIDRFMDSGEKAAVKAIEEVPGIGKASAEAIISVIGTDMSRFPTDRHISKWAGLCPGNNESAKKRNSGRTTKGNKTLKTTLVLCAHAAVRVKESYFAAQFARISVHRGKKRAYVAVAHSMLIAIYHMLRYGTTFMDLGSEYYNAFNRERKAEGCLKKLKQLGYAANIATIADLA

SEQ ID NO: 459525 - protein, 485 aa, unidentified
MVDWSRIHPPRPWLVIECGRCCWRRSETGVQTLDMKTIGKEVHPRALTENSGGTEPAGVPLYIGIDAGRRHHVVVGIGQERMENGSWERAGARRVPSNGAGFSEMLKWLQAFGASPDEVRIGCEPTGGWCAETLVAFLERHGYRVSWLQNWALHERRRLAIGKQTKTDALDARLIARLLYERECHGQTKGFLGRPPRTTDGLRLLVRNRARLVTQRTRYRHQLTQIQDILFPELKDFFKDSNTGPAARRLLERFATPADIAAASEEELFDLVARQAHSHIHGARIGELQQLARGSAGLTAGLEPMLQTQRWLLENLRLVDEQVDHLEKTIQSVVETWPESQRKVLNSFPCMSKLRQAVLIAMMGDISGFHHDGQLRKLFGWYPETRESGTSVFSQHLGSSGNRLARREIWLWAMQLISPRCPSTPFRTYYERLRERNMKGNVAVGHLASKLISVLFFCLRSEQPYDPHRHSLDLGLRDAFSNTEA

SEQ ID NO: 459526 - protein, 333 aa, unidentified
MYIVGVDYHPSFQQIAFLDQETGECGDRRLNHSDGEAEKFYRELRQKGIRVRVGLEATGYSRWFERLLVELGIEVWIGNAAEIKAKRVGKQKTDRQDAQLLLKLLEENRFPRIWVPSPENRDLRQLLWHRHRLVQMRTRVMNQLQALAMNEGKRWKHRLWSAEGRAQLEKFPLAPWASRRRQDLLELLDRLTPTIDELTAAVEQQAKKLPEVLRLMTHPGVGPLTALAFVLIIGTAGRFRRGKQMGSYIGLIPSEDSSGGRQRLGHISKQGNALLRFLLKRRKPQHGTTRTGDKNTGIWRCVGKKASPRWPWVASWPCGCTGCGGTAARIHSR

SEQ ID NO: 459527 - protein, 391 aa, unidentified
MFTQRKSLTLLDLFEFEQNVRNRAALYIQNIQPGDKTKGDFSLFILKIIGMKTIVKQVAGIDVAQDELVVCLGRMYDDWTPELYGSKTFANTAKGFESFMGWVNKLRDPSVPVRFVMEATGVYHESLAYYLAEQQQEVSIVLPNKISNYARSLEVKTVTDKTASEAIALFGLERKLDQWKRPNPVYKKLRQLTRERDQLIQIRTIVKNQLHAEQAEAEPNKTSVARSRKQIAFLEKQEQEIKTEIAALTKGNEEVKKTVKLISSLTGVGVLTAVTVIAETNGFELIRNKRQLTSYAGLDVKEKQSGTSVKGKPRISKKGNKYLRKAMHMPALTAIRHDERFKAVFARLVSKHGIKMKAAVAVQRKLLEMMYILYKTNTPYDKTIYKIKDQS

SEQ ID NO: 459528 - protein, 338 aa, unidentified
MTIVMGLDQHRAQITYDLLDTESGEVRGGRVRPGDRDSFRAFLRRFDGKQLEAALEATTGWRFLVEELRAVDAEVHVAEPAETSQRRGPKKRAKTDRTDARHLRELLLAGRPPESWIPPEHLLELRSKVRLRHTLAEQRSEWQQRIQAQLYHHGVPARRQSLTADNRAWLEGLELTEAARLQIDVALRMIDQIRAELVSIERELRAYARRQPGCRALMAHSGIGELTAVTILAELGDCRRFGSSRRAVRYAGLDITVSQSDERRSPGHLSRQGPPALRWPLYEAAQVGRRQASPDRGYYEQASDRLGSNRACLAVARKLLKRAYHTLRELGDEALQPA

SEQ ID NO: 459529 - protein, 420 aa, unidentified
MKVVYQTCCGIDVHKSFLVATIIKTTSGVQPSYQKKRFSTFNNSILEFKQWLLDNSCRDVCMESTGKYWIPVFNLLEDELNVTIANPKWVKAVKGNKDDTKDSKWIGDLFRLGLVPGSYIPCKPIRILREFTRYRYKLTSCRSSEKNRFQNALTVCNVALDSVVSDIFGKSATSVIDYLLKQPDNSINHEEISSRLLRSLKKKSESVIESIEGYQMTDAQKYRMRLVHAHMDYITSTISDIDSMIDSLVEPYENAVQLLCTIPGVDRSSAITILSEIGTDMTQFSNSKRLCCWAGLTPGNNESAGKKKSVRITRAGVYLKPALVQAAHAAVKSNKSPYYKAKYERIMKRRGKKRAIIAVARMILTAVYHMLSTGEAWNPTDLYKIDMPEPLKNKQKEKAVKQAMKLLIAEGIIKEPLLAS

SEQ ID NO: 459530 - protein, 320 aa, unidentified
MKHKVGKDNTLARFIGIDVSKQWLDVATLPERETRRFSNDGAGQEQLGAWLVQLAPELIVMEATGGSETRVATVLAAEGLALAVVNPRHVRDFARAFGILAKTDRIDASVLAAFAEKVHPPVRPLPDEDRRELIDLVDRRRQLVTMRAEEKTRLSQATASARQDIKEHIEWLDERLRRLDIDLTAKLRSSSLWKAKEEILISVPGVGRVTVFTLLARLPELGALNRRAIAALTGVAPFARDSGQHRGRRMIWGGRADVRSVLYMAAVSAARINPVIKSFYLRLKQAGKPAKVALTACMRKLLTILNTMLRTNQSWHAPTT

SEQ ID NO: 459531 - protein, 342 aa, unidentified
MDHFAGLDVSVKETCICIVDDTGRIVWEGKVASEPETLLKVLENPTYHFRRIGLEAGPLSQWLFSSLAEAELPVVCVETRHMQAVLKAQINKTDRNDARGIAQMIRAGLYRPVHVKTLRSQKLRMLLTHRKLLQSKAIAIENDLRGTLRNFGLKVGMVGKVRFEARIQELVENFSDLAALVEPLLIVRRALREQIVILHRRLLAIVRDDEVCRRLMTTPGVGPVVALTYRATVDVPARFRKSKAVGAVFGLTCSKYQSGEIDWSGRISRCGDEMMRVMLYEAAQSTLRSKKWSWLKAWAIQIARRRGMKKAIVALARRLAVIMHRIWVDGTEFRWTRETAAA

SEQ ID NO: 459532 - protein, 428 aa, unidentified
MDEQEHSRLEDFRQLKKEIRGSKEYLIVGIDVAKERHHAFFGTATGKTLLKRLVFENTQEGFDKLLIQAESVKLQHALEKTVFGLEPTADYHKPLGEFLIKTDQKVVLVSGVGVKRNRELLDGRWDKHDTKDSANVADLISQGKCLFYDYPPLPLRELRALVSLKRRLKKQEHGIMARIRNHLLAQYFPELDRWYRQWGAEGLSIVRWCLNPSMLAAMDYAHFTRLVAPQTRSLAQQERLRSIWQTAGESIGCEAGDALGFEATVMVEELEHIRELIRATDQKITEICLQFPEYQYLLTIPGFGPDVSSKLIAAIGDPFRFTTGAQVLKMAGLDLSADRSGKESERATPVLSKKGKADLRYALYQAALIASTRNRSFVLYFTNKLRGREREKGIKTKMRVKLAAKLLIIAWTLMKKKEAFNPEYLTIE

SEQ ID NO: 459533 - protein, 319 aa, unidentified
MHCIGVDVSKQDLVTFDGTQERVFPNKHGLPEFSRFLNGSADVLVVFEPTSTYSRRLETLCRTHRIACCPLNPRVVPHLRQVGKGRSKTDSSDAELLYRYGIERGHSEAVQLENDSLAEAVQARLACYRVAQKTRVAYQGLAEALSQDPATPQALLSELVAEIAELKGREHQHLVAAQAIVEEDEQAAQPLSALLSIPGVGLVTALTLLALFRKYPDANRSQIVALAGFDPIQFQSGTSVHGKARISKRGNREVRKRLFEATLSAARYNPSIRSIYQRLKEQGKPDKVARVAAARKLLLIAHAVYKTGEPFRDPTEKEA

SEQ ID NO: 459534 - protein, 369 aa, unidentified
MSKSIKYIGLDVHKKSISVAVASGGLRDAERYFGQIDNTAGALRKLSEQLSRDGVRLCFCYEAGPCGYGVHRQLTALGHDCDVVAPSLIPRKPGERVKTDRRDALMLARLHRAGELSPVWVPDADHEAMRDLVRARAVSVRDVRRARQRLSGFLLRHGRVYCGAKAWTLAHRRWLSRLAFAHPAQQIVLQDYINAVEAAEVRRDGLMRQIEALLPHWSLAPLVAALQAMRGVALVVAVTLAAEVGDLRRFEHPGHLMAYLGLVPSEHSSGGRRRLGAITKTGNAAARRALIEGAWSYQLPARISRARLSRMEGLAKPIRDIAWKAEVRLCARYRRLCASGKPSNLVVTAIAREMLAFAWAIGQQIEPTR

SEQ ID NO: 459535 - protein, 345 aa, unidentified
METIYYIGLDVHKKTIAYCVKNISGKIVQEGTIKANRQSLSQWVSTLPGSWMGALEATMFTGWIYDFLKPHAVELKVAHPQMLKAITAAKKKNDRADAAKLADLLRVNLLPECTMLPENIRELRRVLRYRNLVVRLATQMKNKISGLLMEVGAEYEKKRLHGSKYFTELLETVEDVPDSVKDLLQLSRGNLELFTTAQRRLTQGLRKQPLIRNRVDCLMSIPGVGEILALTWVLEVGDVNRFGNSRQAISYCGLCSAQRESAGKEKRGPISKQRNKYLQTMLIEAAKLAPNWNRQLAELREKELTKGNRNRATLAVARKLVEYLLAVDRRGTPFIVEETQQERVA

SEQ ID NO: 459536 - protein, 419 aa, unidentified
MEQITEDDEIVARVAALDVGKATLVACVRVPGEDKPGRLQEVRTFATTSAALLELRDWLVCLGVTLCVMEATSTYWKPPFYLLEDAVGCWVVNARDVKNVPGRAKTDKLDAIWLCKLAERGMLRPSFVPPPWQRELRDLCRYRRTLVQERTREKQRAEKLLEDTQIKLSSVISDIFGKSGRDMLEALISGQRNPAVLAELARGSMRGKKSVLQEALTGQFRDHHGWLLRMMLDRVDALTAQIDALTGRIDEVLAPFAHQVAQLDEIPGVGKTGAQELIAEIGVDMTRFPTSGHLVSWARFAPRARQSAGKAEPGTTGKGSPWIAGMLGEAVPGAGRTKTFLGSRYHRLARKRGKQRAIVATGRSILVIAYQLLSDPGAQFADLGPDWHDRIAPLRRKRQLIAELERLSGKKVTLQEAAA

SEQ ID NO: 459537 - protein, 326 aa, unidentified
MSGFVGIDVAKDELVVYLMWESGGRSEECVVKNDKSGFKTLMNWLKKRTGKEAHVCLEATGIYGDAITEALHEKGYRVSVVNPARISAYAQSQMRRNKTDGLDAELIADYCRTQNPMLWTPPTPAVKELRQLVRHLDNLKQEKVRAENRRSVEQHTAIIEQLTAQIDLLVQQIEEIKQAIKDLIKRDPTLRKEVELLESIPGIGILTAAVILSELGDIHRFDDVRQVVAFVGLNPRQSQSGRKRTSVGISRMGRSSLRAALYLPAVVAKNCNPILSVFAKRMLSNGLTPMQTVVAVMRKLLHLVYGILKSGRPFDPNYLSSTPLPS

SEQ ID NO: 459538 - protein, 437 aa, unidentified
MKKTLEIVHPNAAGIDIGSRGFFVDAGEEEIKVFPTFTEGCHGVRDYLISKNITTVAMESTGVYWVILHAVLEEAGIEVYLVNGRDAKNVPGRKSDVKDCQWLRQLHSYGLLRKSFIPDESIRTLRNYVRLRQDHIRATATQIRLIQKALTLMNIRFTEVISDISGASGIKMIEAILQGERSPEVLAMMCHPKILENKKDDLLKSLEGVYSEDHLFALSQSYQTLRYYNQLIEECDKAMEKHLLKITESKSDVEVKNKRKPIRNHRPQIEGLSKSLLKMTEGKDPTTIAGITDYSFLLILSEVGTDLSQWKTEKHFVSWLKLCPQRNTSGKMMRKVNSLHHNKASLMFRNIAQGMISTKHVAIGSFARRIKAKRGSGVAIKAVARKLACYYYRVMTKGEAFVEKGIELYDERFKEQKKRYLIRQARLLNMKLVELEL

SEQ ID NO: 459539 - protein, 342 aa, unidentified
MEISTIGIDLSKTTFHLIGLSPRDEIVLRKKLSRKQLLIFTASRTPLLIGMEACAGAHYLARALRDQGHDARLMPAQYVKPYVKTNKNDYLDAEAIAEAVQRPTMRFVPIKTDEQLDLQALHRVRDRWVARRTAVMNQIRGFLLERGIAIRKGPSYLVSQLQVIFSDGDSLFSGRLLHLIRELKHEWDELERKIEEASAELARIAKQDDGCYRLMEVPGFGPIVSTALVAAIGNGISFRKGRDLAAWLGLVPRQHSTGGKTRLLGISKLGNEYLRRMMLHGARSVVMQMERKPSALGEWLTSLSARRHRNITVVALANKMARIAWAILSKGTHYSAPAFVAA

SEQ ID NO: 459540 - protein, 321 aa, unidentified
MEAVWVGIDVSEEWLDVAIWPAAATYRVANAAAAIAALATRLRTLNPRAVVLEATGGTQALAAGELHAAGLPVAVVNPRQAREFARSLGGLGKTDRKDALVLAQFAQASETNGRLVPLRLPDEAEAELKALVVRRRQLLGILVAESNRRLRASKVVRKSIVQSIKGLKRAIAEVEGELKRVLASSPAAQAKATLLSAVPGVGPQLSFTLLAELPELGQLGRRQIAALVGVAPHPYESGKFKGRRVIWGGRARVRTMLYMAALSAVRHNPPLRTHYQALLERGKAKKVALVACMRKLIITLNAILRDATPWNPNHLDLQHSR

SEQ ID NO: 459541 - protein, 321 aa, unidentified
MLSVLGIDIAKQKIEVALLITDKVKNKSFQNTLDGFEALALWLRKWGIERVQACLEATGNYGEDLAVFLHQAGHVVSIVNPARIKGFAQSELIRTKTDKIDAAIIARFCLAMKPKPWVPPSPEIRALQALVRRADSLIDMLTQEKNRLDTAHESVLPLIKEHIDYLGKEIEQVRHQIADLIDRTPELKRKKDLLASIPGIGKVTIAAILAELDDLEKFKHVRELVAFIGLAPKERLSGSSIKGKPRLCKTGHARLRKALYMPALVSIQYNPLMIAFYQRLKEKGKNGKVIVCAIMRKLVHIIFGVLKSGKKYDPNYKPALA

SEQ ID NO: 459542 - protein, 466 aa, unidentified
MRRHIPQRMMEDTLAQRNRISPPRSGKTRAALSLTHPNAAGIDIGSASHYVAVPADRDDEPVREFQSFTADLHRLADWLAACGVDTVAMESTGVYWIPLFELLDARGFTVLLVNARNVKNVSGRKSDVLDCQWLQQLMSFGLLRGAFRPADEVCALRALSRQREMLLRSQSRHVQHMQKALTQMNLQLANVISDVVGATGQKILRAIVAGERDGRTLAALKDARIKASTNEIAQSLQGSWRAEHLFALKQALALFDFYATQLAECDAAIEAQLQVLAAHSADPQPGKKRSRSRNAPKFDLRSRLFRMCGVDLTRIDGIDVTTALVVVSEIGTDMSRFPTVKHFTSWLGLCPGTKITGGKLLSGKTKRCANRAAQALRLAAAALRSSKSALGAYFRRMCSHMDKPKAVTAAAHKLARLIYTLLTKGEEYTDQGQDYFEERYRERVIRQISQRAAKLGLSVVPTPHAA

SEQ ID NO: 459543 - protein, 369 aa, unidentified
MVVVLEMSQSSWLAAGVVPGIERRPLKKLDPDPTALLRLVEGWRDHAMKAGRMITRIVLAFEAGRDGFWLARWLRARSIEPFVIHSTSVAVSREHRRAKTDRLDTEMLIRVFLGWLRGEPRHCKMVAIPTLEEEDARRPSRERESLIGERTRIINRMKAALIRLGIRGFKPELLKAPQRLEAQYTAEGVPIPPNMLDELRRDMARLAWVREQINAIEQARLERLEQAPSTGPHAMVRMLASIIGVGVETADMLVQEILSRNLRDRRAVARYAGLTGSPDESGVKRREKGLAKAGNARVRRGLIQLAWRFLRFQKESALGQWYRARTEGAAGKRKTTMIVALARKLLIALWRMVTTGEIPAGVALRTAAA

SEQ ID NO: 459544 - protein, 322 aa, unidentified
MLEEGRIQSTEASLRRHFEGEARYRIALECGTHSPWVSRLLKMLGHQVIVANPRKIPVITGSESKNDRNDAEQLARFAAYDPKLLSPVEHRSERRQQDLNLIQARATLVRARTMIVNALRGLVKSAGGRLPACSTESLPARAQALMPPMLAEIGSSLLQQIAQLNAQIGSMDQQIDKLSAKYPEIVVLRTAPGVGPVVAAAYVLTLDRPDAASNRSTGAFLGLRPAQSQSGDSDPQRRISKTGDSYLRSLLVQSAQYILGRFGPDSALRRWGLKLAASGGKRGKKRALVAVARKLAVMLHSMWRNGQRFQPFPQGTTETIAA

SEQ ID NO: 459545 - protein, 397 aa, unidentified
MGEGMVAGIDWASEVHVACVLDGHGAVASRFSFTHDGPGIAAMAGRLRAADVAGVAIERGDGPVVEALMEAGLAVFVVPSRQIKGLRSRYGSAGNKDDRFDAYVLADTLRSDGHRWKPLRPDTDPTRALRAACRSRKDLVETRVQVLGQLRANLELAFPGAIGLFTKLYSTISLAFLQRFPTAAKAAWLSPKRLASWLRSMGYTGGVSARILHDRLAAAAPGLAGAEGEARGQITLALVTVIGTLNTQIAALDAEIGRLFAAHPDQHIFASLPRSGTIRAANLLAEIGDCRQRFPTDDALAALAGACPSTRQSGKRTQAVFRWSCSKKLRAAVMDFANGSRMADPRAAGIYAAATGRGCRHPHAIRILARAWLRIIWRCWQDGTAFDPALHRSRHLT

SEQ ID NO: 459546 - protein, 432 aa, unidentified
MLKINFMSTLFVGIDVSSKSNVVYAMDFYKNKYIQTSFSNNQPGADELSALIKDCMVAHSDLNTIVIAMESTSVYNIHIANHLSTCEILLPFKPYVFCLNPKMTANYRKAFTAMAKTDPLDAFIIADFARAGLIEIQPWRGSQFLALKRLTRHRLHLTECITREKTYMVSNLYLKFSELQLLSGENQPFSNIYGATSSAILTEYLSPQEIIDTSEEELLTFIAEKSKNRITDISKTTELLKKAASNSYRLDKCLYEPLNISLASSFNCIDTFKKEIKAIDNAIEKTIKGMNPNALTILKSINGIGPVFAAGIIAEIGDITIFHSSDALAKYAGLTWSKNQSGDFDGEDTCMQKAGNTYLRYYLGEAANSVRRHIPEYRDYYAKKYSEVPKHQHKRALALTSRKFVRLVFGLLVKNQLYTGEKLDTEFHIKTN

SEQ ID NO: 459547 - protein, 348 aa, unidentified
MAGSTLPHRWSVGIDLHKDTLTACVYCSCCGEIRFQKIACRCRKQIAEFFGSLPRPHVVAIEAVGFYRWLWEMLEPLVERLVLADATQARALAGRRMKTDREDAQNVAELLACNRLPLAYAPPFEVQVLRDCSRQRNALSRQHAHVLHRVKSVMNANNRPGPARMASSGLIRYLEAFQSKLPERHGRYLWLCVDQLALIERQRAQLERELQRLLAQPLFAETSAILHSFPGVGLVTCATVLAEIGDFGRFSYRKSISRYGGFDPRTFDSAGKQRTGHISKRGPSNLRWVLVQAAWAALRLDPQVKRIWLRISRKAGKKAATVAVARRLLVWMWKAVRTGQPYRAPVAV

SEQ ID NO: 459548 - protein, 349 aa, unidentified
MDRTTYALDLAKNVMQLHWVEAETGEIGRKKLARAKLAEFFAQRLPARVVMEACGSAHHWARVLGKLGHQVELLPAAQVRPFVRSNKDDAADARAIWLAAQQSDIRRVPLKSIEQQAVLALHRTRSHWVSVRTATVNALRGLLYEFGVVLRGGRQAGLKALAEQRAQIDEQVPQIMRRLVDGQLRALAQVQQRIEELEHELGAVQKQLNKAGELRQVPGIGVLGATALAATLGDGGGWRNGREFSASLGLVPAHSGTGGKVRTGHISKRGDPYLRTLLIHGARSVIEHGKDKPKWLQQMLARRPPNVVVVALANKMARTAWALVAHGRTYQRDWQSAKPGCSTAQAAAA

SEQ ID NO: 459549 - protein, 440 aa, unidentified
MLMLTEHALRRFAYLFGLEELNEGRQNVTVSYDCHIGVDYHKAAYSHLVVQDSTGKTLRSGRIRNDSRALGLLLERYRENRHAVAEATRNWMVIYDWLDDICDDVVLAHPLKVKAIADAKIKTDKIDATVLAHLLRADLVPEAWAPSERARELRVALRERMFYVRLSTMVKNWIVAVFDRYREQTVQLKTLGDLFNKAGRQQLTALRVSEIDRVQIDRGLEFISDIDRRIKQSEAASRAVTKTNGNVKLLKTIPGVGEFFDQLIDAEMDDIGRFHSPNKLAVYAGVVPSTYSSGGKTYHGRIIKHGNKCRRWAFVEAVAPGIVTAPQHRAQYEHLKFRRTNRARVAIARKLLTIAFLIPRAYERRSGSTRKDHRPRYPGCPDVSLAGPAGLGCALEGEWDAGSRTPLYDRSRKAHRHQATIGEWLKTAGQKKLVLRTGDI

SEQ ID NO: 459550 - protein, 431 aa, unidentified
MDDIGRFEQFCQFRSLIRGSREHLIVGIDIAKDKHHAFFGTAYGKTLWRRLIFTNDFIGYLRLVEQTELLLKQHRLKEVVFGLEPTGNYHKPLAHWLIQHDYPVVLVAGKAVKDNRELLDGRWDKNDTKDSANAADLVSQGKCQFYEQPDSLMIAVRNLIAVRKQLKKEEHKLRMRIRNGLIVKYFPELDRHWGSCLEENLAIVRWYLDPQKIADTDFNLFVRHVTTTDRGLRQVQRLMAIHKAAGQSVGLPVDASACYQARLLVERLKCVKDEIAQTMQQIEGLCRTLPGYKLLLTIPGFGPYIAALVLAALADPFRFASRKQVIRLAGLDLNANRSGKKSQDSVPVISKKGDADLRYGLYQAALIASYHNDGFRRVYHRMIENRGGERGIKTKARVKLAAKMLVIAWTLLKNNKPFDETRLSAESGNTR

SEQ ID NO: 459551 - protein, 373 aa, unidentified
MNEFSKFVGLDVHKATIAVAVADKAGGEPRFFGEIPNTSVAIAKLMPQLAKGGATLSLCYEAGCCGYVIHRQLTKLGYFCQVVAPSLIPKKAGDRVKTDRRDSLMLARLLRAGELTGIWIPDGLQEALRDLTRAREDMKHLQRQSKQQLLGFLLRHGVGGFTGKSNWTQAHFRWFETVKFDQPAQQIVFQEYIDIIKAGIKRVQGLDEHIERTAQASAVWPIIEALMALRGVNLLTAATIMAEVGDLSRFASAPQLMAYLGLVPSESSSGPTKSRGGITKTGNSHVRRVLVEAAWTYRHPARKTRTLQRRAEKTSDAVQELAWKAQQRLCSRYWALDARGKLKVQTCTAVARELAGFIWAIGQAVPGPNHVSA

SEQ ID NO: 459552 - protein, 319 aa, unidentified
MQTLVERCAGLDVHKDSVTACVRVPDGQGGRQAETRRFTTTTAGLGLLAQWLASFEVTRVGMESTGCYWKPVWQLLEGQVECWLLNAAHLHNVPGRKTDVADAAWIAQLVEHGLVRPSFVPPRPVRELRDLTRYRKTQIQARTRETQRLDKVLQDAGIKLSSVATDVLGVSGRAMLEALVAGTHDPAVLAALAKGRLRTKLPALRKALAGRFRTEHHGLLVAQILTHIDYLDEAIALLSERIERVIGPFAEQVVLLDTVPGVDRRAAEVIVAEIGPDMGQFPTAAHLASWAGVCPGNNESAGKQRSGRTRKGSSGWAAA

SEQ ID NO: 459553 - protein, 354 aa, unidentified
MVTIINDVLPRIVVGVDSHKETHQVAVLDRTGALMGNQSFAVTRNGYRELEAWLATLGTVDRVGVECTGSFAAGLTRYFREREVDVYEVTTTHRATRARRGKDDMIDAEMAARKVLSGEARAVAKDTTCDIESIRLLKLSRESAVKARTVALLQIRDVLITAPAVLREWIESAGGTRHSVNRTGAMRPDLERLGEPLQAAKFTLRQLSGRVKMLDQEIAGVNAQLDQLVARRAPHLLRCCGIGTQHAAQLLITAGQNLGRLRSDGAFARLCGVAPVPVSSGKTNRMRLHRGGDRQANRALHLIAIARLRLDPKTQVYMTRRRAEGLSNMDVVRCLKRFIAREVYNALKLDLLQN

SEQ ID NO: 459554 - protein, 336 aa, unidentified
MKEQQIKHNEVQIKKFIKKLKLEWNEIYCCYEAGVTGYPLYRYLKSLGVNCILVAPGKIPRQSTDKIKTDKRDAIKLARLMRSGELESIHVPSEEDEAVRDYLRSRDSLRLDLGRNRQRLMKFLLRKDIKYSTTKYWTVSHYKWLNNLHFNNEILQETFNDYYSRVRVQEENLKAMDKKIQEIAESEPYREKVGILRCFRGVDYLTAMFLLSEVNDFKRFKTAGSFMSFLGLVPGEYSSGSKRKQTGITKTGSPRLRRILTEAAWQHRFPGTGSKIVTARRSGQPALVVALAEKASLRLHKKFRNLQLRGKTPQVMITAVSRELSGFLWAAMNLVA

SEQ ID NO: 459555 - protein, 408 aa, unidentified
MQRRENLLYVGIDLHKETHTAVMVNCWNEKLEVVVIENKPSEFKKLAEKVNRKSNHLGLEPIYGLENAYGYGRSLAVWLIENGYIVKDINPALAYDQRKSAPMYRKNDEYDAYCVATVLINQLHTLPDAKPKDNEWTLAQLVNRRDLLVKDGIRFKNGLHEQISMTYPSYSKFFSEIDGKCAMYFWKTYPSPVHLQEKTAEDLTIEFKEISRIARKDKAELILDCVQNDGNTFREYQESRDFITISLVRDLEHQKEELAGLDKEIEKILFSFDYKLTSMPGIGTSIASKLIAEIGDIRRFPNADKLARFAGVAPVKFSSAGKGKEQSSRQGNRQLHGLFYFLAVTMVSRPKNGSPNHPVFYDYYMRKIGEGKTKSQALVCIMRRLVNIVYGMMKNKTEYLEPLPEKEQ

SEQ ID NO: 459556 - protein, 341 aa, unidentified
MGQLNTIGVDLAKNVIQVSVVSASSKEKLNKALTRTKFKEFLAKQRPALVAFEACASSHYWARTAQRHGHDVRILPALSVAPFRQGHKTDQNDALAVAEAAVRPNLKEAPIKSLDQQGLQSIQRSRELLVQERTALSNHIRGLLFEFGIVMPKGFATLHARIPEILEDAENEVPHIFRSTLQLMYRRLLALKEDLDVLTRQIEQLVQANDACKRLLDIEGVGPISAVLLYATLGTGEAFHSGKEFSAYIGLTPKQYSSGGKTKLVGLSRHVANKRLRAVLIQGARSYIHRVKEPKTTKDQWLLAMVARSGYGKASVALANKNVRTAWAMLTKGTDYERVAA

SEQ ID NO: 459557 - protein, 412 aa, unidentified
MEGETVIAGVDTHKDVHVLCLLDGLGRKIWSGSFGADPEGYDRLAEAIGDPGSCMVVGVEGTASYGAGLTRRLVELGYNVVEVLRPKRDKVRPGEGKSDPLDAERAARKAASGKGCSVPKSQDGWVEAVRQLYVARRLAVATSTSCVACAKSMLTTAPGALRERFRGRERPKDLMPLLARGRKAGDALEESALASLRSVAAVWKEARSQVESLDERIRALLEANAPALLGVEGCGTTTAAALVVAAGDNPGRLKGEAAFSMMCGASPIPASSGKTDRHRLNRGGNRQANWALHEIAIKRMAYDERTRRYVARRTSEGKSRREAVRCLKRYIAREVYHVLMDPNPDGAAPEGPELAKMRKAMRVTQKKAAAELGLSAAALGHLERGKRRSTKLERRYYELLCELERALPQTAS

SEQ ID NO: 459558 - protein, 365 aa, unidentified
MQKISTMRTSGKKICKGQLTIGLDLGDRSSSYCVLSEAGEVILEKKLPTAPEVMKQTFARMPLSRIAMETGTHSPWVSRLLKALRHEVIVAHAQNVRLIVKSRRKDDRIDARTLARLARIDPELLSPVQHRSAQAQLHLTEIRARAGLVSARTALVNAGRGLVKSHGERLRKCGTSQVGREIASGLSTELREALEPLLREVESLNERIHEYDRRIESMIKERYPETALLKQVKGVGNLIATTYVLTIEDPQRFRKSRDAGCFVGLQPGRRNSGESEPQMHISKQGDEYLRTLLVQGAHYILGPFGEDSDLRRWGQRLAARGGKNGKKRAVVAVARKLAVLLHRLWVSGEVYEPLRNSQKMMHAAA

SEQ ID NO: 459559 - protein, 397 aa, unidentified
MMGVNVKSPNVANATNSRTGRLFVGVDVHKDNHAAMALDCFGEVLENWEIGNEYGDFVSLVDEIEKVAGKKDLVPVFGLEDTYGAGDFLAKYLFGKGHEIKTVNPVLVKRERDFETHPEKSDLADAKGVAKVLIQRIDTLPHYNVTKTIEISRDMGNLVKDRETIVFEQTILKNQLHRILHQSWGSAYRSVFKDVFSKQALIFWSDFPSAIECKKSHKRVVKPDWIRKTDYEELPQTSGITQNQVRRKTKRILAIREELKEIETELKQLLEQTGQKLETLPGCGTTLASVVISEIKDVRRFKTPAQLAKYAGLAPRSYESGKKKRHIKSKSGNRRLNRAIYQIALTQISNQGIEKAKEYFQKKIGESKSKKHALTCLKRQIIDIIWSMLKEKRGYYP

SEQ ID NO: 459560 - protein, 413 aa, unidentified
MDVVHPRCAGIDCSKKDAKVCVRIQGQGRRAKSATVSTWGATTGQILALREHSIAAKVSCVVIESTSDYWKPFYYLLDDGLDVVLVNAAAVRNLPGRKTDVSDAAWLADLGAHGLVKASFVPPAPIRALRDLTRARTVITRERTREVQRLEKLLEDAGIKLSSVASEITGVSGRAMLEALIAGQRDPAALADLARRRMRSKIPALTEALTGRFNDHHAFMARLFLDRIDAHSADIARLDERIEAAMEPFRPARDLLISIPGFSRIVAEVFIAETGGDMSVFPSAGHLASWAGLSPGSNESAGRVKSSKTRPGNRYLKGVLGIAALSAARSKNTYFSAKYKRIATRRGPMRAIVAVEHAMVIAAWNLLTNGDLYRDPGADYYTAHRPAATKARAVSQLQALGYSVTLEPLTDTA

SEQ ID NO: 459561 - protein, 320 aa, unidentified
MSETLSPVYVGIDVSKEQLDISSGGTGKIWGAANSSAGWTELIEQLKPLNPALIVLESTGGYEAQVLAELYHAGLPVARVNPGRVREFAKSIGQLAKTDRLDARLLARYAEAVKPEPTKLADEDEQHLTGLVNRRRQLLEMHVAEQNRLYTAPKNMRERINQHLEWLMNEIRSLEAEIDDFIQGSPMWKEKGDLLRSVPGVGSITAFTLLSELPELGALDRKQIAALVGVAPLNRDSGRRSGKRHIYGGRSSVRSTLYMATLAATRFNPVIHAFYHHLLQAGKVKKVAIVACMRKLLTILNSMMRHHSPWHCDLALCQIP

SEQ ID NO: 459562 - protein, 347 aa, unidentified
MRFYTQQHQYYCGIDLHARTMYVCILDQAGRVVVERNMASAPEPFLDFIAPYRADLIVGVECIFTWYWLADLCAREQIAFILGHALYMKAIHGGKAKNDRIDAQKIALLMRGGMFPEAYVYPAEMRATRDLMRRRNHLMRKRAELIAHIQNTNSQYNLPEFGKRVSKKHERVDIAAHFPDPQVQQAIALDCTLIDYYDELLPRLERHIQACAKDHDPKALSLLKTIPGIGMILALIILYEIHDIRRFPRVQDFMSYCRLVKCSRESAGKLYGHSGSKIGNAHLKWAFSEAACTFLRGNHEAQKLHQRLVKKHGKGKALSIIAAKIGRAVYFMLSRERVFDKDKFFAG

SEQ ID NO: 459563 - protein, 372 aa, unidentified
MKKSSTTLFVGLDVHKESIAVAYAPQGPGSEVVALGNIGTRQCDIDKLLKQLQGKGCLLQVVYEAGPCGFWLQRYLSQHGVSCRIVAPSLIPRRSGDRVKTDRRDAVQLARLHRAGELAPIHVPDIEDEAMRDLSRGREDALRDLKAAKYRLKAFLLRQDIRYEGQARWTPAHLRWLARVVCPTPAQQIVFQEYLRTINEQSERIARIEDALREQAQSWRLRPVLEAIQALRGVQFTTAVTVIAELGDLTRFDHPRQLMSFLGLTPSEYSSGAHRQQGGITKSGNTHARRVLVESAWAYRHPAKLSAHLQRRIEHQPKVLQDLSWKAQVRLCKRFRQLSARGKHVNEVVVAIARELSGFLWAIARSVPLPAH

SEQ ID NO: 459564 - protein, 337 aa, unidentified
MNYCGIDLASKSSSICIIDEKGKVLREVAVPTETADFAKALKGFGKLKVILEASPLAEMAAQMVEEQGHEVEIIDARLAKQLMAAKKKTDRRDAGTLAQIGRSGWYHPVHRKSAEARELRSLSQARRQVVKLAHSQASHIRGLLRAQGIRLGKVSEGQFADTVRAVVQEQVPGLASAMGSLLAVLQTAKEEEKRLSKEITARSQADEVTRRLQSVPGVGPMISVLYRATIDDPQRFRRGEEVADYLGLAPGISQSGDVEYRGRITKEGDKALRWHLVEGAHSLLTRGQDCALKRWGLALETRKGGAKARVAVARKLAILLWRLWKTKETFQAFPEVA

SEQ ID NO: 459565 - protein, 347 aa, unidentified
MKKVMAGIDLHSNNLVIGIVDSEGKRLLHRKLECELNKVLEFLRPYKEQLQSVAVESTYNWYWLVDGLRAAGYPAVLANPARINQYSGLKHADDQNDAFFLAELARLKILPTGYIYDPQLRPVRDLLRRRLSLVHQRTALMLSFKSLFTRTTGQEMKLSRLKSLSAQEAKSLYEHPANQLIAQVQQRHIEALNESIGQIEQVVLKVARHLPSYARLQTLPGVGIILGLTITMETGDVHRFASPGDFASYSRTVDAQRTSNGKKKADNNQKCGNKYLAWAWVEAANFAKRYDPQCRRWFDRKAAKTSTVIATKALACKLAKAAWYLMAQNSDYDARRMFAELAVKTTK

SEQ ID NO: 459566 - protein, 355 aa, unidentified
MNATTVAVDLAKNVFELALADGRWKIVARARLTRTQFERWFDNRKVDLVVMEACGSAHYWARTLRARGIEVRLLPAQYVRAYVKRNKTDAADAQALLEATRANDIRPVAVKSIEQQALQALHRTRSGWMSTRTRRINTLRGFCREFGLVVPEGAATGLACMARYLADPHSGLPELLRPSMRLMIDEIRLMEARIGQLEQALSQIAKHSPACQVLQSVPGIGLLTSTAMVAAVADPRSFASGRRYSSFLGLTPREFSSGNSRYLGRISKRGDRYIRMLLTHGARSVLRAATVAHRAGRSIDRLRSWALAVQSRTNHNKAACALANKLARIAWAVWVKQENYQATRTPCRSTEVLSA

SEQ ID NO: 459567 - protein, 338 aa, unidentified
MKNIKVLGIDLAKNVFQLHGLDIKGKCVLRKRLSREKLAEFLIKLCPCLIGMEACTGSHYWARLFQSMGHTVKMMAPQFVKPYIKSNKSDVNDARGIAEAVTRPDMKFVPIKAIEQQDVLLSHRARELAVKQRTAQVNQIRGLLAEYGIIIAKGISHMEKMMLVLEANQDKLTSKAEAIFLRLYEQFKVYDMQVKIYDKEIEVMAKGNAVCKEIMKINGIGPISASAVVATIGDAKVFKNGREVAAWLGLVPKQHSSGEKIRLGGISKRGDRYVRKLLIHGARAVVKNCEGKTNRLSQWVEDKKIHRGFNKASVALANKNARIIWAIMATGECYKKPV

SEQ ID NO: 459568 - protein, 324 aa, unidentified
MSEMPTSQSVLNHGTDVASDHLDIAVHDSKAGVKRIANERRAILQWLKHVPCGSRLAMEATGRYHLLLARLAHEHGLQVYVLNPRDVSHYARGVGQRGKTDRLDAQVIARYVANEHAQLRCWQPAPPQLAELDSLLRRRAALVRHQGALRQSMGDDPLTSKLLPQVMAPIDKVLQALDKAIAKATQRIEGSKQALCSITSVPGLGALNGAALLSLFTRLADARADAVVAFTGLDPRPMDSGNKRGVRKLSKRGPAELRRLLYNAASSASRTAAWRGVYERELAKGLPRTAALVALARKLVRVAFSLFKSQTTFDPNHGQELKIA

SEQ ID NO: 459569 - protein, 341 aa, unidentified
MNELYYIGLDVHKKSISYTIKQADGGIVEQGQVEARRAALSAWAGTIRKPWVGALEATLFTGWIYDHLRPFAEELQVAHPAMLKAIACGKKKNDRLDAEKICDLLRCNLLPRCYMAPAEMRELRRVLRYRQLLLSEAVRMKNKISGLLLEVGEPYVKQKLHRRGYFQELLGNLQDTPASVLEMLAISRGSLELFDGLQRKLLAGLRRHPLLAARVERLRTIPGVGEVLALSWALETGSPERFSSRRRAISYCGLCSAQRESAGKNRRGPLSKQRNKHLQHVLIEAAKLAPRWNPPLRQLHERELQRGSRNRATVAVARKLVAYLLAVDKSGRAFVPPAQAA

SEQ ID NO: 459570 - protein, 429 aa, unidentified
MDEVDDVELLVERVAALDLGKAVLEACVRVPHPQRPGRRMQELRGYGTTTAQLLAMVAWLRHWHVQRVVMESTSTYWKGVYYLLEAEGFDCWLVNAREVKNVPGRAKTDRAEAVWLAKVVERGMCRPSLVQPPEIRRLRDLTRYRRALVQDRTREQQRVEKLLEDAQIKISSVLSDLHGVSGRAMMHALIAGERDPRTLARLAKSGARKKTDQLEEALRGFFTDHHATILKMMLDNSDRIGAQIAALDALIEDAISPFSRQATRLADIVGVNTVAAAELIAETGVDMTRFPSAAHLVSWAKFCPQTHQSAGKSMSKGRGKGNPWLAGTLGRIAFANSRADTFLGTRYRRLARRRGKQKAIVATGNSVLTVIYHLLSDPDAKFCDLGPGYYESRINKHRRARDLATQLQVLTGQHIAIRDGKAVITDTAA

SEQ ID NO: 459571 - protein, 415 aa, unidentified
MEHTYQVAGIDVHKSMLAVVISDAAREGEFHFQKRKFGTTASELRALRVWLEQQGVREAVMESTAQYWKPVWQELEGSCKLFLAQAFSNKAPRGRKRDFADAERLLRRHVAGELILSFVPQPEQRLWRTLTRGKHQLTRDRVRLHSQVEALLEDARIKLSTCVSDLLGVSSRRMLYGLAKGETDPAALAGLADPGLRASAEQLQDALSAAATMSSLHREILGLFLARLELIEKQIETLNGYIAKALHGHEGAVQRLAEVPGFGIDSAQQVIAEVGPTAGTFASPAELASWVGVCPGREESAEVSKNNRSPMGNRMMRRILNQVANAAVKSKGSVYQNLYRRLVVRLGHNKAIWAVAHRLCRLAWKILHQGVKYIEYGERPNPKAVRKRANKLLRDLKALGYQVQITSTSPEVPTL

SEQ ID NO: 459572 - protein, 408 aa, unidentified
MYNAVGIDASKLKSTITIIQPAGVVIRKPFDVLHTSDELNTLVTYLKSLEGETRAVIECTGRYHEPVVKSLSEAGIFISAVNPKLIKGQKQNTLRKVKSDPADARKIAKYALDNWAELREYSSMDTTREQLKTLNSQFTFFMKQKVAAKTNLISLLDNTYPGVNKLFDSPTRDDGSEKWVDYAYSFWHVDCVRKIGLKAFTERYEAFCKKHHYNYQKNKPALLFGESKQLVAVFPKEKSYKLLIQQSIQQLRLASEHIEIIRKEMNELASTLPEYETVMSMYGVGETYGPQLIAEIGDVSRFTHREAITAFAGVDPGVNESGQFKQRSNRASKNGSTRLRKTLFQVMSTYLQNKPVNEPVYQFLDRKRAEGKPYLVYMTAGANKFLRIYYGKVKECLRNLEQSQIEES

SEQ ID NO: 459573 - protein, 410 aa, unidentified
MEVMHQRCAGLDIHKKTVVAAVRIVDRGKVTTEVRTFATTMAGLLALSDWLSENGVTHVAMEATGVYWKPVWHVLSDGEFELVLANAAHVKNVPGRKTDVSDAAWLAELLAHGLIRASFVPDSETQELRALLRTRKQLVRERSRHIQRIHKVLEDANIKIDAELSDLLGKSGRAMLNAIVAGETDPVRLAALAHHNVKSSQAKLQEALRGRVTHHHRFLLQLHLRQIDGLDTALGTMDGEIEANLAPFRTAVELVSTHPGINQLSARAIVSEIGIDMSRFATAGHLLSWSGMCPRNDESAGRRRSNRLRKGAPWLKTTMVQCAQAAKNKKGSYYQAQYLRLRSRRGPKKAICAVAASILTAIFHMLKNGTVYQDLGADHFNRRSKTTQTQRLVRRLQHMGYAVEIQPLAA

SEQ ID NO: 459574 - protein, 485 aa, unidentified
MAKRKLSTFDRLRIGTALNRKERREVERRLNSTDPGLEIVNRDAAGIDVGNESHYVAVPAGRDAQPVREFGSWTSALEEMARWLIGCGIRTVVMQSTGVYWIAVHDVLQKHGLEVYLVDARGTKNVPGRKSDVQECQWLLRLHTYGLLRACFLPGPEIHAVRTVWRLRDQHVKDAGRCIQHMQKALIEMNVQLHIALSDLGGVSGQAIIRSLLAGERDPRALAALRDRRCQASEEEIVHSLQGNWKPDVLFELQQAVDAYDFYRQQMAKCDEQLKQCMAVLPGRKAEMLAPPIKSSSATDKSKGFGSRKPRKPKGNQPGFDLEAELERILGVKATTIDGINVMTIQTVLAEVGPDLSAWKTESYWASWLNLAPKRDISGGKVIRHVRGQHSNRVGNAFRIAAQSLLRSQSYLGARCRYLRARLGAPKAFKAMARILACQYYQLVTKGQAWVDRGAEEFNRRSQQRELAALQRKAHNYGMQLVPAV

SEQ ID NO: 459575 - protein, 422 aa, unidentified
MRNLRQSAFTPDLGRNHTSMTEPQPGIYGGVDTHKDVHVAAVVDQTGRIRDVASFPANSTGYRRLVAWMRRHGELVRVGVEGTGSYGAGLARHLGGERIEVVDVNRPNRQTRRRRGKNDTVDAEAAARAALNGEATAAPKSHDGVVESIRALRIAFCSTRSTRTRIANQLRDLVICAPDQLRRDLEPLATPARVERASRFRPGELTDPTEGTKTAMRTLARQYQALTADLDDLRGHLDELTARANPALRDAVGVGVDVASILLIAAGDNPERLTSEAALAALCGASPIEASTGKTIRHRLNQGGNRQANHALWRIAMVRLTCDPATRAYTERRRAEGKSTREIIRCLKRYIAREIYRLLTNPPVVADRTDLRTARTAAGHTLTIVADALDTWPARISELERGVTRNDELEHRYRIWLGLEVA

SEQ ID NO: 459576 - protein, 348 aa, unidentified
MYIGVDTHKTQHVLVALDAQGRSLGTRTCAHTPEGWANGLAWARSWESRVWGIENSGSLGKGFAQSLLVQGEGTVHEVSPHRTAQYRRRGRTQDKTDETDALAIARLLLAEGDTLPEVQRDDLSTELRLLSDHRDNLLAEKTRLINQLHGQMLQVDPSYKEKSGRLTDTRGVTYCRSLALPPDDRLVRTRLLIVHQRAEQILRLDAEVAAVAVELTARVQESQTPILALRGVGVVVAARIIGEIGVAPRIRSAAALAALAGISPVAVSSGGQGGYRLNRGGNRHLNRAIHGIALTQRRCDPRGRAYYMKKRAEGKTPRAALRCLKRRLVDVLFRAFSQHMEPRLGVAA

SEQ ID NO: 459577 - protein, 351 aa, unidentified
MTAGLDLGDKYSYLCLIDQHSGEVVEEGRLRTTPEAFRRRFASGQPMRIAIEAGTHSPWASRVLEECDHEVLVANARKLRLIYANKQKTDEVDAENLARLARVDPKLLYPLKHRSEDSQAHLAIIRSRQALVGARTQLVNHVRGAVKSFGGRLPKCPARSFHNKASERIPEALMPALGPILEQIGSLTQRIRDYERELETISKAHYPETELLRQVEGIGGLTALTFVLTLEDPYRFERSRSVGAYLGLVPARDQSGDTDPQKHISKEGDEMLRKLLVGSAHYILGPFGSDSDLRRHGEKMTSRGGKNAKKRAVVAVARKLSVLLHRLWITGEVYDPLYNTHRRQEQEEEAA

SEQ ID NO: 459578 - protein, 449 aa, unidentified
MKTLNSVRNGLPVINDRAAGIDIGSRFHVVAVPADLAEQSVRTFSAFTADLECMATWLTDVRITTVAMESTGVYWIPVYEILESHGLHVVLANARDARAVPGRKTDVNDAQWIQRLHACGLLRASFHPDREISALRSYLRLRERHLDYAAAHIQHMQKALTHMNIQLHHVVADITGVTGMRIIRAIVAGERSETALAAMRDTRCKSSIDTIQSALVGNYQPEHVFALTQALAMYDAYQAQLELCDQQIAHSLLRLSQQNVPPREPLPKPRHRTRQPNALNFDVRTMLYQLVGVDLTQIHGVGPYLALRLVAECGTDLSRWPTAHHFTSWLTLAPGCRISGGKVLSAHTRKTKNRVTAHLRLAAVTVGRTNTALGAFYRRLSARIGKAKAVTATARKIAILFYNAMRFGMDYKDPGADHYEQKYRERVVKGLHRRAAEFGFTLQAVEGVS

SEQ ID NO: 459579 - protein, 343 aa, unidentified
MQTIATIGLDIAKSVFQVHGVDAAGQMVVRRQLKRRQVLAFFAKLPPCLIGIEACASSHYWARELQALGHTVRLIPPAYVKPYVKRQKNDAADAEAICEAVTRPNMRFVPIKTIEQQGCLVLHRTRHLMVRQQTATINSIRAYLAEFGIVAPVGRRGVEQLLEIITDASDARVPEVARSCIAALGAQLRQLKAQILELDRRITAWHRSSELSWRLNEIPGVGPLLATALVASITDPKVFRSGRDFSAWIGLVPKQKSSGGKDKLGNISKRGDRYLRSLFTTGALAVIRYAKIHGTKHRPWLVALLARRPTKVAAIALANKLARIAWALMTKGSHYRQPAALRV

SEQ ID NO: 459580 - protein, 360 aa, unidentified
MKELTTIAVDLAKSVFEVAVSEVPGRVSQRKRLNRAGLVAFFANRPPAVVLMEACGSAHHWGREIQKLGHEVRLLPPSKSAKYRIGNKTDRTDTDALLEANRNERILPVPVKSIPQQTLASVHRLRVGWMGTRTARLNALRGVMRELGVVIPLGAKVVLPAVAEAMACGHVPEDLHPLLAASMAEIRQLEENVKECERTLARMARSIPAAHALQKIPGIGLLGSTALIPAVGDPLRFKNGRKMSAFFGIVPSEHSSGNRRRLGSITKRGNTYVRTLAIHGGRSVLLAAHRRKNPDRLHRWALEVERRQGPNRAAVAVANKIIRIAWAVWARGTPYDGSLTGPTPKPSITNTTTPQGTGAF

SEQ ID NO: 459581 - protein, 428 aa, unidentified
MQSHSTIQSLYVAIDVGKNVHCYAAYAGSSLTLLVSPQTVRTHHPGYEHFKTWLTELVDSQRYAAITVGLEPTGVYHEAWGYALQRDFGDSVVLQLVNPFRTKQKRKQLNNRAECKTDPIDAESLAHCLRDDIGRLLYFPSENLQSLDLWCRRYDVLRHDRQRLTNRVRSQLDRLWPGALVDVAAFKRAHPHLQPPVPLVCTQPLQRKLVQALLHIDPNPYTWRALSAHQIQTTLREDGWRCGPKTAQRVSRVAQDALLPPPSRAQLLAELLSADFHRYQQLCEEMADLRTRAEELVRATPGSVVATVPGISEFQAAQYAGLVADADRFDHADQVWALVGFDTIQDDSGDRRRRGKITKRGHPYGRAVLFQMGLSASMACPAIGQAKQRALQRGKSKLVATIHAAHKTNRICFHLYKHGVAFDPDKSR

SEQ ID NO: 459582 - protein, 514 aa, unidentified
MLSSEKYNTVAADSPPDSAVSDCEVDLKEAVSMVLPVDDGVEVMPTRDYGVGIDCHSRFLEINVLVKRGPSFFEYCREVSTDWNAIKSAHEWVIHVLRTCSDPPVMLSSPLHYCIESTSTYHLPVLLAWEGTPSVVNPSIAGATKKKTDKLDARLLAVHDLTGIWRPFYVVPENVQDLRVLIGQRDYYSRLASAIGNRINSTILKFGFTVGKDGSVVKNTEVRAIVENLICDHPEPVSTDLPQRNIPEDTRHVLSEEYQLYDRFSLCVTDFDKQIRDKVCSMDWPVSGGKTVSGKKLLSILMTAPGIGERTAITWLANIMDPTRFPNAKAVAAYCSLDPSLKISAQKVTSTKKRKGNKALHSSLCMSASIVIAKHSEFFGRWGYRMYQQTGKWKKATNAVARRLATALYFMHMNAEPFSYEKYQLTKEVHVLDMSLDDLVQLNGSFRRYIPVLKSAGIFRTQSLIQSYYSCELRGCKGLGPKFYTLVKEFIETQDNYRELYNSFLTEKASKGES

SEQ ID NO: 459583 - protein, 305 aa, unidentified
MTQVYIGVDVSKQWIDVSHPTRGQWQIETPALDRFAAEAAAEHAIVVFEATGRYDRPLRAALAAADAAHVRLSPQAPRQLARVLGIRAKSDRADAVLLRRYGEAFQPAPGRTAPPEPLADLVVRRRQLVKMLQAEHIRAHEPLAEPARASLARMVDHLATEIAALDGLIAGAIATCPERAETARRLRTAPGIGPVTAATLIAELPELGRLDRRALAALVGLAPFENESGRWRGRRHIRGGRAELRRALYVSAMHASRGNGALKPFRDRKIEEGKPVKLAITATARKLLTILNAMVRDQMDFKYPA

SEQ ID NO: 459584 - protein, 413 aa, unidentified
MRVILPQPHENEREQTMTGSMETGRDGYWGSLPETKLALPEYRNPTLAPSGPQKNISQETPAHRQKEGAMKAVVERCAGIDVAKKTLNVCVLSGPADQEPEAELGLFGTFNADLDRLRNWLLEKGCQQVVMESRGSYWKPVYAALEGSGIEVQLANGEDVKARRGHKTDWDDCQFLANLLRHGMIRASFIPPPAIRDLRDLTRRRRQLSGAAVSERNRVQKVMEEANVKLGSVLSDVFGVSGQLMLEKLLDGEADAEAIAELAQRKARQKIPEIRQALEGHRLRDHHRRMLRLSLEHIAFLERQISAIDEEVGKLIEREGYQESFDLVRSVPGVQQITAAALLAETGADMNVFPSEGQLSSWIGVAPGNRISAGKNKSGATTRGNRWRALRWWNAPGRQPRERIPCCRNGFGD

SEQ ID NO: 459585 - protein, 487 aa, unidentified
MRRRLCKEKIENKAPFGYNLTKRSTSGTELNPPCSKRTGQRLVHPGVNRSKNTNRVTSFEDLYKAALERDRPLKSNHKEVSIMFHTGIDWADDHHDIYIIDDSGTKVDPFRIEHNPQGLLFLRDKIRKLSVGKEQVLFAIETHKNLLVEFLLDEGYTVYSINPKSVDSYRDRYRVSGAKDDTFDAMVLANILRTDRNQHRAILPNSDLARELKILTQDEQKLIRMKTKIMNQLQSCLKDYYPIALELFSEIDQTITLDFLLKFPRHTAIPLKTLKDFLKEHRYPGADKKAEELYGKLSGPQIFVEEFTVRAKSRMLIALVTQLKTLLVQLAQYRQEIDKLFEQHPDSQIFKSLPGAGDKNAPRLLSEIGDNRQRYKEAKNLQCDAGTAPVTKKSGKTKFVQMRFACRKSFKNALYQFAFSSIMASPWAKQFYYAQRAMNKSHTKVLRTLSNKWLKIIFRLWKDHIPYNENVHLADILRYQLANNTAN

SEQ ID NO: 459586 - protein, 318 aa, unidentified
MTQMTHTTALYVGIDVSQKTLTIALYPTDEVWTIDNTSQHHTALVQHLAQLPIQRVLLESSGGYEKAVVSALQQAGLPVVVVPAQRARYFAKSMRGDLKTDRADARMLAYFACCYPVQPVAPCSPVQAELKELWARREQLVQQVEREKKRLHTVQSEAVRASLERMLAVLKDEIAQIEARVAELIASDAALAQKAALLQTAVGVGRVVAYGLVAELPELGQVSHRAIAALAGLAPVRCESGDWVGRARVRGGRPRVRRLLYQAAVVAVSHDGRWRAEYAGLLGRGKVKKVAFCAVARQLLVVLNAMVRDGRAYERVSE

SEQ ID NO: 459587 - protein, 487 aa, unidentified
MSNYYLGGDASKGYCDFVIVDAEKKIVEPDFQLDDTANGHQALFKLVRKFFTQHSDSTLYAAVESTGGYENNWYERMKDFGHTLPIHVARLNPAAVKADHDAGLKRNKTDAIGALDVATFQITHPEKVKYDEDTYPMLRRCWRFIRLLTKQKTQLINQLDSLLYISLPELLVFCREGYSQWLLQVLTRYSTYEALRSAGVQELRKLPYLTPEKAEQLIGLIQPGQTIGASDAISSQIIQSLAAQILHLDQLISQHKVFLEEHCDEAKEEIAILTSFKGIGVFSAIGLLINMIDVNRYATAKKLTSYFGLHPELKLSGDGVWKMCMSKKGRIEPRAILFMVVLCAIRCNPVIKPLYEKRVSNGMNKMAAIGLCMHKTLRVIYGMLKHKKLFDPNIDKINQAKSQQAASKPKKDKKRRLQDFDKQAPISPRQNRKRKQSKLPASAAAATAPEPSSQPERRAGDWMKLSTLLPSYPQSDDTVSKKSEKIT

SEQ ID NO: 459588 - protein, 455 aa, unidentified
MKKNKQQKQSVFKQMNSNAAGVDIGSESHYVAVPPGRDKENQDVRSFGTFTSDLYALANWLKTCKIDSVAMESTGVYWIPLFEILDSKGFDVKLVNPRSIKNVPGRKTDVLDCQWIQQLHSYGLLQGSFRPDDQICILRSYLRQRSMLVSDASQYIQRMQKALEQMNIKLNRVIRDITGTTGMAIIRAILDGERDPKKLAAHRNPRCKNDAATIAKSLYGNWRKEHLFTLEQAVETFNFYQKQIGVCDQKIQHHLSSFDDRSDGRPLDKSRRLTGGNKLAFDARKHLYQMTGVDLTRVAGLDSLSALQIIGEIGLDMSCWPTEKHFSSWLGLSPGSKISGGKVLSSKTKKCANRAAHYLRLAAYSLHRSNSAIGAFFRRKKAQLGPAKAITATAHKLARIIYNMLKHGTAYNDLGQDHYETRYRQRVIQNLKRRAKQFGCQLVIIKEQQMLTQHS

SEQ ID NO: 459589 - protein, 350 aa, unidentified
MEYIAFDAHKHYTVASVERPTGEVLRETRLAHHRGVIRDFLQQWTPGSPVAVETVGNWYWLVDEIEEAGMVPRLVHARKAKLMSGMINKTGKLDVRGLNRLQRTGTLPTVWIPHAEIRDQRDLPRTRMVLVRARTRLKNRIHATLAKYALTVTDVSDLFGKQGRIILSDKLTQLPPHSRFSTEHLLEQLKALDAHIAEFEVRIRKVFKKTPALEWVISLPGVGLILGIVILLEVGDIHRFPDAEHLAAYAGTTPRVSGTGGKIRFGRLRPDVNHYLKWAYTEAAEVICQHRADWSHRHVSQLYTRVRHRKNHQKAIGAVARHLAEATYWILTKRESYQEPKRRSDASMKA

SEQ ID NO: 459590 - protein, 346 aa, unidentified
MRVLIGVDPHKHSHTAAVLDQRGELLAQQRFPASREGHRALRRFAKRWPQRRWAIEGAAGVGRVLAQQLVANGEQVIDVPAKLAARVRELSTGHGRKHDPGDAVSIALAALGSQRLQQVDVEDHATVLRLLSDRRDDLVATRTQALNRLHRLLAELVPAGADRHLTANTAAVLLRRLRPTSPPAKARRQLAVDLVRDIRTLDQRITTVQQRLQAAVTQSNTTLVELVGIGPVLAAKFLGEVGDIGRFPTKARFAAHNGTAPIEASSGQVVRHRLSRAGNRRLNHALYLMAIVQLRHPTAGQAYYRRKLTEGKSPKEALRCLKRRLSDVVYRCMVADQQRSNQTATT

SEQ ID NO: 459591 - protein, 341 aa, unidentified
MGDITTIGLDLAKNVFQVHAVDVAGSVVLRKQLRRGQVLAFFAELPPCLIGLEACATAHHWARELIALGHETRLMPPSYVKAYVKRNKHDVADAEAICEAVRRPSMRFVPLKTAEQQSALMMHRARDLLIRQRTMLVNALRGHLAEFGLVEAQGLHKVARLIAIVMDEMDARVPDIARQVLKVIVSQIEDIQTRIAGLETQVLAWHKSNPVSQRLATIPGIGPIIATAIAATVADPSTFRSGREFAAWLGLVPRQNSTGGKARLGGISKRGGSYLRRLLVNSAHTVLLCSKVAKTDPWLTSLLSRKPRLVVAVALANKTARMAWAIMSRPDSTDTQRSQHD

SEQ ID NO: 459592 - protein, 404 aa, unidentified
MEVIYPRCCGLDIHKKTVVACIITPEGQETRTFRTMTRDLLLLADWLVQCQVSHVAMESSGVYWKPVYNLLEGTGLTLLVVNAQHIKAVPGRKTDVKDAEWIASLLRHGLVRASYIPDRPQRELRELVRYRRTLIQGRAQVVNRIQKLLEGANIKLSSVASDVVGVSGRAILEAMVQGMEDPQALADLAKGRLREKRTALEEALRGLMGPHQRLLLQSHLRHLDFLDAEVADLDREVATRMTPFEGALSQADSIPGIGRRTAEAILAETGVEMSRFPTAAQLSSWARVCPGNNESGGKRRRASTGRGNPWLRSALVEAAWAAARTRETYLSAQYHRLAARRGAKRAIVALAHTILVILYHLLRTGKTYQDLGSNYFDERQRQHVLHRAVHRIERLGYKVSLEAA

SEQ ID NO: 459593 - protein, 379 aa, unidentified
MCLTVDEAAHFGRWLFPDRMAKRAHDWTPGPNIEWRTAVAQYIGLDVSLKDTFISVREDGRRIWRGKCPSDPKILAEMIYKRAPNVSRVVFETGPLSTWYYHELTAAGLPAICIDARQAKKGLDMARNKTDANDADGLAHLAEAAFYKQVRVKSYDNMLVRTLVTARTQLLKMQLQLSNQIRGLMKTFGLIVPKGLGRVFDGHVCDLAGSHPGLAPIILPLLAVWRELRVKVAGLSKQLVGTARQSKQCQLLTSIPGVGALTACSFIAAIEDPANFARSRSVGAWLGLTTRRYQSGEVDYDGHISRRGDVYVRGLLYEAATVILTRAHADSDLRQWGIKLREKVGFKRAAIAVARKLSVVMHAMLKSGECFERRPVTTA

SEQ ID NO: 459594 - protein, 409 aa, unidentified
MLKIVYPNCCGIDVHKTFVVAVIAITNNQGITEYHRKRFSTFTNGLTQLRDWLEYYSCFDVCMESTGKYWIPVFNILEEQTNVCLAHPKYVKAIRGKKTDKKDAQWIADLFKHDLVASSFIPPLKIRQLRDLFRYRMKLTQLQVGEKNRYQNCLTWSNLQIASVVSDVFGKSAQAIIKSILDNPQDKPNIEQLVHKRMKNKVQDLEIAMEGALTPEQAEKIRVIKAHYDALAICKEDLEQMIRELGQDYQHQVKLIQTVPGFKEDLSALRIISEIGCDMTVFDSAAKLCSWAGLVPANNESAGKKFSTRISKGGKYLKPFLVQVANAVVKSDKHPELRNKYLKLKKRRGHRKAIIAICRRLLVSVYQVLRKQEDYNPVLQGLTEIRNPDKTMSVQDAVRFAQQHGFNVA

SEQ ID NO: 459595 - protein, 424 aa, unidentified
MEVLHAHCAGLDVHKDTVVACVRHMVEGKITTTVKSFNTTTRELILLSEWLSTEGATHIAMEATGVYWKPVWHILSDGEFELVLANAAHVKNVPGRKTGAPGDRSSSLGWKTDVNDAVWLADLMAHGMIKASFVPDEPTQQMRDLLRTRKQIVRERSSHIQRIQKTLEDANIKLDSVVTNILGLSGRRIIEALIAGQTAPQAMATLAHRRLKATSDQLQASLDGRVTKHHRFLLKLHLDQIDAFDATIARIDEEVSANVEPFRVAIEMLSAIPGVGELSAAVIVSEIGIDMSRFETAGHLVSWAGLCPKNDQSAGKRRSNRMKKGAPWLKSTLIQCAWCASRTKGSYLQTQYLRLRSRRGAKKAVCAVAASILTAAYHMLKNGTVYQDLGASYFDNRAKDKQALRLINRLKNLGFEVQITPQAA

SEQ ID NO: 459596 - protein, 377 aa, unidentified
MKRVKFVGLDVHAETIAVAVAEQDGEVRSLGVIPNREDSVRKLVRKLGAVQELRFCYEAGPTGYALYWQLIRMGAKCEVVAPTLVPVKAGDRVKTDRRDALKLARNYRAGELTAVWVPDAAHEALRDVVGAREAAKKDQLRARHRLSKFLLRHGRRPPMGVKPWTMKYLEWVKREVHFEQLAQEATLLDYLNEVGHAAVRIARLDGAIEEAVKVAPPQMRAVIEALQALRGVAHVSAVTVVAELGELSRFSRATQLMGYGGIVASENSSGERTRRGNITKTGNAHLRRVVVEAAWAYRHRPAVGATLRKRQEQVSEEVKEIAWKAQQRLHGRYRKLLAKGKNKGVVVTAVGRELLGFIWAIGTKVEAAQKESLQRAA

SEQ ID NO: 459597 - protein, 428 aa, unidentified
MDVIYSRCCGLDIHQATVVACILVSEAGKAKPRKVVRTFRTVRRELEELRAWLVEQEISTVVMEGTGVYWRPVYAVLEGHLELYLVNARHVRNVPGRKTDVSDAAWLAELGAHGLVRASFVPPEPIRMLRDLTRARTTIAQARTKEIGRLETLLEDTGIKLSSVACEITGVSGRAMLEALINGQRDDPAALADLAKRRLRNKIPLLTEALQGRFNDHHAFMVRLYLDRIDAHEADIARLDARIEEAMAPFRPIRELLVSIPGWSHVIANVFIAETGADMSVFPTAAHLASWAGVTPSSNESAGRIKSAKTLPGNRHLKAALGVAALSASRSTDTYFGARFRRIAGRRPTQPATKKSRRQSAAGQTAIVALEHKMLTCAWHMLVNGTLYQDPGPDYYTRHRPAHTKAKAIKQLQALGYDVTLEPHTDAA

SEQ ID NO: 459598 - protein, 352 aa, unidentified
MAATAQSAIAVIGIDIGKNSFHVVGLDGRGAIVLRQKWSRGQVETRFANMSACLIGMEACVGAHHLSRKLKALGHDARLMPARYVRPYSKGQKNDFRDAEAIAEAVQRPTMKFVVTKTADQLDLQALHRVRERLVSQRTGIINQIRAFLLERGIAVRQGQRFLRVELPRILATPPDVLSPRMVRVIEGLASDWHRLDERIEVLSSEIEELAKRDAGCERLMSIPGIGPIISSAMVAAIGTGDSFSKGRDFAAWLGLVPRQISTGDRTILGKISKRGNRYLRVLFVQAAWVVLVKVKPTRWEGHGLRHWIEAAKKRLHHNVLAIALANKLARIAWSVLAHGRAFETNKLQAAA

SEQ ID NO: 459599 - protein, 311 aa, unidentified
MNSEAYIGVDVSKDLLDVKVLPSNKAQQFSNDGPGIKKFITFIKKIDPQLIVFESTGGLEMLAVSSLVEKHLPTVVINPRQIRDFAKATGRLAKTDSIDADTIARFARDIRPEIRPIKDEHTQLLSALNARRRQIVDMLVAEKNRLYSAPKPNIKSIQKHIQYLERTLEDINKDINKTIKKSPTWRENDRILQSFKGVGPVLSATLLCDLPELGTLNRKKIAALVGVAPLNCDSGQFRGRRRIKGGRADVRRKLYMAAVASIRHNPRMKNFYHKLIDAGKPPKLALTACMRKILTILNAMIKNRTYWIATC

SEQ ID NO: 459600 - protein, 438 aa, unidentified
MSNKVIFNLDELFISVGIDVGADFSWMSIALPKQQFVGKPYKILHNSIDSLTTAVSKIKEAEELYSLESRIFLESTGIYHYPLFCYLRDKGFNCSVINPIITKNSTNINIRKVHNDRFDSKKAALVGLKPDLKVSLMPSDLALNCRNLCREYYDLMDTRSAYVNKLQGELRIAFPQYLGIFSKVTINTSLTLLETYTSPSAFLKADKQEIIDIIKSTARFGLTYAQNKYNAIIQAATDANQFGYIIDSNIKRIRLYISFIRKYDEEINSILESLHELVDANEDSDFVKQIHLIETFKGAGFLSAVSIMGEIGDFSAFSKPKQLFAYFGLDPAVKQSGKFEGTKVQMSKRGSAIARRVIHTLTLQSISISRNREAKNPVLREYYLKKCDSKPKLVAMGAVSHKVCNMIFAILRDNKPFKIIAPQEHIKQYNSAKCDIAA

SEQ ID NO: 459601 - protein, 376 aa, unidentified
MREKLRFLGMDVHAETIAVAVAEPDGEVRSLGTIANREDSIRKFIKKLGSPEQLRACYEAGPTGFVLYWQLSKLGVECAVIAPTLVPKKPGDRVKTDRRDALKLARSHRSGDLTAVWVPDEDSEALRDLVRQREAAKQDQLRARHRLTKFLLRTGQRPPLGLKAWTERYMRWLGQVRYTQPAQEVTRLDCMNEVEHMSLRVKRLEEAILEVVKQAPQSMQELIRGLQALRGVAHISAVTIASELGNISLRFESARKLMGYCGVFPSEDSSGKRVRRGDITKCGNAHLRRIVVESAWCYRHLPRVGEKLRKRHEGIPAEILEIAWKAQNRLHKRYTKLIMAGKDLRKVMTAVARELLGFIWAIAIKAEAGCRQPMAA

SEQ ID NO: 459602 - protein, 350 aa, unidentified
MLIIGCDYHPAFQQIAFVDTDTGELQEGRLQHREEAEKFYRDLAVQGMKVRVGMEASGHGRWFERLLAELNFELWIGDATEIARKRERKQKTDRQDAQHILKLMLQDDFPRIWVPSWENRDLRQLLWHRHRMVQARTRIMNQLQAVALNEGLRSKRRLWREHGREQLESFRLAPWASRRRQDLLELLDRLNPTIAELSQAIEQEAEKFPEARWLMTHPGVGPLTALAFVLIIGRADRFQCGKQIASYLGLVPLEDSSGNRRRLGHITKQGSSILRFLMVEAAQVTVRSLPEWRSKYFHLMMRRGRKIAKVAMARRLAIGLYWMWRKGWDYEQVVKFGSHVGKLGTGDGVQ

SEQ ID NO: 459603 - protein, 345 aa, unidentified
MMVIGIDAHKRSHTAVTVDEMGRQGFVKTVGTTTQDHLRLLKWAVGFAEERLWAIEDCRHLTRRLERDLIAAGESVVRVSPKLMAHVRDSARSYGKSDPIDALAVARAALREPDLPIARLDGIEREIRLLVDHREDLVAERTRIIARLRWHLHELDPGWTAPTKLERHSAFDKVKAHLSDHNDGAMVRRLALRLVEHLRLLTDEIDELTAEITVRVTKIAPSLLAIVGCGALSAAKIVGETAHAGRFRSKDAYARHNGTAPLPVWSSNKQRHRLSRTGNRQLNAALHRIALTQARCYQPARELLDRRKNGGDGGREGLRVLKRRLSDVVYRAMLTDETGPLPRTA

SEQ ID NO: 459604 - protein, 341 aa, unidentified
MQITTIGLDIAKNVFQVHGIDANEKVVVRKQLRRSQVIGFFKALPPCLVGMEACASAHYWARELRKFGHEVRLMPAKDVKAYVKRNKNDAVDAEASCEAVRRPTMRFVGVKSAEQQGQLMQHRTRDLLMRQRTQVINALRAHLAELGIVAAQGREGLKELLAIIADESDARLPIDARASLIVLAAQLQAVQTLIGSIEKRITAQHRANEASKRLQSIPGIGVIGASAIVSTVTDPNAFRSGRDLAAWIGLVPRQDSTGGKQKLGPISKQGDRYLRRILVVGAHAVLRRAKHNPEKYPWLTQLLARRPFKVVAIALANKMARVAWALLASGGRYRAPRLTAA

SEQ ID NO: 459605 - protein, 410 aa, unidentified
METLIKRCCGLDVHQATVVACLRIARPGKKVSREIRSFATTTAALLELRDWLTAAGCTHVGMESTGVYWRPVHAILEDAFTVIVGNAQRIKNVPGRKTDVKDAEWLAELLALGLIPPSFVPDRGLRALRDLVRFRRSLVEARTDCRNRILGVLEGAGIKLASVATDVFGVSGTAMLQAIVAGHLTPAEIADLAKGRLRKKRAALELALHGSVTDDHRLMLDLLLGSLNDTEGRIAAIETHINVRLEPYRQDHLNLTTIPGVDWAGAASIVAELGTDMAVFGTAGRAAAWSGVAPGNNESGGRRRRAGARKGNVHLKTTLHTAAVAAGRTKHTYLADKYHRIRARGGPGIAGGAVAHKILIAAFHILARKVTYRELGADYLDRRAKQRVQRTIVRRLERLGYDVTLRPKAA

SEQ ID NO: 459606 - protein, 392 aa, unidentified
MLFVGIDIAKRNHEASVIAQDGHVVRKAMRFANSQAGYNKFMDMVRSLSEPVVFGMEATGHYWLTLYTHLRNDGFTVHVINPTQSDALRGMYIRKTKTDSVDSVIIADVIRFGRYCETSVEPGDLHAMRELCRQRFYVIDMASDLKRKVIALLEQVFPEYEKLFSDTFGVSSMELLSQDTTPEEMLSVSSQQLAEVLEKASRGRLGAEKAAEIQDAARNSFGIVLASSSFSLIIRQYIEQIRSLEASVDVFDAEIARLLSGFDTQLTTITGIGPTLAAVILSEIGGDIRRFSSPAKLAAYAGVDPTVKQSGDFSGTRIKMSKRGSPYLRRAIWLASTVAAFKDPVIHALYERKRAEGKDHMTVIGHVCRKMISIIFAVLRDNTPYVPAGISD

SEQ ID NO: 459607 - protein, 354 aa, unidentified
MSEDQHVTVGVDTHKDVHVAAVLDQTGRMLANSSFPTTTRGYAQLAAWAESFGTVAKVGLEGSGSYGAGLLRFLTDYGLTVIEVDRPDRSTRRRVGKTDTIDAESAARAVISGRASGTPKTRHAQVEMIRALRVARRGAMKARIQAGGQIEALIVSAPEPVRQLVRGLAGKKRIRACAALRPGTVSDPATATKVALRSLARRWLALQAEIDDLDSHLTALVTATAPDLVALPGIGVDTAGQLLVTAGDNPHRLHSEAAFARLCGVAPIPASSGRTDRHRLHRGGDREANRALWRITLVRMRCHQPTKDYVTRRTAEGKTKTEIMRCLKRYIAREAFTHLAPLPNTAGTMTRCDH

SEQ ID NO: 459608 - protein, 389 aa, unidentified
MRRPTPQVRSTLWVCKSHTGSNAQEGGSALEMDGSSEQPQMTAGLDLSDKYSYLCLIDQQSGEVIEEGRLRTTPEAFRRRFASEQPLRIAIEAGTHSPWVSRVLEECGHEVLVANARKLRLIYANKRKTDEIDAENLARLARVDPKLLYPLRHRGEGSQAHLALIRSREALVSSRTQLVNHVRGTVKSFGARLPKCPARSFHKRASEHIPEVLRPALGPILETIGSLTERIKDYDRKLEAISKEHYPETDLLRQVEGIGPLTALTFVLTLEDPYRFEKSRSVGAYLGLVPATDQSGDRDPQKRISKEGDEMLRKLLVGSAHYVLGPFGSDSDLRRHGEKIASRGGKNAKKRAVVATARKLSVLLHRLWVSGEIYDPLYNAHRRQSKEAA

SEQ ID NO: 459609 - protein, 350 aa, unidentified
MLYTGLDVHSKWMTIKGFDPETGDLVEIKKQSNDEQSLRETFSSLAGPLHGVMESGTNSWAVYRILEPYFERLIVVDPATVWGKDVRRGAKTDGRDAFGLALKMQRGELEPLYVPDVQTQDMRALARAKINASRHVTKIVNEIGSQMRSWGIVIECSLLSPKGQMYINESKSKLPDFSLRVLEMWLEMLKKAQETEAEIEKMVEAEAAKDEVCKLLTSIPGVGPLTALVVRAEIGDIRRFSSAEQLISYCGLCPSVRQSADKIYYGKLNRFCNRFLKYVLILRAQGMSRSKVDSPMRQTYWRVIIKGKNCAKIAVARQLVRVIYSMLINKTSWDASRITARKSALTPAAA

SEQ ID NO: 459610 - protein, 358 aa, unidentified
MSTIGDDDRRVIAGVDTHKDFHVVVVLDEHGRRLDQATFSTTTRGYRDLTGWVIGFGEVLALGVEGTASWGAGLSRHLRARGLNVVEVNQPDRHRRRRRGKSDPLDAEMAARAVLAGDATAVPKAGDGPVEALRQLRLARTGAMKARTAAANQLHSVCDTAPDALRAQLRGLTTRRKVAIASRYRPGDPLTPTGGAKRALVTIARRWAALDTEIRELDHAIRVILNTIAAPLLARHGVGYDTAGALLCTAGDNPNRLTTKASFAALCGAAPVPISSGNTQRRRLNRAGDRNANSALWTIVMVRLRSRHAPTVAYLERRVATGHSKRDAIRCLKRFLAREIYLDIQHITADTAHLDRAT

SEQ ID NO: 459611 - protein, 402 aa, unidentified
MNAVGIDVSKGKSMIAIMRPFGEIVSSPFEIKHTTSDINSLVELINSVEGESRIVMEHTGRYYEVLAHQLSKANLFVSAINPKLIKDFDNDSLRKVKSDKADAVKIARYTLDKWQNLKQYNVIDELRNQLKTMNRQFSFYMKHKTAMKNNLIGIIDQTYPGVNTYFDSPARSNGSQKWVDFASTYWHVDCVRKMSKNAFIDHYKNWCKRKKYNFSKSKAEEIYEKAKELVPVLSKDNITKLIIKQAVDQLNSVSTTIESLRTLMNETASKLPEYSVVMAMKGVGTSLGPQLMAEIGDVSRFTHKGAITAFAGVDPGVNESGSYEQKSVPTSKRGSSVLRKTLFQVMDVLIKTHPQDDPVYQFIDKKRAQGKPYYVYMTAGANKFLRIYYGRVKEYLSSLPES

SEQ ID NO: 459612 - protein, 350 aa, unidentified
MNVQSNAKTLTLGVDTHLEKHVAVLVNNIGQVVDTKEVAVTTLGYSALFKWCRSFGVVKQAGIEGTGTYGAGLCKYLQDKGVDVYEVNRPNRARRRLRGKSDPTDAESAARSVLAKESTAIPKSHDGVVEALRFMVVARKSSVKSKTQTINQIRALLVTAPEAIRQKCYVPRAFQCIVACEELEPRTDNLLESSLISMLQLLALRWRGLAAELRIIDKRLKALTSSCAPTLIEQYGVGTYVAATLLVAAGDNPERLKKESSFAALCGVSPMEASSGKTQRHRLNRGGVRDANNALWTVTLIRMRNDARTKKYVEKRVTEGKSNKEIQRCLKRYIARELFPIIVSDLSCLT

SEQ ID NO: 459613 - protein, 283 aa, unidentified
MDKELYIGVDVSKQTLDLAYYDGESIDWKKAHIKVSNNNAGFKKIGSWVAKVSKGFDIVLFCMEYTGLYTQNFRLWLEEKHYIYRMVEPRKMHRFEPDLDDGLRSLDRIKTDELDSFRIAIYCEQNHRKILRNPSKLPPPVYFKLKRLLAERKQTVKQSVLYKQQLHDICAYDTDLSVERKNGQLKTLNDALKGIDNEIDMYIKEDADISKNFSLLTSIPGIGRVVALETIVLTENFMAIDNPRKYACYIGVAPFKKESGTSVRKGSSVSKKGHKCPVKIGTS

SEQ ID NO: 459614 - protein, 322 aa, unidentified
MSGSSVMVGIDVASLHVDVAAIGAELPAQLVRVSNDADGHSALADGLVRLAPGLVLMEATGGYEAALACALQAAGLRVAVINPRMARDFARAMQRFAKTDRIDAATLAELAGVLARRPDAERFIRPVSEPEQQDLAALVTRRRQLVAMQLSERQRLRLARPVARSSIEAMIEAIKHQLDDVEAEMARHVEQHHVALSKVLQGVAGIGKVAAATLIAELPELGRLNRRQICALVGVAPYANDSGSSRGRRRIAGGRFEVRRTLYMATLSAVRYNPPIRDFYERLVAAGKLKKVALIACMRKLITHLNAIARDHSNTHDRLAIA

SEQ ID NO: 459615 - protein, 343 aa, unidentified
MQAITTVGLDIAKSVFQVHGVDAAGQVIIRRQLKRRYVLAFFQKLPPCLVGIEACASSHHWSREIKALGHTVRLMPPAYVKPYVKRQKNDATDAEAICEAVTRANMRFVPAKTTEQQSCLMLHRTRHMFIRQQTAVINAIRAHLAELGIVAPVGRNGVEELLNVVADPADKRVPDIVRACLAALGAHLRRLKEQILEFDRMIMGWHRSSEASKRLDAIPGVGPMLATALVASVADPKAFRSGRNFSAWIGLVPKQHSSGGKDRLGSISKQGDRYLRGLFVAGALAVIRYTKIHGTKHRPWLTALLARRPVKVAAIALANKIARMAWAMMARGERYKEPVALAA

SEQ ID NO: 459616 - protein, 345 aa, unidentified
MLYVGVDAHKATSQVTVMDSGGNILRRKRIVSSPIAVRQALAGYDEPLKAVLEASYCWAPMYDWLDEVADEVVLAHPLKVRAIAEARIKTDKIDSETLAHLLRSDLIPRAHASSQDVRARRRVLRQRMFLIRLQTMVKNRIRALLVQHICEQPKVSDLFGKCGRDWLRRVQLPDPDGRLLKEDLGLLEFLQQEISRTDRLIAELAQGDEPVQFLANVPGIGVFLSVLIRWEVDIIERFRQAKKFASYTGLVPSTYASGNRIVHGRLTKQGNKWLRWAFVEAVSPAVRSSAYLHSYYQRIKLRRGVKDARIATARKIAELAWTVWTERRRYEERLPKSLRTATEER

SEQ ID NO: 459617 - protein, 421 aa, unidentified
MLKIHRFNCAGLDVHKNLIVATIGITDKKTRVTEYIQKDFSSLNSDLYSLKNWLIEHECFDVCMESTGKYWIPVFNVLEIESKMNIVLVHPKYVKAIKGKKTDKKDSKWICDLFKHDLLKSSFIPPKDIRELRDLSRYRFKLICMRTSERNRYQNSLTVSNIGLASVVSDPFGKTAQAVMNEVLSTEVIDEDKIAKLIHGRCRNKDKIIESLRSSKIEPDQRFKMTEIQSHMNELDKHIEAVEVEIIKRASRHFDDFLHITEVDGIQLMSAILVISEIGVDMTQFETDKQLCCWAGLSPANNESAGKKKSVRINKAGQYLKPVLIQCALAAIKNKNSYFGQKYTGIKKRRGHKKAIIAIARMMLVSIYHMILTGEKFNPSDYESFKNPKLQKEKNNYTIETALDFLKSHGFDVSSIQDIPK

SEQ ID NO: 459618 - protein, 318 aa, unidentified
MQGRAEKEKMEEVYVGIDISKDSLDVAIHGCEKQWHFANERFGIAKLTKMLVKLGPALIVFEATGGYEIPVFIRLDEAGLPVARVNARQIRDFARSTGRLAKTDLLDARVIAHFGQAVRPATRHVPDTHELKAIQTRRIQILEMITAENNRLKGSRKELKKRIQAHIDWLNKELDHTDKELKEKIASDPEWQEKDNLLQSTPGVGPVLSTTLIAQLPELGNLNRRQIAALVGVAPLNRDSGTLHGRRIIWGGRANIRTILYMATLAATKYNPAIKKFYDRLCIAGKSKKVAITACMRKLLTILNAMLKHHIPWNYSPV

SEQ ID NO: 459619 - protein, 337 aa, unidentified
MEYFAGLDISMAETQVCVVAQSGAVIHKAKVPSTPADIAGELAQLPACRRIVFETGRMAPMLYHGLRELGLPVICVESRQAYQALKLLATHKTDHNDARGLAHLARTGFFKPVHVKSLPAHAIRSLIIARKKLVGQRVTLENQIRGLAVVFGVRLPRALSSDFIRQALQASNGIAGLSAAMQGLAAARAAVLAAILAIDADIRRMVRASDACQRLMSIPGVGQLTALAFTAAVDDPGRFRRSRDIGAYLGLVPRRHQSGEMDYTGSISKCGDRRIRTLLYEAANVMLTRYKGPLQLKDWALAVARRSTMRKARVALARRLAIIMHAMLKHGTEFKPA

SEQ ID NO: 459620 - protein, 444 aa, unidentified
MKEVVHLEVMHTICCGIDVHKKKLVACIRRGRKEEVREYGATTKEIKEMVSWIKEHKCEIVAMESTSVYWKPLVNIFEMEDIDFIIVNARDSRHLPGRKTDVQDAQWIAQLLQLGQLRGSYIPSREQRELRDVCRYRKKLVEERTRAINRLQKHLEGANIKLSSIVSDIKGVTSLNLLDYMINNQDALDEAKAKELIITRISASVEEVVEAMEGIVTDVQKILIKENIDHMKELAFRITRLDEIIDQFMSEEATDDEDDNQTPDDKKDNDDQILEDKKPKLSYKEAIKLLIQIPGVGIRNAQTILAEIGLDMSRFSTAGHLASWAAICPGNNESAGKRKSGRTKKSNKMLKTTLSQAATAAIKNKNSFFSAQYQRLVVRRGKKRATMAVAHSILISIYHMLSEGTEFVDLGSDYYNQFNTEKKANSYIKKLESLGYHVIAEKIA

SEQ ID NO: 459621 - protein, 357 aa, unidentified
METAYDGRQVVGMDLHRRRSVLVRMTGDGRRLGTARIANSPAELRAQIARAGKSPQVVLEATYGWYWAADTLAAAGAEVHLAHPLGVKAFTYRRVKNDERDAADLADLLRMGRLPEAWIAPPEVRELREITRYRQKLVHLRTSCKDQVHAVLAKLGVPVTCSDIFGTAGSAWLDGLGLPQPYAGKVTSLRQLTGELSAEITMLSEVIADLLAGDRGYQVIQQLPGIGPVLAAVIVAEIGEVTRFKNAGQLCSWAGLTPRHRESDTKVSRGHVTKQGSRMLRWALIEAIQRVRADTVTGAVKDAIIARRGKEARSIAKVAAARRLLTLVFYGMRDEQIRCLSRSPADPPVTQPPARAA

SEQ ID NO: 459622 - protein, 342 aa, unidentified
MVVIGIDPHKHTHTAVAVDEVGRKLGQVTVAADEAGVLRLWVWAGRFGQRRWAVEDGRAVAGRLVRTLIGMGSAVVWVPPKLMVACRASARTRGKSDPIDALAIARAALREPRLPAARLDQVALDLRLLIDRRETVVAARTAAICRLRWHLHDLAPGLDEGTRTLTGRRRQHALTGMVAALPASVRRDIALDLLADITRLTEQILILERRLSELVTPIAPTLMAIVGINVLAAAKLIGEVADITRFRSPAAFAMHTGTAPIPVWSSNTPQYRLNRGGNRQLNTCLHRIALIQLIHHPPAQQFRDRWTQQHPHATKKAAIRALKRHLTNVIYHALQTDHHHLT

SEQ ID NO: 459623 - protein, 300 aa, unidentified
MNSVGLDVHKTRCVACIKTHEGRILEEFAFQNNPHGHEELITHLKVYPEIQVAIESTGNLWIPIYNRLEDEQIHTILTNPKKTRMIAEAKIKTDRLDARILADLLRANLLSASYVPPQEIREQRSIIRERARLAQVRTIIKNRIHAILDKHSIKTPYTDISGKHSLEWLSKLELPPGDRILLDINLEQLNTLNRSIERLTETIATSAVDNPEVKLLMGFTGIDYYSAMLLLNEIGPITRFASPKKLVSYAGLAPGIRQSGNHTTHGHITKEGNSHIRWILVEAAHTPHATTRDSANSTSE

SEQ ID NO: 459624 - protein, 412 aa, unidentified
MTTSYLVFAGIDYGSDFHQVCLTDTEGKKLTEFRIEHSAIGIGKLVKTLLQHGEPSRCAVALELTHGPVVETLLESGFDVFAVNPKQLDRFRDRHSVAGSKDDRLDAFVCADSLRTDRHHFRLLQLDDPLVIRLRELSRIDFSLSKDFRRLANQLRAQLHRFFPQLLELCPAADEPWLWALLLKAPTPHKARRLKKNQLARILKEHRIRRISADQLHLLLAQPSLTLAPGSLEAASEHVQLLLPRLQLLCQQRRDCRRRIDDVLQQLQENVTSEGECREHHDVEIVLSFPGAGSLVGAAMLGEASQPLAERDYHTLRAHSGIAPVTRRSGKRTLVFMRRACNPRLREAVYHWARTSIQNDDGCKAFYARQRGRGATHGRALRALADRLLRILVAMLRTQTLYNPSLPRLHPS

SEQ ID NO: 459625 - protein, 346 aa, unidentified
MNYCGIDLAGVSSYVYVTDGRGKKLTAGAVPTEKASLERRLKRFVRGGLSIAIEAGNQTAWVYDALVAMGATVTVVNPTKVKLIAESRRKTDKIDAKILAELLRIDALPTPVHMPGQETRALRGLLVARRQLISARTKLCNVVRGMLRQEGVRLPARALSSFTGWRRLLEQGFAQSHLCMIVAAYADSFVALTDSIHEIDSQLSKYERTDARAARLKTMPCVGRIAALTLLAAVDDVHRFPSSRKLVGYSGLAPTVRSSGERTEYGPISREGRRELRAVWVQIAHLVAIDTSRATLELRRWFHRVAGRRGRKTAIVALARRLLVIAYQLLKEDTVYDATRLKHKAA

SEQ ID NO: 459626 - protein, 445 aa, unidentified
MASFAGGVAQAGYVDRIRDLAPQRCLVVPVDVGKRTAVALVADHYGQIIAAPFEFDLTVSGASKLVTTITAARQRVGAESVRVGVEAAGHYHQALATTLRGNGFDVVELNPYQVKMARAQLGTGRVKTDVRDCTAMVELLVRGQGWPLHRQDGAMAEPVVWVAHRRRKLAAAQALGSQVHALADLAFPGLTGCFTTGLEAKTLRMLLATLPDPARVAAMSAEELVHHARSHRVRMTRPKAVQVIAAAGEAMCVPEAKRAAAARLLTAEVEVFDALQRDLAACDQRLAQLLPDTPAGVLTSIPGVGTLTASYYGAALGDPARFANAGAAYRYSGLAPASYESAGRRATKVRISKIGSVELRQAMIALGTGIALHHPDFAAYKRRLVDTGKKPMVAAIAVAHRAHRLAFAVIRSQKPYDPAKWAISTSGRQRRDRSAMAADPATGAT

SEQ ID NO: 459627 - protein, 413 aa, unidentified
MDVLHSRCCGLDVHKSSISACILLREAGRVQKHQRRFGAMTQELQELAEWLRQFGVTQVAMESSGVYWKPVWNILEGQFTVVLANAQHIKNVPGRKTDQKDAEWIAQLLQYGLLRASYVPCEIIRDLRDLTRMRASLSQEASRICSRIQKVLEDANVKLASVATNVLGKSGRAMLEDIITGEDNPEHLASHALGHLRVKIPQLRLALEGKIRPHHRFLLRRLVDQIQFVEQEIALLDERLDDIGRQRPDFAQAVDRWDSIPGIDRVAAWALLAEIGDNMGQFPTADHLASWTALCPGNHESAGKRLRGTTRQGSPWLCRMACQCAWAAARTKNTYLSSQFRRLAARRGKKRAIIAVAHTIIVIGYHLQKNQRNYEDLGGNYFDRIHSDGLKRYLVKRLQQLGHKVTLEPMEAA

SEQ ID NO: 459628 - protein, 341 aa, unidentified
MNIKTIGIDLAKNVFQIHGVDEHGKRLFNKQLRRAQMASFFANIPPCLIGMEACASAHFWANKLISMGHNVKLMAPQFVKPYVKTNKHDAADAEAICEAVTRPNMRFVPVKTAEQQAVLALHRSRQSFIKQRTAQANQIRGLLAEFGIVVPRGIQQLQRRLPELVEDADNPLPVLFRTQLSLLQHHMAYLFDVIATLDKQIEQCYRQNALCQRIGKIPGIGPVTASALIATIGKANNFENGRQLAAWLGLVPRQHSSGGKQVLLGISKRGDTYLRTLLIHGARAVLQSAKHKQDAVSSWANQLMARRNNNIASVALANKNARTVWALLAKEREYCAPIISA

SEQ ID NO: 459629 - protein, 361 aa, unidentified
MTAIFEKYYVGLDISDKTTAVCIVNGVGDIVKEGSVPSEPQDISDYFEDAGFDLHLIGLEASGVAIWLCRELLCRGYPLVCVETHRSSAFLAAQKMKTDKNDARGLAQMMRCGLYRSVHIKSDESQRIKMLVNNRRFLVEQRVDIENQIRGSLKVFGLKVGAVTEKQYDARVRELIDGDGELEVAILPLLEQRSSGVERIKALEKMLSTAAKNDEICRLLMTAPGVGPLTAVLFKAVIDDPSRFKRSRDVPPQLGLVPRKYASGETDYNGRITKAGDVMLRHHLYRAAATLTQTSARPCELKKWGRNLRNRSSYKSSTVAVARKLSIILHSMWVNRQEFDWSVDSKSQVEEDCEVELSKSA

SEQ ID NO: 459630 - protein, 343 aa, unidentified
MELYVGLDVSLKETSICVVDGRGEIVSESVVNSEPVAIAEFIGSKAKDAARIGLETGPTTTWLWHELRALGLPVICIDARHAKAALSLQINKSDRNDAFGVARIMQCGWYKEVRVKSVACHEVRALLNSRALLVKIKRDLENQIRGLLKNHGLVIGKAGGKVFHRRAEELVGRHGLLWEAVHPLLELREQARRQIARLTRRLLAMARDNEESRRLMTVPGIGPINALAFCAAVDDPSRFRRSRSVGAYFGLTPRRHASGEVDWTGRISKCGDAMVRSYLFEAAGVLLTRVPQWCRLKAWGLRLVKRIGFKKAKVAVARKLAVILHRMWRDGTDFIWSTEEAAA

SEQ ID NO: 459631 - protein, 338 aa, unidentified
MSIYAGLDVSDKTTHICVVDGDGGVLRRDVVASDPEVLAKWFHKHSRGITRVVLETGTLSTFLYHGLKERDVPIECICARHAKGALSARVNKSDVHDAEGLAQLARTGWFKRVHMKASATHIDRAALRIRAQLITTRVAMINQLRGLLKLFGLRLNQVTTPAKRAERLAALYRQRPDLEDVFAPLVACVDTVEQQLRASGRLLERRASSDTVCARLMSVPGVGPITALTYTASIEDPRRFARSQDVGAYVGLVPRRTQSGERDTKGHISRAGDGMLRSALYEAANSILCRVKRPSALQEWGRRMSETKGTRRARTAVARKLAVLLHSLWLNETEFRWA

SEQ ID NO: 459632 - protein, 316 aa, unidentified
MSQTNNTPIIYAGLDIAKATIALHIAGQPTTTTLANTKTGHSQLLKLLTKHPNIHVVCEASGGYERGVFERLSAATIPATILNPRQSYHFAKSLGGRAKTDPLDARLLSLYGQKIQPRATTPRTPQERALCELIRHRRSLQQALIAQNQSLQQIQFAPLRRQLKALLRQMETRLANIEVLIKNQQKADHQLQAKSQRLAQVSGVGELSALSLLAEMPELGALKSKQAAALAGLAPYARESGAWRGRRRIQAGRPAVRRILYMAALSASRHHRALSAFYQRLRAAGKPFKVAITALMRKLLILLNLALKSPNLSLVN

SEQ ID NO: 459633 - protein, 338 aa, unidentified
MSVELIAIDLAKNVYQLCGVNRAGKPVFNKQVSRTKFIQTIAQYPGVTVAMEACCNSNYIGRVLLRMGYKVNIIPPKHVKPFVKGNKNDRNDAFAIAEAARRPNMHFVQPRSIEQTDMSIAHKIRERRIAERTALVNQVRGLLMEYGVTVPLGIHKLRADLPFILEDAENELSIIARQQFQLLLEEWQALDILISEQDALIKRQAHTDEKATRLMQIKGIAELTSTAIVSHMGASHNYKNGRHYASCLGLVPKEYSSGGKQKVGGITKRGNKYVRRLLVQCAWSIIRRIESATDNLSLWVKKVIERRGKQIASVAIANKLARIVWAMSHYKQDFNYGN

SEQ ID NO: 459634 - protein, 351 aa, unidentified
MQRFIGIDVHGQSCTLVVMGPSGRRLGEHVVETSAKALIERIRSIPGDKYVCMEEGTQSEWLYEVLESHVKQIVVTQPLKRAGSKSDAIDAWALADMHRRDALERTVFKSPKTSTALRQAARGYIAVRRDMVRAKCRLNALYRSRGCNPTGEIYDPDTRNSWLAKLPPAYRTLGELLSEQLDGLCQSHQAAESWLLKEAERIPVARRLATAPGIGPIRAALLVAIVVTPTRFRTSRQFWSYSGLAIVTRSSSDWVRDGRGWTRKLTAQTRGLNRNRQPELKAIFKGAATTVIQQMPNHPLHKDFQRMTDAGIKPNLAKLTLARRIAAATLAMWKHQEDYDPSKQTRAPQSQ

SEQ ID NO: 459635 - protein, 395 aa, unidentified
MTPPSPTKVAPYRGRTEEVREFGTTVSQLLALGDWLSERGVSRVGMEATGVYWKPVHWVLEATVPEVWVINARHMRNVPGHKTDVADSVWGASLLEHGLVRASFIPPPPIRALRDLTRYRKSVIEDRTRETQRLHKVLEDAGVKLSSVASKVLSKSGREMIDALIAGERDPEILAGLAKGRMRSKIPRLKDALAGRFNEHHALLCQAMLARIDQADATIDALGVRIGELLDPFEAAVSLLVTIPGVSQRTAQVIIAEIGADMSRFPDAGHLASWAGMCPGNNESAGKHRSGRTRHGSKWLRKALIEAAHAASRTKDTYLAAQYAQIRYRRGPQRAAVAVGHSILVIVWHLLTNGEPYNDLGGDYFDKQRTSDARQRRLVAQLEAMGNTVTLTQAA

SEQ ID NO: 459636 - protein, 340 aa, unidentified
MTITTVGIDLAKNVFAVHCIDQNGKAVLVKPKVSRAALSELIAGLPPCVIGMEACSGAHYWARLFRQYGHDVRLMAPKFVSPYRMAGKTGKNDAADAIAICEAVQRPHMRFVPVKDESQQAMQCLHRTRQGFIQERTATYNRLRGLISEFGVIAPQSTDALRHVVSDQKETLPVQVRLCIDDLLAHVTNIEEKIAEYDRVLSRVAKTDHRSQQLMELKGVGPTTASALVASIGNAHDFKNGRQLAAWLGLTPSQYSSGGKSKLGRITKAGDAYLRTLLVQGARSVMVGAENRTDSFSRWVCSLIGRRGYWRAVVAIAAKNARLCWASLHYGDDFRLYSTT

SEQ ID NO: 459637 - protein, 367 aa, unidentified
MKKISTVTAEKVEKNASQKLTIGLDLGDRFSWYCVLNEAGEVVLEQKVATTPKAMKEVFGGMPRSRIALETGTHSPWVSRVLSELGHEVIVAHARNVRLIGESRKKDDRLDARMLARLVRIDPQLLAPVKHRSAQAQADLMAIRARAGLVRARTSLINTARGVTKSYGERLRGCNPRNMNPEKAQELSPELQAALGPLLGEIESLSERIGEYNERIEQIGKESYPEVARLKQVKGVGTLIALTYVLTLEDAHRFGKSRDVGCYVGLQPGRRNSGQSEPQLHISKEGDRYLRTLLVQGAHHILGPFGADSDLRRWGLKLAERGGKNGKKRAVIAVARKLAVLLHRLWVSGEAYEPLRNQRQVALPAAA

SEQ ID NO: 459638 - protein, 497 aa, unidentified
MPNKTTIYSRCNPQLLKLFERAGHPAKVLCVALDYAKVQHTALICNGLGDLLKSSFAVENTAPGAARLLKEVRACAQSRKVRCEHVFFGGEDYPSYAENFVRHLRQEQFLVVRVNAWEAKQQRDNFQASSDSLDLLGIARCCLHRRGEPVRDLPQAYPNLRIATRDRDKLVRMRTAVSNRIHSYVDRLFPGFLSAGKSGLEPFCRASLDLMADRFSPAQLSRRPRQALSQWLGRRGVTQAPDTADQLKQLAKQVLPPAPDQTVMLQQSLAQLVGLYRNLEQNIGRIDREVAYWLARTPGAWLTSIAGFGITLAAGWTAELGPPSQWHSVRQLCSYCGVVPKTKQTGGADKEPLVGTVAQRCNKRLKNVVLQAAEKVIQYGPEELRQTAQQLEARGAHTAFAVAKRLVRLGKYLATTGTVYRPKALMDPDTPKATLAAYYQNLWEKLLPKWKDKADLRDVFAPEHPLGQWRKMVQDLYALELRLPQQKTAHKSSALAP

SEQ ID NO: 459639 - protein, 340 aa, unidentified
MDILDLLGLDIGKSTFHLIGHDAKGKEVLRKKFNRNRLLEFAARLKPCTIAMESCGGSHWLARKLLSFGHQVKLIAPQHVKPYVTGNKNDYIDAEAICEAASRPKTRYVAIKTVEQQVLSTQHRLREALVGHRTQTINRIHGFLLEFGIELPATKAAMNQVHQILDDPAAELPQQLKSFIEHLLEELKRLNDEIKAIDRSIKEQVDTDDAGTRLMSIPGIGPIIASALLADVGDASNFHSSRDFAASLGLVPRQYSTGDQTVLLNISKRGDKYLRKLMIQGSRAVLVHINKRTDALGTWCRDLLRRKHPNKVACALANKLARIVWAVLARGVSYNAQSMA

SEQ ID NO: 459640 - protein, 445 aa, unidentified
MNLNAAGIDVGSEAHWVAVPRDRDEQPVRRFGAFTADLYALAEWLRQCQIETVVMESTGVYGIALFEVLEARGFDVKLVDAHHARQVPGRKTDVQDCQWLQELHTYGLLRGAFRPEDQVCVLRSSLRQRSMLVAMASRAVQHMQKALEQMHCKLTEVVSDINGKTGMEIIRAILAGARDPQRLARHRDQRCQHDHATIAKALEGHWRAEHLFALQQALDQYEFIQQQVRSCDQQLEVCLQAFVAQAEVGAPRPAPARKRRARQRHAPNFDVHVYLDAMTGVDLTQIDGIDSLTALKIISEIGLDMTRWPTGKHFAAWLGLCPGNKLSGGKRYRMRSKPTANRAAAALRLAAQGLVHSHSALGAYYRRMRARLGAPKAITATAHTLARLVYSMMRYGAAYVDAGQQAYERQYRDRMLTNLQRKARAFGYQLVHVEGLESGEATATS

SEQ ID NO: 459641 - protein, 375 aa, unidentified
MEEVITYVGIDAHKRELYVAMLIGAATNPVTWTLENEPKAIERLHRKLEREAAGPVRVCYEAGPCGYALQRQLTKGPVTCTVIAPALMPRKPGDRIKTDKRDARKLAELFRAGLLTEVRPPTPAEEAVRDLARARDDAREDLQRAHHRLGKLLLRRGLHYAGRNWTKAHRAWIEAIVWTHAAERHVVEDYQLAIDHLEARLIELDARLSEIAQTDPYREPVGWLRCFRGIDTLTAMVLLAELHDFRRFPNPRALMGYLGLVPGEDSSGDRHRRGRITKTGNSFARRVLVETSWHYQHRPGVGPGLAERRKGQPARIIAIADKAQQRLCRRFRRLKAKDKPAGKVVVAVARELAGFIWAALQVPADINRTDSQGHV

SEQ ID NO: 459642 - protein, 323 aa, unidentified
MTALDATGRSLKSGAVANQPGELQKWLRGFSEPVTVAVEACSFWPAFKEAIEGEVHSIRLVHPQRVKAIASAKLKNDRVDSQTLAHLSRCDLLPEAWMADRHTQARRQQVRLRISLGQHRAALKNQVHAVLHQHNLKNEASDLFGKKGRQWLSQAVLPPAARTTVDTYCAMIDHLGQHIREQEKQLQALASTDPRAQWLATIPGIGVYSAMILLSEIGEIQRFSSPKSLYSYAGLVPRVRESAGHKSYGGISRCGSPRLRWVMVEAAHIAVRCCPAAKHYFERLRQRKHAHVARVALARKLLGAVFAMLRDGECFDPSTFAAV

SEQ ID NO: 459643 - protein, 400 aa, unidentified
MNAVGIDVSKGKSTVAIMRPFGEVVAEPFEVPHTDAELRKLACFLEKLPGETRIVMEYTGNYWQPIAKVLHDAGLFVSAVNALLIYKYGNNSIRKGKTDKLDAVKIANYCLDRWMDLERYTPADQIRQTLKTCRRQYDQYIRLKVNLKNNLITLLDGTFPGLNTLFKSASRDTDGHEKWVDFAGKFWHCECVCGKSEYVFTNQYRKWCTKAGYRFSTEKAASIYTYAASQVDTLPMTDAIKCLVTLAVTQLNTIIETIYVIQQEMLTLASQLPEYPIVMRMFGVGPVLGPQLIAEIGDVRRFERKQSLVAFAGVDAPPCQSGVFESKNRHISKRGSPRLRKTLFQVVSTIIQHAPADDPVFQFLDRKRKEGKHYYVYMTAAANKFLRIYYGTVTAYLGKL

SEQ ID NO: 459644 - protein, 355 aa, unidentified
MKQYIGCDTHARYSVFVSVDEKGQVGAPVRVEHGGRDLRDYLSKLEPATPVAVEAGGSWYWFMDELEAAGLDARLVNPLEAKHRMGGKNKTDKLDAQGLAILLRSGTLPEVWVPPADLRDLRGLMRTRLATREQTTVLKNRIRAALRRYGVMKDEQPVDLFTKKNRLTLSVAIGRLPEETRRATLHEWEILDLIDKHIGELEVRIREKIGRLGWVRLLKSIPGVGEILGATIHLEIGDVRRFPTAAHLASYAGLVPRVHSSGGKTWHGPTGPQANHYLRWAYVEAANAILLNRQKYAGQHVIELYDRLKKQKCHGKAAVAVARHLAEASWWILTKREPYRPPRAHAAAMSSSRNG

SEQ ID NO: 459645 - protein, 348 aa, unidentified
MQIAVLGIDLGKNSCSVAGLDATGRIVLRRRMNREGVIKLASRLPGCVMAMEACCGAHHLGRALQSIGHQVRLMSPEYVQPYVKAQKNDERDAEAIAEAATRPTMRFVELKNETQLDMQSLHRARSRLVGDRTALINQLRAVLLERGITIAQGRRRLEQYLALALNGVGSPPLQLSTRMRVLIDDMRAEWHELDRRIAVFDAEFVAAARNDQTARRLASIPGIGIMNATALLAAVGDARTFARARDLSAWLGLVPRQATTGGRPRLLGITKRGNKYLRTLLIHGARAALPSLATTGGSLGNWLRGLSARAHRNTVIVALASKLARIAWAVLRSAATYNATIGDHPAAA

SEQ ID NO: 459646 - protein, 476 aa, unidentified
MTRSLDGGSERRTRKETKRLARQMRSEQPGLQIVHPDAAGIDIGSRIHYVAVSPDRDSEPVRSFGCFTSDLVQMADFLRQCGITNVVLQSTGVYWIPVYDVLEGAGFEVWLVNARDTKNLPGRKSDVQECQWLLKLHTYGLLRRSFRPEPEIRAVRTCWRERAEYVRQAGSCIQRMQKALTEMNVQLTTVLSDLSGTTGMNILRAIAAGERDGHKLAALRDHRVRADEETIARSLEGTWQPEQIAILKRQLADWDHVQQQIAACDRDLETLLKSLSARAVPTASPAADARKTKRGKHGGRFSRNEPRFALQPELNRITGVDLTRIDGIGAMTIQTVIAEAGLDMTRWPTEHHFVSWIGLSPRNDQSGDRVKNRRTRRVVSPLATALRLAANTLRLSDTYLGAQFRRFRSRLGPPKAITAMAAKLARLIYRMLRYGEDYVDRGAVFYEEKYKQQQLRWLQKKAAQHGYVLTHTAAVH

SEQ ID NO: 459647 - protein, 412 aa, unidentified
MEVVHVRCAGLDISKQDAKVCVRIAGAGRRKTTETVTTWSAMTNQVLALREHLVAEQVTCVVMEATSDYWKPFYYLLEDLPGVEVMLVNARHVKNLPGRKSDVADATWLAQLGAHALVRASFVPPEPIRVLRDLTRARTAIIRERGREVQRLEKLLEDAGIKLSAVASDITGVSGRLMLAALIEGQRDPSVLADLAKRRLRSKIPALTEALTGRFNEHHALLAQVHLDLIDQHTAAIQEITARIEVLIEPFQGFRDLITTIPGIATLTADVIIAETGADMTRFPTAGHLASWAGTTPGSNESAGRVKSTKTRPGNPYLQGALGAAAMSVAKSPNTYLGARYRRIASRRGPMKANVAIQHKMLTIIWHMATTGALYDDPGPDYFSRLHPERAKNRALHQLEAMGYAVTLDRAV

SEQ ID NO: 459648 - protein, 388 aa, unidentified
MIYLGIDIAKLNHFASAINSDGVVLFEPFEFLNDSDGFHSLLAKLSSFNKDETIIGLESTAHYGNNLVSFLVSKGFNVCVINPIQTASLRKHNIRKIKTDKVDTFIIAKAIALMDNPRFVTLYDISLMQLKNLGRFRQKLIKQRTRLKIQLTSYIDQVFPELQYFFKAGIHQKSCYALLKESPCASDIASMHLTHLKTLLMSNSHGHFKKETALELRVLAQKSVGTYDKSLSIQITHTIIQIELLNEQILDIEEELTDIVNSLDTVIMTIPGIGPINGGMILGEIGDVKRFSNSSKLLAFAGLDPSVYQSGNFSARKTKMSKRGSPTLRYALINAAHNVVRHNKTFQDYYNSKRSEGRSHYNALGHCAGKLVRVIYKMLSDNVEFNLD

SEQ ID NO: 459649 - protein, 334 aa, unidentified
MKQVNQVGVDVDSEALVSMMQRGGERLPLARFANTAAGHKKFIRWATKGARSARVCLEATGIYSLEFALALHHAKNVEVMVVNPRAIKDFVRACMQRAKTDAVDAGGILDYLERMPFSAWQPPAPEILELQAINRRIVQLNTELTREKNRRHAAEFGGASADTIAHDIEVNIRHLERRLERMHDSGLKLVRGVPALATKLAHLVSTKGIGEASAMRLLAELLVLPDDLAAPQWVAHAGLDPRPYESGTSIHRPRRISKVGNRHLRAALYMPALVAIQHEPNVKAFYDKLIAAGKKPMQAVVAVMRKLLHAIWGMLKHDQNFDGEKFFKIAKENT

SEQ ID NO: 459650 - protein, 370 aa, unidentified
MKEPTTSYIGLDIHKESIAMAIADADRAAPRFVGTINPVPAELCKAMRRVCIKESTLVVYEAGPCGYGWVRYLRKQGWACDVIAPSRITRKPAEKRIKTDRRDALLLARESRSGNLTSIVVPDERDEAIRDLVRAREDARAARHRVRLQIQAMMLRHGRHYQGKKSWSQAHDRHLSTIRFEHPAQEITFNEYRQAAKEACERVERITQELRVQCKDWRMNPVVKALMCLKGFDFVAAVIFVAEMGDLTRFAHPRALMAYLGLVPSEFSSGNTRRQGEITKSGNKHARRILVEAAWNNRFKAQVARTLEVRQEGQPTIIRDISWKAQLRLSKRWRSLSMGRKLAQNKICVAIARELAGFIWDVARHVKVNP

SEQ ID NO: 459651 - protein, 568 aa, unidentified
MSRSKSKSRINSSGGCVTAEVSALEYLFSANGAVSCKPDTVSTVIQPLARGAAKSSPQKRPAVNNCAATKMKKSEKLSRLRHDRAGRIAPAGSRSCKPHLAKVSPSAPVPLAASVPKSERTIAREAPCIRLTFDRATMHNKKGEPMKEWKEITHYAGFDWARDHHVVVVVDRQGQIVADFQFDHSVEGWKSFRQKTTALESVAVAIETSQGAVVDQLLQYEYTLYPVNPAAAASYRQRKAPSGTKTDHLDAWSLADALRVDGHGWKALAPMDELSAQLRLLCRDEVALIEQRTALVNQLQQALLEYYPAALEAFEDWTMPSTWDFILQFSTPEALVKAGKRRWEKFLHTHRLWRAQTLEKRLALFAQADQFKAGAAITRAKSQLALSLCKLLRTLQEQLDQYRKQIEALFENHPDHHLFGSLPGAREKLAPRLLAAIGSDPKRYGSFQVLQSFAGTAPISFQSGQLRRAKVRWACDKFLRHTVHLWADCFRKASAWGQAYYRKKRQDGKSHACALRCLGQRLLKILFRMLTERKPYDAELHARNQQKHGSWVLALMPNPTPHISEQLP

SEQ ID NO: 459652 - protein, 276 aa, unidentified
MFIVGIDVAKRSHEATVITSEGQVVQKAFSIRNNCMGYNLMMEKLRKPTNVKSQIVFAMESTAHYWLALYTRLRKDGYKAIVLNPIQTSAMREMSIRKTKTDSKDSFLIAELKKYPTPKKLARDSFGVEDCEGIYSMLLLTMLDEIQSLTEKADELEKRISSLLKEFDSTITSVPGIGPILGACILSEIGDVTRFRSADKLTAYIGVDPSVNQSGEYISDHAHMSKRGSPYLRRAVWMASIVAVQRDPMFRAYYDKKAALYSFGEYPISALKHFVK

SEQ ID NO: 459653 - protein, 404 aa, unidentified
MDSPIRYGGVDWASRSHAVCIVDEHGEALERFTVEHTEAGLRMLGRRLAKAGVARVAIERPDGPVIEALLAASLEVVVIASRHIKALRTRYGTAGNKDDRGDAFILADVLRTDGHRLRCLQADSPETVTLRATVRARKDLVQTRLRLTQQLRAHLELVFPGAVGLFAELDSPIALRFLVRFPSAAKAGWLSPKRMAAWLRAEGYCGLTSADELCRRLAAAPRGVSGPEGEARAAVTLAFVRALLAVREQVGELESRIREQLELHPDGAIFRSLPRAGQVRAAALLAEIGDVRERFPTPESLACLAGAAPSTRQSGQHLAVTFRFACDKKLRDALIDFAEDSRFANPWAAEVYRRAIERKKTHPHAGRILARAWVYVLWRCWQDHVPYDPARHRALQRVVLAQAA

SEQ ID NO: 459654 - protein, 378 aa, unidentified
MTRIMRYVGMDVHAETIAIVVVEADGSERDLGVIANRPEAIRKCLKRLGPAEELHCCYEAGPTGYGLYWQLTQMGIECTVAAPTLIPTKAGDRVKTDRRDARKLARYLRSGDLTAVWVPDTAHEALRDLVRARQAAKIDEKRARHRLQKFLLRHGQRPPQGVKAWTARHRAWLAVLQLEPPTLQVVLQEYLHEVLHSEQRVQRLDTAIEQAVEGAPEAIRAVVEALQGLRGVRTVTAVGVMAEIGRFSRFAHPRQLMGYSGAVPSEFSTGGPGKHQRGAITKAGNAHLRRLLGEAAWCYRYRPAVRYPLKKRQEPLPPKVIDISWKAQLRLCHRYRRMVARGKLKQKVVIAVARELLAFMWAIGVEIEKRHEPPRAAA

SEQ ID NO: 459655 - protein, 329 aa, unidentified
MSALVCGLDVHKDSTYATILDSSGKIVSQMRMNNERVLSFLSRFNVGTVAMESSNQVASLYRKLEGRGYSVVVSHPKKTRYIAEAKIKSDRVDSKVIAELARLDALPLAYMPDKEISMLREQVRRRAFLVRERVKLRVKIKSILTYEGIRWPSDHGLFTVKGVEWLHGLRLEPVESYLRVLKPLDDEIRLVSKQLRGLAGKDEDVKLLMTIPGIGYYSALLVKSEIGDVNRFPFGDRLCSYAGLVPSTHASGASVRHGGITKEGSRWLRWVMVEAAQTHVHKYDTSITRLYSRIAERRGKRSAVVAAAHKLLLVCYSVLKNKRPYHDQA

SEQ ID NO: 459656 - protein, 315 aa, unidentified
MAAATVYIGMDVSKATLDVCVSDGETWQAANDDSAMETLCTRIATLHPTLIVLEATGGYELRAAAALAAAGLPVAVVNPRQVRSYARSVGQLAKTDRIDARILARFAATVQPEARPLPDAATREIEALITRRRQLVVMITAEENRLHAAPSITRNEIKTHIAWLRRQLAKIDENIDDSVRRSPIWRAKDDLLRSVPGIGGKTSSTLLALLPELGTLSGKQVAALVGVAPLNQDSGTLRGRRRVYGGRVRVRTSLYMAALVASRYNPVLKDFYGRLRAAGKPAKVALVACMHKLLIIVNAMVRSGRPWNAARARTA

SEQ ID NO: 459657 - protein, 351 aa, unidentified
MLIVGCDFHPSWQQVAVFDPSSGEIEAHRLVNGTGEAERFYQQLPVPSLIGVEACGNCEWFLQLVEGLGHEVWVGDATQIRASYVRKQKTDRRDAAHILRLLIEGRFPRVWRASREQRDLRQLLVHRHKLVEIRTRVKNGLQHLMLNQGVQKKRQLWTEAGQRLLQQFPLQGWAACRRKDLLGLLHTLDEQVRVLDQAVRQAAETNPPARLLMTQPGVGPVTALAFVLTIGDPARFRRGKQVASYLGLIPREHSSGGRQKLGRISKQGNRFLRSLLVEAAQSVVRWDEGFRKQYQHRCHRMPQGVAKVAAARKLAVRLFWMLRTQTPYPEIVRIESSPAVLLVDREVRPLE

SEQ ID NO: 459658 - protein, 334 aa, unidentified
MKNYKNYLGFDVSKNTLDYCLLIPERDTVKRGSVANEKKSLQTLFAAFSKEGLMMEDTLVVFEHTGIYSTILAVFLCGNGWNYAEVPAIEIKRSRGLSRGKSDTIDAQEIAKYAMRNEDKIQLSEVPEIIYQQLNLMNAEREKLIAAIKSFERTSEGEEFLGKEVYRSVKSANRKTVTFLKSQLKTLELAISKLVRSDEDLNAKQELLRSIPGVGEIGTLYLLLTTKGFLRFRNARKYACYCGIAPFGRTSGTSIRGKSRVSPFADKKMKSILHLLSLTAIKYDHELKLYYERKQTEGKPKMLALNNVKFKLVNRIFAVIGRGTPYVKTQQFAA

SEQ ID NO: 459659 - protein, 362 aa, unidentified
MRIIGCDLHARQQTLAMLDTTTGEVVEVTLKHEGDNVREFYSSLPRPVRVGIEATGSMQWFLNLMEELGIECQVGHPAQIRASAPRKQKNDRRDAELILKMLVEGRFPAIWLPSKELQDLRSLLRHRHQWVRMRTRIQNALQSMALANGLRRGTALWSHDGQSRIASLPLAPHTAYRRSELQAMYEKFEAEIEKLNQRVEEQACQRPGARLLMTHPGVGPITALATEVFLGDPARFADSKALASYVGMIPREYSSGGRQRLGGLSKQGNPLLRFLWGEAGAHAARKDPELQRFYRRKLVQKGLGKASVAVARKLGIRLWIMLRDQIEYNEFCRRGQKQQKSSDACVGMPETRYGAKSHRPID

SEQ ID NO: 459660 - protein, 403 aa, unidentified
MKHVIAFDISMGKSYMVIYNEQKQCVFESEIKHSKPEFEKLHEKIHELTDETGESPEIVFEATGIYSRQLERFMQNNQYTYCLLSPLEAKLQCDSLRIHKTDRSDAHRLALTHFTVTRRVSTGTDNLFYQLKSLSRLYSELDSELSMIRGRMHKVIQLTFPELEKMFTSKSDLFLNFVQLFPHPDCVLGLSKTIIKNRIRANTNKKISTITAEKKALQVLEIAKTSYPAVSQNDVLCDQLKLYARRYQELLHQKECCINKMVHIAGQRAEYNIILSLPGVGLNTAIRLMAEIGDITRFTSNKQLNAFAGIDIRRFQSGKTCFKDRINKRGNKHLRKLLFLIIQNMIKQRRYGQNHIVEYYDKLKTQPYNKCHKVASIVCVNKLLKLLFYLITHNIYYDYRLTT

SEQ ID NO: 459661 - protein, 371 aa, unidentified
MSAISKTTDRVVIAIDPHKASWTAAVVDASSQPVATIRVPVSRDGYRALRRFADRWPDPTWAIEGASGLGAPLTARLRTDGIDVVDVPAKLAARVRMLSTGHGRKNDDADAVSVGIAARSAPRLNSAAVDDTVTALRAIVEHRDDLVKTRTQTVNRLHVVLTNLIPAGAQRDLTAERAAELLRGIRPRDTAGKTLRGLATDLISEIRQLDRRIAKAAADIQTAVTASGTALTELCGIGALTAGKILGRVGTIDRFRSAAAFASYTGTAPIDVSSGDVVRHRLSRAGDRQLNLCLHVMALTQIRQDTPGRAYYLRKRTEGKSHKEAMRCLKRRLSDVVYQQLRHDANWMEAGPGGHSGAALSSSAASSNPAH

SEQ ID NO: 459662 - protein, 348 aa, unidentified
MIIIGVDFHPEFQQIASVETETGEFQEKRLAHREEAEAFYRALAGQKVCIGMEASGQARWFERLVAELQLELRIGDAAKIQTKRVRKQKTDRQDAQLILGLLLEDRFPQIWVPSWENRDLRQLLWHRHRMVQARTRIMNQLQAVALNEGLRCKKRLWRKHGRQQLESFRLAPWASRRRRDLLELLDRLNPTIAELSQAIEQEAEKFPEARCLMTHPGVGALTALAFVLIIGRADRFQCGKQIASYLGLVPLEDSSGSRRRLGHITKQGSSMLRFLLVEAAQVTARSIPEWRSKYFHLMMRRGRKIAKVAMARRLAIGLYWMWRKGWDYEQVKKFGSHAGQLGTGGGVQ

SEQ ID NO: 459663 - protein, 420 aa, unidentified
MPYRMAGVDVHKKMLAVVIADVAVEGEYQFVRRRVGTSPSELRGLAEWFVAQEVDDVVMESTAQYWRPVWETLERSWQPSRPASGRLHLAQAQSNQGARGRKRDFPDAERLVKRLVAHELTLSCVPDAEPRLWRTVMRRKQQLTSNRVQLQNRLESLLEEAHLKLSSFVSDLLGASARRILQAVADGDTSPERLAALASQRLRAPPEQLRDALGACTTLHPVYRRLLALTLEELRVLEDHLDQLDQELANLLRAHQAGVQRLAEVPGLGVDSAQQIIADVGATAATFPSGKHLASWVGACPGDEERAGVNYSHRSPKGNRQMRRLLNQAAHAAVKTKGSIFEVVYRRLVPRLGHAQAIGAVAHRLCRLIWKILHQGVSYEERGPAVTTQRAQRRAAKMIRELRGLGYRVELVPAPSGSPA

SEQ ID NO: 459664 - protein, 328 aa, unidentified
MRGTEVVSYLRIDNVASAIERQLQELMDLYLIEKCDLMVCAEYTGHYIYPLAIACQNKQVDLWLESGYNIKCEARKERGKSDKEDSRRIAEYGYKNRQDARYYSIPEHDMAVLESLLSERSDYVVERAKLEGQLNDQKGYTDTEVYKAKAKRQKKLIRQYDRLIEETEKELERLMRENKTMGHQAELLETIPGVGRQTAMRMIAATKGFTLFENGRQFCCYAGTAPFEYTSGTSIRSKHRVSQRADKSLKAMLHLCALAVARRCKQNHFSDYYQRKVNEGKNPMSVLNAIRSKLVLTMFAIIRTDQPYSPEIVHNYVEKFSIKPIAIS

SEQ ID NO: 459665 - protein, 340 aa, unidentified
MQITTIGLDIAKNVFQVHGIDAAEKVVVRKQLRRGQVMKFFGALPACLVGMEACATAHHWARELTKLGHEVRLMPAKDVKAYVKRNKNDAADAEAICEAVRRPTMRFVRAKSAGQQGRLMQHRTRDLLLRQQTQVINALRAHLAELGIVAAQGREGLKQLLTIIADEKDARLPMDARASLIVLAAQLQALHTMIGSIEKRLTVQHRENEASKRLESVPGIGIIGASAITATVTDPKSFQSGRDFAAWIGLVPRQDSTGGKQKLGSISKQGDRYLRRILVVGAHSVLRRAKQNPEKYPWLTKLLARRPFKVVAIALANKMARIAWALLASGGHYRPQLATA

SEQ ID NO: 459666 - protein, 344 aa, unidentified
MSIVRNVVGGVDTHADFHVAAAIDSNGGVLGIESFPADSAGYEGLLGWLAAFGAIGKIGVEGTGSWGVGLARFLADADIEVVEVDRPNRQTRRKVGKSDATDAVAAARAALSGAASVTPKARNGPVEQMRVLLVARRSARHQRIQTLNQLRHLVFTAPEPIRVRFKDRYKTGLVAEAANMRPRKGSDPVIYTTNLVIRNLARRVKAFNTEMKQIDRMLISLLEQTAPSLLALHGLGPDTAASLLVTAGDNPNRLHSESAWAHLCGVTPIPASSGKVTRWRLNRGGDRNANAALYRIVLTRMSSHQQTRTYVTRRRTEGLSTAEIMRCLKRYVARQTFKHLPAAA

SEQ ID NO: 459667 - protein, 350 aa, unidentified
MMVIVGIDAHKRTHTAVAIDEAGRKLGEKRTTSTTTEANLELLRWAEAFGKERRFAVEDCRHLSRRLEADMLAAGEELVRVPPKLMAHARDAARTYGKSDPIDALAVARAAWREPSLPRACLDGPSRDLRLLVDHREDPVRERTSQVNRLRWHLHELDPSWDPAPRSLVRFKHLDALGARLDGLGGTVAWVARDLVARIRELTVAANELERRIVEQVSRLAPALLGLAGVGGLTAAKIVAEVADVRRFHSKDAFARHNGTAPLPVWSGNLVRHRLSRTGNRQLNAAIHRIAVTQMRIHDGAKLSLGCRIAMGTTKPEAIRALKRQLSDVVYRTLMTDAVSTQVARFGEAA

SEQ ID NO: 459668 - protein, 315 aa, unidentified
MEQTFFTGIDVSKHRLDVALSQGDEILEFYSIPHTEDDISGLIEKFKKTSPKLIVVERSGGLERSLVAHLAEAGLPVVANNPRQIRDFARATGILAKTDKIDARTMARFAAVIKPPQRPIKDAERQQLADKVARRRQLVHILAQEKNRLSRAVGSVRADIEHHITYLQERLDKINKDIEQIIESTPVYQETVEILTTFPGVGRVTSAGLVADCPELGSLNRREIGALTGTAPFNRDSGTRSGPRCVWGGRKTVRVHLYMATISAIKWNYKIKAFYQRLIAAGKKPKVAITACMRKVITILNAMVKQQKPWQAGAV

SEQ ID NO: 459669 - protein, 429 aa, unidentified
MEEVDDAELVVERVAALDLGKAGLEACVRVPHTHRPGRRMQELRGYATTTAQLLELAAWLRQWRVQRVVMESTSTYWKGVYYLLEAEELDCWLVNAREVKNVPGRAKTDRADAVWLAKVAERGMCRPSLVQPAEIRRLRDLTRYRRALVQDRTREQQRVEKLLEDAQIKISAVLSNVHGVSGRAMMEALIAGERDPGTLARLAKGRARKKTDALEEALRGFFTDHHATILQMMLDNNDRISAQIAALDARIKEAIDPFSGQAARLTDIPGVDAVAAAELIAEIGVDMTRFPSAAHLVSWAKFCPQTHQSAGKSKAKGRGKGNPWLAGTLGRIAFANSRSDTFLGTRYRRLARRRGGQKAIVATGNSVLTVVYHLLSGPDASFIDLGPQYYESRINKHRRARDLASQLQALTGQHIVIRDGKALITDTAA

SEQ ID NO: 459670 - protein, 346 aa, unidentified
MEQIIRTGMDTSKYIFQLHGVDAAEQPVLRKRLGRKAMVDFFAKLPPTVIGIEACGASHHWARVLAPLGHEVKLIAPQHVKPYIKRNKNDGRDAEALCEAMSRPTMRFVPVKTAEQQAALMLAGIREQMVARRTQLSNTIRGYAAEFGITVAQGLNQIEPLLARLAQDESVPELARALFAMQGREYAQLQVELKAIEVKLRAWHRANADSRRLAKIPGVGPIGASALVMKTPDPRAFPSGRHFAAWLGLTPKDHSTAGKTRLGKITRAGDERLRSVLVAGATAVIQQAKHGRGHPSPWLLALLKRKPPKLAAVALANKIARIAWKLMATGESYDGTRLLGASASAA

SEQ ID NO: 459671 - protein, 324 aa, unidentified
MSKIKEFFGIDISKDVFDVVDASNKHHQFKNDPSGFKEFSKLLSEKSHCVMEATGSYYQGLATWLYSCSFNVSVVNPLSVKRFIQMRLKTSKTDKLDAQMIRMYGESEQPKLWNPPSKLIIEATELHKLIELLVRQRAGLKNRLHALESKGITRSLVLTSVRRQIRNLSNEIGDLELKLESAIKEYEPDLLTRLCSIPGVGKRTAIYLIVLTQGFEKFESSRQLISYFGLNPIIRESGSSVRGKSRISKTGDNQVRKLLFMCAFTACEHNKACREIYQRLTAKGKSKKLALIAVANKLLKQSLALAKSGLYYDENYRSVNVNLG

SEQ ID NO: 459672 - protein, 371 aa, unidentified
MRKIIAYAGNDVHQEFTKAAVYEENEQEPRIEKHIKTEKAEVQKFYKKLSNKYEIKACYEAGSCGYVFYRWLKEIGIECEVIAPSLIPKRSGDRIKTDKRDAKNLGRLYRSGELVAVHVPSEEDESERGLVRLRSQIKKEVHQSKQYILKFLQTRGLTFKDGRNWTERHWRYLRAIKFERTEEEFTYRRYIELLEYKQQELVGIEEEIIKLAKTRKYESGVNKLRSLRGVDVLTAITLLTEIIDFKRFRRPTELMAYLGFVPGQYSSGGKRRDGQITGTGNSRVRRILVEAAWHYRHPARLSKALKKRQEGQDLETLNYAWKAQQRLHKRFNRLSFKKGSNIAVVAVARELTGFIWSLMVNEKNYSGLTSA

SEQ ID NO: 459673 - protein, 356 aa, unidentified
MARTNVSSVQQFVKGFEAHPFFIGLDVHKRSYHLALRRIDGKTVTLVCPADPSGLVGAIQRLCIRVDGVAYEAGPTGFSLARALRAAGIQTLMAAPSRIPRAVSAGAKTDRLDCIRLADYAAKGLIRSIAVPTPEQEAKRSLQRRRQDIVDARRRCKQRIKSFLLFLGLPEPKPSIRWRRGTAEALRELPMDPHARLTLESLLRELTFYDQELREVQEQLRQMGRQQERLMSCLQSVPGVGDVVASTFMVELFDPERFERAEEVASYLGLAPMVRHSGEKTPSGRLRPAGQTRLRSLLIEAAWMWRQYDPYARTLFNRFLGRMGIAQKAIAAVAWKLAIILWRLYVEARPYRPAIL

SEQ ID NO: 459674 - protein, 345 aa, unidentified
MELHTIGIDLGKTVFHLVGLNLRGEVVVRKKFSRKQLLHFTANLQVKLIGMEACGGAHFLGRALREQGHEVRLMPAQYVKPYVKTNKSDYIDAEAIAEAVGRPKMRFVPIKSDDQLDLQSLHRVRERWVMRRTAVINQIRGLLLERGITLRKGRCYVDEALPGILEDASAKLSCALRVLLAQLKLELDHLQMRIDEADAVIKKTAGENEACRRLVAIPGIGPITATAIIAAIGNGAAFKKGREFAAWLGIVPGEYTTGGKQKLLGISKRGNSYLRRLFVHGARAVLQQSAKQSSGLSSWLAQLTTRTHRNVAAVALANKLARMAWAVLAKNEPYRPPMLADAATA

SEQ ID NO: 459675 - protein, 380 aa, unidentified
MIKSKLTKNLTIGVIDRKYLGTIDPVSELGSSHHSLNSPNSCEGHKARILQGRELENPYEEVQMSFVGIDVSKLQLDIAVRPDNKRWSVANAEADIIKVIEALNELSPKVIVVEATGGMEMPLVAALSQACLPVVVVNPRQVRDFAKAVGRMAKTDRIDADILAHFGEAVKPDVRLLKDEETQMLTALVTRRRQVIEMLTAEKNRLGISPKVIHKGIQKHIEWLQRRLEDIDRHLDSPIRKSPIWREKDDLLRSVPGVGQVLSVSLITGLPELGSLSRRKIAALVGVAPLNCDSGLFRGKRTVWGGRSYIRAVLYMATLSASRVNPTISLFYRRLIEAGKKPKVALTACMRKLLGILNAIVKNRSPWQADHPTCPTLKNA

SEQ ID NO: 459676 - protein, 392 aa, unidentified
MITALKQLYEQNHTGDLRARRGDRMMGWMAPLRHLGAKVLVDRKPPANREPSMNEITTVGLDLAKHVFQVHAVDAEGDTVLRKQLRRGQVLAFFSRLPRCLVGMEACATAHYWARELRALGHEVRLMPAQYVKAYVKRNKNDAADAEAICEAVGRPTMRFVPVKTAEQQAAVLLHRGRERLVRQRTMLVNALRAHLAEFGVIAPQGLRNVGRLIAIIRDDDDARLPGLARQVLQVLAVQIEQLEAAIAALEKRLMGWHKSNPVSQRLATIPGIGPIIATAIAAMVAEPSGFRSGREFAAWLGLVPRQNSTGGKNRLGGISKRGNQYLRRLLINGASANLLRSKATNADPWVIGLRRRRPSLVVAVALANKTARIAWAVMHRQENYQRMATAA

SEQ ID NO: 459677 - protein, 466 aa, unidentified
MTRPEKQSASKRGRKRNDRAKLKQQDWTLGLSVVHPKAAGIDIGNEEHYVAIPPSMDPEPVRRFGCFTQDLIALADWLQQRGIETVALQSTGVYWIGLYDILSERGIKVFVVNARETKNMPGRKSDVQECQWVLKLHIYGLLKNSFRPEEEICVMRTLWRQRQQQVADAARCVQHMQKALTQMNLQLANVISDLSGWTGQAIIQAILDGERNPRKLAELRDPRVKASAEVIAKSLEGNWRWELLFVLRQEFETYKSLQKRIEECDGELHRHMRSMEQKADPELLEACPRNKRPHGNVPENFDLREEVYRITGVDLTKVDGINGLTAQTLLAEVGSDVKAWETEERFVSWMNLAPNNRISGGKVIGRDKRKVVNRAGQALRQAASSLLRSQSYLGAQYRRLRARLGAPKGIKAMANRMARIVYRMLKFGQQYVDKGTEAYEQKYRQQQIKMLTKRATELGLQLVESA

SEQ ID NO: 459678 - protein, 438 aa, unidentified
MSNKVIFNLDELFISVGIDVGADFSWMSIALPNQQFVGKPYKILHNSIDSLTTAVSKIKEAEELYSLESRIFLESTGIYHYPLFCYLRDKGFNCSVINPIITKNSTNINIRKVHNDRFDSKKAALVGLKPDLKVSLMPSDLALNCRNLCREYYDLMDNRSAYVNKLQGELRMAFPQYLGIFSKVTINTSLTLLETYTSPSAFLEADKQEIIDIIKSTARFGLTYAQNKYNAIIQAATDANQFGYIIDSNIKRIRLYISFIRKYDEEINNILESLHELVDANEDADFVKQIHLIETFKGAGFLSAVSIMGEIGDFSAFSKPKQLFAYFGLDPAVKQSGKFEGTKVQMSKRGSAIARRVIHTLTLQSISISRNREAKNPVLREYYLKKCDSKPKLVAMGAVSHKVCNMIFAILRDNKPFKIIAPQEHIKQYNSAKCDIAA

SEQ ID NO: 459679 - protein, 385 aa, unidentified
MALTTATQTSPYPGSPCLYIGIELSAAKWGLALSAGGQRIREKSIRAGDREPLAREIRAARKRFGLPEDARVVSCYEAGRDGFWVDRLLGQLGIENVVVDAASMKVNRRARRAKTDKIDAKQLLADLIRHARGEKDVWKVVRVPTEEQEDKRRLHRGLERLKKEKTQHRVRILSLLATQGVQPGNLKALLVELDAARIWNGKPLPPALKAEIEQEWGRLRLVEEQIRAITKEQRDQLKQPSSPDLMMIKMLTRLRGIGVDSAWILVMEFFAWREFNNRGEVGGAAGLGGTPYSSGSIEREQGISKAGNPLVRTRMVELAWLWLRFQPHSDLSQWFMRRFADGGARLRRKGIVAVARKLLIALWHLAEHGAVPRGAVIDLTESSPA

SEQ ID NO: 459680 - protein, 314 aa, unidentified
MQVPTNFLGVDVSKAELVISTHGQDACLCVPNECTAITKWLRTLTSGSLLAMESTGRYHQLLADLAASMGMLVFVLNARDVYFYAKALGARGKTDRVDSRLIARYLAEHHARLHPYHTPSACQAQLQQLLSQRWTITTKRTALRESLKICDPCIAQATSQLDDAFASLLRCIDQRITALIKTNDPLQHARTLLQSIVGIGPQSSALLASLFVRLPFANPDALVAYSGLDPRANDSGRSKGRRRLSKRGSPALRHQMFMSACHTKTFAPTYQALRARGLKTTEALVILARKILRIAFAVWRSGQPFEAHRIISSA

SEQ ID NO: 459681 - protein, 347 aa, unidentified
MRFYTNQHKFYCGIDLHTRSMYVCILDSAGEVLVHRNLPATPAHFLSVLRPYRDDVVVAVECIFTWYWLADVCAAERIPFVLGHALYMKAIHGGKAKNDKIDAHKIAVLLRGGMIPMAYVYPAAMRATRDLLRRRTHPVRKRGELLAHIQNTNSQYNLPAFEKKIAYKGNREGLAERFVDPSVRLSVATDLTLIGHYDQLVRELELHILRHAKAHDVQAYMRLRTVPGIGEILALIILYEAHDIGRFPTVGDFVSYCRLVKCARESAGKRYGFSGKKIGNAHLKWAFSEAAVLFLRQHAEGQHFFRRLERKYGKPKALTVLAHKIARAVYFMLARQEAFDMHRFAQT

SEQ ID NO: 459682 - protein, 334 aa, unidentified
MENIALIGIDLGKNSFHIHCQDRRGKAVYRKKFTRPKLIEFLATCPATTIAMEACGGSHFMARKLEELGYSPKLISPQFVRPFVKSNKNDFVDAEAICEAASRPSMRFVQPRTESQQAMRALHRVRESLVQDKVKTTNQMHAFLLEFGISVPRGAAVISRLSTILEDNSLPLYLSQLLLKLQQHYHYLVEQIKDLESQLKRKLDEDEVGQRLLSIPCVGTLTASTISTEIGDGKQYASSRDFAAATGLVPRQYSTGGRTTLLGISKRGNKKIRTLLVQCARVFIQKLEHQSGKLADWVRDLLCRKSNFVVTCALANKLARIAWALTARQQTYVA

SEQ ID NO: 459683 - protein, 356 aa, unidentified
MSHDVKYIGMDVHKEAIVIAVLNGSGKLIMETIVETKASSILQFLHGLRGELHVTLEEGTWAAWLYDLLQPQVQEVVVCNPRRNALLKEGSKSDKVDARKLAELLRTGMLRPVYHGENGLRTLRELGRSYQTIGKDLTRVMNRLKALYRGWGIACAGTQVYAPRYREEWLRKIAQAGVRRRAELLYQQLDGLQALRRNLRPEFLAESRKHKAAKLLRQISCIGPIRAARLIALMQTPHRFRSKRQLWTYSGLGIETHDSAQYRYVGGQVQRSKKPQQIRGLNQNHNHEMKEIFKSTATRASCGTGPFHDFYAALLAKGMKPEMARLTLARKIAAITLTLWKKEERFDAEQLKTQAA

SEQ ID NO: 459684 - protein, 416 aa, unidentified
MEYPPDALAAVPPGGVTCGIDWANDDHAVCVVNMAGQVVQRFTVEHTGEGLAELVRRLRKAGVGEVAIERPDGKVVEAVLAAGLTIVVISPNQLKNLRGRYGSAGNKDDRFDAFVLADTLRTDRARLRPLLPDTPATVTLRQACRARKDLVGHRVAVCNQLRAHLKAAFPGAVGLFYELDSPISLAFLARFDCQDRADWLSPRRLAAWLASQGYCGRKDPAILHARLTAAPRGATGGDGAAKAHITRALTAVLTSLAEQIKALEAQIAEQLARHADAHIFTSLPKAGTVRAARLLAEIGDCRSRFPDPESLAGLAGVAPVTRQSGKHSSTGFRWAVNRQLRDAVCDFAGGSRHASPWAASLYHDAIARGKDHPHAVRILARAWLYVIWHCWQHHTAYDPARHKALQRILAEEKPAA

SEQ ID NO: 459685 - protein, 400 aa, unidentified
MRVVFGIDVSKVSSEVAILVNGEKVHGYTMPNDAIGFARLLGDLKTVHKPEIIFEATGVYSRRLQAFLEDNGYAYTRLNPLEAKKQLDSLRVRKTDQIDAEKLAQSQFVLNRKPTYVQEEVYQNLRDLSRFYQNLTEDIVRAKNRLHKVLQVTFPELENILATPTGEQYWKLVMTFPCKELVLDRDGNELLDSIRQSTSKRISDKRVVYLAEKLTALANQSYCAVKKTSPMFEEIRYYAQELLRLSERRKAVLDQMVTLAKPLPEYEILLSIPGIAETTATSIIGELGDIRRFHSANQINAFIGIDLRHYESGNFLAQEHITKRGNPYARKILFKCIHNIASASHTNPCHIADFYEKRKRQSQTTSTKPHTIASIHRLIRTMYYLITHNKLYDYTSTQNQ

SEQ ID NO: 459686 - protein, 337 aa, unidentified
MAEVHVLAIDLAKRSFQVCGTARGGAVLFNRTVSRSKLEQLLRGQPPCIVAMEACATSHYWGRMAQGFGHEVRLIPPIYVKPFVKRQKNDAADAAAIAEAALRPNMHCVAVKSAEHQARAVAFRTHQCFVRQRTQLINSLRGHLAEFGIVVAKGPANLKSLVEMMDDATIDLPETVRDIVRLYLEQIELITKKVDELTLRLRNAVRETAEMRRLCTVPGVGPVTAGAVLAFAPDLRAFSSGRNFAAWLGLVPRQHSTGGKTRLGSVSKMGQHDIRKLLIIGAMSRIRWIVRKGALPENWLGRLLGRKPRMVAAVALANKMARIIWAMMTREQNYRMV

SEQ ID NO: 459687 - protein, 519 aa, unidentified
MVDRYPVRKPGSEFCAQVNGNGRQFYSWLIPIRRVLFASQLGRCLQRKGKSVSPTKQTEAKNNVPRRKKRGWCQQDRPVIEPNAAGIDVGAREMYVAIPPDRDPDPVRVFKTFTADLEALIDWLVESGITTVAMEATGVYWIPLYQMLEDRGVRACLVNARHMKNVPGRRTDWHECQWIQYLHATGLLRPAFRPDQDVCAVRTLLRHRNELVRMAAQHVQHMQKALTQMNVHIHHVISDITGLSGLAIVDAILAGERDVAKLAALRHRSIHADEETIRKSLAGDWRPEHLFTLNQSRQMYANCGINIEACDQKIAEVLGAFEPQVDLTAQPLPPEPGPSRKRRTKRTGDFRFEVRTEAYRLFGVDVTRIPGLNELAIPLFSEVGRDLAPRFPTADHFASWLALCPDNDKSGGKVLWTGVRKINNRAAQMFRMGASSLHHSHSPLGDFLRRMKAKLGPTAGITATAHKIAIIFYTLVTKQVEYDDSIWAKRDEQRQKRFEAKLKRQARRLGYQLVPIEPV

SEQ ID NO: 459688 - protein, 342 aa, unidentified
MFYAALDVSLRSVAICIIDEAGKVRLERSVSSELSDLIRCLQEFGSPIHQVGLEAGNLSHHLAAGLAEAGYDVICMEARQVSAALSAMRNKTDRHDARGIAQILRSGWYSRVHVKSQESLYTRALLTSRKVMQRKCIDLENEIRGVLKVFGVKLPMRLSRGAFDRAVRDIIINDAGLSHALLPMLEARQTLFDTFLQLDRRVRQAAHEDAVCRRFMGVPGVGEITAVSFKAAVDDPSRFKSSRTVGAHFGLTPRRFQSGEKDNPGRISHAGDADVRAALYAAANAMLMRSIAWSKLKAWGMRLMKAKGRRRAIVAVARKLAVLLHRMWLDGSDFRHGSEAAA

SEQ ID NO: 459689 - protein, 418 aa, unidentified
MQTDAHGSLWGFVDWATESHSVCVVDGQGNAVAEFAVENTPAGLAKLATKLTELGQGYRGGMSIAIEVPHGPVVDALLESGFALFTLNPKQIDRFRDRYTMAGAKDDRRDAFVGSNALRTDPQAFRRIDPDHPAVIELREWSRIDRELGQELVAQANRLREQVLRVAPHWLALCTAADEPWFWALLELAPTPRDAAALRVKRVQAVLRSHRIRRVSAPQVHGTWQSACLGTPLGVVTAVGAHVRVLLAQLRLLHTQRRQSAAELERCLEGCRSVFVSPPGRPSDVEIVLSQPGIGLRVAACLLGEAGRCLRERNLRAFRAQTGTSPVTKQSGKTRQVVMRHACHLRLRDACYHWARGAVINDPRSKEHYAALKRKGHGHARALRGVADRMAGRLFVMLDRGTLYDPHHRRLPAGHKQA

SEQ ID NO: 459690 - protein, 326 aa, unidentified
MQNILGIDISKETFDVFLITEKRSHYKVFCNDPKGFRSLEKWLVVHQASQVHACMEATGHYGEGLTEFLFEQDHLVSVVNPARIKHYGDSKLHRNHNDKASADLIAEFCLKEKPSLWRPLSPEIKHLRALVRRFSDLKAARQQELNRLESGEKDKWVLSDLEAHVEYLDQRIRATKKEMKVFVAHTPKLKSQMTLLTSIPGIAVQTGCVLLAEIGDFSTFENAPQVAAYAGLNPKNHRSGTSVFKKARISKQGRSELRCSLYWPAIVALRCNPVIQDLAERMEKTKHHKMEIIVAAMRKLLHLAYGVLKTQKPFDPNYGAQFNFAS

SEQ ID NO: 459691 - protein, 390 aa, unidentified
MHVVAHQPEAPGAIRSDLGAIFVSLELSRSTWLITSLSPCAGEKMSKHGVAAGDIGALLARFSEFKQKAFARTGKSFPIIVIQEAGLDGFWIHRVLQSERIESHVVDPASIATSRRRRRAKTDRIDGEALLRALLAYKRGEPRVCAMVKAPTPEEEDRRRLSRERKTLIGERVEHVNRIKGLLFCQGVSDYEPLRRDRRQRLDELKTGDGRALPDHLKAQISRELDRLELLLEQIKAVEAGQNTLFAAAKAEAPTPAPVTMLLDIKGIGPEFAAILWMEAFFRSFANRKQIAAYAGLAPTPWQSGAVNCEQGVSKSGNPRLRTTLIQLAWLWLRHQPQSALALWFKERVTRNGGRFKKTTIVALARKLLVALWKYVTAGIVIEGAVMKAA

SEQ ID NO: 459692 - protein, 358 aa, unidentified
MASIASTSRVVIGGIDTHKDLHVAAVIDTAGVLLGTEAFSTTRAGYRALVRWLRGFGDVRLVGIEGTGSYGAGITRHLGEAGIQVLEVDRPDRSDRRRRGKNDTLDAENAARAALAGRRTSTPKTKDGTVEALRVLRLTRTTAVKSRRVALQLLGNHIVAAPEELRDQVRNLTRMQLIRTCAAWRPDTSGFRDPVVATRIALKSLARRTLELNDEIADLDQLITTLVGELAPQLVAATGIGVETAGQLLVTAGDNPQRLRSEPAFAMLCAAAPLPASSGKTQRHRLNRGGDRQANSALHLIVVTRMRVDPRTKDYVTRRIAEGHSKLEIIRCLKRYVAREIYYLLKPPHNENVKSRPA

SEQ ID NO: 459693 - protein, 392 aa, unidentified
MFAVGGDVSNGRSMVAVLGARRSVVVQPHEVPHTADGFAELAARLHALDGEVRIVMEHTGRYYESFAMSMYRAGFFVSAVNPLAIKGYQEGISVRKVKTDKADALKIAQFAIDKWEILPHYTPMDTIRYDLKTLHRQFQLSSKTKTALNNNLIALLEQSYPGANRYFDSPVRPDGSQKWVDFVDTFWHVDCVARVSRKAFVERYQKWCKRHGYNFSEAKAVEIHEDARQRFPLVPKSDTCKLMVREAVAQLNAVSRTVETYRAEMDRLASQLPEYETVMAMTGVGKSMGPQLIAEIGDLRRFAHQKSLVGFAGTDPIKDDSGDKVSDSKPSSKRGSPYLRRTLFVIMTILLQLQPPDDPVYQFLDKKRSEGKPYYVYTVSYTHLTLPTNSRV

SEQ ID NO: 459694 - protein, 416 aa, unidentified
MQDNEQLIERVAALDIGKAMLVCCSRVPGEDGRRLQQVSEHSTMTRSLGLLAEQLLERGVTRVVMEATSDYWKPPFYVLEAHGLDVWLVNAKDVKHLPGRPKTDRLDAVWLCKVAERQMIRASFVPPPPIRRLRDLTRYRVSLVSERTREKNRVEKLLEDAQIKLSAVVSDLFGVSGRAMLAALIAGERDPRVLADLARGSMRGKISVLTEALIGQVTAHHVFLLQRMLRHIDALSADIAEIEDRIEAEIAPFADAVTRLDEIPGVGVTAAQIIIAEIGLDMSRFPTAGHLASWAKFAPGVKESAGKNKGNGSTGHGDPYLARVLGEAAVGASRTDTFLGERYRRIARRRGKKKAIVAVGRSILIIVWHLLSDEQAHFTDLGADFYDKRRGTEALKRSHVRQLEALGYTVTLAPAA

SEQ ID NO: 459695 - protein, 337 aa, unidentified
MNIVFLGIELAKNVFQLCGLSQASKPVYTKRTGRKELLQTLANIPACLIGIEAPTGAFYWQREFEKLGHKVKVISPQYVNPFVRGQKNDGNDAQAIAVALMQPTMQFVPPKSPEQQNIQALHRARQRIVNHRTATVCQIRGLLLDRGIPIGSAVSRARRAIPLILEDAENGLSSRMRRTIAELYDLFNDLGRRIHFFDKEIETVFRQSEACQRIAKIKGIGPKTATAVVAIGKGTEFKNGRHFAAWLGLVPRQHSSGDRQVLMNMTKKGDKHLRTLFIHGARAVVRVATNNSDGHINQWVNQLKERRGFNKTTVAVANKNARIIWSMLTNETGYQVV

SEQ ID NO: 459696 - protein, 425 aa, unidentified
MTQVYANTGEKVLVAIDIAKKRNTVLIQFPDESRKKFMVANKLSDFQEFTAYLKSLGYPCVIGFEATGNYHRPLAYYLQQEDFYLKLISSMAAARTREAMYNSWDKNDPKDAQVILHMLKTGLTQTYHDPLLHRINDIQELSKTYYQVSLRKTRVQHSIMTHFLPLYFPEVQKYYYTSRAQWFSSLLLRFPSPSSVLKYSLEEFIEAARDVAGRKVNKSAWLTDFYETASSSIGLPVTEDSEAMTMFRLVLQEHQHLCRLRRSIEERAELYLKDNSDYNRLQTIPGIGPVIALTILAEAGDLRRFSHYKKFLKYCGLNLSTHQSGCFRGMSKLSKHGNARLRYVFWLAGTSAIRMRENTFRKKYENYIKADPSNPDLKRKAYTAIAAKMARVAYSLVKSEKDYRCFYESSVPSGKIPSVGPLRHL

SEQ ID NO: 459697 - protein, 370 aa, unidentified
MAQSSTLFIGMDVHKDTIAVAYVAHDHGAEVPSLGTIGTRRCDLDQLVRKMQSQATHLIFIYEAGPCGYWLYRYLMKKGSDCWVVAPSLIPQKPGDRVKTDRRDAVQLARLARSGALTAVYVPTVEDEAIRDLTRAREDTISDRKDAKLRLKAFLLRHDIRSTGRAKGGPAHLRWLSEVVCPTPTQQIVFQEYVRAVPEHTERLQRLEQALQEHVKTWRLSPVVEALQALRGVQCTVAVTLVAEMGALTRFDSPRELMKCLGLLPSEHSSGAQRRQGSITKAGNTHARRVLVEGAWAYRYPAKVRRHVQLRLEKQPKVIQDISGKAQVRLCQRSRRLTSRGKHANVVTVAIARELTGFLWAIAKEVPSVV

SEQ ID NO: 459698 - protein, 341 aa, unidentified
MNNTTTITIDLAKDVFQVAVFNKYGKSLINKAMSPKKIMEFIINYPEAVIYMEACGSAHYWGRQFRQHGHKVKLIPPHIVARYRNGNKNDKNDAFAIYEAAKNPSIYFVAIRTLEQQDLATQHKLRAGYIKQRTQLGNRVRGFAMEYGVKFPKGIQHLRKQVPLALEDAENELTAVARACLRQLLDQLILLDEVIKETTETLVNQAKKIDACVRLEKIPGVGWLVASMLYARLGDGSAFRRGRDASASLGLVPAHSGSGGINRLGKITKRGDRYLRSLVVHGARSTLHRVGNKEDGLSHWIRHQQQTKHTNNTAVALANKIVRMAWSILRTGDAYRAPVAQ

SEQ ID NO: 459699 - protein, 377 aa, unidentified
MKRIKFVGLDVHAETISVAVAEQGGEIRSLGVIPNREESIRKLVKKLGPVEELRFCYEAGPTGYALYWQLTRMGAQCEVVAPTLVPVKAGDRVKTDRRDALKLARNYRAGELTAVWVPDAAHEALRDLVRAREAAKKDELRARHRLSKFLLRHGRRPPMGVKAWTMKYLEWVKRDVHFEQLAQEATLLDYLHEVEHGAARIARLDGAITEAVKSAPPQMRSVIEALQALRGIAHVSAVTVVAELGELSRFARAKQLMAYGGIVPSEDSSGERTRRGDITKTGNAHLRRVVVEAAWAYRHRPSVGATLRKRQEHVSEEVQEISWKAQQRLHERYRKLLAKGKNKGVVVTAVGRELLGFIWAIGIQVETAQKESLQRAA

SEQ ID NO: 459700 - protein, 343 aa, unidentified
MQAVTTIGLDIAKSVFQVHGIDAEGKVLIRRQLKRRYVLAFFQKLSPCLVGIEACATSHHWSRELKALGHNVRLMPPAYVKPYVKRQKNDATDAEAICEAVTRANMRFVETKTPEQQSCLMLHRTRQLFIRQQTSVINAIRAHLAEFGIVAPVGRKGVEHLLAIGTDGSDQRVPEVTQACLAALGAQLRMLKAQILEFDRRILAWHRSNETSRRLDAIPGIGPALATALVASVADAKAFRSGRNFSAWIGLVPKQHSSGGKDKLGSISKQGDRYLRSLFTAGALAVIRYAKIHGSQHRPWLTALLARRPTKVAAIALANKIARMAWAMMAKGERYKEPAALAA

SEQ ID NO: 459701 - protein, 319 aa, unidentified
MKQHILGIDVAKRKLDVALIFNGKTLTKQFDNSKQGFKLLNAWLESLHLWQVHACLEATGTYSDEIALFLHQSGHFVSVVNPFRIKGYGKSKMQRNKTDKADARLIADFCLTQNPDRWFPLSPQVAELQAFNRRIEALEEMLQMERNRLDVAPRKTKPSITRMINIFEKEIENLQKSIKEHIDQNPDLKEQSKLLQTIPGIAEKTSNLLLGELEFGRYKSAREVAASAGVTPKRAESGTSLKQTKLSKMGNGRIRKGLYFPAIVAAQHNKIIKEFAKRLEQNGKTAMQIICASIRKLLHIAFGVLKNKRPFDSNLAFSS

SEQ ID NO: 459702 - protein, 391 aa, unidentified
MPMYFVGIDISKYKHDCCIISAADQQIISKFTITNGKDGFEQLLTALNSLSNPEDIKIGFESTAHYALNLELFLENAHHSFMEVNPVLIKEYKKSTTLRRTKTDSVDCESIARWLITVEYKPHSKGFYHAYSLKSLTRLRDRLIRQRSFYLVKITNVLDHTFPEFKPFFNERLSKTALYLLENYGSAEKMARMNSASYDKLRCISRGKFSIQQFLRLKELAANTVGVNNSIFDLELNTLLTLYKSLSDEINTLETEIIKLIEEVHPHYMSIPGIGPISAAVIYAEYGDISNFSNPGQMLAFAGIEPGINDSGTESHGRRMVKHGSSQLRYVLLNACLPLIRFDLTFATYYEKKRAEGKKHRVAITHVAKKLIRVIYALERQDVDFNAQKLR

SEQ ID NO: 459703 - protein, 322 aa, unidentified
MSQPNQICVGIDVAKGSLDICVGTGKASFTVINGTDGFEQIIKALKSVSVSLILMEATGGLEAPVAYRLQAEGYEIAVVNPRQARDFCRAMGYLAKTDSIDARALAQMADVINNHPERERFILALPDNQRQVLTALVARRRQLVGMLVAERNRLHTTHPAVMKSVECLICALNGELELIDIEIKEHVQKHFIDLSALLSSVKGVGPTTIASLLADVPELGNLTRREICALVGVAPVNRDSGKMRGRRSIFGGRASVRTALYMATLCAVRFNPALKTFYTRLVLVGKPKKVALVASMRKLLTIINAMIKKGEEWDNTFHNLAC

SEQ ID NO: 459704 - protein, 413 aa, unidentified
MDVLHGRCCGLDVHKSSISACILLREAGRVQKHQRRFGAMTQDLRELAEWLRQFGVTQVAMESSGVYWKPVWNILEREFTIVLTNAQHIKNVPGRKTDQKDAEWIAQLLQYGLLRPSYVPREIIRDLRDLTRMRASLSQEASRLSSRIQKVLEDANVKLASVATNVLGKSGRAMLEDVIVEKDDPEHLASLALGHLRVKIPQLKLALEGNIRSHHRFLLRRLLDQVQYVEHEIALLDQRLEDIGCQRPELAQAVARWDTIPGVDRVAAWALLAEIGDNMAQFPTAEQLASWAALCPGNHESAGKRLRGTTRQGGPWLRRMACQCAWAAARTKNTYLSSQFRRLAARRGKKRAIIAVAHTLIVIAYHLQKNQSNYDDLGGSYFDRIHSDGLKRYLVNRLQQLGLKVTLEPMEAA

SEQ ID NO: 459705 - protein, 331 aa, unidentified
MDNSLYFVGADIALKKFDAAIRLDGNRYKHKVFANTPEGFTAFHAWLQGFGSHFHILMEATNVYHEDLADYLLVQGLTVSVINPRCMPNFAKSTNMRSKTDKVDARLLADYAYCNSARLRKYAPLATNYRTLKRLMRQLTHLKKIIAKEQVRIQMMMDALCVEISQEIIAGTKALAKELEKKIKELVKEDKVLSRNAQLLQSIPAVGWMSAMYLLSHLGDGSRFRNSKAAATYMGLTPIVKQSGDSLHIVSGISKMGPRDIRDVLYAPAMSYAFGPWKERVYAPFVQRLTANGKAPKEVIVALMRKLVSIAQAVLQHQRPFDSAILVGKAA

SEQ ID NO: 459706 - protein, 335 aa, unidentified
MEFTYFIGIDVSKNELDFAVMRLNTLLFHREIANTEQAIGILIKELAKQPGFDWPNAVFCMEHTGIYNNHLLAFLHKKKANIWLESAIQIKRSSGKIRGKNDKVDAIRIADYAYTKRAKVRLWIPKREVVQQLANLTVTRTRLIEAKKMLGTPLQEQDSFTGKGITKQSTAVCSHTLKAIDADLERADNAIDGLIDKDPELKRLFGLVTSVTGIGKVTATQILVTTNEFKDISAPKQYACYAGVAPFVEESGIFKGRGRVSHMANKKVKTLLHMSAMVAIQHNRDLKQYYQRKVNEQKKNKMSVINAIRNKLILRIFACVNHNSPYENNYQKFLA

SEQ ID NO: 459707 - protein, 346 aa, unidentified
MKILALDLGKYKTVGCAYESESGAHQFKRGLTTAAGLAGMVQEVKPDRVVIEICSIAGWVCDLMWGLGVEVQVANTSDDAWRWRKVKQKDDRRDALKAARLSAVNQIREVYVPAIEVRQWRALISYRQQLVRRRTKIKNHIRDLLLREGQLLGRGSSCWSEAGLKQLGEQARPFSECGPAELWRGELQVELEQLQEMQRQVATVTAQLNKMGAGEARVQLLRTVPGVGPRLAEAIVALLDQPQRFRKASQVSGYIGMVPKALDSGETERRGHITRQGSRVVRSLLVEVAWAGLRHNAWVRQTYQRLSGGKKARKKIAIVAVGRKLLVKCWAMLRDHRAWDWQPQIT

SEQ ID NO: 459708 - protein, 347 aa, unidentified
MKNHNTIGVDLAKNVIQVCAVSSRGKQLHNKALSRKKFSEYLTKQKPGLVAFEACATAHYWARYAQAQGHEVKILPVLSVYPFRQGHKTDENDALAVAEAAMRPHLKEAPLKTVEQQGLQSIQRSRELLVQDRTALSNHIRGILLEFGIAIPKGFSTLHTRIPEILEDGDNELPDSYRATLHLLVGRLCDLREDIRLMNKEIDVLVKQHVACHRLTALEGIGPIGAILLYATLGTGEAFKNSREFAAYLGLTPKQYSSGGKTTLVGISKRIANKRLRAVLIQGARAYINHLKEPRTTKDQWLSALVQRAGYGKASVALANKNVRTAWAILTQGTAYRKTQLAGLLPA

SEQ ID NO: 459709 - protein, 345 aa, unidentified
MDHYAGIDVSLECSSVCVVDVNGKIIRETKAASEPEALIGWFRSLGFELARIGLEAGPLSQWLYAAMKKAGLAVELLETRHASEAFKSMPVKSDRNDARNLAQLMRLGWFRPVHCKSMSAQEIRAMLTARKLIQAKLQDIENSLRGILRGFGLKVGKTTKRSFAARIGALVAGHPALEAIAAATLAVHTVLLREFNGFEKRVRTLSLLDAKARLLMSTPAVGPIISLTYASAIDDPSRFTSSKRAGPLFGLTPKKYQSGETDYSGRISKNGDDSVRAALYEAAHIILTKPIKGCAQLKSWAMRIAKRAGMNKAKVALARKLAVIMLRMLKDNVPFNPAAKAAAVS

SEQ ID NO: 459710 - protein, 355 aa, unidentified
MNATTVAVDLAKNVFELALADGNGRVIERHRLTRTQFERWFDNRKVDRVVMEACGSAHHWGRWLEARGIAVKLLPAQYVRAYVKRNKTDAADAAALLEAARAADIKPVAVKSIEQQALQGLHRLRSGWMATRTRRINTLRGFCREFGLEIRVGAVQGLAAIARLIADDRSAIPALLRTPMRLALEEIRLMEARIEHLERELAQLARQSPACEALTSVPGIGLLTSTAMVAAVRDPRSFDSGRRYASFFGLTPREYSSGQHRYLGRISKRGDRYIRMLLTHGARSVLRAATAAQRQGRKLDRLRTWALQVQERTNHNKATCALANKLARIAWAVWVKHEKFQSTPAHPSMAAEVAT

SEQ ID NO: 459711 - protein, 420 aa, unidentified
MKSARNTLPEEPAGNVTCGIDWARDDHAVSVVDVRGREICRCSVEHSAAGLRELLAVLERTGAREAAIERPDGPVVDTLLEAGITVVVISPNQVKNLRGRYGSAGNKDDRFDACVLADTLRTDRARLAPLTPDSPATVTLRRACRARKDLVGHRVALANQLRAHLRNAFPGAVGLFAEIDSPISLKFLARFESRDRAGWLSPRRLAAWLASVGYCGRVDPAVLHARLIAAPRGAAGDDGTAQACITLALHAVLATLVEQIRALSEQIGEQLALHADAHIFTSLPRSGTVRAARLLAETGDCRARFPAPEALACLAGVAPSTRQSGKMRAVSFRWACDKQLRDAVTDFAGDSRRASPWAADLYNRARGRGHDHPHAVRILARAWLFVIWHCWQDETAYDPARHHALQRLLATRDSTAARAA

SEQ ID NO: 459712 - protein, 368 aa, unidentified
MDKSIKVFVGLDVHKDTIVVATAEAGRAPGRVVGTIAHDVPRLLKMLVRLGGPAHIVYEAGPTGYGLQRELAHRGYHCEVIAPSLIPKRAGDRVKTDRRDCLRLAELARAGELKPIWIPDPADEAIRDLARAREDAVNARTQARHQLKGFLLRRGVRYSGKSAWSKTYYRWLGTLDFDQVGAQTAFTEYWQAVQSADERVARMTDALAGSIQGWRFEPVVMALQALRGIDVVSAIGLVAEIGDIGRFAHPRQLMGYLGLVPSEHSSGDRLSRGSITKTGNAHARRLLTEAAWNYRFKARIGYRAQRRQEALPQPIRDMAWKAQLRLTMRFARLSARGVQINKVCVAVARELSGFIWAIARTCSTPLSA

SEQ ID NO: 459713 - protein, 315 aa, unidentified
MSDVPCFVGIDVAKAQLDIALRPSGERWAVPNDASGVATLVDRLQGLHPALIVLEATGGLERLVTSALATVGLPVVVVNPRQARDFARATGPLAKTDALDARALAHCADVIRPTPRPLPDTQTQELRALLGRRQQLIGMRTAEQHRLAGTSGRLTQDIEAHIAWLNTRIATLDDDLETLLRASPLWRENDDLLQSVPGMGPVCARTLLLELPELGTLTRQQIAALVGVAPLNCDSGTLRGRRMIWGGRAPVRTVLYMGTLVATRFNPQIKAFYQRLLAAGKLKKVALTACMRKLLTMLNAMLKHRTSWQAQEVQN

SEQ ID NO: 459714 - protein, 320 aa, unidentified
MMSEVILGIDVSKKTLDAALIFENRILCKQFQNSCDGFKELAAWLAFLKITCLHACLEATGVYGEAIALFLHESGHRVSVVNPLRIKGYASANMQRNKTDRLDAQLIASFCLTQEPESWQPPSAAVKHLQSLVRRVEVLAEMLKAEENRLASTTFEIKPSIERIIRLIKEEIGELERQIKQHINQNPHLKEQSELLQTIPGIGSRTANLLLSEVEFERYSSARALAAQAGVTPRKRQSGTSLKQTSLSKLGNARLRKALYFPAIVARQHNEIIKEFAKRLKKNGKTPMQIVCAAMRKLLHIAFGVLKHKRAFDASLAFSA

SEQ ID NO: 459715 - protein, 380 aa, unidentified
MNTTTVGIDLAKSIFAVCEGDYRGHGSRSSILKSGEFLKWLRTLPTCTVVAMEACSSAHSWGRTMQALGLEPRLIAAEFVRPYRKNQRIKNDTRDAEAVLTALHAPGMRFVTIKTEDQQQRLAWHRLREGWKAERTALFNRIRGLLTEFGIVVELGAAKIRRKLAELESDAAYPQSIQLMAQSVRAQIGILDQRLAECERQIARQSKSDPAVARLRSRPGIGPLTADAIVATVGNARQFKNGRQFAASLGITPRQHGSGGKTHLGAITRRGDSYLRCLLVQGARCVLQAALRLHKNKPNTLNRLQLWMITLNERVGYHKAAVAIANKHARQVWAMITRGEAYNAEAYKDWEAAHATVRPGDIQEASDYDLSTAALAAASV

SEQ ID NO: 459716 - protein, 412 aa, unidentified
MEVVYPRCSGLDVHKRFVVACLSIIEHGQRHKELRQVSTMTSDVLTLKAWLLASGCRQIAMESTGVFWKPLYHLLEDSFEIVLVNAQHMKAVPGRKTDVKDAEWIADLLQHGLLKASFIPSSEHQAVRDLTRTRMRLIQERNRLIKRIQKVLEEANIKLASVVSDVMGVTGQAILRALVAGKEDPECLARLAQGSLVKKQDQLQAALQGKLAPHHRMQLEELLQLIATLDHSIARFDREVAERLRRFDALIERVDAVTGLARRSIEVLFGELGWDMNHFPDAAHAASWVGICPGPHETGGKQLSGRTRQGNRWAKTVLIQAAHAAGHTQTYLGEQYRRISARRGSKKAAMAVGHSILVIFYHMVKSGEPYHEKGADYFSTVDKEKIQHRLVRQLERLGNTVILQPQAKTTLA

SEQ ID NO: 459717 - protein, 342 aa, unidentified
MFYIGDDVSEKSSYVYVTDGRGRKIESQEIPTDKDGYRQYFKKWVGKHVKVAVEAGGHSRWIHDTLKKLGISVYIVNPNKVKLIAKNKKKTDKVDAAFLAKLLRIDELPERVYVAEGESRELRDLLRSRHQLVASTTCIMNHLRGMLRQEGIKLKAKAFNDESTFSRLLTNKSIPKHLHPIIISYEKTITELRKQRGALDEVIAEYENKDIELLKSVPGIGEVASKTTYAAISTVKRFKRAKQLTSYCGLVPSVFSSGERANYGHITREGRSEVRHAVVQGVRALLRSTDSDGKPLRKWYERIARRRGSKTAVVALARKLIEIIFYVLRDRRPYNAQLLHVH

SEQ ID NO: 459718 - protein, 415 aa, unidentified
MHQQQFAAYVGIDWGDRRHSVHLQVAGDHNTESFELEQKPEALHEWVARLLERFQGRPIAIAIEQRKGAVIHALMMYAFLVLFPINPKALARYREAFLTSGAKDDPIDSELLLDFLSHHSDRLRAWIPDSEPTRKLQTLCEQRRKLVNRRVALTNRITSLLKQYFPQALDWIGDIASIQTCDFLESWSTLDAIQRVSPEIVQSFYRRHNCRKASIISERLDQIARARPLTTDSAIVEPYSLIVETSAGHLCCLLHAIQRLDKRIAELFAQHPEHDLFDSFPGAGPVCGPRLLTVFGTDRSRWTSAVELQSHSGIAPVTEKSGNSCWIHHRLACAKFVKQAFHEFADQSIRYSAWARAYYDLQRSRGKDHQAAVRALAYKWIRIIFRCWKDSKPYDEATYIRSLRRRGSPAVEKLP

SEQ ID NO: 459719 - protein, 338 aa, unidentified
MYYTGIDLHKKTSFITTIDKDGKIVTRANLQNVEEDILAYFATLDKKTRIVIESMASWYWLYDLLTGEGFEVVISNPVKTKAIASAKIKNDKLDSHMLAQLLRADLIATVHVSSLETRKLKELLRHRSRLVRDATRMKNRIHMLLMKNNFRSPFSDLFGVKGLRYLEEIDLPDYHRQQVETYLLLYQKLREQIEPLTQRVRALAKGNHTAQLLMTIPGIGPITAMFIMAEVDDISRFRSYRNLASYAGLVPSLDASAGKEKRGRITKQGSRYLRTALVEAAQAAVRMKNCRVSIFFRRRIVKGGYQKAIVATAHKILQYAFYVWKNQTPYKETYPVCA

SEQ ID NO: 459720 - protein, 426 aa, unidentified
MRRVCGLDVHKDSIYMCILYENGSKIESVFGVLTPELDKLRDLLVSHHVCEVALESTSIYWIPIWNILSVDFSLKLVNPYFIKQLPGRKSDVKDAEWIATVLQKGLIRGSYVPDRMIQCLRQYERRNHELSKNIVHAEQRMDMILQRCNIRISNYVSCISCKGYQKVVNAIISGESNPKVLVTLIHKRTLNKHGRQVVEDSLNGFVSDTDRDILRQYRDERMQMEQHKSENKAKMQAICEAHYCEELELLQTLPGIKEESAANIIAEIGVDMKMFLTASAIVGWAGLKPRNDQSAGKIKSRKITHGNKYLRKILVEAAWSAARTKDSRFMKMYQRLLARGKSKQKALIAVARKLLVLIWNMLSKKEAFQYADRILPAGYRQEQTHPFDFPAGDPFQRNSPELRFAGQKEKAAADNRLFRSGCGSKR

SEQ ID NO: 459721 - protein, 441 aa, unidentified
METVFEVMNACCAFLDIHKETVEATVRILQSQRVRQETRRWSTTTGQIQAMADWLATHGVTHAGMESTGVFWKPIFNILETRFTVILTNPAHMKQVPGRKSDLRDSQWGAQLLQAGLLRGSFIPPRWQRELRDYTRYRSQLQAEQTRVANRLHKVLEDANIKLGSVATDILGLSGRAMIHALMEGEQDAATLAEMAQGKLRTRRPELKLALEGRVTPHHRRMLRMLWKELAAVEECIADVDREIQEVTQPYTSQIEQMDPVPGIDRRTAEVVLAEVGANVDPFPSDQHLASWAGMCPGNEESAGKRRTGRTTKGNRWLRAALVQAAWAASHTKRSYLGAQYRRLAGRRGKKRALVAVGHSILVILYHLLKDSRPYSDLGRDFFDRMNHDRLIRYYSRRLAELSQKVTVEPLPEVIPGEGMVNVHPLAKAKGMTAGGICNDP

SEQ ID NO: 459722 - protein, 407 aa, unidentified
MDEIIIDKGCGLDVHKETVVGCVMGSGIKKEIRTFSTKTNDLLRLKTWLSGLGITHIAMESTGPYWKPVFNVLEDGFTVILANARHIKNVPGRKTDVKDSEWICRLLRSGLLSASFVPPQGIRELRDLTRYRRKLTQAVSSEKNRIQKVLEDANVKISSVLSDTFGVSGLQMIEAIMEGKLSEEQISELAKGRLKSKKAEIREALVGYFQDHHRFMIRASLEHIKHLEKLVEELDREIKEKLGEKYQKEYSLLQTIPGVKEQGAATIIAEIGADMDIFPSEGHLSTWAGMSPGHNESAGKKKSGKTTHGNKNLRAALTQCAWAASRTKNTYLSAKYHSLVGRRGKKRSLIAVGHKILVMAYHIIKNGVPYKELGKNYLLHRREDKIVKNHIKRLRDLGYEVELKKAA

SEQ ID NO: 459723 - protein, 398 aa, unidentified
MESQLRVGIDVGCHAHRVGIADPTGSILEEFDISHSEAGFQEFFRRVEERRAALGFPVAVAMEGYNGYARPLDRLVQEKGYRLFNVNNLKLARFKEVFPGAAKTDPIDARKILELFHLREQLPMAKDVLQEVLPAPEVNEKLKRISRRRRQLVTEKLRILNRMQADLQAVSPELLGATHDADNLWFLRFLSFRDDLQQLAKLRRATIRQIPSVGAKYAKVIEEWQAKATFSDEVEYVGPMIVDDAKRILDLHQQIHTLDEALAKLAAESEIARRLSTIPGFGKTSIAELAGEIGTLSRFSSEASLALYVGMSPLTVQSGQTSRARTPRQVNTRCRAAMMTTVARHIGCVPQSRAYYDRKRAQGKTHNQAVRALGRHMIRVIWAMLRDGRDYEPRGDTP

SEQ ID NO: 459724 - protein, 319 aa, unidentified
MNKSTLFFGIDISKDSFDVYSDHIGHISYSNTNEGFKSFLKVLDTNSHCVMEATGCYHHKLAMFLYDKGVIVSIVNPLVIKRFIQMKLRRLKTDKSDAFMIYGYACEQSLEQWQPEKEYIELGRELLSLVQAYLRQSTSLKNKLHALESRGQIKGVMIVSIKRQLRHLKKERQFLEQELESLIKTHEPSLFSRLTTIPGIGKKTAVLMMVSTSNFNAFDSYKQVSSYLGLAPNERSSGSSIRGKSRISKTGDGLLRNHLFMCSFTASVYNPQCKSLFDRIVAKGKSKKLALIAVCNKLIKQAFAIAKSGLPYDPDYAIK

SEQ ID NO: 459725 - protein, 415 aa, unidentified
MEGSPRYLIGIDWASDKHDVCVLDPNGAIKASFVVSHTAKGLAELMRRLHRCGDPVSLPIAIERPSGLLVDTLVEGGFSVVPIHPNALKATRPRYSAAPAKCDPGDAYILADVLRTDGHRFRRLRAPSDRTRALRTAVRTRDDLVAARVQLANQLRSLLESFWPGAAVVFAGIDTPIALAFLDRYPTPTSAARLGDKRMERFLRNSRYTGRRSASELLERLRSAAVSQAGHLESETKGRLVRNLVAVLKPLSAQIREVDDLIATHLTGHPDGGILQSFPQTGTINAAQILAELGDDRLRFASENQLAAEAGVAPLTFTSGKHRGVACRFACNKRLRRALTTWANNSRHGHPWAFSVYRAARQRGCDHPHAVRILARAWVRVLWRCWQNHTPYDINEHGRAQPFLLSVEESASAAA

SEQ ID NO: 459726 - protein, 378 aa, unidentified
MKRILKIGMDVHTTNYTLCAMEPIIGEDDRIFATIKVTPDYKNILMFIENLKMKLGLNDEYDIQCGYEAGCLGYSLYNQLTAAGVKCVILAPTTMLTPQGVRIKTDMRDAYMIAQCLSYGGYHVVYIPTETDDSVKEYLRMRNDHKLALKKIKQQINAFCIRHGCCYDGTKWTLAHLKWLKKLEITNELYRETLDEYMASYEEQETKIERYDKRIEEIAEQTKYHDKVKKLECFLGIKTHTALSLIVETGDFERFAKGNQYAAYLGLAPGENSSSDSIHRLGITKAGNSHLRQLLIEASGGICKGAVGHKSKELRARQNGNTAEVIAYADKANTRLRSRYYKFIRHGKKRNVAVAAIARELACFVWGMMTDNIEMKVA

SEQ ID NO: 459727 - protein, 315 aa, unidentified
MKQQTSATTETIIKGRNIIDFTGKTMWVGIDMHEKDLQVAKVLDGICLGNHRMPANGKALIEHLRTRYRGAAFKCVYESCAWGFTLQRELTAAGIECIVVHAGDVSSSDKERKRKTDRNLASGDLTAIHVPDKDLQKERNLIRFRKKLVGDLNRSKNRLKSLLKYQGINIPERLGKKNNWSLNFMNWIEDEAKKDILLQDTLLLMLEEIKLLRQLLLKTEKALRKLRQDKYDEQSKLLMSAPGVGRTTAMLFLLEIGDIKRFGPFDKLNDFVGFCPDTDSSGDTEHDTGITSRRHKQLRSALIEAAWTAIRIDPA

SEQ ID NO: 459728 - protein, 343 aa, unidentified
MTSLGIDTHKATLACSAVDELGRQLASRSFGNDPHGHAAALLWIQRLPAPRRVGIEGAGSFGATLAETLLAAGEVVVEVPAQFTDRERRSLVQRGKSDPGDALAIARLTAREPRLPALRRPGVVADLKLLVGAREQLMAERTRLANQLHADLLVLAPGYGTRLPNLTAGRHQSAAARLLGRRAGVRAELARGRLRRLRQLSIEAERLEQRIAALLVTTGSRLSQLPGIGALTAAKLLGETGDVRRYRNHASFAAASGTAPIPASSGQRQRHRLNRGGNRQLNRALHTMALVQSRCEPRAHDYLARRQAEGKTRLEALRALKWHLARVVYRTMLADAQSSAGAA

SEQ ID NO: 459729 - protein, 412 aa, unidentified
METLYAICCGLDVHKDTLTACLRRLEAPGQGTKELRTFGTTTAALLTLLDWLTAAGCTHVAMESTGVYWKPVFNILEGNFAQVLVVNARHVKALPGRKTDLLDAEWLAQLLQHGLLRGSFIPPAPIRELREGTRYRKQLIRARADEANRIQKLLEAANVKLGSVATDILGVSGRAMLAALVKGETDASALAGLAKGRLRQKRDRLVAALTGRITPVQRALLGQQLAHVEYLDRAIAELDSLIGTLMIPYQAEADRLRTTTGIEQRTAEALIAELGVDMTVFPSDRHCASWAGMCPGNNESAGKRKSGKTRKGSKWLRAALVEAAWATSRTQTYLGAQYHRIARRRGKKKAIVAVAHSILVIAYHLLKEGTTYRDLGHDYFDKRDTARLQQRLIARLESLGLRVTVEPLPQAA

SEQ ID NO: 459730 - protein, 343 aa, unidentified
MAIIRVGVDLAKDVFQVHGVDRNEKPVWRRKLSRDEWVDALLKKIEPGCEIGMEACGGAHHWARLLQAKGFVVKLIAPQFVKPYVKSNKNDANDAEAICEAMSRPHMRFVPVKTVAQQDIQAVHRVRAELMAQRKAKGNQVRGLTSEYGIVAPREWLHLRRAIPCWLEDAENGLSGKFRELLQGLWQDLLTLDERVAELDREIASIAASDPVAKRLQQLRGVGPMIATALLATVGDASQFANGRQMAASLGLTPKQNSSGGKNRLLGISKRGDSYVRSLLVHGARAMIRTAKAKEDRLSQWVMKIATSRHPNVAAVALANKTVRIAWAMMKNETDYQPALAAG

SEQ ID NO: 459731 - protein, 341 aa, unidentified
MKKAEYVIGIDVGDESLSVAVTRGADGAGLVECSVSNDSEGFEELGGWLSKHQATANNAAFCLEATGVYGERLCYYLCSRGFQVAVEPPLKVKRAFAQSAHKNDTVDARQIAEYGHRFFDELSWWTPPAAILEQMKVLLSAREQFTSQKIANVNALKALERKTVTTRIAIQAYEHAIARLAENIKEIDQEIKRLVKNDDSFHRLITTLTSTPGIGMLLAANLVVMTNGFTRTANHKQLASYTGISPIEHTSGSSVYRRPRSRRFGPSRMRKLLYLAAMSVATHNPEFRRYYLRKVAEGKPKRLVLNNVANKLLKVVCALVRSESAYIPNYKSVHPLFLKTA

SEQ ID NO: 459732 - protein, 351 aa, unidentified
MNIIGCDLHSRHQNVAWMEEATGEIRSRRLAHENGEARAFYLSRPRGAIVGIEATFPALWFERLLGEGGHELWVGDAARIRASEVRRQKTDTRDAEHLLDLLQAGRFPRIWVPSPAERDLRQLLVHRSKLVRTRTAVKNQLHALAMSQGVCRKRKLWTARGRAELQSLALLPWASQRRQALLELLDQFDGAIAELDRAVAAEAQQRDAAVRLMTHPGVGPVVGLAFALTLGPVERFPNSRKLVSYLGLNPREHSSGGQQRLGAISKQGNSLLRWLLVEAAQTAARYDPELRRAYQRLKFRRVSGVAKVAIARRLAVRLYWMLRARLDYAQLVRMSGSPSSAVVPPRAGSKV

SEQ ID NO: 459733 - protein, 412 aa, unidentified
MDTVYRCCAGVDVHLKTCEVCVRRVGPDGKAHSVTRQFRTTTRAILEMADWFQDEGVEMVAMESTGVYWKPLWNLLEDRVDLMLCNARHVRNVPGRKTDKRDAQWLADLLQHGVLKPSFVPSRRQRFLRDLTRQRRVLADEKTRVVNRIQKVLEDANIKLSSVASDVMGASGRDMIRAIIAGERDPAVLADMARQKLRRKLPELREALRGDVTEHHRFMLRLHMRQIEFIEQKIAELQARIDEAMAEEAPIIKRLEQVAGIRKVAAQAILAEIGTDMSRFPTAAHLCSWARLCPGTNESAGKRRRSGTGQGNRWLRAIMAQAAWGAAHTKNSYYSAQFRRLAGRRGKKRALVAVAHSLLVAIYHMLKNDAEYQDLGADYFDRRKPEQLTRSLVRRLEKLGHTVTLQPRPEAA

SEQ ID NO: 459734 - protein, 360 aa, unidentified
MVRYSLGIDMSYKIFHVCLSLMQADGNVRVKGTSKFQNDKDGFVLLESWLQKHLKQKELPVAIVMEATGVYYEKCALHLYQAGYRVSVVLPNIAKKYLQSLGQKSKNDKIDAKGLSTMGAERNLTGWEPLNDFFYILRSYTRQHESLQQTKTIINNQLHAQHNKAHYNELVEQQLGQLIEVIEGQLKELATAIADHIKTNREVSQRVKQICGVKGIGILTVAVIIAETNGFALFKNIPQLVSYAGYDVVEDQSGKRAGKTKISKHGNGHIRRAMHMPALHAANWKGSVFQNLYQRVVERTSIKMKGYVAVQKKLLVTTYTLWKKNESFNVGNENEKHTKEQKQMLPSLVSPKADKKVVPA

SEQ ID NO: 459735 - protein, 349 aa, unidentified
MPILAEQFVHVIGVDTHKLRLTAAALNASGGCLELLEVGADARGYGRLLELGSRFSGPLLWAVEGTGSYGAALTEHLLANGQTVTEVDRPKRPPRRRGKSDEIDAIRAGRDALAMKRLTPPRRRQEREQLRILFTSRQELVSNRTRLANHLMQLVVTASEKLRSRFLDFGSHGAERLVRQCLASRCHPGMSAEDRTRLTTMRELAHMIRSLSADADRYEQEIAVRVEQMAPGLCAQPGVGALTAAQILLSWSHAGRMPNEATFAALAGVCPIPASSGQTVRHRLNRGRDRQLNAALHRVVLTRCRYHQSTRDYLARRTAQGKTLAEVRRCLKRYAARQLFKFLNRLDKA

SEQ ID NO: 459736 - protein, 428 aa, unidentified
MKQFDGIRLQEFRQAKKEVRGSDRYLIVGIDVAKERHNAFFGTANGKTLHKGVVFDNTIEGFRKLLRMTEALKVQYDLSKIIFGLEPTANYHKPLGEHLIKCGHLVVLVSATSVKNNRSLLDGRWDKHDTKDSANVADLISQGKCLYYECPEPKVQDLRNLLSLKRRLKKEEHGLRVRIRNQLLAQYFPEMDQYFGTSSSLAVVRCCLDPSAIAGMEFDVFCRSVAPGKISMAQQKRLQMIWRKAPESIGCSIGDATPFEAQVMVSKLCQVRETIKTMDEKIKDICLQFPEYSCLLSIPGFGPDVSSKVLAAIGYPFRFTSGKQVLKMSGFDLCANRSGKSSNSATPVISKQGKTDLRYALYQAALVASYSNKDFITYYTNKLRGRQREKGIGTKMRIKLAAKLLIIAWTLMKKKELFDPSYLRKDNI

SEQ ID NO: 459737 - protein, 336 aa, unidentified
MIIIGCDYHPGFEQIALLDTATGEMQTRRVEHAKGEVQAFYASLPKGTRVGIEATGCTQWFERLLAQCGHELWVGDPAEIRARRVRKQKTDKRDAEHLLELMTTNRFPKVWVPSAENRDARHLLQHRSKLVQMRTAVKNQLHGLARGQGLYRPGQRWNDGKRKELEALELGKWTSRQRQDLLRLLDFLDPRIEELGKGVEEEGARRPEVARLRAHKGVGPIVSLAFVLTLGPVQRFARSRKVVSYVGLNPEEDSSSNHQRFGHITKQGNSMLRWLLVEAGQTAARHDPELSRVYKRLKIRRGPNVAKVAVARNLAVRMYWTLRRAAQESAVDAHAR

SEQ ID NO: 459738 - protein, 365 aa, unidentified
MQIEPLTRRAAPVIPPVNNRGGAFGTAAAVTHDRTVARLSIARTRQVTVTQIICGVDVSSISLEAFVAPVGLARGFANSTEGIAELVAFCEQQGVQLVAMEASGGYEKVAFAMLWAAGVPVTVLNPRGVRDFAKGMGLLEKSDRIDARVIGWFAEVKKSVPSAPPSAEQQQLKAWVTRLRQLTELQAAQRNQRLLVGEATVQALISELLKVVAAQMRRLEAQIAALLASDPLWQKLDQAMRSIKGVADRTVARVLAEMPEIGTLSNKAISKLAGVAPLVHESGKRAGKRPVRGGRRQVRAILFVVAEVVRRHNPDFAAFHQRLSAAGKPKKVIRIALAHKLLVRLNAKAREARKAFVAASICQSA

SEQ ID NO: 459739 - protein, 378 aa, unidentified
MQTTAAPREYSEEKVLFLALELSNSKWKLGSTVGVGSKARERTIAAGDLGALHEEVSRAKRRFGLESSARVVSCYEAGRDGFWLDRHLRHAGIENIVVDPSSIEVNRRSRRAKTDRLDVGKLLRQLMRWWSGEPKVWGVARVPSVEAEDQRQLHRELEALKRERTRYTNRMTSLLVTQGIRLKVSRSFLARLSAVRLWDNSPVPAGLRSRLEREYVRWTLVQEQIAELEKQRRSALRTARDRGAQTARRLYRLRGIGENYAWLASMEAFAWRRFDNRRQVGGMAGLTPTPYSSGQIQRDQGIGKDGNRRLRAATVEIAWGWLRFQPDSELSKWFQERYGPGSRRSRRVGIVALARKLLIALWRYLETGVVPAGAVLKT

SEQ ID NO: 459740 - protein, 281 aa, unidentified
MTVTHYIGFDVHKKSVSYCVKDAAGTIAEEGKLRATREALRQWAGKRTEPWHGAMEATLFSGWIYDTLKPFAAELQMGHPAMMKAIGASKKKNDRIDARKTADLVRCNLLPACYVAPVEMRELRRMLRYRNLVVAQAVRMKNKMSGLLMEVGAEYNKQQLHGKKYFTELLGSLEEVPESVKELLQLSRGALEMFETTQQQILNQLQKAPRLVQRLEVLKSIRGVGEVTALSWALEICDPHRFPSIGDAVSYCGLTSALVSSRTSSGAGRFPSSGMRICRRC

SEQ ID NO: 459741 - protein, 341 aa, unidentified
MNQVSTVGLDLAKYIFQLHGADSAGAVVFRKKLRRGQLLAFLATLPPCTVAMEACASAHYWGREIAKLGHTVKLIAPAYVKPFVKRQKNDMADAEAICEAAQRPTMRFVAVKSEQAQAAAVVFRTRDLLVRQRTQAINALRGHLAEFGVIAAKGPVHTSKLIAALEDPASDLPQAARGILAVLVEQLRSSDERVAVLDREIARHTKENSVARRLMTIPGIGAVTAAALTALAPPADTFRRGRDFAAWLGLTPVQRSSGGKERLGRTSKMGERTLRRLLIIGASAVARWAARKGVPAGTWLGRMLARKPPMLVRVALANKMARIVWALLARGGVYRAPVTAV

SEQ ID NO: 459742 - protein, 392 aa, unidentified
MNAVGIDVSKGKSMVTILRPFGEIVSSPFEIKHTSSDILSLIKLIHSIEGESRIVMEHTGHYYEVLAQQFSAAGLFVSAVNPKLVKNFNNDSLRKVKSDKADSIKIARYALDKWQNLKPYSIVDELRTQLKAMNRQFHFYVKQKTAMKNNLINLIDQTYPNANTYFNSPPRSDGSQKWVDFVYTYWHVDCVRKMSLNSFVKHFNKSKAEEIYTKATELVPVFPKNEITKRIIRQAIAQLNSTSATVETIRILMNETASKLPEYPIVMQFKGIGPSFGPQLMAEIGDITRFTHKGALTAFAGVDPGVNESGSYAQKSVPTSKRGSSNLRKTLFQVMDVLIKTMPQDDPVYQFMDRKRAQGKPYYVYMTAGANKFLRIYYGRVKEYLCILSESS

SEQ ID NO: 459743 - protein, 402 aa, unidentified
MNAVGIDVSKGKSMVAIMRPFGEIVSAPFEIKHTASDIHSLVELINSVEGESRIVMEHTGRYYEVLAHQLSEANLFVSAINPKLIKDFDNDSLRKVKSDKADAVKIARYALDKWQNLKQYNVMDELRNQLKTMNRQFGFYIKHKTAMKNNLIGILDQTYPGVNTYFDSPARSDGSQKWVDFASTYWHVDCVRKMSLNAFIDHYQNWCKRKKYNFSQSKAEEIYGKAKELVPVLPKDDITKLIIKQAVNQLNSASTTVESLRTLMNETASKLPEYPVVMAMKGVGTSLGPQLIAEIGDVSRFTHKSAITAFAGVDPGVNESGSYEQKSVPTSKRGSSDLRKTLFQVMDVLIKTHPQDDPVYQFLDKKRAQGKPYYVYMTAGANKFLRIYYGRVKEYLSSLPES

SEQ ID NO: 459744 - protein, 427 aa, unidentified
MSEQKQATEEKAEFAAYVGIDWADQKHVWSLQVAATGKREEGEVEHSPEAVEAWINGWMARFPGQPIAVCLEQSRGALLNMLSKYQQLILFPVHPATVSRFRAALYPSGAKDDPKDADLVLDLLVHHRERLRRLEPDTVETREIRFLVEQRRNFVNQKTAQSNRLTSTLKQYYPQILDWFDDPTAPLVAAFLSRWPTLEMLQKVRQETLIRFFHEHNCRSQELIEQRWQQIRTAVPATRDQAVIDSSIVRMHWLCKVISTLCQAIADLDERILPIAQAHPDYTLFDSLPGAGEVMVPRLIAAFGTKRERFSSASQVQSFTGIAPVTEASGRSEWIHMRWACPKFLRQTFHEWAGHSIPHSEWASAYYHQQLEKGNGHHAAVRSLAAKWIRIVYRCWVNHTPYDEQIYLKSLRLHGSPLAAAIAEAAA

SEQ ID NO: 459745 - protein, 359 aa, unidentified
MNATTVAVDLAKNVFELVAADVHWNVVERARLTRTQFQRWFHNRDVALVVMEACGSAHHWARVLQQQGIEVKLLPPRYVRAYVKRNKTDAADAAALLEAVRCADIVPVRIKSVEQQALQSLHRVRSAWVATRTARINALRGLCREFGILISTGARLGVEQISRVLVDPHSNVPAMLRETLKLLVEEIRLLEVRIAQLERELSEAAKLSPACCTLLTVPGVGLLTATALVASTGGAVQHFKDARHFAAWFGLTPREHSSGSSRYLGRISKRGDRYLRTLLTHGARAVLRAACIAQRRGAALDPLRRWGLAVQSRSNHNKATCALANKLARICYASMRDQQPYQSVRLAKKLERQTFPMPA

SEQ ID NO: 459746 - protein, 339 aa, unidentified
MTNYIGLDHHRKFTQVAVVNESDDVVLECRMPNTLEAVKALLERLKGESQGVVEAGPSWGWIFDTFEKLGVRMILANPSQVRVIAETRCKTDRRDAMALARLLRVGWIPRVYVGSPETRAQKHLWRERVWMVRMQTRLKNRIRRLLDHHHVEIPDYSDLFGVAGRNYLEALKLPGNAQKILEVELKLLSTYQEQIRDVQRWAAEATQGLPNVTYLKSLPGFGEVLAPIAALEIGDIHRFRNAASLASYCGLVPSVSSSGGITWRGGIGQSGNHWLKWVFVEAAWCGMRAMPELRARFSRIKARRGTNIAAVACARRLSEIAFALLKHQRCFEVRTLVHV

SEQ ID NO: 459747 - protein, 445 aa, unidentified
MGRRCIGLDVHREFAQVAVWEDGVVRQAGRVALTDEALRVFADSLAPEDEVAIEATCNTQAIVRLLEPHVARVVVSNPQKTRAIAEAKVKTDKVDAEVLAQLLAADYLPSVWVADQATQALRRQVARRAHIVRQRTRLKNRVQAILHRNLIPRCPAADLFGIKGRCWLSNQPLPADEQLAVDALLRQLDFHGQELRIIDAELGRVALSSPEVKRLMTIPGVDATVALSIVAAVGDFRRFRRPEQLVSYLGLNPRVKQSGGQPASHGRITKQGRAHARGMLVEAAWSAAKTPGPLRAFYQRVCSRRGMQIAVVATARKLAVLCWTMIERGEDYAFARPSLTDKKLRALELRAGMPSRRGQKGKAAAYSLKEIRQRERELAEQGERAYRQLVADWQAQRPTKPKDQPGVAAANGTRLKRPSVGQAARQASVPEPALRSGVDHALSKA

SEQ ID NO: 459748 - protein, 399 aa, unidentified
MTPDDIDVWVGLDVGKSAHHAHALDHDGNTLYDKPLKQDEKAIRTMLGKLSKHGRVLLVVDQPNTIGSLPLTVARNMGIAVAYLPGTAMRRTAQLLPGDAKTDRRDAHVIAWAALKLPETLRDAGPDDETLAALKLLAGHDEDLAHESTRHVNRLRSLLLQTHPAFERALKGERITRDATLALLERYGGPMGVKRAGIEDVKDWAKSNGLRAGRIIDDMFKAIGEQTVTVPGTLMAETIIPSIAHDIKTIRDRRREVDRQVEKLLEDHPLLTVLTSMPGTGVRTASNILLGIGGDIANFKSSAHLAAYAGISPVTGQSGTSIKGERPSRRGNKRLKNALWQTAFVASTKHPPSVAYYKRKREQGKHHNAAIICLARRRCDVIYSMLKNGTLYQEPALVA

SEQ ID NO: 459749 - protein, 318 aa, unidentified
MSLPSIFVGIDVAKAHLDIALRPTGTRWTVTNDEAGITDLAAQLHEISPALIVLEATGGLQRAVVAALAAAALPVVVVNPRQVRDFAKATGQLAKTDALDARALAHFAEAIRPAPRPVADAQTEELRALLARRRQLIAMRTAEQNRLGSAPRRLHADIEAHITWLNARLATIDDDLDTTLQASPVWRAREDLLRSVPGIGPVCARTLVLDLPELGTLSRQHLAALVGLAPFHRDSGTLRGTRTIWGGRAQVRTALYMSTLVAVRYNPVLKAFYQRLRAAGKLAKVALIACMRKLLTILNAMVKHQTPWQLQEEKIIAL

SEQ ID NO: 459750 - protein, 345 aa, unidentified
MEITTVGLDLAKNVFQVHAINGAGEVVVRKALRRAQVLRFFERLAPCLVGIEACGTSHHWAREIRRLGHEVRLMPPAYVKPYVKRGKSDASDAEAICEAVSRPTMRYVAIKSCEQQAALTVHRTRDLLVKQRTQFVNMIRGLLAEFGIEIRRGITHALSLAERIAVGEMPGIPALAAKMIASLAGQILDLQARLREIERELLAWHRSSDIALRLATIPGGGTIGATAFAASVTDPTQFRSGRQFAAWLGLTPLQHSSGGKERLGRISKMGDKYLRRLLVVGMTSLVRRAKYKPEAVGRWLAALLSRKPARVVTVALANKAARVFLAIMARGGIYRAPQPAGAAVS

SEQ ID NO: 459751 - protein, 388 aa, unidentified
MEARLVDTTPTARNDALARCLIAIELSKASWVVGVQTPLSNKTSQYRLAGGDWQSLLKLIERIRRQVSRELGRPVEMISCYEAGYDGFWLHRLLEAHGVRNHVLDPASLLVNRRARRAKTDRIDVERMLRALGRYLRGEPDACSVVRVPSVEQEDARRLHRERHRLIRERVQHVNRIKGLCATQGIYDYEPLRSDRKAQLDGLRTGDGRTLPTRLKAEIIRELQRLELVLKMIAQIEAERDAIVKEAAPQHLNAGKIKALVNLKSIGPEFATTLVGEVFYRSFDNRRQVGGYIGLAPSPYSSGSMDRDQGISKAGNPKARSSAIELAWMWLRYQPDSTLSIWFRQRVGDRKGRVRRIAIVALARKLLVALWRYLETGLVPAGAVFKTR

SEQ ID NO: 459752 - protein, 465 aa, unidentified
MTIKIKKQSGKQKRGKVSSVLPLINPNAAGIDVGASEHYVAVPPDRDEQPVRRFGAFTEDLHALAQWLLRCGVKTVAMESTGVYWIPLYQILESQGLKVKLVNARHVKHVPGRKSDVQDCQWLQQLESFGLLSGSFRPEAKICVLRSYMRQREMLIRSASRHVQQMQKALSEMNIKLHHVISDLTGQTGLTIVRAILAGERDRWKLAAMKDRRIKSDVGTIAKALEGDYRSEHLFALRQALEIYDHYQQRIAECDSEIFKEMQTLETRAEGALSSSAPLKRKARSRHNPIPFDSQAELYRIMGVDLTRIDGINEATVQLILSELGLDLCKKWPTEAQFTSWLGLCPNNEISGGKVLRRGTRKVVNRVANALRMCAQSLLNSKSALGAYARRMRAKRDSQIAITATAHKLARLIYRMLKYGEEYLDIGQEQYEAKYKVGLLKSLQRKAHQLGYQLIVNQPVATVVP

SEQ ID NO: 459753 - protein, 350 aa, unidentified
MKKIVKQVAGIDVAQKELVVSLGRMHDDWSPEVYAHKTFANTETGFLTLIIWVKKQAQQDIAVRFVMEATGVYHESLAYFLTDKSFDVSIVLPNKISNYFRTLDVKTITDKTASEAITLFGLERKPDSWQQSKGLYKKLRQLTRERGQLVEERTAIKNQLHAEQAEAEPNKKTISRIKKRIELLNKQEKEIKTEIEALIKEDKEMKHLLVILCSLPGVGILTAVTVLAETNGFDLIRNKRQLASYAGFDVKEKQSGTSVKGKSRISKKGNKYLRKAMHFPALTAIRHDERFKAIFARIVSKHGIKMKAAVAVQRKLLEMIYTLYKTRTVYDKEYLKTIQVGNSVTESITI

SEQ ID NO: 459754 - protein, 408 aa, unidentified
MKLFCGIDWAEAHHDIAIVDGDGTLIAKRRITDDPDGFAQLIELLAEAGDCPDSQIPVAIETPRGLLVAALRASGRPVYAINPLAVARYRERHSVARSKSDHADAMTLANILRVDAHVHRRMPADTELCQAIAVLARGQQDAIWRRTKAGNELRSMLREYYPTFLAAFRGRFQIGIASPEARAVLAIAPTPAAAVKLSVSRITAALRRAGRQRNIDQVAAEIRTALRAPQLCQLPLVEAAMGRQTLALLAALDAACQSVVELGQAASELFQTHPDYQIITSFPGLADSTGARVLAEIGDDRARFADARALKAYAGSAPITRASGRSISITRRRIKNDRLAATGWVWGFAAMGNHPAAQDHYRRRRELGDRHAAAIRHLVNKFVGQLYYCLQHRQVFNEEKGFGCAAAA

SEQ ID NO: 459755 - protein, 323 aa, unidentified
MNKGIKYFGIDISQLVFDVTDSDGNYYQFKNNGTGFKKFSKLLDMESHCVMESTGYYHYQLAYHLLETGVKVSVENPLSVKRFIQMKLSKIKTDKSDSRLICAYAKQVELKLWTGQSKTEQECLQITRALSCYTKQSTMLKNKLHGEAVLGEPSKGVVRSLKRSLKQVEKEIKTLEDMLLVLVKQSHQDLLTRLETIPGIGRKTALMLVVLTGGFERFIKAGELCSYAGLTPVVRQSGSSVNGRARISKIGNQKLRNLLFMCSFNACKYNKACRDIYERIVAKGKSKKLALIAVCNKLLKQAFAIAKSGLVYDDGYRSTLVKN

SEQ ID NO: 459756 - protein, 462 aa, unidentified
MKTQKSEKEHSRKVKTEGLENLKQINLNAAGLDIGDREIYVCVPQDRDENPVQVFKTFTASLYHLADWLTKCGITTVAMESTGVYWIPIFQILEERGFEVLLVNAQHIKNVPGKKTDVLDCQWIQQLHTYGLLRGSFRPSEQTCVLRSYVRHREMLIQCRSSHIQHMQKALQQMNLKLTNVVSDITGKTGMSIIRDILVGERDAVKLAQHRYRNCAKSEGEIAESLVGDYREEHIFSLKQAVELYDVYNEKLKACEIEIEQQLAQFSAKINIEENPLPPRKKNSQPKNNPEKDIRPELYQISGVDLTEIEGVDVITAQVIVSEIGVDMNRWKTVKHFTSWLGLCPHNEKTGGKVIRTKTKKTNNRANLALRQAAITLRNSRSGLGQFYRRMRTKMGAPKAVVATAHKLARIIYHMLKHQVAYRSVSAQEDETRHRERAIRELQLKADRLGGKLTFEPLPQTA

SEQ ID NO: 459757 - protein, 355 aa, unidentified
MSQEKYIGLDVHQATISAAVTDGSGKLLMECLLETKAATILEFIQGLRGTLSLTFEEGTSAAWLHDLLKPHVSRLVVCDPRKASLLTDGNKSDRIDARKLAELLRNNQLNPVYHGEHGIRTLKELGRSYVTITKDLTRVMNRIKALYRSWGIACGGSNVYAGRHRTEWLAKIVEPGVRVRAERLYQQLDSLQPLHLEARRDLLRESSKHAAVKLLRQIPSIGPIRAALLMALLQTPHRFRTKRQLWAYSGFAVQTHDSGEYRCVRGKLQRNRERIRVRGLNQNHNKELKNLFKSAATSASTRPGPLRDFYMARVESGMRPTMARLTLARKIASITLTMWKKGASFDPKQFERQAA

SEQ ID NO: 459758 - protein, 403 aa, unidentified
MFYLGIDVSKSTARYLILNESGNKLRSFTLSNDKESLESLPERFSSLSINRDNLLIGIEATGSFWENIYSFFKDRGFHIVLLNPYNTNKFREALSKKAKTDDIDALIIAQLLRTGEYVQSQVAEENIQALRELTNLRYEFVKERKNLQRQVYSLLCIVFPEYGKTVIAKPFSQASMAILMRFPTSKHLGEAKTKHIEKIVRRIQGNNFSVEEIQYLIETAKNSIYSGRAKDARAITLRMLLGHIENLSNSIEELESEMKQILSPSDKDGSFPGENLLSIKGVGDKTLAALLSYLGSDGSNFSSSKAAVGYVGFYPNIYESGQTRKDNTISKRGPKVLRWALYMAAVASLKHNKEMRTLYHKKLSQGKTEKQALICVGKKILQIALSLLKSGEPYNPARVFVSN

SEQ ID NO: 459759 - protein, 502 aa, unidentified
MKILYRRCAALDIHKKTVCACVRQASAKEEVQVERATFGTYTDDLEQLGEWLKEHKVKRVAMESTGVYWIPVWNVLEQSRFGLELLLVNPTLVKSLPGQKTDPKDAGRIAELHQYGLLRGSFIPPRPIRQLRDLVRSRVHVQQDRNRIVNRIARLLESANVKLGSVASNIVGKSGRRMLYAIQEGESRAARLAGLALGQLQKKEGELARALQGRFSDHLRFLLKDLLEDLHHAESRLEQFDHAIRRSLLPHAEAIEGLRTIPGVDEVTAWTIISEIGFDMSMFPTADHLASWAGLCPGNDESAGKRRSGRTRKGDRYLRRSLVQNAWAVAHAKESFLTSLFLRLARRRGLKKAALAVAHRILVIAYYILRDGVVYRELGSNYHDQLHPLRTKQRLVERLEGLGYQVEVRPKPTVDVTASLANASPVPRKRGRPPGPATRPYRKAPRPTCPTCAERGIVCFHHDASLQRPPVQPVTGCRRCARWGIPCIHVRPRSQPNTPPDQ

SEQ ID NO: 459760 - protein, 354 aa, unidentified
MSQKLSSEVAVIGVDIGKNSFHLVGQDRRGALVLRQKWSRGQVEARLANLPPCLIGMEACVGAHHLSRKLGSLGHDARLMPAKYVRPYSKGEKNDYRDAEAIAEAVQRPTMKFVATKTAEQLDLQALHRVRERLVSQRTGIINQIRAFLLERGIAVRQGLHFLRAELPGILAKRTDVLSPRMLRVIEDLAGDWRRLDERIESLSAEITRLVERDPACQRLMTVPGIGPLTSSAMVAAIGTGDVFSKGRDFGAWLGLVPKQMSTGDRTILGSISRRGNCYLRKLFVQAAWVVLVKVRPQQWERYGLKSWIEAAKKRLHRNVLAIALANKLARIAWAVLHNGRAFECVKTNAPRPA

SEQ ID NO: 459761 - protein, 312 aa, unidentified
MADMVRLAGIDVSKDKLDVYVTPSGESRTVGYDRRGLAGLRRWLIGLGVALVAVEASGGYERQVSEVLEEAGLVVHRLNPLRVRRFAELKGRLAKTDRLDARTIAEFARTWPQEHQLGRDPRRERLAEHLLVRRHTQETILDCINQLEHLRDGRLRRLVTARKASMERTLAKLDCCLVDLIAQHADLAELSERLRTVPAVGPVLATTLIALLPELGSLTRRQVASLVGVAPFDRSSGRQVGAKSIQAGRGFVRTALYMAAMVASRHNPAIAAFSKRLAGKPGKVRLVACMRKLIVTLNAVVRDGTQWQPRTA

SEQ ID NO: 459762 - protein, 403 aa, unidentified
MRVVYEHCCGVDVHKKSVTACIITPEGKETRTFGTMVRDLLELADWLNEHNVTHVAMESTGVYWKPVYNVLEEEFEVWVINARHIKNVPGRKTDVKDAEWIADLLRHGLVRASFIPDRPQRELREVVRYRRRLIQQRAQMVNRIQKVLEGGNIKLASVATDIMGASGLMMLKAMVAGEEDPKVLADMAKGKLRDKIEELQWALEGTMGAHQRFMLDSQLRMLDMLDKEIAHLDDEVAQRVSPFEEEVQRVDEVPGIGRRNAEDILAEIGTDMSRFPSAAHLASWAKVSPGNNESAGKRRSSPTGRGSPWLKSALTEAAQAAANKKNSYLAAQKRRLAGRRGSRRANIAVAHSILKSVYYMLRDGTSYRELGGNYFDHRTRHATVHRAVRRIERLGYKVSLEAA

SEQ ID NO: 459763 - protein, 341 aa, unidentified
MSEVSIIGLDIAKHVFQAHGVDASGHVLLRKKISRAKLLPFFAAQPRCQVVLEACGGAHHWARELLKLGHDVRLIAPAYVKPFVKRQKNDAADAEAICEAAQRPSMRFVPVKTEEQQAAAMVFRGRDLLVRQRTQISNALRGHMAEYGWIAPKGLVHLEKLAALLADPSAVPQGVRSVCMLLLDSLAMLDRQIAELDKEIVRRSREDAVARRLMTIPGIGPITATALLALAPPPGTFAKGRDFAAWVGLTPRQHSTGGKQKLGSISKMGERTLRRLLIIGSSAVVLQASKRGAPKGSWLEQMMARKPRMLVTVALANKTARIVWALLMKNEDYRAPVAAAA

SEQ ID NO: 459764 - protein, 344 aa, unidentified
MSGAYEGRQIVGMDLHRRRSVLVRMTETGQHLETVRISNDPEYLREVMTRAGEAPDVVLEATYGWYWAADTLAELGAQVHLAHPLGVKMFTLRRVKNDVRDAADLADLLRMGRLPEAWIAPPVTRELRGWVRHRAKLVGLRSNLKCQVHAVLAAAGVTVPMSDLFGSTGRQLLAATRLSVESRSRVDSLNRLITALDFEIDLYTRLVAGRLRADPGYRAVQTIPGVGAVLGAVFVAEIGDITRFAQPQQLASWAGLTPKHHESDTTVHRGRITKQGSRLVRWAAVEAVQRVPAHTRFGQRRDRVAQRRGRNIGVVAAARDLITLVFYGLRDHHIRCLPSGTGAA

SEQ ID NO: 459765 - protein, 351 aa, unidentified
MEKVIKQCVGIDCSKEKLDVSFAVMKSSLDSSFLSTTVFANDKAGWKKMIKWAEQLEAKDLQTHFVIEATGVYHEQVCLFLFLLHRQISVLLPNKVKKFAGTLKIKTVNDRVSAQTIAQMGIEKKLDSWQPPHEVFNLLRQLTRERHQLIEEKTQILCELHAEQSGAWPNKKSIQRMKQRINLILKQIVETENEMKEQVNEHPWLKEKLAHVCSIPGIGFLTAVTVVAETNGFNLVRNKKQLVSYAGLDVIEKESGSSVRGKPRISRRGNKQIRRAMYFPAFSAIRAKSKMHHLYDRLEAKHGIKMKAAVAVQRKLLELMFLLWKKNENYIENYDIKKLEQPKKAALIEMA

SEQ ID NO: 459766 - protein, 427 aa, unidentified
MGRIKIVYPVCCGMDVHRDFVIACVAATNNQGITSYDTKRFSTYSGGLRDLAVWLTAHCCKDVCMESTGKYWFPVHNMLEKDFNVVVSHPKFVKAIKGKKTDKKDAMWIADLFKHDLVRSSFIPPDDIRQLRDLCRYWQKLTWCTTGEKNRAQNCLTVSNYKLDGVFSNVFGKSASAIITYMLEHPGEQFDVKPFIHHRCKSSLEEIQAAVDGLFSPWQAKKLKIIHSHIEDLSLLKRMVQELVTQLASPYQRQIDLLLTVPGISDPMTAIRIIGEIGVNMKQFESSKHLCSWAGLTPQNNESAGKKKTTRIGKAGQYIKPLLLQCAIAASNPRSKKYTEVLGKYQQLKKRRGVKKARIAIARRLLTAIYQMLLKDEPYRPYIAPARESVPDSRILTPAQALALLRRRGFIIAESDPSIPAESASSG

SEQ ID NO: 459767 - protein, 283 aa, unidentified
MVLVGADLHKRWHTVVAIDEQGRKLGERTVPATPDGHLELRARAAGYAGHRWGLEDCRHLSRRLEADLLRAGEQVVRVPPKLMAGLRRSGREPGKSDPIDALAVARAPLASPGRPVASLDGPERDVRVLVDHRDDLVAERTRDIARLRWHLHELGVEEPRGRSLDRAGVRRFHSAAAFARHNGTAPVPVWTGNQERHRLSRDDNRQFNLALNRIAITQMRIDDRGRAYIEHRRAAGDTKTEAIRALRRRLSDEVFRRLSTDETRRADAAPALTAVAACHRRNA

SEQ ID NO: 459768 - protein, 310 aa, unidentified
MKQAKVYVGIDVAKGHLDVAWEQTRWRIPNDAGGHRELLQRLEQVSGGLMQVICEASGGYERRLLSALARGGIDFSLVQASRVRHYARACGLLAKTDAIDAQLLARFGRAIAPIPTKGLPPEHEQLRQLEDQRRHLVRVLVAQQNRQAQLSNKTLLRLSSRLIAQLRKQIAQLEALLAASIAQNPELSAKARKLTSIVGVGPRTATLLLAQMPELGELNRREAAALAGLAPFNRDSGSLQGKRTIFGGRRAVRCGLYMAALVAARRNPILAPFYQRLRRAGKPPKLALTATMRKLLIALNSTLKTDPIPP

SEQ ID NO: 459769 - protein, 331 aa, unidentified
MTNLVRKYNVGLDIHEEVFYGTVLNEQGEVITEGNVKYSKESIQNFLGSFPSTDVIIAIEASSLARGVCKLLGELGYDVVLADPVKVHYIAKEKKTDKVDSRTLADLLRTGYIKLVYMPTDDIIKLRDISRHRAQLVRMRALNKVRIKSYLSREGTKFPGNWNKATLAKLKEMNLMIANFVNIIELLNEQIYHVENKIKKISKFNSKIQLLTTIPGIADVSAMLILGEIGDIKRFNSPKSLVKYAGLCPGVSQTGKKSHDVTSMANNKWLKWIITECGGRAAMLNKRYLKHYVRVKNRKGYGVARRSVARKMLTDIWYILTKEEPFKKSES

SEQ ID NO: 459770 - protein, 415 aa, unidentified
MSHKYLLKGVLLMVSVGVDVSKGKSTVCMMKPYGEIVKSPYTINHTKDDLLAMVAFIKTLDEEVWVVMEDTGHYHWPILLFLYEQGLRVTCINSLRMKKYCSQSIRRAKTDTIDSVQIANYGLTYWHELEAYVPRTEVFQALRTYSRQYYQYTCVETKIRVNFQNLLDQVMPGISARLADQNGRHKLTEFVYRYWHFYNITNHGKTVFVRSFSSWAKKQGYRSNELIASEIYELAQTGIPVLPCNDSTKIIVQQLAQTLLTVDQTRIDLLSRMDELARQLPEYDLVKKMSGVGDKTVSLLISEIGDVSRFKTKHSLIAYAGIDAPPYQSGKFDATQRSISKRGNKYLRRIGFEVMLSLLRNKPSSDPVYMYILKKKSEGKSSKTAMIAGFNKFLRIYYARVMELYSYIDNTRIAA

SEQ ID NO: 459771 - protein, 342 aa, unidentified
MRIIGCDLHASQQTIAMLDCESGDIVERTLKHDGATVREFYAALPAPVVVGIEATGSMGWFLRLMEELAITCHVGHPATIRRAETRRQKHDRRDAALLLELLTQNRFPSIWMPSTELSDLRALLLHRHQWVGMRTRVMNGLQGLALAHGIRRRAGLWSRDGQAAITALPLPPHAATRRAELQALYGHLTQQIDALDHRVGAQARARPQAARLLTHPGVGPVTALATEVFLGDPSRFADGKAVASYVGMIPSEYSSGARQRLGKITKQGNPLLRLLWCEATIHAVQRDPALRRFYRRKLQQKGFGKARVAAARKLGIRLWILLRDQIDYTEFCRRASVRVAAR

SEQ ID NO: 459772 - protein, 372 aa, unidentified
MKEHSELFIGLDVSKLKISVALAEDGRDGEVRFFGDIDASPASIAALATKLAKRGARLHFCYEAGPTGYDLYRQIIVLGHDCAVVAPSLIPQRPGDRVKTNRRDAVSLAKLHRAGELTPVWVPDVGHEAIRELVRAREGAMEALRRARQQLLSFLLRHGRVYTGRTPWSKAHSSWLCGQTFEHPAHQIVLAEYRHAIEEAEVRLKRLTGQVMEMAASWSMAPVVQAYQAMRGVAFMIAVTFVAEIGDVRRFDNPRQLMAYLGLVPSESSTGERVRRGGITKAGNSRARRVLIEGAWTYRFPARMSRLIQGRQDDVPKAVREIAWKAQVRLCGRYRKLTAAGKLKAVTVTAIAREMAAFLWAIGQVVAPVLAV

SEQ ID NO: 459773 - protein, 407 aa, unidentified
MNYKREGALFVGMDLHKEFHAAVMTDCWGELIATCTVENTPTKYPKFLKEVLRKAAGKPVIFGLEDVSQYGRGMAEYLLSQKQIVKEVNSSYTKRERRRSTSPDKTDFGDARSICDTLIRKLNELPDANPQDIYWALQQVLSNYEFMNKTASALMNNIHTQLMHHYPRYNKLFSDIDGKTSIAFFEKYPHPALLLKAPQTELVDLLHKSKYSPSPRVIQEKAEQILLSIKEAGYKESNQQEAQNELIRSLFRQLSQAKAEMEKAEKQMDELLSKSPYKLSTMPGMGTILAATIIADIGNISRYRSPDCIAKMAGIAPTNKSSGNNQWQVRNRFGKRRLHYAFYMLALNQIAKDNKGKEPRNPIIYEYYMRKQKEGRQPKQAMIFVMRRLVNVVYGMMKSGEAYRPPA

SEQ ID NO: 459774 - protein, 365 aa, unidentified
MTVIHYIGLDVHKKTISYCIKRAAGQIVQQGRLAATRAALRSWAEGLQVPWQGAMEATLFSAWIYDTLKPYAEKLVMGHPARMKAISAGKKKSDSIDARTIADLLRCDLLPTCYVLPPELRDLRRLLRYRSLVVQQSVRMQNKMAGLLMESGTPFDKDKLHGKKYFTALVKSLQEVPESVKDLLRMSRSSMEMFQTTQKQLVERLLSEPALEQRVERLMSIRAVGPITALTWALEIADPHRFASIADAVSYCGLTAAFRSSAGKQQRGPISKQRNAWLQSVLIEAAKLAPRWNPQLAALHAHELERGHANRATLQVARKLVAYLLAVDKSGQPFQVHTPPPPANTMAENKTRRKNKKAAALLPAA

SEQ ID NO: 459775 - protein, 426 aa, unidentified
MRVLYDRVAAIDVHKDMVKVAIRVPGAKRGTRKTDVLEFRTFYGVLQAMARELRRRGVTHVVMEASGVYTDPVYYALRELDFTEVMVINPAHAKALKGHKTDAKDAIRLLDLYECGLLSGSYMPDADLREVRDLARYRMKTVQARTSEIQRLQKALETAGIKLGSVVSEITGGSATAMIEALISGERRGSVMADLAQSRLRTAGKMADLSMALTGRFTDHHALMCRLHRDRIKLFDDAVQDLDATIAPLVARYAREAELLKTLPGFGDVIVAGWLGAIGPAPHQHFATASRLASWATLCPGNYMSAKKSKGGRTGNGGAYIKPLLIQAAWAAVRVPGRLQARFRRLVRKFGGPRNKGAQKRAITAIAHTLLKIAYSVLKTGKPYADLGADFYTRRESPDARQDYLVRQLQKLNPGCVITITPAEAA

SEQ ID NO: 459776 - protein, 341 aa, unidentified
MGEVSTIGMDLAKSVFQVHGADASGAVLFRKKLRRHQVLTFFAAQRPCMVAMEACGSSHYWAREIGRLGHAVRLIPPAYVKPFIKRQKNDAADAEAICEAAQRPTMRFVAPKSEQTQAAALVFRARDLLVKQRTQIINALRGHLAEFGLVVAKGPAHVPHLVRAVADPDEPIPEIARPVLQMLIEMLHQLDEQITRLDREIAQRARENETARRLMTIPGVGPVTAVALAALAPPAETFKCGRDFAAWVGLTPRQHSTGGKQRLGSTSKMGERTLRRLLIIGASAVVRWVARNGAQAGSWIARMAARKPPMLVRVALANKMARVVWALMARGGIYQAPVATA

SEQ ID NO: 459777 - protein, 327 aa, unidentified
MQYIGFDIHKRYTFYTQMDATGQIRRQGKLTNSRDALAQFFGDVAEPARVVIEASMNWYHLYDLLETLAIPVTLAHPLRTRAIAEAKVKTDKVDSTILAHLLRTDLVPAAYIPPREIRDLRELLRYRAVLVRLQTMLKNRVHAILLKHGYECPYTDAFGGQGRAWLGTLPLRPVYQQALQGFLAVLDTLHAQILDASRTIDQEAKAKPLAQTLCSLPGVGHYTALLILAEIGDITRFPGPKHLVSYAGLAPIVRGSGGRVYTGHISKQGSTWLRWILIEAVLHAVRRPGRYQQIYQRLAPRKGAKLARVAAARELLTTIYWMLRHAH

SEQ ID NO: 459778 - protein, 386 aa, unidentified
MQKLNDLSRSLAPLKPDGTLIAVIEMSQSSWLVAGIVPGVERQPLKKLAADEIALLKLLHRWREEAEKAGRRIERTAVAFEAGRDGFWLARWLRTRSIEAHVIHASSVAVSREHRRAKTDRLDTELLKRAFLGWLRGERDHCKMVAVPTSKDEDAKRPNRERESLVGEQTRIINRMKATLIRLGIRGFNPKLKKAAGRLEDLRTPEDEPIPPNTMAELRRDMDRRRLVSDQIRQIEEARLDRLKQAPDDGPHAMLRLLARVIGVGIETADMLVQEVLARNMRDRRAIARYAGLTGSPDESGTKRREKGLARSGNARVRRGMIQLAWRFLIFQKNSTLAQWFRARTENARGTRKLMIVALARKLLIALWRLVREGVVPDGVVLRPTQ

SEQ ID NO: 459779 - protein, 414 aa, unidentified
MEVVHPRCCGIDVHQRSLAVCVSIKEGPKAEKYKLQCGTTTAELMRLGDWLRGHGVTHVAMEATGVYWKPVWHVLEGEFQLLLANPTQVKALRGRKTDMKDGERIADFMQHGLLEGSFVPPPAIQELRDLTRNRTILKQEQVGVGNRILKVLEDANIKLSSVMSDVLGKSGKAMLRAIVAGETDAKALAELSRGRLRGKKAKLQEAAEGRLTEHHRFLLEQWLTIWEQLEERIGKFAERIEEKIRPFEPVVKTWASLPGIDRVTAWTVVAELGADMAQFPTAGHAASWAGLCSGQNESAGKRQSGRTRQGNVWLKQALCQAAWGASMTKGSYYKALYRRMAAHKGKSDGGVKKRAIVAVAHSLLVTGYILLVSGKEYSDLGADYFDRLDREKLTKRLVKRLENLGHRVTLQPAA

SEQ ID NO: 459780 - protein, 315 aa, unidentified
MDQTATPACFVGIDVGKANVDVELRPLGETLCVPRTGAGLEQLAARLRAVSPTLIVLEATGGFERVVLATLAGAGLPVVMVNPRQIRDFARATGRLAKTDRLDAQIIARFAEAVRPEVRPLPDAAAQDFADLAARRRQLVEMISAEGMRVDQAVHKKVRRRLAAHLLWLNKELSALDTDLDEAVRGSPLWVERAALLTSVPCVGPTLTRTLIADLPELGSLDRRQIAALVGIAPVAHDSGKHHGARHIRGGRTTVRAALYMAAWVGCRYNPVIKAFYERLKAAGKPHKVALVACMHKLLTILNAMVRTNTAWKTA

SEQ ID NO: 459781 - protein, 409 aa, unidentified
MEAVHPSCAGIDIGKRSLTVCVIRGDRSGEPVKEIRTFRTLTRDLLALADWLERCGVTAVAMEATGSYWKPIWNLLEERFELLLANAAHLKAVPGRKTDVRDAEWIAQLFRHGLLRASFIPPRPERELRELVRYRTSLIRERASEINRLAKVLEGANIKLGSVSTNIGGVSGRAMLTALTEGVTDPEALASLARGRLRNKHDVLVEALAGSVGPHQRFLLGTQLRHLADLDALIGSLDAEIKERLRPAQGLIERLSTIPGVGGRTAEVILVEIGQDMARFGSSRQLASWAGMCPGNHESAGVQRGGRTRRGSPWLRTALVGAARSASRTKTYLGAQYRRLAARRGAKRAFVAVGHTILGMVHAVLTTGRPFDDLGVTYFDRRDGEHLRRRLTRRLEAMGYVVTVEPRAA

SEQ ID NO: 459782 - protein, 427 aa, unidentified
MSAPASNPTHLVGIDVAKEVHVAAGIVPEGTVVFAGREIRYTRQDLDSFETFLATQCPRETTLIGIEATGHYWIQLRRFLVDHGWSVLVFNPVHSGVLSRANARGRVTDADDALTIARVLRDRIPPSQILSPAMEHCRELTRRRALVAERRVEEIQHLQAAVDVMFPEFAAVMGRVEKASSLAVFEMAPCSDAILATSRARLAEVISRASRGQSDGDHLAQILQTAAATSLARGYREAGRETLIAHLVRALRQLDDELEALDRAIDPLITTLPQEARQLAELPGFGPITSAATIAEFGDLTRFVTVDAGGKRHVRAGAMLAFAGLDPRICQSGRWTGTPRMSKRGSPHLRRAIMLAATGAAQRDPWCKALYLRYRQRCAVRGHWLATSHVARHLIHAIAAALVYGKDFTWQTYIANKKAKIVTRDAA

SEQ ID NO: 459783 - protein, 341 aa, unidentified
MEQATTIGLDIAKHVFHVHGADAAGHVLFRKRITRAKLLGFLAAQARCVVAMEACAGAHYWAREIAKLGHYVRLIAPVYVKPFIKRQKNDAADAEAICEAAQRPSMRFVPVKTEEQQANGIVFRARDLLVRQRTQCVKALRGHLMEYGYVFPKGITHVETLVAVVEDLQSSLPDSVRVILKLLVDTFTALEAQIAALDAEIRQRSKSDPTARRLMTIPGVGPIASTAITALVPAAEGFPAGRDFAAWLGLTPLQKSTGGKQKLGAVSKRGERTIRRLLIIGASAVVRQASRRGAPKGSWLAQMLARKPKMLVTVALANKMARIIWALLVKGGTYRTPTAAA

SEQ ID NO: 459784 - protein, 410 aa, unidentified
MEVLHTHCAGLDVHKESVVACVRHMTDGKVTTHVKTFKTTTQELIALSDWLSAEAATHIAMEATGVYWKPVWHILSDGEFELILANAAHVKNVPGRKTDVNDAVWLADLMAHGLIKASFVPDEPTQQMRDLLRTRKQIVRERSSHIQRIQKTLEDANIKLDSVVTNILGLSGRRIIEALIAGQTVPNALATLAHRNLKATTDELEASLRGRVTRHHRFLLKLHLDQIDAIDAAVARIDEEVNVNVEPFRVAIEMLSAIPGVGDLSATVIVSEIGIDMSRFETAGHLISWAGLCPKNDESAGKRRSNRMKKGAPWLKSTLVQCAWCASRTKGSYLQAQYLRLRSRRGAKKAVCAVAASILTAAYHMLKNGTVYQDLGASYFDNRAKDKQAMRLVNRLKNLGFEVQITSLAA

SEQ ID NO: 459785 - protein, 345 aa, unidentified
MHIASIGIDLGKTTFHRVALGERNKVLLRKKFSRPQLLAYTANLPASLVGLEACAGAHFLGTALREQGHQVRLIPAQFVKPYRKSNKNDFLDAEAIAEAVTKQNMRFAQLKTQEQLDWQAMHRVRDRLVRRRTALINEIRGFLLERGITFAAQPIHLRKNLPTVIEDAEQNLSPRLRWLLDRMWQEWKQTETEIQAITDEIERISNEDARCRQLRQIPGFGPLVSTATVAAIGNGSAFRRGRDFAAWVGVVPRQYSTGGKQKLYGISKRGNVYLRRMLIHGARSVLFRVKYDTGGFGQWVRRLAQRAPHNKVVVAIANKLARIAWAVLSSGQDYRHQPLQQPAAA

SEQ ID NO: 459786 - protein, 325 aa, unidentified
MFVGLDLHKRYSEFATMDIFGNVLRQGRIENTLEEMKTFSESIPAQSSIAIESSSTWYWAHRLLSERHRVVLSNPIKNKAIASAKVKTDKIDSVMLATLLRGGFMAECYVPSRETMEFRELVRYRANLVRQRTRMKNQVHAYLLMNNISIEAGPFTKGFVEEVRKIDDARVQGYLRLIDGLNREIREASATIRQKAGSNEDANLLMTIPGVSFYSALLIVSEIGEIGRFEDSSSLVAYAGLAPSTHSSGGKTYHGPIMKSGSRYLRWIVGQCTRVHMRAEPGGTVASFYARLARKKGDQKAIVAASAKLLKIVYWVLRERRSYHS

SEQ ID NO: 459787 - protein, 415 aa, unidentified
MKVVFPICCGVDVHKTFVVATIITTPADSLQPIYQKKRFSTFNSDLNRFADWLLEHGCLDVCMESTGKYWVPVFNILEKRGIQVVIANPKWVKAVKGNKDDTKDSKWIGDPFRIGLVKSSFIPDLNIRILREFTRYRYKLISMKSSEKNRFQNAFTVCNVALDSVVSDMFGKSATAITDYLTSDESFDPEHCVSLLQRSLKKKAEQVLESIDGFSIAEEQKARIKIIREHYDFIEKMIAKVDTCVNEMVVTYEGEINFLCTIPGIDRNSAITIISEIGTDMRQFGSSKRLCCWAGLTPGNNESAGKKKSVRISRAGVYLKPALVQVAHAAVKDKENPYYALKYERIAKRRGKKRAIIAIARMILTAIYSMLCTGEIWNPVDLYKIDMPEHLKEQQLAKAIKQATRFLEKHGLSVA

SEQ ID NO: 459788 - protein, 357 aa, unidentified
MKQHKNNKKISFKGKDFFIGIDVHKKTWYISIRHNGLLIKSFAMDPIPEILVNFLNKNYPCANFFVAYETGRFGFWIYRKFKKLGINCMVVNPADIPSTHKEKDKKSDKIDSIKLARELENNNLKPIYIPPPEAQHLRSLVRLYLNYTKNITRTKNQIKSFLDYNGITLPKHTSSWSNNFINHLYSITIDNGPGDKTLHSLLNILCFSRKEQNDILKQIRKFINNSYFKEVFYLLKTVPGIGSKIAFIILSEIIDMKRFKNFDQLKSYVGLTPSVYSSGDTYYEYGLTYRKNSRLKYALIEASWVAIRKDPALLESYNKLITRMKKQQAIIRIAKKLLSRIRHVWLNKQPYVTGIVE

SEQ ID NO: 459789 - protein, 331 aa, unidentified
MATYIVGCDVSKKKLDLALLLSVEPLKLRSKVVENHQPGWMALIEWACRQASCSPGELHVVMEATGAYHEAAAYALTQAGVTVSVVNPALVRDFARGLAIRTKTDATDRAVLARYGATVKPPLWQPPAPEVVELKGLINRLQVIETDLARESNRLEKAQVSVTPKVVLDSLHKSLAFLEREKRELAKRINDHIEGHPQLKRDRELLESIPAIGRKTASRMLCVLHSRPFRAAASVAAYLGLIPVQHQSGSSVYRPPRLSKAGDGAMRAALYMPAVVASRVNPDIRAHYERLLAQGKSKMSALGAAMRKLVHICFGVLKNQQPYQPRVPQNA

SEQ ID NO: 459790 - protein, 456 aa, unidentified
MPRGQRRTTRAVTTPVLHPHAAGIDIGATELYVCVPLDRDPQPIRRFGTFTEDLLALAAWLAQCGVTSVAMESTGVYWIPLYQILEERQFEVCLVNARHVKNVPGRKSDVQDCQWLQYLHSVGLLRGSFRPPETVCAVRSLLRHRDSLVQLAATHTQHMQKALTQMNLQLHHVLSDITGVTGLAILDAILAGERDPQELARHRDPRIKASPETIAKALVGDYRPEHLFTLRQSLASYRHYQQLIGECDGEVQALLGDFASQIDPAVHPLPPSTSARRTPHGTAPRFDLRAELYRVLGTDLTQVPGLQTPTVHTLFAELGADLSPFPSGDHFASWLGLCPDNRISGGKVLSVKTRRVKHRVAQALRLAAQSLSRSQSVLGGFFRRMRAKLGAPKAITATAHKLARIVYHLLTTRQPYDESRLAAVEADHRRRTESRLRTQARALGFQLVPVTEQSVS

SEQ ID NO: 459791 - protein, 364 aa, unidentified
MISVPPNATVLGLDVHKFSITSAVLEPGSDSPVLDRLGADRESIRRHVARLGDNGRVWACYEAGPTGYELARYLRSLGVRCEVVAPSLIPVAPSDRVKTDRRDARRLARLYRAGQLVAVNVPSPAEEAVRDLCRARADMVIDRVRAQHRLDRFLLRHGRVFTDGKNWSAKHESWIAQQRFDEEAASATLAHYRSALSARWAELEAIEVELARYFTRPPFATAVARLSAYKGVTELGALTIASEVCDWRRFPTAGAFMSFCGLVPSEHSSGEQVWRGGITHAGNFHLRSHLVEASWVYQRQPYVGLALKRRQHDAAPELVARSWRAQLHLSRKFRRLDEKKSVRKVVVTAIARELAGFLWAEMTA

SEQ ID NO: 459792 - protein, 334 aa, unidentified
MNPQVFIGLDVSKQHLDVAVRPQNRHFVTPNDDRGIKQLVKRLAALKPQLIVLEASGGYEFLVTAALAEAQLPVALVNPQSVRKFAGATGKLAKTDKIDAQVLAHFAEALRPEPRPLPDQAQQRLKAALQRRLQVVKMIGQEKNRLEKTFIPAVRQDIQAHLTWLSQRLEQLDRDLSDQIRQSPLWRDRDRLLRTIPGIGPIVSRAVIAQLPEAGTLPGKKAVALVGVAPYNRDSGRFRGKRMIRGGRSYLRRMLYMAAVGGGGVSGGPALAAAYEYNRGLRPKVSLFLIMGCGVKSRGDVQTYFDLGADAVSFCTLALRDWAAAEKILTSYNR

SEQ ID NO: 459793 - protein, 331 aa, unidentified
MKQKYNRVIGIDVASDKIDVNDSAGKIAKQLPNTISAISKKLFKRIQDTENTLVVCEATGGYEYLIVEAAHDAGVPICVANPRQVRDFAKGHGYLEKTDVIDAFMIRRFGEDVEIHLTPPRTAQEKEFLSTVRRRTQVKDLLSQEQNRLSQTRDKFAAQQIKETISHLKKQLKSLDKRIEKMLKDLSKVDPKVEILFSVSGVGPVTAATLLAELPELGQLNRGQIAKLVGVAPLANQTGKSDKKRKVRGGRSQVRSVLYMATLVATKHNPVIKRFYDRLIAKGKIKKLALVASMRKLLTILNNMIHCGESWKNPQVNAKKEQKATTAPSLN

SEQ ID NO: 459794 - protein, 331 aa, unidentified
MVTLGIDAHKRSHTVVAVDELGRKLGEKTHGTATADHLELVIWAQRFDPQRQWAVEDWRRLSRRLERDLLAAGERILRVPPKLMAHARDAARSYGKSDPIDALAVARAALREPNLPTAQLDGPDRDLRLLGDHRDDLVQKRTRVINKIRWHLHEIDPTWQPPARCLQRTKNLNEIAARMDGHDGLVPRLCLALVQRCRELTEQIAKLDKEIAALAEKLAPSLMAITGCGALTAAKIVGETAGVQRFKSRHAYARHNGTAPLPVWSGNRERHRLSRIGNRQLNAALHRIAIAQAHYHPAARDFLQRRRASGDTTTEALRPGSASRKSAHRVA

SEQ ID NO: 459795 - protein, 384 aa, unidentified
MKNDNIVFIGLDTHKEQTQVSYTLDHRTAEVNDLGRIQTTKTGFVKLARQLQSKYPHATLHFVYEAGPCGYWIYRLLTSLGHCCFLVAPSLIPKKPGDRVKTDKRDAQNLTRLLKNNDLDPIYVPEPEDEAVRDLSRAREVGMRDLNDAKHQLKSMFLRNNIRYSGSDSWSLKHLRWLTEIVLPHPCQQIVLQEMIQIISERMARLKRLDNELTHQVKLWRYYPVVKAIQAMRGVRLLIATGLAAELGDLSRFDTPRKLMKYVGLTPSEHSSGNTRKLGSITKCGNGRARRLLIEGAHSYRHAAKISKEMQLRQEGLPKTIIDKAWEAQMRLCRRYQRLIMRGKPRNVVITAIAREMIAFIWSISREVVLPRVDPKTRLSRVPA

SEQ ID NO: 459796 - protein, 315 aa, unidentified
MNEAEDVIVGIAVAKAALDVAVRPRGEARQLANDATGLGALVGWMQALSPEVIVVEATGGSEAPLVAELGIAHLPVAVVKPRPVRDCARATGRLAKTDRLDAQAVAHCGQAMRPTPRPLPDEDAQALAALVERRRQVVAMRTAEEHRLGATRVAAVRARIQAHLAWLEADRGEIDGDVHQQVRARPLWREKDERLQSVPGSGPLSALTLRAEWPEVGRLSHGQIAALVGVAPLNRDSGTLRGRRAVWGGRQAVRPALSRGTLRATRCHPAIRLFYDRLLAAGKAKKVALVACMQKLLTILNAMRKHQTPWQAQAA

SEQ ID NO: 459797 - protein, 349 aa, unidentified
MNTQRLSYIGQNVYVGVDVHKGTYTVTCVCNKQIVKTATVPADPAGLAASLPRWFQGATLSSVYEAGFSAFVRHRALTKAGLTNIVVNPASVAVAANDKVKTDRRDSKKLAMDLADGRLRGIYVPTEAEELARLLPRTRAQIVEHRATIARQIKAKLHQFGLIAPASRRLISNRYLREIEAWTLPPELRVSLTVLAEQWRFATRQLVAMRRLLREQAKAQEVIEKVYRSVPGIGEVVARTLATELGDMTRFANERALFSSTGLTPSEYSSGTSVRRGHISRQGSRRVRRLLVETAWRALSRDEVLQAMFDRIAATRGKKRAIVALARRLIGRIRACFRQGTTYAVGTYA

SEQ ID NO: 459798 - protein, 320 aa, unidentified
MMTQNDLVVVGIDVAKDKIDACIRAVMERKTCPTAASGRRSLITWLRKHRVGKAVMEASGGYERVWAKALRQAGLEVRIVDPKRVRHFAESAGRLAKNDKIDAEMIAWFAETFSEAPSQIDDPAQEEMKALVKGRQGLIDVRARLEMQKEHEAPVRVRQARARLLKKLADEIAAIETTIAATIKTRPDFAKRAEIIQSVPGFAEGTAMALLGGLPELGQVSDKVAAALVGVAPYDDDSGKRRGERCIKGGRRWVRNALYMPCVGAATLSNPVFKAFYERLIAKGKPSKVALVACMRKLIIILNTMIARGEKWDPKRYKMA

SEQ ID NO: 459799 - protein, 353 aa, unidentified
MAPTRRIIVGVDTHSATHCAAIIDRHGRLLGCAEFAASASGYDQLIAWARKFGCVGSVGVEGTGAYGAGLARHLASLDIEVFEVPRPDRRLRRSRGKSDTIDAEAAARAVLAGTTTIAPKLADGPIESIRTLRVARMGAIKAKTAAVNTLKSMIITAPEPLRAQLPASGLPNKIIGACLKLRPDTTQLHDPTQATKAALRSVAGRAKALREEVAVLERQLSQLVAEVAPTANGTFAMGPDTTSALLVAIGDNPDRLRSEAAFARLCGVAPIPASSGKTNRHRLHRGGDRSANRALHIAVIVRMRYCERTRAYVVRRTGEGLSKPEIIRCLKRYLAREMFQALRTAYQALHRPT

SEQ ID NO: 459800 - protein, 386 aa, unidentified
MQEETFIPQDYDVFAGLDVSKKSIAATFTDGRGFIRSLQMPHKVDYLLNHVRKHFAEQKIAFVYEAGPTGYGLYDGLAAEGYRCLVAAASMIPRAPGKRVKTNRLDSRALSEGLRGGQIKSIHVPSCVYRELRHLTQLRDTMVRQAAAHKQRIKSVLLLEGIDFPAAAPGRQWTLRVKAQLRKLQCSRTVRFKLDQLLDSLEFSEKQVLSSTKEIRRFCQEDQELSQSIQYLMSIPGIGWIVASQLLARIGDWHQIENVRQLASFLGLIPTENSTGESVDRGSITRAGDGRLRSKLIQAAWSAIRQDAELREFYRSVCRRNGPGRGARIAIVAVARKLSTRVYAVLKNQRPYIVREQVHSAPLTQEETSPQGTPRRCAEPGETKNS

SEQ ID NO: 459801 - protein, 353 aa, unidentified
MRTYYVGMDVHQASIVIAVLNGAGKLVSEAIIETGAETVRNFIKQFRGKVYVTFEEGTQANWLYEVLRGVVTEVVVCDPRHNKLLQSGNKSDQVDARKLAELLRNGSLRAVYHGDKGTRLLKELVRNYDCLVNDTTRVMLRLKAIFRGRAITCAGHEVYRKDRRQKWLGKLSEPGAKLRASSLYEQLEMLRRLRHEAKRAMIKEARRHPAYPLLISVPLLGPISVAQIIAVVQTPFRFRSKRQFWTYVGLAVVTHTSAEYVLVDGLVRRSTRPVATRGLNRNHNHLLKRVFKTAAQSASAREPFKAAYEARLAQGMDPSLARLTIARKLAATTLSIWKRGERFAPERMKPQVA

SEQ ID NO: 459802 - protein, 340 aa, unidentified
MKAYCAIDLHSNNNYLVVIDDQDNILLNRKRQANDIGVVLDALSHIRIPIEQIAIESTYNWYWLVDGLTDAGYRVVLVNTSKVKQYEGLKYGNDESDAFHLAHLMRLGILPTGYIYPKEERAVRDLLRRRLQLVRQQTTQILSIQNQLTRHTGRQFTANVVKKLTASDIKHRLADPNVQEGVLSNLTILNVLRSTIQSIEEKLLVQVEIKPAFQKLLRIPGIGPILAMTIMLETGDIHRFKKVGNFASYCRCVNTQWMSNNKQKGQGNRKNGNQYLSWAFIEAANYAIRFNERAKKYYQRKTAKTKRVVALKAVAHKLARACYYVIRDNEEFDNQRLFCN

SEQ ID NO: 459803 - protein, 343 aa, unidentified
MKLHVLGIDLGKTVFHSVGLDVTGKVVIRKKCSRRQLLAFTANLEVQLIGMESCSGSHFLGRALREQGHEVRLMPAQYVKPYVQTNKSDYLDAEAIAEAVQRPRMRFVPIKTEEQLDLQALHRVRERWVMRRTAVVNQIRSLLLERGLTLPKGRSYLDRQLPGILEDGELRLSGSFRVLLAQLKLELEQLTARVEEMDRVIQKTAKENEDCQRLTEIPGVGPVTATALIAAVGNASAFQKGRNLAAWMGIVPGEYSTGGKQRLLGIRKRGNKYLRTLFVQGARSVVQQRNKQSPGLSKWLAELLARAHQNVVIVALANKLVRMAWAVLCKNERYRAPVFAGTT

SEQ ID NO: 459804 - protein, 427 aa, unidentified
MLKINYMSTLFVGIDVASKSNVVCAMDFYKNQLIKTSVTNNQPGAYDLICQIVSVMQKHTDLNTVVVALESTSIYSVHISNYLSSCEELMPYHPYVFCLNPKMTANYRKSFIGMNKTDTLDAFIIADFARAGRIETDPWRGPQFLALQRLTRHRLHLVEAQTREKTYMVSNMFLKFSELSILPKEEQPFCNNYGTTASSVLTEFLSMEDIINTSPEELITFLCEKSKNRIADPSKTAGLLQKAARDSYRLDRCLYDPINISLASSFNCIDAFKQEIKTIDKAILKTIAGLNPNAYTILTSVDGIGPVFAAGILAEIGDITAFHSQDALAKYAGLTWTKSQSGEFEADESRMTKAGNRYLRYYLGEAANSLKNQVPEYRDFYYKKYNEVPKHKHKRALALTSRKLVRLIFGLLTKEKLYSTDRADALS

SEQ ID NO: 459805 - protein, 344 aa, unidentified
MIVLGADTHKRSHTIAGVGATTGELLGERTVQVGRAGFGALLAWARALGGERVWALEDCRHVSGSLERFLIERGERVLRVHSKLMSASRREARGRGKSDAIDAVNVARAALREGLATFPAAHLDGPELDLRLLVDHRERLVIHRVELNNTLQWHLHDLWPELELPGGALFSKKWSTRIARRLSRAEQTMRVRIARDDLRRLRELTETVKALAREITQLIEQIAPRLLAEPGFGPLIAAKLVGEIAGAQRFATDAKLARAAGAAPIPASSGNTRRQRLDRGGNRQINAALHRVIVTRARCHQPTRDYIERRRGEGKTTRDAIRCLKRYLARQVWNLLRASPRTRP

SEQ ID NO: 459806 - protein, 392 aa, unidentified
MMNAVGIDVSKNKSTVTIRRPGDEVVLPPCDVRHTRSSIDALINEIKSLEGETKVCMECTGRYYEPMATWLTDAGLFVSTVNPVLIKDFGDDSLRAPKTDKADSKKIARYTLDRWTKLKQYDLMDETRNQLKTMNRQFGFYMDQKTSMKNNLIALLDQTFPGANDFFDSPVRPDGSQKWVDFVYTYWHVDCVTGRTLDAFTEHYHKWCSRKGYNFSAAKAKTIYDVSKDLIAVFPKDDVTKIIIHQAVDLLNAASKTVETLRARMDETASTLPEYPVVMDMNGVGPTLGPQLMAEIGDVMRFEKRGSLTAFAGVDPGKNESGQYVQKSVHTSKKGSPHLRKTLFQIMDGLIQRSPVGEPYYVYMTAGANKFLRIYYGRVKEYLKSLEANESE

SEQ ID NO: 459807 - protein, 314 aa, unidentified
MNNTEIQTPVNVGVDVGKANLDIALHPSGQFYTVPNTEAHIRQFVRILKNYEVERIVVEASGRYEHALVQACDQAGLPIIIVNPISVRRYAQAIGVLAKTDRIDAQIIAQYAATLKPEYKPIPDKTSQKIKDLLVRRSQLLEMSTMEKNRLQILPRSLHRSIKSLLRMLQNQIETVTLQIEQEVAKVDQWRTKIEIMTSVPSVGKVLAYTFVSELPELGSLNRKEIAALVGVAPINRDSGKLNGKRRIQGGRHRVRTVMFMAMLSSIQCNPVFKRFYERLKAQGKIPKVALIACIEKDDCGTQYHDQKSGILAR

SEQ ID NO: 459808 - protein, 347 aa, unidentified
MKKVVKQVLGIDVAQDELVCCFGKMHDDFTPELISHKTFLNSSKGFESLLEWVGKLSEASVAVRYVMEATGIYHESFAYFLHDQGLDVSIILPNKISNYARTLNVKTVTDKTSSEAIALFGLERKLDNWDPPKGIYKKLQQLSRERSQLMDEQTVIKNQLHAEKAEARPYKNSIDRANKRLALIKKQVQDIREELEELLKSNDEVKEIAILLCSIPGIGMITAATVLGETNGFNLIRNKRQLTSYAGLDVKEKQSGTSVRGKATISKKGNKQLRKAMHLPALAAIRYDERFKSIFVRLVSKHGVKMKAVVAVQRKLLEMTFTMFKSKKKFDKNYFKGAEEIVEQVAE

SEQ ID NO: 459809 - protein, 481 aa, unidentified
MKTKPPEKIQKATSPSTRGHWNEMNRKQRREMMRQIQSEDLSLEVVHPHAAGIDIGNESHYVAVPPTRDSQPVRHFGCTTVELKALAEWLKQCGIRTVAMQSTGVYWIAVYDILETAGLDVYLVNARDTKNLPGRKSDVQESQWLMKLHTYGLLRNSFRPSQEIRTMRTYWRQRNDLIRAAVSHIQRIQKALTQMNIQLGNVLSDVSGVTGQAILKAILAGERDPHQLAALRDPRVKASEEQIARYLEGNWQEDLLFVLKQEQEAYEFCQQQMAECDRQLQQYLQQREDRSQGASLPQEMRKGRLVRKKGNKPGFALRAELFRITGTDLTQVDGIDVVTAATILSEAGWDMSKWEDEHHFVSWLRLCPDNRISGNKVLGKGRLPTNNRASIALRMAASTLRLSNTYLGAQFRRFRTKLGAPVAIKAMAAKLARLVYRMLRYGMKYVDQGAKIYEAQHRQRQIGQLKWNAAKLGFRVVEAAT

SEQ ID NO: 459810 - protein, 344 aa, unidentified
MFYAGIDAHMKSSTIWIVDRKGRKVSSSTVMTSAEGFAAGLGRWVRRGLKAAIEASGITPWVCQLLKDLGVRVVVVNPNRVRLIAESRKKADRVDAETLAELLRLGGLPEVHQPSLEARRLRTELSVRRQLVRQRTGLINQARGLLRGWGVMLPVRFFQSRGGWKDLQAKRLPEYLRSLLETMKGVYEQLTQAIRQVEMTLKQREHSDERVARLETIPGVGRVSALTLVAAVDKIARFGRAKQLTAYNGIVPTVRSSGEREQQGSITRQGRSEVRAVWIQAAHSLVRSRAPGARPLQKWFWKVARRRGVRTAIVALARKMLSLAFYLLRDGTRYEPLRLRHAAA

SEQ ID NO: 459811 - protein, 349 aa, unidentified
MNRINNNEEKSIYQYDHYLSLDWSQKNMAIGRMKKNSIKPQIMDVKSDIKEAKKYFSGLKGSKILTIEETTSTHWLAVELKESVDRILICDPYRNRLLNQGPKTDKIDAGKLCQLLRANMLHEVYHNLEEDYSIKKLVSAYDDLIKFGVRLQNQRSAIYRAEGLNHKKDNLPEDNATLQFIEQSQNKAIELYNEEKKEYHKYFDKIRRQNKLIGKLECIPGIGTIIAVKIYGVVIDAHRFINKYQYWSYCGLALNQKESGGRSYGKRKPRYSRKLKGAYDSAAMAAIGGNNDIADYYNQLLEKGLSVKQAKQAVARYISKVSYGILKTGENYVPYKWRQTQQDKGSNLK

SEQ ID NO: 459812 - protein, 378 aa, unidentified
MIKYSIGIDISKKNFHVCLSSVDVLQHVKVHRSGSFANSKVGFEQFHKWIKASCSQQNTPLFIVMEATGVYYENCAMYLSSQGYNVSVVLPNKAKKYIAALGVKTKNDKVDAKALSCMGAQQALDLWQPFSEFFYELRSLTRYNQSLKEMRTSLTNQVEAAEHSMHPNEKILEGLKKIIAQIDDQIEENVKAISTHIKSDPEVAEKVRYITAMKGVGELTVATVLGETNGFILFTSSSQVVSYGGYDVVENDSGSHKGKTKISKKGNGRIRRILHMPALCLVKYRVKPFINLFERTLAKHNIKMKSYVAVQKKLLSIIYTLWKKGEMFDENYGDTTYDVEVEHSSRVSFAEAEQNSPGQAKATQGIQPSTNRRLHPLG

SEQ ID NO: 459813 - protein, 338 aa, unidentified
MELYAGIDLHSNNSVVLVLDENDRAVYQKRLPNTLDKIVQALQSCGTPIKGVAVESTFNWYWLVDGLQAAGFVVHLVNTAAVKQYDGLKRSGDFEDARHLAHLLRLGILPTGYIYPRQERALRDLLRKRSQMVRTRTTQILSMQNLLARNLGARSSSNQLKKWDNEVIDALDFLPEQKLAIKANLAVMTCAHREVDALEREIVNRAKLRADYQQLLTVSGVGKVLALTIALEVGDIKRFDGAGNFASYARMVDSRRESNGKTKGVGNTKCGNKYLAWAFIEAAHFAVRYDEAIKRFYQRKSAKTLAVVAIKAVAHKLARACFHVMHDGVPFDVKRAFG

SEQ ID NO: 459814 - protein, 423 aa, unidentified
MKLTYPICCGFDVHKTFLVATIITSEYVMPHYYQKWFSTFYNGLVAFKKWLLEYDCKDVCMESTGKYWVPVWNVLEDSCHVVIANPKWVSAVKGNKDDKKDSKWIGNLFRMGLVPSSYIPSKDIRILREFTRSRSKLVSMRSSKKNRFQNAFTVCNLTLDAVVSDMFGKSATDIENYLLDTDAVDPEHCVSLLRCSLKKKASDVVEAVSDSNMTPEQKERGRIVQEHFADIDHRIAQLDEIIGDLVAEYEGQISLLCTIPGIDRRTAITILSEIGTDMSQFGSSKRLCSWAGLAPASNQSAGKKKSVRISRAGVYLKPALVEAAHAAVKSTEKQPYYRIKFERLMKRRGKKRATIAIARMILTAIYAMLSTGEVFNPSDLKKFDMPEDLKRKQTLSSTKEAIKLLVSLGLVPAGSISLDALAG

SEQ ID NO: 459815 - protein, 424 aa, unidentified
MPTPPEELIAAWVGIDWADDHHDVALQVAGSDAVEAHRLAHTPDALATWRAQLAARFGGRPVAIALETSRGPLVAALLEAPFVVLYPINPRSLRRFREAFSPSGAKDDAPDARLLLTLLVKHHAQLQPWRPEAPATRLLAYLVQERRAAVELRTALTLQLGAALKDYFPHALEWAGDDLSAPMATAFLQRWPTLAAVQRARVDTVRQFYTQHRCRSRARIAARLAAIRTAVPLTRDAALITARVAVVQLLVAQLRALAPSLARVDALIAEQFAQHPEAPLFAALPGAGAALAPRLLVAFGTDRTRFPSAEAVQTQVGIAPITIRSGRSEQVHWRWTTSTFLRQTFHEYALHSIRESAWARAFYTQQRQRGKSHHAAVRSLAYKWIRILWRCWHDRTAYDEARYHRALHLRHSPLATAVKQHNAA

SEQ ID NO: 459816 - protein, 410 aa, unidentified
MKYYVGLDWAAREHAVCVVDEHGAVTARFAVAHTDAGFAELVTRLTKLGAPAELRIAIERPSGLVVDTLVDRGFAVVPIHPNVVKSARPRYSAAQGKSDAGDAYLLADLLRTDGHRFRTLSPLSDETRALRGMVRTRDDMVANRVVLANQLRSLLGEFWPGAREIFADIDSPIALEFLDRYPTPQAGSSLGEKRLAAFLARHAYTGRRTVTELLERLRSAPRSVAGELEAEAKGDCVRALVAVLRPLVAHIAVLTSAIEHAVEAHPDGKIVISLFRSGRVCAAQILAELGDDRARFISAEHLAAEAGVAPVTRASGKHRAVVFRWACNARLRVALAILADTTRKTMPWARHVYQRAQDRGCEHAHAIRILGRAWCRVLWQCWQQRVPYDPTKHRAAREFILQLADGKEAA

SEQ ID NO: 459817 - protein, 375 aa, unidentified
MQNKVRFLGLDVHADTIAVAIAEPDGEVRSLGTIANRAESIRKMVKKLGSVEQLRACYEAGPTGYVLYWQLAELGVNCEVIAPTLVPMKAGDRVKTDRRDAERLARSHRSGDLTAVWVPDAGSEALRALVRAREAAKQDQLRARHRLSKFLLRTGRRPAQGIKAWTLGYMAWIKQIRFAQMAQEATKLDHLTEVEHMGERVARLEKAIEEAAKLASPEIQEVVKDLQALRGIAPISAVTIAAELGNISRFEGARQLMGYSGAVPSESSSGKRTQRGSITKTGNAHLRRIAIEAAWSYRLRPGVGPALRKRQDGVPEEIKEIAWKAQHRLHKRYSRLEAAGKDRRKIITAVGRELLGFIWAIGTRAEAAVKQRRAA

SEQ ID NO: 459818 - protein, 408 aa, unidentified
MQRYYLGVDWADKSHQLYAADESGKKIKELEVQQTAEGLAEFGRWLDERRSAGTELWAAIEKPQGRIVDFLLDHGVVVYPVNPKALDRARDRFRMSQSKSDGFDAYVLAEFLRTDHTHLRALEPDSAQGQELKMLTRDHQRLLRQKTRLLNQMTITLKEYYPRALEVFDDLETQIARDFLHAYPTPQGLSRMTRPQWKRFAKGEHHLSEARWQELWEKINKPQITIVDHVVRAKAKLLLALVAQLEVGVKAVHDYSQEVERFFAALAAAKIARTLPGAKSATTMPTLWAELGDAKNRWNSFRHLQAEAGTVPVTKASGKSRMVQFRFACKKRLRTAMYWFAFNSLMRCEWANKYYRDQRGKGHSKHQALRALGAKWLKIIFVMWRDHKPYDENYHLANIARHAMRQAA

SEQ ID NO: 459819 - protein, 358 aa, unidentified
MRIIGCDLHARQQTVAMLDTDSGELVEKTLQHDGEELRKFYSQLSHPVLVGIEATGSMQWFLELMEELRIECRVGHPQKIRKAETRKQKHDRRDARLLLTLLAENRFPTIWMPSTQQRDLRTLLRHRHQWVRLRSRVQHTLQSMALNHGLRRGHALWNQEGQHALRALPLAPYASERRAALLTLYPRLQGSIEELDKEVSEEVQQHPQARRLLTHPGVGPITALATEVFLGDPLRFIDGKALASYIGMIPSEHSSGGRQRLGAMSKQGNALLRYLWCEAAMHAVERDPELKRFYRRKLVQKGLGKARVAAARKLGIRLWIMLRDQIDYQEFCRRGKGRQENGSVRAGMPDLDSGPAVQ

SEQ ID NO: 459820 - protein, 352 aa, unidentified
MERKNYRRCCGMDVHKETVVVCVLPPDGEEGKPLKKVYGTLRADLGRMRGWLKLLKVTSIAMESTGVYWRPLWNVLEGQGFELLLANPKQVKALHGRKSDKRDCERIAQFLQDRRLDPSFVPPPEIQRLRDLLRYRLYLLEQRNQTHNKIRDLFETANIKLSSVASDLLGVTGQNIIKAMIAGETSADRLSWKVRGKLRKKEKEVKQSLAGCFGEFHRAMGEWLRKQYGFLSAQIEEVEARTRREMEPHRELIELLDAVPGIDETVGWTVIAEMGIDMGVFPTAGHVASWAGMCRAPMKAPESRRAPGRGRGTVISGGCCCKRHGQRPTKRIPTCGRSFIACSIGRDGGRRS

SEQ ID NO: 459821 - protein, 339 aa, unidentified
MQVTTIGIDLAKNIFQVHGITESDEVAFNRPLRRAQVLPFFARLDPCLVGMEACCTSHYWARELTRLGHEVRLIPPMYVKPYVKRGKSDAIDAEAICEAVTRPTMRFVEVKSVEQQASLSLHRARNLMVRQRTQVVNALRSMLAEFGVYIAKGLARIISFSQGVLAGIQLELPEIAQDVVHNLCGQLDVLHRQMHWYETRLRLEAKRDPRIKLLQTIPGVGPVTASAIAASTGSGHQFQNGREFAAWLGLTPTNRSSGGKERLGRITKMGDQYLRQLLVVGMTSLVRQTKSHPERANKWLTSLLERKPARLVTVAMANKTARIVWAVVTKNEPYIPRTA

SEQ ID NO: 459822 - protein, 410 aa, unidentified
MRKALNTDVHIMPQLERACGLDMHKDKIVGFISSKDGSEQELKEFGTFTCELKDVRDWLTRNKVEHCLMESTGIYWMSLYFILTEAGINVTVANPVHIKQIPKRKTDRKDARWLCTLLLHGFVRASFMPDNDQRILRDYCRSRLFYTWQQTKTQNRLLKILESNNIKLRSVISTIHTKTAMDIIRLLARGVTDKEVLLNCSRGQIKQKRERLTMALEGTLQEHHLIQLQMLLQDYDHVQKQINRLETSIDNIISEHYAQAVECLDSISGIAVKSAQIILSEAGKDMTRFPTADHFTAWCGIAPGNNESAGKRKSTGVKKGNTYLRTAMVSAAWAAIRMKDSYWHALFDKLRKRMKAQKAIMAVARRLLKVVYKTLETLTLYKEKGIAHFVDLQAKAALYYKAQLSWPQSN

SEQ ID NO: 459823 - protein, 345 aa, unidentified
MEIRTIGIDLGKTVFHLIGVNARGEVVVRKKCSRTQLLRFTSNLRECLIGMEACGGSHFLGRALREQGHDVRLMPAQYVKPYVKTNKNDYIDAEAIAEAVTRPTMRFVPIKSDDQLDLQSLHRVRERWVVRRTAVINQMRGLLLERGITIRKGREHLEASLPGILEDADDKLSGALRVLLTQLRWEMQYLHRQIEESDKLIMRIASELEPCRRLVAIPGIGPLIATATIAAIGNGAAFKKGRGFAAWLGVVPGEHSTGGKQQLTPTSRRGNKYLRKLFVLGAHTVLLQRTKQSSGLSTWLASLTARKRKQVATVALANKMARIVWAVLFKGEAYRPPLVPQPAAA

SEQ ID NO: 459824 - protein, 337 aa, unidentified
MRTITVLGIDLAKKNFQVHGINEKYQKIAKKSLKRDEFFQAVIQFKPEMVAFEACGSAHYWGRRFRDAGIAVKMIPAQFVKPFVKSNKSDAADAEAIAIAALQPNIRSVPIKTDWHLDMQMIHREREQLIGHRTQIVNQLRAFIYERGEIANIGKNNALKLAREVLSEDRFSGEFKSCIERMLEQYASCHEMITRIERRICDLGNDNPDIERVLEIPGIGLITATAAVAAVPDKTEFANGRHFAAFLGLVPRHTGTGGKTKILGTSKRGNSYLRKLFIQGAGSALARLKDKSDKVSKWAEALKTKKGANKAKVALANKNARIFYAVFCKGLDYQKAA

SEQ ID NO: 459825 - protein, 426 aa, unidentified
MVRAVGLDIHRDFCEVAIMEAAGLRSVGRVDTSPAALELFAGSLGPDDWVAFEVSGNAAEIARIIEAHVARVVVVSPSDTGIRQARAKTDRLDARTLARLLAAGSLDAVWMADERTRVMRRRLARRAQLMAARSRCKNEIHAVLIRRLIARPEVSDLFGQAGRRWLDELELPLEERESVDAGMRQIEFLERELADIDRLVALDALGWAQVKRLMSVPGVNVICAASFLAAVGDIERFKDPRKLVGYLGLDPKVRQSGPGPGTSGHISKQGSASARWALVEASWSAVRQPGPMRAFYQRVRARRGHQIAIVAAARKLACLFWFLLTREQDYAYAQPSLTKKKLRRLEIAAGAPKYQGRSNIWSTNNAMREAERALAEQAEHAYKNTVRDWQAAQAKKPTVEVGASATTGRASNKPSKGKAARQTTSP

SEQ ID NO: 459826 - protein, 456 aa, unidentified
MQHTPDQPSEPATMSVVNPRAAGLDIGSAEIWAAVPAERDPKPVRPFGTFTPDLYALADWLAACGVTSVAMESTGVYWIPIYELLEARGFEVYLVNARHIKNVPGRKSDVQDCQWIQRLHSFGLLSKSFRPQDEMLVLRAYLRHRADLLQHRAAHILHMQKALQQMNLQLTQVLKDITGLTGLQIIRAIVAGERDALKLGQLRDPRCKHSRDEIAKALTGSYRAEHLFALKQALSLYDAYTAQVAECDAEIERQFSALKPEHADELPPLDKSDKRDSHSKNGPSYAARSLLYEWLGVDLVALDGLNVSSITTLLTELGRDLKAFPTVKHFCSWLHLAPHNDISGGKVLRRRTLKGGNRAGQVFRLAARSVSRSNTAFGAFYRRMRAKHGPKIAIVATAHKIARAFYYMLKNRQPYLGQSAEQAEAQEREREIARLTKKAHKLGLEVVTPAVQPAAS

SEQ ID NO: 459827 - protein, 410 aa, unidentified
MELQIQRGCGLDVHQATVVACLLTVLADGKVKKQIRAFGTTTRELLALSQWLQGEGCTHVAMESTGVYWKPVYAVLEGTFELIVANAQHIKNVPGRKTDVKDAEWIADLLLHGLLRPSFVPPKPIRELRDLTRYRRKLVESRSAERNRLLKVLETANIKLASVASDAFGVSGMQMLTALAEGKATPAEMAELAKGRLREKIPQLEPALEGRMEEHHRYLLKLQLRRMRDLDQDLAELEERIQQRLEPYREQLRLLEEIPGVDWTLAAVIIAELGVDMKVFPTASQLASWAGVSPGNNESAGKRRNARVTKGNFYLKTALVEAAQAATRAKGTYLRDKYYRLKARRGSKRAVVAIGHKILVAVYHMLSDQVSYNDLGDLYLDRLNKEHLTRNLVRRLERIGWRVTLEKAAA

SEQ ID NO: 459828 - protein, 410 aa, unidentified
MEGTIFIGIDVSQQSNSVHVMDHSGNKLWQRSFANSLTGSHELVQQLLETRRTRPVSFFNFGLEATGCYGDQIAMFLRETNQIPRSEKVVRLLNPKQVSRFKKSYSELPKTDSMDAFVIADSLRFGRIGLKGTVVDEKYLALQKLTRSRFQVAKDLSREKNRYLQTLFLKFSTMVQDSPLSDNFGTTAIELVNEFESVDEIAYTPLEELAEFLNQKGKGHFVDPEALAKEIQKAARSSYRLPKAIQDSVNQVLAMQAQTIRFYTQQLKDYDKLIETQMTGIPNTLTSIKGIGPVYAAGILAEVGDVTRFKDQAALANYAGLSWSRHQSGKFEAEQTHLVHSGNRYLRYYLIEATNHVRKHDPELKAFFARKYDETPRSKGKRALVLTARKFVRVVYALLRDNRIYIPRQD

SEQ ID NO: 459829 - protein, 352 aa, unidentified
MDATTVAVDLAKDVFEVAVANRASRIVDRRRLTRRQFETFLDGLAAGTTVVMEACGTAHYWGRRGQARGLHVRLLPVQYVRPYVRRNKTDRTDVEGMLEAHRCAGIQAVPVKSVEQQALQALHRARTQWQAARTARINVLRGLLREQGHPMPTGARTVLARVIAVLDTAGDTLPGLLQTLIRTLVDEVRDLEARVATLDRQLAAVARTHPDAQRLQQVPGIGVVTATAFVGAVSHIHAFRRGRDFASWLGLTPRESTTGMRRYLGRISKRGDGYLRCLLTHGARAVLLAAQRTARERPHRLTRLQQWAVALAARRGHNKTAIALANKLARIVWAVWCRATDFHSPEAAPVAA

SEQ ID NO: 459830 - protein, 311 aa, unidentified
MDAVVGIDVAKDRLDVAVRPSGECFVVARTGAGISELAAKLAMLSPRIIAIEATGGFETVVAAGLAAAQLPIVVINPAQVRAFAQALGKRAKTDPIDAAIIAHFVEATKTQPRPLPDEMTRLLADLVTRRRQIVEMMAAEGQRERRMADKRLRKSIARLRKALEKELAEIDGEIDDHVRGSPVWAAKEDLLASVPGVGPVIARTLIAELPELGSLDRRKIAALVGLAPWTRQSGQWRGKSFIGGGRKSVRTARFMAAMVAARHNPVLKTFRDKLVAAGKPKLVALIAVARKLLIVLNAILRDNRPWQPKTT

SEQ ID NO: 459831 - protein, 324 aa, unidentified
MMYFLGCDVCKSKLDVALINEQGVAQWYDIVPNETGVITAYLMTVNGHYVGDEITCVVEATGCYHHPLTDACQAVSVPCRVYNPILTKQGIKGSVRGKKTDKTDALLIARMGLRGEGRLDTPEPYRSTKYTARAQQRLGQMAGAVQRYQIHLENVIEYDLSIEARELLSSIQRQFAITRKQIVVDTAAGAPKDLMRQLQTIPGVGPFIAASLIGEVQTMERFTTAKSFIAYAGLDPKIRQSGHTLNSTGRLTKRGSIYLRRSLFIAGNIARRYDPYFKALYDKKRSEGKTYTVAICVVARKLATVARALWLSGKDYNVDYWTRE

SEQ ID NO: 459832 - protein, 337 aa, unidentified
MTLLGIDIGKHSFHLHGQDSKGHQVLRKKTNRGQLLSTLAQLPACTVVMESCGGAHWLARQIGALGHEVKLIAPQYVKPFVKGNKNDFIDAEAICEAASRPAMRFCSIKTAEQQTLSALHRVRESLIGHRTVATNQIHGFLLEFGISLPIGVTALHRVPALLDDPQHPVPVRLKGVVMRLHRQIQQLNDEIKDIESDLKQQLKEDDAGSRLQSIPGIGPITASAVLADVGDASNYRSGRDFAASLGLVPKQYSTGGKTVLQGISKRGDKHIRQLLVQGARALMQHIDKREDALGPWVRELLTRRHANVVACALANKLARIVWAVLAKGGQYDPHPNV

SEQ ID NO: 459833 - protein, 341 aa, unidentified
MNHIGIDLGSRESQVCVRNSAGDILEEARRPTRTLGPWLATQAPARVIVETCTEAFRLGSIARQHGHDIRVVAATLVRSLGIGQRGLKNDVRDARILSEASCRIDLPSVHIPTVISQEIKAICVSREALVRMSTVLINRVRSYVRSRIGHPLRATPKTLPGKVRRALLTDGEGLPAHLDRVLVVLETLREQIADADRELKILAQADDRMRRLMTVPGVGPVTSTRFVAALDDVHRFPDAASVASYLGLIPGENTTGFRTRRTHLTRAGSPQVRWALGQAAWSLYRHRANDPMVQWAKQIATRRGPQVAIIALARKLAHVLYAMWKHETAYDPVRGARPIAA

SEQ ID NO: 459834 - protein, 341 aa, unidentified
MTIGIDLGDIWSHYCTLNEDGEVVDQGRFRSNPCGVDKRFRDLGPARVAMEAGTHSIWVSEQIRELGHEVIVANVRELRAISHSDRKSDKVDAEKIARYARLDPEILRPIAHRTVAQQETLTLIRARDVLVRLRTAAVNSVRGLAKPCGYRLPASSTLAFAKRCQAVLPPGLATALGPLLHQIADMTVKIKEYDRAIKQLTETEYPETQALIKVYGVGQLTALTYVLTLGSKERFQRSRDVGCYLGLRPRRSQSGDSDPQLGITKAGNGYLRQLLVECANHVIGPHGKDSTLRRWGLSLGARGGSHARRRAVVAVARKLAVLLHRIWVTQEVYVPFYEVAA

SEQ ID NO: 459835 - protein, 424 aa, unidentified
MDLLHPCCAGMDVHKNNVHVCIRKAGQSGQVVEEFRVFGTTTRELLALAEWLVQSGVSDAAMESTGVYWKPVYNLLEGRVNVLLCNARHVKNVPGRKTDTKDCQWLAQLLQYGLLRASLVPPRPVRELRDLTRTRASMEEDKTRVANRIHKVLEDANIKLSGVATDIFGVSGRQMIYALIGGQTDAAQLAKLARGQLKKKESRLALALEGHVTEHHRFMLRLLMDQLREIEGTIEKVDARIEQMMGAERDAKAMGENARPFGAALTLLVEMWGISRRSAENILAETGTDMSRFPSHQNFTSWGKMCPGNNFSAGKNRSSGTGKGNPWLRRALVQAAWAASRAKKSYFASRFKRLSARRGKQRALIAIAHSMLKAIYYMLRDGVEYRDLGPGHFENLNQDKAQRYFVKRLQALGFDVALTRRAAS

SEQ ID NO: 459836 - protein, 418 aa, unidentified
MKSASTTPSSKLSARPANGVTGGVDWASEDHAISVVDHDGRQVARKTIDHSAPGLRAMVKFLAQHGVTEVAIERGDGPVVDALIDAGLTVVVISPNRLKNLRSRYGSAGNKDDRFDAFVLADTLRTDRTRLRPLTHDSEATKTLRATVRARRDLVKHRVALANQLRAHLQAALPGAVGLFRDLDSPISLAFLARFDCQERADWLSPKRLRAWLSSVGYSGRKDPAELYARLQAAPRGPVGADGAARAHVTRALLTVLHELVDQIKSLEAQIAEQLALHADAHIFCSLPRGGTVRAARLLAEIGDVRGRFPDASSLACLAGVAPSTRQSGKHRAVTYRWAVNKELRDAVCDFAADSRRANPWAAKIYNDAIARGKDHPHATRILARAWLGVIWRCWQDHSVYDPAQHGALQALLTTEAA

SEQ ID NO: 459837 - protein, 425 aa, unidentified
MREHDTRAEAGTVNPPGRGTMFEIEDVGVFLGLDVGKSNHHGHGLTPAGKKVFDKPLPNSEPKLRAVFDKLTAKFGTVLVIVDQPASIGALPLTVARDAGCRVAYLPGLAMRRIADLYPGEAKTDAKDAAVIADAARTMPHTLRSLELTDEITAELTLLVGFDQDLAAEATRTSNRIRGLLTQFHPSLERVLGPRLDHQAITWLLERYGSPAALRKAGRRRLVELIRPKAPRMAARLIDDVFDALDEQTVVVPGTGTLDIVVPSLAASLTAVHTQRRAMEAQINTLLEAHPLSPVLTSMPGVGVRTAAVLLTTVGDGTSYPTAAHLASYAGLAPTTKQSGTSIHGEHAPRGGNRQLKRAMFLSAFACMNADPASRAYYDKQRARGKTHTQALLRLARQRVSVLFAMLRDGTFYQSRTPNDVELAA

SEQ ID NO: 459838 - protein, 365 aa, unidentified
MVNHIFVGIDLGDKNSVARIAVNQGKTERWGFVNDRRGRQRLLDEVRRRSEKVENGQVVMAYEASSCGFILYDEAEARGIRCEVLAPTKMEKSVEQRQHKNDDRDAEDVVEKLRGHVLAGNRLPTVWVPDRQMRDDREVVRTRVELVEKQTRVKTQIQMLVKRHGLEKPTGIGGPWTVRHRQWLEALTESVAWGYGARTALMSLLRHLSFLEAEIERIEKPIHELAEQPRHKPILDELTREHGVGLMTAMVYRTEIGYAGRFRRGRHVGKFVGLTPTSHESGQQQDRKGHISRQGPPRLRRMLCQASWVHVGHDPQAKRFYQQLVARNPKKKKIAIVAVMRRLAVRLWHRMRQAEIRMTDLVPVN

SEQ ID NO: 459839 - protein, 504 aa, unidentified
MTQKNTSSKFGLLLTWPVGKIQRIQEVSNMNLKGTKKKNQVSNANIFEQQELLKKIEVVRENLTASTWHELETKGKFDKNAKLSFICDDMLILGCDVGSETHYLRAIDTRGRELSKSAFSFSNNVDGFSKAKEWAVKIAAEYDKKQIVLGLEPTGHYWFCLATWMISNGISVVQVNPYAVKQTKELEDNSQLKDDAKDPKLIANLVKDGNFGMPYLPEQLYADLRRLSMFRDQLNEDRIRSINRLHRELKIYFPEYKEALGKTEGTFSLELLKQAPFPDDLAALKEDGIRQIWHNAKLRGRGYSRAGEILEYAKASVGIREGKETGKLVVQWFVQKILELDAELALIETQINQKCLEIPHTDKVLEICGIGENTLSGMVAEMGDISRFDDVKEIQKLSGLGLVASSSGKHKGETRISHRGRKRLRYWLFQAAKSAVAHAEEFKKLHVYYTTREQNPLKKMQSLIAIACKLLRIIFMILKKGIKYDPRKMLKDIRRESRQESLAA

SEQ ID NO: 459840 - protein, 339 aa, unidentified
MRKEEFECVGVDVSKSTLDAALFRGEVDWNEGHVKVGNNESGYNELKKWMRSKHVKKDKMRVCMEFTGLYALDFRSWLEKENITYYMVDPKRMHHFAPPLSIKGIRQTKTDKADAFRIAIYCSLFHESMKPSKLPSAAYFKLKRLLAERRQYVKQSKLYKQQLHDISVYDSVSSRIRKEDELKALRRNVKDTEQEMLSIIESDSSVKHNYDLLVSIVGIGLVVAATTIVLTENFTTFTNPRKYASYIAIAPFPHESGTSVRGATRVSKQGFGQAKADLSICVLSAMSHDPELKEYWLRKKAEGKHAGTILNAIKFKIVLRMFAVVKRGTPYVNTKGYKG

SEQ ID NO: 459841 - protein, 339 aa, unidentified
MNFYFIGLDIAKDTFVASIYHRPKETVLTKENISNDKHGYDELILWLGEHGITRSNCQVCLEATGVYSQGISYYLLAQGYRVSVECPLKVKRAFHPVGHKSDPVDSREIAEYAYRFQDELTPWQPKEELLEKIRQLLTLREQFTRQKCATKCSMKAYTLERVQLALIKDAQEETLKGLERQITRIDKELDKLITEDPHIKNRFDSLKSIPGFGMLLATHLLVMTDNFNKIEEYRPLASFVGIVPYEYKSGTSVYRRPHIRHYGPKASRKLLRLAAQSVATHDASFRRYYLRKLEEGKAKALVLNNIANKLLKVACAIVRDNTRYIKEHRSIHPMYVKST

SEQ ID NO: 459842 - protein, 391 aa, unidentified
MLPARLREQNESVKFLVKGDSMSVRRILAKTIDTDLEYEAIGIDLAKNCVSAALLTTDGEVVCIDRLDYSELEKSAQALSSTTFAMEPCTEMNYLVQKLEAWGHRCLVIGGKNVQNYVENHFSGQKTDLNDAQALAFLAQDTQLRTIKAKDVEQQKYASLTTLREQYIKQYRQTIVSLKGICQAWGLNISKGISGKARLKDLIENHAAFPEELKESLVDMVTHAQTAQKALNKITKTLEELAKNDKLCQLIRTIPGLGLICSCRLRATVGDIKRFKSPKDFPAYYGLVPRSIATGHNERKGKITHRGDRTMRSLMVQAAGSLVNMATKGKLKSKQLTKWILKKQKEKMPWGKLVCAVAAKLLRIVRAVLISNKPYNSKIAGVAKCSLPKGS

SEQ ID NO: 459843 - protein, 342 aa, unidentified
MGEVVTVGLDIAKSVFQVHGVDAEGQVVVQRRLTRAKVIPFFEKLPRCRVGIEACATAHHWGRRLTELGHEVKLMPPSYVKPYVKRQKNDAADAEAICEAVTRPSMRFVEVKSPEQQSELVIHRTRMTLMRHRIELSNTIRAHMAEFGLVAPIGRMGLQSLVEIVRDETDERVPASARICLKLLAEQLDLVNRHALETDRMILASARATEVGRRLMAVPGVGPVLASAIVASVPDPHAFKSGRNLAAWIGLVPRQNSSGGKERLGGITKQGNRYLRQLLVVGALAVIRYAERHGTRRPWLVQLMARRTTKIAAVALANKTARMIWAIMTSGEAYREPVLKAA

SEQ ID NO: 459844 - protein, 342 aa, unidentified
MDATSVGADVSQDWLDVHVLPTGQRFRVGNDDAGIAEMRERLSRISPERIALEATGGLERLAVAAMAAAGLPVVVVNSAHVRAFADALGTRAKTDPIGAALIAAYVNAVRPQLRPLPAATTRALADLVARRRHIVRMIMAEQNRLRTASSRQALESIRRLLAALERELEAIDADTDGHIRKSPLWQVDEKLLISMPGMGPTVARILLAELPELDRRQIAALAGLAPFTCQWGKWRGKSVIAAGRSSVRAALFIVALVAINPHPQCTPRPPRPLRRGQDRRHYAQTAHNPQRHDPRPKNPATLNGKKVALASVPSHDFRSWMRESEVRWLRAAFADVLAGLEG

SEQ ID NO: 459845 - protein, 482 aa, unidentified
MKKRNIYQNQSQELLSLFEAAGSSAKVMCVPMDYAKKDHLVMFCNGHGDILRKPFSVKNSPEGIKYLIDQVTRSCRRRGIKKEHVFLGGEDANSFAENFVSTLRVKGWLVAGVNAHDAKKQRVNLQASTDRIDLMGIATMLLNCRANCCPAQSGIYRNLRTLVRHRRKLVVMLTEVKNRAHGIVDRLFPGFLNENKSGIIPFTQSSLYLMEDRFSPKQIRRRRRQKLIEILKRFGTSKAQETALKLQQYAAKVLHTPDEYIDTLQISLAQHVKHIRGLKESIVVLEKEIAVNLAQTQGAFLTSVRGIGIVLAARVSAEIGDPYEQKSLNNVISYSGIIPRVKQTGGVDGKTYTGHVAKRCNRILKDYVVKSAYHLGLYGPEDLMADYKRRDASGQHADFGIGRRYLRMAMSLMRTSQVYLPPRLRRAHTALEERAGYYLISWPFLRDKWKKAGALEAAFSKDRPLGLWRQIVQKLYDIKLKL

SEQ ID NO: 459846 - protein, 313 aa, unidentified
MPACFVGIDIAKDRSVVAVLPQGDRFTVTHAPAALAELADRLRQADPVRIVLEATGGYHTVVAAALAAAQLPVIVVNPRQVRDFARATGQLAKTDAIDAGILAAFAKAIEPDVRPLPDAEAQALQAVVTRRRQLVEMLTAERLRLPQANPAVAASIQTVIRLLRQQLRDIDHDLDQRIRQSPVWRETQDLLRTVPGVGPATSATLVALLPELGQLSTKAISKLVGVAPLNADSGKWHGARRVWGGRAPVRAVLYMAALVASRRNPVIKLYYQRLLAAGKPKKVALVACMHKLLIILNALLHHQQPWNPEYAYA

SEQ ID NO: 459847 - protein, 356 aa, unidentified
MSYDVKYIGMDVHKEAIVIAVLNEGGKLVMESVIETKASSILQFLHGLRGELHVTWEEGTWAAWLYDLLQPQVQEVVVCNPRRNALLKEGSKSDKVDARKLADLLRTGMLRPVYHGENGLRTLRELGRSYQTISKDLTRVMNRLKALYRGWGISCAGTQVYAARCREEWLSKIPQAGVRRRAELLYQQLDGLQTLRRNLRPEFLAESRKHKASKLLRQIPCIGPIRAARLIALMQTPHRFRSKRQLWTYSGLGIETHDSAQFRFVRGQLQRSKKPQQLRGLNRNHKHEMKEIFKSAATRASCGRGPFHDFYAGLLAKGMKPEMARLTLARKIAAITLTLWKKEEGFDTEQLKTQAA

SEQ ID NO: 459848 - protein, 370 aa, unidentified
MTTTPATVTVIGGVDTHKHTHYAAAIDDHGRLLGHQEFPANDPGYQALLAWMREHGTVQAIGVESTGSFGATLTRALTAAGERVVEVNRPNRLARHMDGKSDRLDAEQIARAVLGQTSTAIPKTKSGTIEVIRTLRVARASAVKARTQAFNTLWGVMIGAPSPLRDELVVLTKRTLVNRCQGLRPETDDLLSLASDPDRMLMAGVKTALRDLARRWKALDAEIKALNKQIKVLVQTAAPELVELHGVGVEIAGQFLVTAGDNADRIRNEAAFAKLCGVAPQPASSGRTNGRHRLSRGGDRAANSALYIVTIVRMRHHQPTRDYVERRTAEGLSKREIIRCLKRYIAREIYNNLPAPASADLPRREVQTAA

SEQ ID NO: 459849 - protein, 344 aa, unidentified
MKYFTGIDVSLRFVSICVVDEAGVVQYEGKVPAEVDLIVAALRRFSAEVRQVGLEAGTLTQYLTYGLQKAGYEVLCLEARQTAATLAAMRNKTDRNDARGLAQILRSGWYRTVHVKSLESHQVRALLASRKAILTKCVDLENELRGLLKIFGVRLASHVAHGSFDQTVRAAVSATPELSMSLLPLLDARTVLYKTYLKLDNAVKAVVRHDPVCKRLMTVPGVGPVTSLTFKAGVDATDRFRSSRNVAAHFGLTPRRYQSGETDNPGRISKAGDVEARQALYTAAHAMLTRSYAWSTLKAWGLRLAKIRGLRRAVIAVARKLAVILHRMWVDGTDFRTSRPQEAA

SEQ ID NO: 459850 - protein, 310 aa, unidentified
MDAIFVGIDVSKDRLDVHVRPSREAFAVARDGKGLEELIDCLRALEPQLIAIEATGGFETIAAAAIAGAALPLAIVNPAQVRHFAQAVGKRAKTDPLDAEVIAHFAEAVKPPVRPVPDEQARLLAELVARRRQIIEMIVAERQREKRAAIARVRKGILRHVRMLEKELLDVDTDIGTLVRGSPAWREKEELLVTVPGVGNTLARTFLAELPELGSLNRREIASLAGLAPFTRQSGRWKGKSMIGGGRASLRAALYMAALSAIRCNRSLKVFYQRLLSAGKPKMVGLIAVARKILIILNAMLRDKTQWQPA

SEQ ID NO: 459851 - protein, 390 aa, unidentified
MIFSQRVGNAQAAIEALIVRACAGAVSVRWALDMTSGTAALLIALLHSGGQQVCYVPGKLVNRMSGAFAGEGKTDAKDAKTIAETARLRTDLTAITPSDRLIVDLQVLTSRRDDLKADWVRGVNRLRALLAGFFPALEGALDYSTRSPLILLIGFQTPSGLRIAGPDAIRDFLLEHRAFAKTTPTIVGKAIAAAEQTIAVATEAVSAPLVARLAGDLLDLDRQINDLDKQISERFGEHRHAKRITSVIGFGPVLGAALLADTGGDPQRMFKTPARLAAYAGLAPVPATPGEYAGTCTAPSATTAGYDMSSIWPRSPRSPSTDHRKCSTDANAQKGNATSKQSSPSPAASSTSSGHCYAMNASSSSPHQPAPPPPGGGVAAAAISPSARRR

SEQ ID NO: 459852 - protein, 458 aa, unidentified
MPKKYKSKPQRQDNPFQQIIHENAAGIDIGAQASYVAVPADRDAQPVRRFGCFTRDLYQLADWLLACQIQTVAMESTGVYWVPLFQVLEQRGFTVCLVNARHVKTVPGRKSDVQDCQWLQKLHTYGLLSASFRPEDEICVLRSYWRHRETLISKAATCVQQMHKALEQMNIQLHKVISDITGQTGLAILDAILAGQRDPKQLAALKDPRIRSSHTRIAKALQGDYRAEHLFVLSQALATYRFHQDQILACDQKIETYLSRLSDRTDETKTHLRPKAHTRTKKAGTNAPTFDLRSHLYRISGVDFTQIEGLNVLTVQTILSEVGLDASKFPSSKHFASWLGLSPDNRITGGKIKSRHTKKVNNRAAKAFRIGAQSLAHSSGPLGGFYRRMRGKIGPAQANTAAAHKMARIFYCLWKCPQAYDPTAFENAEQEHKARTFAYLRKKARTLGFDLVPQTTAT

SEQ ID NO: 459853 - protein, 469 aa, unidentified
MGKGSGVSRSGRRRNARRERLRGLLPRDGAVLGIDLGEARQALALVDHDVRVLWRRTARVRAHELGGLVDDAVAAAAGAGMARVTVACEPTGPRWMQVQRLCAERGLALVCVQPLVSHIAREQEDYTPHKRDEPDAVLVARLAAELHCYVPEELDEQWALLRQLGRRREQLVRAATASVLRVRDFLSVAWPSAPGACKVPFESLTWLAAVGAAAGLGPAGLAAAGEGEFLALVRDEGAGWGLKRPDLRIARGVLALAGDPGAVAWSRRGLFRRIADELGDLRRARRQLREVEADMTALLGELGLARLGGIPGLTPAGAAVILAEAGDPRRYETSSSLVKHAGLSPADNASGASEGASRISRRGRPSLRLAAWRAAFPMLAHNPVMREKYQAMVAAAEESARAAAAAARPGSAQAAQAARAVRAARAKALAACAASLLRWIYYMTVHGADWDPVAASGGRLAAQEPPQAA

SEQ ID NO: 459854 - protein, 468 aa, unidentified
MPARQQVEVDEHEEIVGRVAAIDVAKASGMVCTRVPHATRAGKRVTTVWQVASTTNQILELADQLAGEGIERVVVESTSDYWRPFVYVLEARGLVVWLVNAHDVKHLPGRPKTDKLDAVWLCKLNERGMLRPSFVPPAQIRRLRDYTRLRADLTADRTRHKQRLEKLLEDALIKLGTVATDILGVSGRAMLEALIAGQRDPKMLAELARGRLRVKHAALVQALTGRFDDHHAELARMLLDQIDALSGQIDQLTSRIEQTIAAIPAAQPSASGPGGGPAAAVQAASQSARSAPGAVDPETGEILAASLPVVDRLDEVAGIGRHAAQVIIAEVGLDMGQFPTPAHLVSWARLSPRTIQSGTKHRAGATGKGNPYLKSVLGEAATAAAKTDTFLGERYRRLVRRIGKRKALVAVARSILVIVWHLLADPTARFHDLGADYHASRIDRDRRTRNLVHQLQALGHKVTLQPAA

SEQ ID NO: 459855 - protein, 439 aa, unidentified
MPNPSLPVLDPTAAAIDVGSEQLHVSIAGGPPKVFGTTTGELHSLRDYLLAQGVRSVAMEATGIYWLCPYEVLEKAGLQVVVVNGKYVKNLPGRKTDLSDCQWQATLHAHGLLKPGFVPPEHIRRLQDYLRLRADHIVMAGSHEQHMQKALERMNLKIHDVISDLTGVSGLKMVQAIVAGERNPVALLALCDPQIQKNKAGRLRAALEGSWKAEHLFALRQAYELWQFYQQKIVECDQAIEAVLRELAGPEDPKNPAPPPIKRGGVNAPQIAGLHGMLWRLCGAKDPTQLPGIADYVLLQLLSEVGTDLEKNWKTEKHFTAWLGLAPGSRNSGKRRASQRRSRNRAGRLFCVVARSVGRSVDKALGGFYRRLKGRKGGLVANLALARKLAELFWRLMVQGVSYVEQGLKKYEEKVAQTEHRLLQKLARKYNLVLQPKAA

SEQ ID NO: 459856 - protein, 457 aa, unidentified
MEDTLAQRNRTSPPRSGKTRAAFSLTHPNAAGIDIGSASHYVAVPPDRDDEPVREFQSFTADLHRLADWLAACGVDTVAMESTGVYWIALFELLDARGFTVLLVNARHVKNVSGRKSDVLDCQWLQQLMSFGLLRGAFRPADEVCALRALSRQREMLLRSQSRHVQHMQKALTQMNLQLANVISDIVGVTGQKILRAIVAGERDGLTLAALKDARIKASANEIAQSLQGSWRAEHLFALKQALALFDFYATQMAECDAAIEAQLQVLAAHTGDPQPGKKRSRARNAPKFDLRVQLFRMCGVDLTRIDGIDVTTALVVVSEIGVDMSRFPTVKHFTSWLGLCPGTKITGGKLLSGKTKRCANRAAQALRLAAAALRSSKSALGAYFRRMCSHMDKPKAVTAAAHKLARLIYTLLTKGEEYTDQGQDYFEERYRERVIRQITQRAAKLGLSVVPTAQAA

SEQ ID NO: 459857 - protein, 343 aa, unidentified
MDYFAGLDVSVKETSVCIVDNAGRLVREVKVASEPEALLQVLMTPGQPFKRIGLEAGPLSQWLFSALAEAGLPVICVETRHMRAVLKAQINKTDRNDARGMAQMMRVGLYRPVHVKTLRSQKIRMLLTHRKLLQSKAIAIDNDLRATLRNFGLKVGMVGRTKFEARIKELVDGLPDLAILVEPLLIVRRVLREQIGILHRRLLVIVRDDDVCRRLMTVPGVGPVVALTYRATVDVPARFRNSKAVGAVFGLTPSKYQSGEVNRTGAISRCGDEMMRAMLYEAAQIVLVRSTKWSWLKAWAMKIARHRGMKKAIVALARRLAVIMHRIWVDGTEFRWTREIAAA

SEQ ID NO: 459858 - protein, 444 aa, unidentified
MHFSGEVEEREERLNKQKVVAWVGIDWADEGHEVWEYTVQTDSATCYAIKHTAESLQEWVNQLRIRHGGKPVAVVLEQARGGLIYALMNTGFMEIYPVNPESLAKFRKALYPSGAKSDPTDAELLGQMVRQNPGRFRAWVAGDEQTRSLQLLAEGRRKLVEDMTALTNQLTSVLKTYYPQALNWAGDLSSEQACSFLEKWPTLADLQKSRPFRIRNFYEKYGRPPREVLDERVTQMEKAQPLTADPAVVMAGKMMVNAVVAQIRPLRAAIEKYDDEIERIFRQHPDRAVFESFPGAGKVLAPRLLAAFGADRDRFEAALEVQQFSGIAPVTERSGKTIWVHRRLACPKFVLQTFHEFANQSRRFCVWSKLYYQQQRARGKRHNAAVRALAYKWIRILFRCWKDRRLYDDSRYEKSLIKRGASLAPLLGGTTELGMKSSSYNPST

SEQ ID NO: 459859 - protein, 355 aa, unidentified
MGKHSKSMSGVTVGIDLGDKFSCLCVLDESGEITEETRVATTPKALGRRMSEMARCRVVVEVGTHSPWVQRQLDGLGHEVIVANARQVRLIHKSPTKNDRLDAERLARLGRMDPKLLSPLRHRKAQTQVDRALLRSRGALVETRTKLINHVRGIVKSCGARLRSCSARSFHRQVAEELPEELKSNLLPMLTVIETLNATIRDYEKRIEHVATERYPETELLRQVTGVGLLTALSYVVTIEDPHRFYRSRTLGAYLGLRPRESQSGQRAPELRITKAGDTELRRLLVGSAHYILGPFGVDSDLRRWGLSLAGRGRKNAKKRAVVAVARKLAVLLHRLWVTGEVYEPLRVHPAGSAA

SEQ ID NO: 459860 - protein, 399 aa, unidentified
MTPDDIDLWVGLDVGKSAHHACALDRDGRTVYDKPLKQDERAIRAMLERLSGRGRVLLVVDQPNTIGSLPLTVARDMGVRVAYLPGSSMRKTADLLPGKAKTDRRDAYVIAWAALKLPESLRDAGPDDETLAALKILAGHDEDLAHESTRHINRLRSLLLHTHPAFERALKGERITRDATLALLERYGGPAAMNAAGADEVRRWARDNRLHAGRIIDDMFGAIGEQTVTVPGTATAESIIPAIVRDIRAIKERRRQVGEQVESLLEDHPLLTVLTSMPGIGVRTASNILLSIGGDVTGFASAAHLASYAGIAPVTSQSGTSIKGEKPARAGNKRLKNALWQAAFVASVKHPASRTYYKRKREQGKHHNAAIICLARRRCDVIYSMLKNGTLYQEQTLAA

SEQ ID NO: 459861 - protein, 316 aa, unidentified
MESPQNFVGIDVSAKRLDVAVLPAGTHFKVAHTDEGIASLVRRLRELRPHIVVLEATGGYEIAVAYAMSEASLPVVIMNPKVLRHFAKSTGKLAKTDKLDAQVLAHYAQAIQPPVRPLKDSEQMELATLMSRRRQLRDMIVMEGNRRRTSTPKVRGNIDQHLLYLRQLLTDLDREIHDSIRRTPLWHENSDILQSFNGVGPKVSASLIADLPELGTAPRTQISALAGLAPMNRDSGQWRGKRTIQGGRPAVRQALYMAALVASRRNPVIREFYQRLRQAGKPAKVALTACMRKILVILNAMLKNRTYWNPQLPLAA

SEQ ID NO: 459862 - protein, 483 aa, unidentified
MKSKPQEKNKRATNHPTQHHWHEMNRKQRREMTRQIQSEDLSLEVIHPDAAGIDIGNESHYAAVPPSRDSQPVREFGCTTAELKAMAAWLKQCRIRTVAMQSTGVYWVAVYDILEQAGLEVYLVNARDTKNLPGRKSDVQESQWLMKLHTYGLLRNSFRPSQEIRVMRTYWRQRNDLVQSAGRHILRIQKALTQMNLQLANVLTDISGATGQAIIKAILVGEHDPHKLAEFRDPRVKASEEQIAQSLEGNWQPDLLFLLKQEQDGYEFCHKQMAECDRQLAQYLQQREDRSQSAPLPEEKRKGRLKKKKGNAPQFDLREGLFRMTGTDLTRIDGIDVMTATTVISEAGYDMSKWQTENHFVSWLRLCPDNRISGNKVIGKGRLPTNNPISIALKMAATTLRESKTYLGAQFRRLRTRLGAPIAIKAMAAKLARLVYRMLRYGMKYVDQGAAFYELRHRELQIKRLKSKAEKLGYRVTPIPAAA

SEQ ID NO: 459863 - protein, 416 aa, unidentified
MKEWKEITHYAGFDWARDHHAVVIVDQQGQIVSQFQFDHSMEGWKEFRQKSACFAKLAVAIETNQGAAVDQLLQHGYRVYPVNPAAAAGYRLRKAPSGTKTDYLDGWALADALRVDGQGWKTLQPMDELSCQLRLLCRDEVGLIEQRTALISQLQQALLEYYPAALEAFEDWSNPSTWDFVIQFPTPEALTKAGRRRWEKFLHSHRLWRTQTLEKRLIAFAQAEQFKASAAVTIAKSQLALSLCKLLRTLQQQLDQYRKQIAALFEKHPEHDLFGSLPGAKDALAPRLLGAIGPDPSRYGTFEVLQSFAGTAPISFQSGRIHKAKVRWACDKFLRHTVHLWADSFWKVSAWGEAYYRQKREEGKSHACALRCLGQRLLKILFRMITDKKPYDAELHARNQQKHGSWVPALMQQQAN

SEQ ID NO: 459864 - protein, 429 aa, unidentified
MTRISAGVDVSKNRSTVCIMDQDGKFIMRPFLVWHSTEELDFLADTLKRLNGEVRVIMESTSIYQYPIALQLKERGLFISIVNAYEMKQFANIDFRGGKTDKKDSRTIASYGISYWDKLVEWQIPKDTYFNLDLLNRTYMNAKKHRQIILQELQHYIDCAMPGMDKELHSLNLSTKKDFMLDFVEKFWHRDEIVNMTEAEFTEVFTAWAKEKGYRPGKGKAAKIYAIAKSCIPYYPANPTVKTILQCIVDKLSGVNRTLVTIVTQMIEEAKKLPEYQIVREMPGVGDPLAARFFGSAGDIRRFKNSKALVAYAGIDSPPDESGDFSSTHRHITKKGSKVFRDTGYEIMMALRAQKRTWEKVRKNPEVYDYMLKKEAEEKPRKVAKIAALNKFLRIVYARIKELYDNMALAERAKAKTKSKTKAKTKVTA

SEQ ID NO: 459865 - protein, 365 aa, unidentified
MKEDTRVGPELTIGVDLGDRYSHLCVVDEHGEVCEEGRIATTARAMRKRFEGMARCRVVIEVGVHSPWVQRLLEELGHEVITAHTQAVRLIYGGTNKNDRLDAERLARLGRVDPKLLHPIRHRDGSVQADRAVIRSRHVLVGCRTSLINHARGMVKSMGGRLPSCSAESFHKRAGTALPDELKPALLPVLETITSLTQEIRRYDQRIETLASERYPETLLLRQVSGVGSVTALSFVLTVEDPRRFRKSRSLGAYLGLQPRRSQSGDKDPELRITKAGDEDLRRLLVNAAHYVLGPFGPDTDLRRWGLALAARGRKNAKKRAVVAVARKLAVLLHRLWVTGEVYEPLRDHQRRTNTSALVAQAMSA

SEQ ID NO: 459866 - protein, 430 aa, unidentified
MEIIYPRSCGVDVHKSFIVAVICISESVKPKYIKKRFSTFNNQLIHFRDWLIENNCSNVCMESTGKYFVPVYNALEGHISNVVVANPKWVKAIKGEKDDNKDAKWIADLFKFGIVRSSYIPEKDIRILREFTRYQYKLVNMRSSEKNRFQNALTTGNCKLDLVFTDVFGKSASSIVDTILSNDSYTSEDILSKVHSRCKASDEDILNAVDGTQLNHFQKARIQIVQKHMVYLDSLLDEIQQHIDLMVSNYENYIQLLCTIPGISRKSAITIISEVGIDMSQWSSHRKLTAWAGLSPGCNQSAGKKKSVKISKAGVYLKPCLVQVAHAAVKDKECNYYATKYNKISKRRGKKRAIVAIARKILIAVYHLLKTGEVFNPTDMADVETTQKQRIKYITNNLRNAFNQLSRTGLSEEEILQLIKKRSTNSPQIE

SEQ ID NO: 459867 - protein, 410 aa, unidentified
MPSPTGYCLALTRHFIRGSAKKRFERAPRLLRGLATRIRCGGIAVGGLSLRLPRSAQRCCWTVGVSSLRTAKSCLLSQTLSRTSPIKANRLQALVNAPLALISLLQVLTNNNYRFKRIGLEAGPLSQWLFSALAEAGLPVICVETRHMRAVLKARINKTDRNDARGIAQMMRVGLYRPVHVKTLRSQKLRMLLTHRKLLQSKAIAIENDLRATLRNFGLKVGMVGTVKFEARIKELVEDLPDLAILVEPLLVVRRVLREQLGILHRRVLAVVRDDEVCRRLMTVPGVGPVVALTYRVTIDVPARFRNSKAVGAVFGLTPARDQSGERDRSGAISRCGDEMMRMMLYEAAQIMLMRSAKWSWLKAWAMKIARHRGMKKAVVALARRLAVIMHRVWVDGTEFRWTREATKAV

SEQ ID NO: 459868 - protein, 367 aa, unidentified
MKKISTAAVKATKNFSQPKLTIGLDLGDRSSWYCLLDEVGEVLQEQKLSTTPKAMREVFGSMPRCRIALETGMHSPWVSRVLSELGHEVIVAHARNVRLIGESRKKDDRLDAQTLARLARIDPQLLCPVKHRSARAQADLTVIRARAGLVRARTALVNTARGLAKSYGERLRGCNPRNLNPEKAQGLSPELQTALEPLLAAVESLSERIRECNERIEKLAQERYPQVALLKQIKGVGTLIGLTFLLTLEDPHRFRKSRDVGCYLGLQPGRRNSGQSEPQMHISKEGDPYLRTLLVQGAHHILGPFGADSDLRRWGLKLAERGGKNGKKRAVIATARKLAVLLHRLWVSGEVYEPLRNSHRIAVPAAA

SEQ ID NO: 459869 - protein, 353 aa, unidentified
MKPNLQMTLDKYFRQCVGIDVSKDKFTACLFMYDVASDVGCCTESIDFPNNKTGFNQMVKWSRKEAQKGFQLTYLMEPTGSYYEPLAYHLHKIGLTLYIVLPNKARSFCEYEGIKTKTDAMDAHCLALLGCKNQRLRPWQPPKAIYRELRQLTRLRASLTKMQTQILNHIEAIDHMESVTSEVCKSYKKLLSTIQKQLEQNEQAIASKVAQDKELEARIKRIATAKGIRSNTVTCIVAETQGFHLITNRKQLASFAGLDVVAKQSGKDDPKHKISKKGNAYIRAALYMPALSAAHCNRQMIQSYSRICEKHPDAKMIGVTAIMRKMLLLVYTLWKSGDEYDETRDKTHVQISN

SEQ ID NO: 459870 - protein, 341 aa, unidentified
MTVYIGVDIHARQQTVSYLDTEDGTTELVELQHERDDVKGFYSQFQGEVVVGIEACGYTNWFEELMEQLHHKLLVGDAAEIRRLARRRQKNDRRDAVLLLDLLVHNEFPALFRYDRESREMLRQLRYRHKLVKLRTMVVNTLHALAINAGLSLRAKLLTKGGRQQLRALQLSAISQEQRDELLSLADELSRRIQTVEQWLQTQAKSDARVQRLQTHPGVGLLTSLCLVHTLGDLSRFSSTRKVAAYVGFDPMEDSSAERKAYGGISKAGSRLLRYLLVEAGQTAAKDDEHLRQFYRRLLPRRGKARAKVAVARKLLIRCFIMGRAEIDYAEFLRRGRKEAE

SEQ ID NO: 459871 - protein, 325 aa, unidentified
MKSTLIGIDLAKNVFQVCALNRAGKVMLNEAVKRPKLLHFIRQFEPTTIAMESCGSSHHWARCFRDLGHTVELIPAQHVAPFVRGGKSDARDALAICEAAQRPSLHRVPIKSLEQQDLQAMHRLRQLYVEQTTATANQIRGIAREYGVCFSVGLRPLIKQVPEALESADNELTDIARALLAERLMDLSKLRERVLSVTRRIVQVSSVNPAFEALQALPGIGILSASAYLNAIGSGEQFKCGRQVSAWLGLVPRQYGSGGQLQLKGITKSGDRYLRGLLIHGARAAISVTKDRQSPLIRWAEPIVARRGFNKAVVARPTRTRESGG

SEQ ID NO: 459872 - protein, 351 aa, unidentified
MKILAMDLAKSNTVICFYDSGCGRHTFGKVKTTPQQIHDLLVEHSPDRVVFEICSSAGWIYDICTALGLDAQVANPNTAAWRWKNLKNKNDRKDALKLAQLSAMEQLPTVHIPGVDVRQKRCLIQYRQTLVARVTQIKNNIRSILDKQGYTMSSGKSGWTKKSLELLNQMVSPLAECEVDNLWRGQLYVELEMLESTQRSLSEVTVKLDKLAESDCRIKLLQTAAGVGPRLSEAIVAYLDEPRRFSSGKQVGSYAGLTPRQYQSGSMNRQGKISGQGNKLLRSLLVEVSWLGLRYNRWMQQTYQRILRGSPSRKKIAITAVARKLLVRCWAMLRDGTAWRDEPAKVSNVAA

SEQ ID NO: 459873 - protein, 391 aa, unidentified
MLYIGIDAAKDKHDCCIVDSDGEFKCDGFTFANSKEGFEKFLEIVKQSLSSKDKIIKVGIESTGHYSTNLLSFLNSQGFEVVVFNPLSVSRSRTANSLRRTKTDKNDSRYIVQLLMSGNFKPYHKQSYHILRLKSLSRARFRLVKEIQPLKNRYRRLIHLLFPELQGFFCKLDIPAVITLLTALPGAKDIAACNITKLTNILSTASRGRFKRVKAEALKQLAKNSIAEYNQGDAFELKLTLQRIQFIENQKAEIEAEIRNVMSEIKPPITSINGVGDVLGAAILAEIGDINTFSNSAKLLAFAGCEPSTYQSGKFTATNTPMVKHGSRYLRNTLYLAVKSAYLHSPSFRAYIDRKRAQGKHYYTAMSHGIKKMVRVVFVVLKRNITFTEPI

SEQ ID NO: 459874 - protein, 334 aa, unidentified
MEQITTVGIDLAKRVFALHGVDAQGRVVLRRTVRREQLLETIATLPPCLIGMEAGSGAHEWGRRFEPFGHRVRLMAAKFVAPYRQNGKNDGNDAEAICEAVGRPKTRFVPLKSAEQQAVLSLHRVRQGFVTERTATMNRIRGLLAEFGVVLPQRSPTIRRQALKAAETLPLLARRAIEDLCAHVRVLDERVDSYDRDLQQQAQTSEAARRLMQIRGIGPLSALAIVATVGNARDFKNGRQFAAWIGLTPQQHSSGGKTRLGHITKRGDAYLRSLLVQGARSALHTATRHRDRVSRWACELEHRRGYHRTLVAVAAKNARIAWALLSKGEALRPN

SEQ ID NO: 459875 - protein, 386 aa, unidentified
MSEIIRIGIDTSKSVFVLHGVDGTEKPALRKKLRRRDLVGFLAKLKPTRIGIEACGAAHHWGRTFQTLGHEAVLLPTQLVKPYIARNKNDGADAEGICEAMSRPRMRFVPIKTAEQQAAQMLIGLRDRLVRQRTQVSNAIRGYAAEFGLVAAKGLDKIEPLLARIADAPDLPDLAKELFALHSQEYVQLKVRLRQIEAKLMAWHRHNKLSRRLAEIPAIGPIGACALAIKVTDPGAFRCGRDFAAWLGLTPKDHSTAGKQRLGAITRAGDEMLRSVLVVGATAVIQQARRGRGKATPWLIDLIKRKPPKLAAVALANKTARIAWKLMVSGERYDPHHQGRGRSNPPSPPAASIAPCSHRQGRCAPPTSGGLRPALTALARGASGRP

SEQ ID NO: 459876 - protein, 414 aa, unidentified
MKDILERCIGLDIHRDSVVACLLTGPLDGKAASETVTFGTLSTDLIRLREWVITQDCHYVAMESTGIYWQPIYERLETCFDGDIQLLVVNARHMKNVPGKKTDMRDAEWIASLLRAGLLNGSFIPDKPFRELRHLTRYRKSLTFDITTQKNRIDKILQSAGFRLSLFISDIFGASGRGIMRHLSKHGCINAVELNQYLKTKTRHKMQDIMTSVNGNLSEHQQHMLRMMLAYLECIEAYKLEVEDAIQAEMKKHQAALALLCTIPGISTTSGSSILAEIGTDMSRFPTAQHICSWAGLSPGNNESAGKRKSSAITKGNPYLKSMLCEVAWAVASHKEMYLSQWYWRIKQRKGSKKAVIALARKMLVLIYSMLKSGTLYDEACFEQRRLQCEQKRAKRMISELSKLGYTIEAPKIA

SEQ ID NO: 459877 - protein, 335 aa, unidentified
MYKYIGLDAHSSTCTFCVLDEQGREIDLTTMATNGRMLVNYVKELGGAKKLTFEECELSGWLHQLFNKEVEELIVCNPVMNREFKRAKTDKIDARKLAKLLRGGFLTPVFHDGSKREQLRSVVSAYQDIVEEAVRLKNRYKSVYRKDGKMLRGSAVYSDESLLDGLENSGLKFVGGHIYDMIALFEKKRQELLKELIRCSKQFKEVALLKQIPGIGDIHSAKIVSQVVDPRRFRNKNKYYSYCGLIRHKRISGENQYGSARGGYNRILKSVYKTAGQTVIRGENGLRRYYDALREKGTSHENAYNAVCRKIAAISLSIWRKSAKYDENLVNAQAI

SEQ ID NO: 459878 - protein, 357 aa, unidentified
MLYAGIDAHKRTCTIVIVDDQGKKIKEGVVKTDEFEIKGFFAPYKDRISAVVETCLNWFFIHKVLHGYIKEIKVAEAYKLRIIAEAKVKTDSLDALHLAQLLRIGYIPEIYIPNEKTIKLRELIRARIYLVRLKTRMKNKIHSLLDKNGFHNHPGTDLFGKAGRNFLRQLTIGKPEEGIIARYLGIIEKLEEDIKAFEITVSNNIDETKEIKLLRSIPGIGKISSQLLLAEIGEIKRFRTKGKLCSFAGLCPRVYNSGEVERRGHITKAGNANMRWILTECAQVASRHSPGIRKVFCRIQRKHGTKVAIIAVARTLLEVVFNVLTKGEEFSEVKAFPVNQNIKIRKKSRHASFLAIS

SEQ ID NO: 459879 - protein, 338 aa, unidentified
MIVIGLDVHKQSVTAVAVDEAGRALSEKVIVVGSDELLGWAFALDAERLWAVEDCRQLTRWLEQQLLRAGEDLVRVPPKLTVPERRAGRTRGKSDPIDALAIARAAIREPNLSRPRADEPIYREIKLLVDHREDLVDQRRRTQQRLRWHLHQLDPTYAVPLRMLSRASHLERVGRWLARREPELQVRLARELVSTIRSLNRVVGQLDQELQQRTVEVAPALLELPGCATVTAAKLLAEIGPIDRFKSDAQLARHSGAAPLEASSGKSQRHRLDRGGNRQLNAALYRIAITQARYHTPARDYLDRKRSEGKSRREALRCLKRLLVRVVFNTLKTSPALT

SEQ ID NO: 459880 - protein, 345 aa, unidentified
MKNVSITRYNVGVDFGSEQMDAKLAAQYEDGTRKILFSRRFENRETGFKNLDGWLKEKCRCKDVEIRISCEATGVYHERCCYFLDGLGYYVTVEVPSRVKSYKKSCGFNSKNDKIDATALAYMGLERNLRKWEPINSFYYELRMLTRYHESVQQMHTSASNQLHAMQAGMRVSKLVVKQLKANIKLYEKQLGELQKAIEEKMQSEPEVQRKIANIIEDMKGVNVMTVAVVIAETNGFSWFTNRRQVVKYSGYDVVEDQSGKRRGKTKISKKGNAHIRRALYFPAINLATYNVKPFADKYERIFERSRIKMKGYTALQKDLLLMLFTLWKKDQKFDPNYQNQQKKK

SEQ ID NO: 459881 - protein, 337 aa, unidentified
MQITTLGIDLAKHVFQLHGVGPDGQLVLRQKLRRAQMIRFFAKLPPCLIGMEACATAHYWARELKAFGHEVRLMPAHYVKAYVKRGKNDAADAAAICEAVTRPTMRFVAIKSQEQQAVLVMHRTRDLLVRQRTQAANSLRGLLAEFGIAEAQGICHLRRLRAHLETDTVPEPGRKILVLLAEQIDELEKRITQIDAEILAWHRASKMSQRLAKIPGVGPLIASAIVATVADPSVFRSGREFSAWLGLVPRQNSTGGRQRLGRITHQGDGYVRRLLIIGAQSALQGSKEIKANGWVQALLSRYARLKVAVALANKMARIAWALMTKGDVYHPAAAAAA

SEQ ID NO: 459882 - protein, 340 aa, unidentified
MKNMKYLIGLDVHKNRTTYVVRDRIGNIILEGESATIYSELYERLKPYLKSSVIGLESCTSYYTLYQSFLKNNYNIKVANTIQLRQLIAKNDRLDAKRLAEMLRLGTFPTSYIPDEKIQRLRSLLQVRHSLMEEKTRCNNRIQAFLDRNGIVMPDQEAFGKKWRHALLRYIGSGEVSLELRYEYDHFVYLEKKSDHLSHEITGYTTKYWKKEFNLIQSITGFGPVLACYVIAHIHPISRFQSKRKLRRYAGVVPAFHESGGRKSKGHIPKSSSRKHLRWALIQAANAAGRTNTKLGYYYLKKKKQKNNAGIAHVAVASSMIDIIYKVLTTNKPYNPKNIC

SEQ ID NO: 459883 - protein, 512 aa, unidentified
MEAIHERVAGIDVHRMKHVVTILIGRENGTVSSETREFGGFKRDMRALVGWLQTHRIQQVVMESTGIYWKSVFSHLETAGIPALVVNAFHVKNVPGRKTDVGDSEWLAQLARFGLLRGSFIPPKDLRELRLISRYRRKLMGTLGGEKNRLHKLLDDAGIKLGGVVADIDGVCARKMVEGLIAGGTPEGLSALGRGKLKSTSEVLEAAMDGDLSPRHRLVLSTVLSHLRYLQQQLAQLDRYLIEAMKPYAWAWRLLQTIPGIDQLTAAMILIEIGDNVHRFGSPSRLASWTALCPGNNESAGKRISGKTRHGNPIVRYLLCEAANAARRTKTVFRAKYNSLVIRRGHKKTIIALAHKLIRTWRAQKISSAGGTASRRQLDHFPLAFHGVVHPHLNDWVALLDRQPCRRRLFVRRRHRGVFPTPQAAWQETLETEKANYQPSGGRAASGHPGAAVAIGRVGRERCRRAHQRGSPVQAKLSSRSARQRFSADGSAWRHEGGVAFDASRRRVLTKP

SEQ ID NO: 459884 - protein, 384 aa, unidentified
MDKSITLHVGLDVHKDSIDIATAELGRDGEVRHVGSIGGDLASLDKALRKLIAKGHRLHVVYEAGPCGFVIWRHLNALGHSCDVVAPSSIPKRSGERIKTDRRDAMNLARLDRSGDLTAVRVPGATDEAVRDLVRAREDSVRECRNARHRLKALLLRNGIAYTGKSSWTAAHLRWLATLKMEHAAQQIGFQEYLHSITEATHRIERLEQAMRDTLPDWSLKPLVQALMALRGVQLIAAMTLVAELQDFMRFASPRKLMAFVGLVPGEHSSGPKRRQGSITKAGNSAARRMLVEIAWHYQHSPRVSPVIATRHDRLPQAVTDIAWAAQLRLHAKFKRLLARRVMKNKCVVAVARELAGFVWAIGCEVQTSGWQGVPLESAAIVAA

SEQ ID NO: 459885 - protein, 356 aa, unidentified
MSHDVKYIGMDVHKEAVVIAVLNSSGKQVMESIVETKASSILQFIHGLRGELHVTWEEGTWAAWLYDLLQPQVKRVLVCDPRRNALLKEGNKSDKIDARKLADLLRTGMVRPVYHGEHGLRTLRELGRSYQTISQDLNRVMNRIKALYRGWSIPCAGTQVYAPRYREEWLQKIEHVGVRRRAELLYQQLDGLQALRRTLRPELLAESRKHKASKLLRQIPCIGPIRAARLIALMQTPHRFRSKRQLWTYSGLGIETRDSAQYCYVHGQLQRTKKPQQIRGLNRNHNHEMKEIFKGAATRASCGVGPLRDFYVALVAKGMKPEMARLTLARKIAAIALTLWKKEERFDTEQLKPQAA

SEQ ID NO: 459886 - protein, 344 aa, unidentified
MVTNYIGADVDCKMTELAVERKGKIMVRDRVPTDIKSLSKFLGSIDGNKEMVVEEGPMAGWLYRNLRFKVDRFVVCDPRRNKLISCDGEKDDAIDAGDLAVLLRGGYLREVYHTDDEDRLALKEIVALYHDRVRDAVRQINKLRGYCRCHGITIPRGVLKYPLLRGLWLEDLKPPAVAKQLSIMWIGFDAVAKQVRMAKKEVSRRSKAYPIIGYWKDLPGIGLIRAVTLFAYLDCPGRFDSSRKLWKYCGIGLKRFTSGSDKLGRPKPGKLRLFRHTNRRLKDAVMGGALSAIGQSRNPFADHYWRMIQNGVTTSNARHTVARKMLTVMWGMWKTNCRYDESFV

SEQ ID NO: 459887 - protein, 350 aa, unidentified
MVYVGVDQHKRFSQMAVIDDSGAVLDQRRLYHDDKDALAQYLDQWPGPVAVALEATRSWYWLYELLEQHAERVMLSHPAKTRLVAEAKVKTDKVDAEALAQLLRTDFLPQAYVPPRSVRDQRELHRWRVVVVALRTKLKNRVHAILDKLGIEQSLSDLFGRRGREFLDGLSLRGPYELELRSCLRLIDAIGAEEHSVTVEIRRVLKEDPRARLLMSVPGIGETWAYLILCEVGEIERFRSAKHFASYCALTPRTRQSAEHFWQGGTDRRGNLYLKWALVEAAHVAHTKDPALGALYASKSRTKGTGKAAVIVAHKLAIAVYQVLSRGEKYRYNALTRRHLGKPEAALGRQ

SEQ ID NO: 459888 - protein, 342 aa, unidentified
MKIIGCDFHPSFQQIAMVDTETGEQTEKKLTPGEAVQFYSQLRGPVLVGMEACGNTLWFERLQAQLGHQLWLGDAGKIRALEVRKQKTDRRDAELLLQLLLEKRFPRIWVPSPEQRDLRQLLLHRHKLVGMRRQVKNQLQHLALNQGVQQKHKLWTAAGRKRLEEVALTGWTAQRREELLLLLDDLEPRIGKLDQAVREAAEKDRVAQRLQTHPGVGPITALAYSLTLGEIGRFAHSRQVVSYLGLNPAEHSSGGRQRLGSISKQGNPMLRSLLVEAGQSAARLVPELKRAYQRLKHRKHSSVAKVMVARKLAVRLYWMWRNEQPYSATRMRGSPSHPVAVV

SEQ ID NO: 459889 - protein, 343 aa, unidentified
MQTVSTIGLDIAKSVFQVHGVDADGLVVIRRQLKRRYVLAFFEKLPPCLVGIEACASSHHWSRELQALGHTVRLMPPAYVKPYVKRQKNDMADAEAICEAVTRANMRFVPTKTPEQQSGLVLHRTRYLFIRQQTSVINAIRAHLAEFGVTAPVGRNGVEELLNVVGNPNDKRVPEIARRCLLALGAQLRRLKEQILEFDRLIRAWHRSSEMSMRLDDCPGVGPALATALVATVADAKAFRSGRNFSAWIGIVPKQHSSGGKDRLGSISKQGDRYLRSLFVAGALAVIRYAKIHGTKHRPWLAALLARRPTKVAAIALANKIARMAWAIMAKGERYKEPVALAA

SEQ ID NO: 459890 - protein, 395 aa, unidentified
MFIVGIDIAKRSHEAIIIAEDGQVVRKAFSFRNNCTGYNLLLEQVRRLTLVKSQIVFAMESTAHYWLALYARLLKDGYAVMVLNPIQSHSLRELYIRKAKTDARDSLIIADLVRFDRCKASNVPQDKILALRELCRSRAYLVDMAADLKRKLIALLDRIFPEYESLFDSVFSKASIAVLSKYSTPQKVKNANLRKLTDILMESSNGHFGEWKAHQLKEAACSSFGIDDSGGVYSMLLGMFLEQILSLTAQADSLEKQISVFFQEFNNPLTSIPGVGTVLAATSLSEIGDITRFSSADKLLAYAGLDPSVKQSGEFKSNQNRMSKRGSPYLRRAIWLASTVAVHRDPMFQTYNEKKLSEGLHYMNVIGHVSRKMTAVIFAVLRDGQPYQPILQSAG

SEQ ID NO: 459891 - protein, 344 aa, unidentified
MDHFAGLDVSAKETSVCILDDAGKIVKEVKVASEPQALLKVLGNPAYRFKRIGLEAGPLSQWLFRALAEAELPVICVETRHMQAVLKAQINKTDRNDARGIAQMMRVGIYRPVHVKTMRSQKLRMLLTHRKLLQSKAIDLENDLRGTLRNFGLKVGMVGAARFEARIRELVEGLPDLAVLVEPLLVVRQVLRQQLAVLHRRLLAVVRDDEVCRRLMTTPGVGPLVALTYRTTVDVPARFRKSKSVGAVFGLTSSRYQSGEVDWSGKISRCGDEMMRTMLYEAAQSMMHSKKWSWLKAWAMQIARRRGMKRAIVALARRLAVIMHRIWVDGTEFRWTREKAAAAA

SEQ ID NO: 459892 - protein, 430 aa, unidentified
MTDNKFNRIDHFRQIKKEIRGNSDFLIVGIDIAKDKHYAFFGDANGHTILKKLPFENNQNGFEKLITHTEEKKAKIPFEKVVFGLEPTADYHKSLGEFLIKKGYPLVFVGAAATVKNRELLDGRWDKNDMKDAANIADLISQGKCQYYDHASEQIRNLRSLLSLKRKIKKVEHSTSMRIRNHLVAQFFPELDSYFGSYSEGCLSIIKHCFDPSDIAQMPFDSFVSLVTSRQPTRLQWGKLKSIWEMAPSSIGCSMTTGVDFESSMLVDSLRKTRIDIVAVEREIKRICLTLPEYEYILSIPGFGDTISAITLAAIGDHTRFDNTRQLLKMAGLDLSSNRSGKFSDTQPAKISKKGKSELRYGLYQAAMVASTRNVDFMAYFTNLIKDRSKEKGIKTRMRVKLSAKLLIIAWTLMKKKTVFNPVFIKSKQV

SEQ ID NO: 459893 - protein, 356 aa, unidentified
MLHKNGVGPVVAVVGIDIGKNNFHVVAHDKSGAIVLRQKWSRSQVESRLANMPPCLVGMEACVGAHHLARRLVSLGHNARLMPAKYVRPYAKGQKNDFNDAEAITEAVQRPTMKFVAVKTGDQLDLQALHRVRERLVSQRTAIINQIRAFLLERGVAVRQGLRILRAELPTILGTRTDALSPRILCLIEDLAGDWRRLDTRIEQLSAQIVAIAKEDVHCRRTMSVPGIGPIISSAMVAAIGNGDVFSNGRDFAAWLGLVPKQISTGDRTILGKISKLGNRYLRVLFVQAAWVVLVKPLSWERYGLKPWITAAKKRLHHNVLAIALANKLARIAWAVLAKGRGFEVTRTTDAASQPV

SEQ ID NO: 459894 - protein, 322 aa, unidentified
MTTQTTAPDHFIGCDVGKASIVVFDSRTNQTRTIANRPADLARFAATLDETCLAICEATGGYENTLLHALSKASRAAHRADARKVKAFIRSFGILGKTDAIDARALAVYGQERHADLARWQVPDPQRERLQAMVLIRRDLIADRLAYRNRLAAPGADAVKGPLGKLLKTYDQQIAAIDRDIAALIRGHKTLAAAEKTIRCLVGIGQTTAAALLALLPELGTLNRRQVAALAGLAPHPNQSGGKDAYRRTRGGRPEVKRVLFMAAMVAAKHDPVQKAFYTRLLAQGKKPLVALTAIMRKLVVICNAMLRNTEAEHLAQSEQRA

SEQ ID NO: 459895 - protein, 519 aa, unidentified
MAVSQVVALRGPGGLALLPPAALLGLAVERRADLPGPRRGVAQKRRERRTVLKSGVPATVLTGHQEEGPFMAVVMIGIDPHKASHTAVAISAAEEPLGELRVRACAAQAERLLAWAAAWPQRIWAVEGAGGLGHLLARQLPGAGERVLDVQPKPSARVWLLTAGDSNKSDPDDARSVAIAALRSAGVREARPDDHAAVLKIWSKRYRDLGRTRTQVACRLHAVLCELIPGGLSKEITAGHATRVLEAITPAGAVEAARCELAAAFAEDLRGIDARIRQTRAKLATAIQATGTSLTGLFGVGPVIAAAVIGDVRDVSRFPGRDHFAACNGTAPVEVSSGPRKVCRLSRRGNRRHGHAIHMAAVTQIRHRHSQGRAYYDKKLAEGKTGKEALRSLKRQVSNAIFACLQAGARRAAARAGGPGGQQGNDSVASAAGSHPRHRLFGQATPGPGDHPTATFSSPAPGSAHGRGTAGHSPVAATPPPATRRSRWSARSATRTNDLGARQDDGRTRPRRRPRPKDR

SEQ ID NO: 459896 - protein, 391 aa, unidentified
MVCVGIDVAKDKHDCCILDSDGMVRADCFTIPNNMDGFKQLLQTIRNCTKKSDKIKVGLEATGHYSYNILGFLLDNDLAVYVMNPLHTNLYRKSLSLRKTKTDRVDARTIATMLLSDVDLKSYTDIAYHNEELKSLTRYRFDKVQERAKLKQSVSRLVTILFPELEGLVSSIHGTSIYALLSEYPGTKQISEVHLTKLTNLLTTASKGRYGKEKAIQIREAARASIGSVMPAKSLELKHTIKLIQELASEINEIEDSIQKIIDELNPPILSIPGMGVNSAAVILAEIGDFSNFSSPDKILAYAGCSPSTYQSGKLTNCYAHMEKRGSRYLRHALYNATKYVCYWNPVFAEYLAKKRAEGKHYNVALSHAMKKLVRLIYALQKSGKAYLAAA

SEQ ID NO: 459897 - protein, 314 aa, unidentified
MQSASEVFVGIDVSKAQLDVAVWDSSGAWQVANDEKCICALVNRLKELSPTLIVVEATGGLEVPAVAEMAFAGLPVAVVNPKRTRDFARSTGQLAKTDVLDARVLAHFAQAVRPQVRSLRTEEQEQLAGLVTRRRQVIDMITSEKNRRCSTRPRLRERLDKHIEWLDGELKALDEEIAQFIKGSPLWKEKEELLRSVPGVGPVTAATMLAQLPELGTLNRQKIAALVGVAPVNKDSGKKRGKRRVFGGRAPVRSTLYMATLSATKFNPIIRSFYERLLKRGKEKKVALTACMRKLLVILNSIIRHRQPWQPHLA

SEQ ID NO: 459898 - protein, 347 aa, unidentified
MRFYTGQHRYYCGIDLHARTMYVCILEHETGEVALHRNLRCEPNHFLQTVAPYREDLVVAAECIFCWYWLADLCMRENIPFVLGHALYMKAIHGGKAKNDRIDSRKIAVLLRGGAIPMAYVYPQGMRATRDLLRRRLFFVRKRSELFSHTRTTFHQLNLPAPADRLLDRSNRIGVAEAIADPIVRASVEADLVMAAKLDEIILFLEQQIRRQAGSENPDALALLRTIPGVGPVLSLTFLYELHDIARFPRVQEFLSYARLVKSQKSSAGKIIKTSGDKIGNAHLKWAYSEAAVGFLQRNPRGQKFIQRLRSKHGRGKALSILAARLGRASYYMLRRSTPFDMDRFLN

SEQ ID NO: 459899 - protein, 344 aa, unidentified
MGESTTIAVDLAKSVFEVAVSSRPGRVSERQRLSRAALARFFAQRPPATVLLEACGTAHFWAREIERAGHRVRLLPAQHVRRYRQGNKTDRADAKALLEAFRNEAIRPVPVKTPAQQELTALHRLRAAWHGTRTARINTLRGLLREQGIAIPAGAARFVSQALELAGDDDSGLGDTLRFAAFELVAEIREIERRIDEVERRLEAIGRQTPLVARLRSVPGIGLLTSTALAGFVGDLHRFPSGRHFASYLGLTPRERSTGGTRRLGPITKRGDVYLRMLLIHGARAVLAAATQQREPDPVRRWALAASVRLGHNKATVALANKLARYAWAVATREAPFAARAKAA

SEQ ID NO: 459900 - protein, 412 aa, unidentified
MKLFIGIDVSSKDLQVAITDSENHQKPLLNQSFSNDLTGANKVKKLILQLAKQNSYDKVIIGMEATSIYSFHPAYFFANDEDLQKLNLETDVVNPKNTKRFHDVYEENKNDPIDAYYIAEYLRFGKYHVTIARQEEYLALQRLTRTRYEITSSLARAKQHFIEALYYRLNKLVTVDKENIKTSIFGATMLSIVTDSKTIDEITEMPIEDLIDYLQTKGRGRFSDPEALAKAIRKAVRGSYRLGKVMKDSIDAVLSVYYTEIKTNQKLIKNLDKAITDIVQALPEERILQSIPGIGPVYSAGIIAEIGSIDRFDTEAQLAKYAGLAWRQKQSSDFDSEHKPMTKNGNHYLRYYLVEAANLIRLRDPVFRKYYQKKYDEAFYSPHKRACVLCARKLVRTIFTLLKNGQIYQTPR

SEQ ID NO: 459901 - protein, 400 aa, unidentified
MNNISFSGFLGIDVSKDKFDAYCIDIDGEKQFYLSCSMDRAGFEKLVDHMDNLSIPRENFLIGMESTACYHINIFSYLLAGGYTAVLINPLLISNFVKMQLRKTKTDKKDALVIAQFLLMYADRLAQTSISPHVSDLRDLSRQRESLLSQMTALKCDMKRLLTMTFPELEKLTGVFTKSILKLLSRFPSADTIAKADPAEVTQLLIDHSMGKNTAKTTQAIIQAARSSVGTTSPSRELILKQKADVLIHLESHLKELTAMMIELCRSDMGDDIDIMTSLRGIGEKTATNFLVEMGGDIRKFKDHRKLIAMAGLDPAIYQSGNHDGQGRITKRGNRHLRRVIWLMTIRVIQFNDCFKQHYQRRRQDGLPFKKAVLATAHKLLRVIFAMLTQRKTFCYETNS

SEQ ID NO: 459902 - protein, 379 aa, unidentified
MEKSSTLYVGLDVHKDSIDIAVADAPRDAEVRHLGSVAGGVTAVSKSMRRLVSTGHRLHIVYEAGPCGFVLQRHFTALGWRCDVVAPSSIPHPCGERIKTDRRDAMKLARLARSNDLAVVRVPDGADEAIRDLVRARDDAVREQRNGRHRLKALLLRNGTPYAGKCSWTAAHLRWLATVKLEHAAQQISFQEYLHSITESGARIGRLEQAMRDALPEWSLRPLVQALQALRGVQLIAAMTLVAELQDFLRFDNARKLMAYVGLVPGEHSSGPKRRQGSITKAGNSAARRMLVEIAWHYQQGARVSASIATRQADLPAAVTAIAWAAQLRLSAKFKRLVARRVMKTKVVVAIARELAGFVWAIGREVQISGWQGVKPATA

SEQ ID NO: 459903 - protein, 409 aa, unidentified
MKLYVGIDVSSTDLYTCIMDQEGNTCAQFKVDNHLLGATFLRDQILLWANKRQPSEILIGMEATSVYSWHPAMFFHQQEELKSWHVKVFTINPKLIRKFKEAYTDLDKTDGIDAWIIADRLRFGRLKVTAVMHEQFIALQRLTRMRYHLVHQLTREKQYFLQHLFYKCSSFTQEVDSSVFGHAILELLLESFRLDEISQMDVQQLADFLRQKGRNRFADPECIAKSIQKAARSSYRLSKCVEDSIDLLLGLSIQSIRSLQAQIKELDKAITRHLEGIPNTLQTIPGIGPVYAAGILAEIGQIERFDNQAALAKYAGLTWSKHQSGRFQAEDTSLIRSGNRYLRYYLVEAANSVQRHDATFRAYYRKKYEEVPKHQHKRALVLTARKLVRVIDALLRNGQIYTPRKGEDR

SEQ ID NO: 459904 - protein, 339 aa, unidentified
MEPNGPALATLLEKLKANGALSGRPISRVIVTHEAARDGFWLARFLQRRGVEVHVMQASSLPVDRRARRTKTDVIDAEMLLRTLLAWLRGEPRVCSMIPIPSEADEEARRAHREREDLLGERRSLLNRIDGILATLGVVDFKGLRRDRRKQLADLRPPDGEDTGGGDSRIERLVERLELVMAQIAAVEAARDAVVAKETPADTSERMIRDLSRVRGIGVESATLLVREAFCRKFANRRALGSYAGLTATPFASGSMMREQGISKDGNRRLRACLVELAWFWLRYQRESGLARWFCSRVNGAKGRVAKIMIVALARKLLIALWRFVKEGVIPEGATMKAA

SEQ ID NO: 459905 - protein, 363 aa, unidentified
MKEEKRRYVGIDLGKREYTMAILGKNGKMSIHHGKTCIHGRQALYKKLEPTDKIALEAGNLAFIFASEIKERIGSEVRVLNSAKLPFIWDAPTKTDKEDAMKLAHLVEERRDEKLPIVPLPSEKELERRKILSSYSREMKNKTRYINTLHAMFVHQGHTTIVKKDIATAEKRREAIQVLTGVEREEAEWILKYLELHEQRIKELKDIMKKDAKTDEDMKNLQTIAGVGPVVAYGFVAHVGDGSRFSKGAQVSNYIGFVPRLDYSGTIQRHGHITKRGNAYLRGLLVQAAWSAVRSKKGGALRTRFKYYTLTQEQSKKKTIVSIARKMAELMYSVLRSKTSYETRKWNGPQERTKPKFILENCA

SEQ ID NO: 459906 - protein, 464 aa, unidentified
MCSMPLSINVVNMMMKDNNNIKVCGIDPHKRKCQAVILSIDQDHHTVAAKTELRFDNNLTGALELLKLLRDADCNRVVIENSNNFAYALYEFLREAKVHVELVGPSRVPAKHKKSDRVDAEWLALMYSRSMVSPDYVPTKEIRQLRDLLRLRSLLVRARTMLKNNVHANLTRGTFDISKIVSDAFGKRGFEILEMLSLASVGVHDYDDALLRLPKAVIEKYKDAVNNSFIAQINGVTLGVALGIIKALNEGIKELEDTIAQHILEHKELKRMVELIMTIPGIGLIVATTIVAEVGDFSRFGSKKELAAWAGMIPDTEESNGKQKSHGITKRGSPHIRRVLCEAANVIALHGKPVGLLRFYKRILHRKGRKVAIVALGHKLLRVIYALIVTEKRYEDEEVPKNDRRGRRTIPEVDKGELKRIHTKKLKMLQRRGATGKAVMKKYREIGALRAHISTGMSEEGEAT

SEQ ID NO: 459907 - protein, 374 aa, unidentified
MKEFSKYVGLDTHKDTIAVAVADALGGNPRYYGEIANTADAIHKLVKRLSADGEVVSFCYEAGPCGDEIYRQVSRLGQHCSVVAPSLIPSKPGERVKTDRRDSEKLSRLDRAGELTPVWVPDQEQEAMRDLTRAREDMKGLERAIKQRLNAFLLRYARIYASGRSRWTQAHFRWLEGLKFDIAVQQIVFQEYVEAVKQAEARVAGLEREMEKALENWSLAPVVEALMALRGVKLITAMTIMAELGDITRFDSPRQLMSFLGLVPSETSSGQTRRRGGITKTGNGHARRVLIESGWCYRFPARKTAHLQRRAEKCSSEVQAIAWKAQKRLCGRYTHLLGRGKLKVQVCTAVARELVGFIWAIACEVMGTHVIRAR

SEQ ID NO: 459908 - protein, 399 aa, unidentified
MLDDGSQPVKLFNVDNNQLGAEVLVERVYSIAKEHCISDILIGTEATSMYDWHLLEYLAESKLALEFNLKLYRFNAKWIKNFKKSLAPRGKTDPIDSFAIAERLRMGRLPKEYIPDTKYQPLRKLTRFRFHLMQQIAREKNFFLANLFLKASAYSQIKPFGSTFSATSLSVINDFFSVDELAAMPIEELTEFILEKGKSHFSQPGEIVDNLKRVARESYRLKPELAPTVNLILASTFNNIRCYKDQVKLVDQAIAENLKAFKHTLESISGIGPVYAAGILAEIGDVHRFLNDSSLAQFTGLTWPKHQSGRFQAEETRMSHAGNQYLRYYLVEAANSVKRCDATYKSFYEKKYKEATKHHHKRALVLTARKLVRLVWTLLTRQVLYQPGYCSFEDLSKIG

SEQ ID NO: 459909 - protein, 289 aa, unidentified
MYYIGLDVPKRTISYCVKDAAGHVHQEGKIGSTRRELDAWIKTLPQPRTIAMKATIFTGWIYDQLLPHAEKVKVAHPLMLRAIAAAKRKNDQVDAGKIADCLRCDFLLECHMVSAEIRDRRRTLRYRNLVLKQMVRMKNRISGLLMETGVNYNKQRLHKLGYFTELMSGNDEVNESIRPLLKLSREAVVRSQRLDYALVSSLERDPLLAERLKRLRTIPGVGPITALTWALEIGDVSRFQSVKQAISYCGLCSAERSSADEEMRMPISKQRNKHIQQTLVEAAKTGSSI

SEQ ID NO: 459910 - protein, 319 aa, unidentified
MNKNTLIFGIDISKDVFDVYNELLGHKRYSNNDRGIKSFIKALPEDAHCVMEATGCYHHRLALFLYDKSIAVSVMNPLVIKRYIQMKLKRVKTDKSDALMIYNYGCNQELDYWEPDVEYIELGRELLSLIQMYLKQSTALKNKLHALESRGKRKGKIITSIKRQLRCLKKEQHLLEQEVECLIKENEPSLFSRLRTIPGIGKKTAILLMLNTGNFKDFSSYKQVSSFLGLAPNERSSGSSIRGKSRISKTGDGLVRNHLFMCSFTACVHNPQCKALFDRIVAKGKSKKLALIAVCNKLIKQAFAIAKSGLPYDPEYVSK

SEQ ID NO: 459911 - protein, 335 aa, unidentified
MRYIGLDVHYGSSTYCVLDENGREVKCETIRGHWPKVLERLRRIEGAWTICFEATCGYGYLYRELSRMARRVVVAHPGQLRLIFRAKRKNDRIDARKLAKLLYLDEVPEAYVPGEEVQSWRELIEHRRRMVDRQTTCKNAIRSLLRAHGKIAAKGLWTNKGLAWLRQEPMPTAAAHLKRDLLLDELTEAKRRVRTVTQALDAIGRSHPAVLLLRTIPGVGIRTAETVAAYLDNARRFARNSQVGAYFGLVPCQDASAGVNRLGHITRQGPSTARKYLVEAAWQGVYRSPTIRAYFERVLHGRPERRKIALVATAHYLLRCMHALLVQGQAWHEAA

SEQ ID NO: 459912 - protein, 325 aa, unidentified
MQGKEVSEQETRKCTAGIDVSKSWLDVHVLPSSESLRVANTTGGIRQLKRWLLRRKVELVAVEATGKWHREAARSLSASHFAVAVIDPYRVRMFAKAQGILAKTDRLDAKVLAMFAAMMSPSVREPAPQALEAMQELVTARVSAVNEQVALKNQLAAAREAFLKRQLERRIRELGGYIQAIEKECLKQINQDEALARRFAILTSIPSFGDVVAITLIACLPELGLLSDKQIGALGGLAPIADDSGQRQGVRVVWGGRGAVRRILYLAALSAKTYNNDMKLFYRRLIERGKEAKPALIAVARKLLVLANLLIAQDRLWLPTAPQNA

SEQ ID NO: 459913 - protein, 338 aa, unidentified
MNYVGIDHHRQYSHITWLDEKGEVVKSGRVANRRRELEGFLQGERDVRAVIEAGRSSYTMVDVLADLGIETTVAHPKDVKAIARAKIKTDERDSYKLAHLLRTGYIPEVHKRSRENRSSQRVLRQRAFYVGKQTSVKNRLRALLAQQGEEIRQEVERVENLFTDKGMKVLRGLALPEREAKLVGALVRTYDHLEARINETNALVKELYEAMPSAQLIQTVPGFGIFLAVLVAVEIEDIGRFEEVSQFHAYAGVIPSTHSSGERSWHGKIIKEGNRWLRWAAVEAVWPALRADFDIRCFYDRLKKRKGANSAKVATARRLLTIIYRMLKENRPYILHKR

SEQ ID NO: 459914 - protein, 365 aa, unidentified
MSKDIKKPAGETRRYVGIDLGDKKSRVCILDERGEIVLQEWVETTPEAFFKRFHGEAKMDIAMEVGAHSRWASDLLGRCGHKVVVADPRQLALITKNDAKSDKRDARTLAQLLRADPRLLSPIEHRAEKLQTDLTVIRMRDNLIETRTRLVTSVRGVVKATGGRLPSSETSSFPQQVSDLIPEPLRPALAPVLEVIDRLNEATYEYDCLLEHWARTRYEESGRLTQVKGVGTLTALTFMLTVGDKERFSQTRDIGPFLGLRPRLGQSGDNEPQLRITKAGDGLLRKSLVECAQYMVGPFGQDSDLRRWGLKMIEAGNGSKRARQRAVVGVARRLAVLLMSLWKSGQTYDPLRHSRAQESSAEVAA

SEQ ID NO: 459915 - protein, 480 aa, unidentified
MNVKARRTKKQVNVENQAINLLSKEELNKKIEVVEKELRSYTWRELETNGKFAKNDKLSFITDDMLIVGCDIGSENHYIRAIDVRGRELSRGAFEFSNTSEGFENAKTWVLALAAKHDKKQIVLGLEPTGHYWFALAAWMISNGISVVQVNPYAVKQSKEIEDNSQLKDDRKAPKLISNLVKDGNYGMPYLPESLYADMRRLSMFRDQLTEDRIRNINRLHRELKIYFPEYMDAFGKIDGTFTLEVLKISAIPLDIVALGAEGMKKIWHDAKLRGRGYSRAGEIVDYAEKSVGLTDGTDAGREAVKWYAEQILKLDEQLEMVESALHRKCREIPYAENILAINGVGENILAGILAEMGDISRFDDVKEIQKLSGMGLVACSSGKHKGQTKISYRGRKRLRYWLFQAAKSAVSHADEFKQLHEYYTTRSKNPLKKMQSLVVIACKILRVIYTILKTGTIYDPEKMLKDIKHPASSQTSLAA

SEQ ID NO: 459916 - protein, 312 aa, unidentified
MREHCYGGIDVSKDRLDVMVLPDSKSFSVDNNAAGYSELVKRLRDLPIAAIGIEPSGGYERAVIRTLLAAGLSVRRINPNKLRQFARARGVLAKNDRLDARLIAEYVTIMPTRLVQRDPAAEQLAEVVTMRRQLCDEHVAVENQTTHLEDAMLRRLNKRRLARLEADILLLDTRMAQIVASHANLTRRYQLLTSMRGVGPTLAFTLIALLPELGQMSRKQIAALVGLAPYDFDSGRLKGHRCIYGGRLPVRNVLYMAALSACRYNPALKIFHNRLAATNKKPKVIIVAVMRKMITTLNAMLRDNVAWQPKSA

SEQ ID NO: 459917 - protein, 345 aa, unidentified
MKKGITIGMDLGDKKHQVCILDKTGKIITEDEVAGNRTAMASFFKQYRGAVVAMEMGAHSRWVSQIAEAEGLAVLVGNARKLRMIWQSRKKSDAQDAVMLARIARMDPALLCPIHHRGEQVQMDLEIIRARDLMVRERTRMVSHVRGVVKSIGERLAPSSAASFGHKARIPEALNEAMKPMLEMIRELTKKIHGYDLMIKDAATKKYPETEQLCQVGGVGPLTALAYVLTLEEPERFAKSRMVGAYLGLVPRLDQSGQIDKQLRITKHGDGYLRRLLVGSAHYILGPFGPDCDLRTFGLKLMQRGGKNAKKRAVVAVARKLAVLLHALWRSGQQYEPKRRQQAAA

SEQ ID NO: 459918 - protein, 448 aa, unidentified
MAVIEGSAAVAVGIDAAVVANHHIVVRRPEAGRPGTVIDDFVVPPTLVGMDRLTKRLASWPGAVAVAEPTSMTWLPLSIALGDAGVELSLVGNRHSARLRSALAGKNKSDPIDAAVLSRAGEFFELCPARIPAVAELALRRAAQRRGKTITDANRCLRRVISQARWAFPDLWNAFAGSRPTALGVLGRWPHLDALARARVSSITEVVAAHTRGVTGVEERAQQIRATARAWAEFWEGHLDLDALGWETAELLADLAAAEARVDRATDQTRRYWEQLWGDDPVLLSVPGMGPVLAPTVRAFLADGAHLDDAKAAQSFVGLNPSNWSSGQMESPSRAITKEGPPVLRLAFYQAANVARTHDPQLAEFYRRLMVERGHCHTKANCAVARKLVARTWATITSGTPYQLRDLDGTPVTRRQATTLAAALAVPDDVRRRTRAHSAATHRARLTR

SEQ ID NO: 459919 - protein, 376 aa, unidentified
MAQTDVQYPTIHLAIELSRSAWLVAARLPGVEKPSLHRIEGGDTAALLALAAALRARAAARLGTPVRVACCFEAGRDGFWLHRLLTAEGIAAYVLEPTSILVNRRARRAKTDRLDALGMLRVLAAYLGGDRQACSMVRVPTPEEEDAKRPHREREELVRERVRLENRIAALLATQGVRERPSLRNWERDLAALRTGDGRPLPPHLRAELDRLRRRLVLALELTREVEAERDAALAAGPRDAAGRKIAALCRLRGVGANFAAVLTREVFYRAFDNRRQLAGYVGLAPVPHQSGEADRDRRISRAGNARARTTLIQLAWLWLRYQPDSAPARWFRDRVGALRGRTRRIAIVAMARKLLIVLWRYAETGLVPEGVEVAA

SEQ ID NO: 459920 - protein, 367 aa, unidentified
MESTKYIGMEVHKDTISVAVVNSAGKVVMESVLETKAATILQFIRGLRGNLLVTLEEGTWAAWLYDLLKPYVTKVTVCNPRKNALLRSGNKGDRIDAQKLAELLRHGCLSAVYHGEKGLRTLRELSRSYLTITKDWTRVMNRLKALYHSWGIACSGTQVYAPRHRAEWLSRIKEAGVRSRAEFTYHQLDGLQALRQAVRRDLLAESRKHEASKLLRQIPGIGPIRAALAVALLQTPDRFRTKRQLWAYSGLAIETHGSGEYHYVDGQLRRSQKPVVLRGLNQNHNHHLKWIFKSAAVRASSSAGPLHEFYEGLVAKGMKLAMARLTLARKIAAITLIVWKSMPTPRLCLLLRGNSGWEELGLCPESA

SEQ ID NO: 459921 - protein, 357 aa, unidentified
MAALSIADVPPNVTVGVDTHKHSHIARAKDGLGRHLGQLEIETDPRGYAGLLAWAQEFGPVVTFGIEGTSSYGAGLTRFLRAQGQAVIEVLRPVRRDRRFGGKSDPIDADAAAGAVLSGRATAVPKAGDAGVEMVRALKIAKQTAIKARTQAVNAVKGLVVMAPDPIREQLRNLKTPALVRTCSAYRVDRASDPTSAIKLSLRSMCRRYVVLDQEVRSLEKELDALTVRLVPQLRQLFGVGQDVAATLVLAAGDSGDRLRSEASFSMLCGASPIPASSGMVQRHRLNRGGDRQANAALHHIVIVRLRHDQATKAYFAKRKAEGKSKKEIFRCLKRYVAREVYRTLVGPREEVIRSAA

SEQ ID NO: 459922 - protein, 419 aa, unidentified
MGKIIEYCAGIDIGKRFLLCCVLKGAAQEEPRSQTLRFEVTVPGLIGLRNWLVSENVTHVVMESTGSYWIPVFNILEEHFVVVLANPEEVKNRKGHKTDRKDAEHLAELLRHDHIRSSYIPPKPVRELRDLTRRRLQLTQDATRERNRVQKLLEQVNVKIGNVLSDVFGVSGQSMLLALLNGEASPEQIAQLARGQARHKIPQLIEALEGNRMSDHERLLIRSCLRHLACLQEEVEELDTEILRRMQAPPFQHAFLLMQTIPGVGQLAAASILAETGTDLSPFPTAEQMASWAGLCPGNRESAGIQKGTQTTHGNPYLRTALVQCAWAATRKQGSVFQSRFQQLSPRRGQKRAIVAVAHQMLIILYCMLKLSVPFRGAEEAPQQRRRQRRAHHHLRCLRRLGIPVQVLATADGLMGETG

SEQ ID NO: 459923 - protein, 343 aa, unidentified
MDYFAGLDVSVKDTSVCIVDDAGRIRREVKVASEPDALLAVLRNPAYHFKRIGLEAGPLSQWLFSALAEADLPVICVETRHMRAVLKARINKTDRNDARGIAQMMRVGLYRPVHVKTLRSQKLRMLLTHRKLLQAKAIAIENDLRASLRNFGLKVGVVGTVRFEARIKALVENLPDLAALVEPLLVVRRVLREQINILHRRLLAVVRDDEVCRRLMTVPGVGPVVALTYRATVDVPARFRKSKSVGAVFGLTPARDQSGERDRPGAISRCGDEMMRTTLYEAAQVMLLRSAKWSWLKAWAMKIARHRGMKKAIVALARRLAVIMHRIWTDGTEFRWTREAAAA

SEQ ID NO: 459924 - protein, 347 aa, unidentified
MTIVEDRPVITGGVDTHADMHVAAALDSIGGLLGVREFPATAAGYAGLLGWLRSLGNLALAGVEGTGSYGAGLARYLAAAGVRVVEVDRPDRQDRHRQGKSDPLDAVSAARAAQSGRASAAPRGRDGAVEAIRALMVAKRSARQERTQAVNQARALIVTGPEELRARFAQRSPAQLIDAIAALRPRPGDVPGYATRVALRELGRRARFLDGQLDRLDELIGPLVTERAPGLLALHGVGPDTAALLLVAAGDHPERLRSESSWAHLCGVAPIPASSGKTAGRYRLNRGGDRQANSALWRVVMVRLRSHEATRAYADRRGKEGLSKKEIIRCLKRYVAREVYRQLRAGS

SEQ ID NO: 459925 - protein, 346 aa, unidentified
MEYIAMDVHKKYTWARVENEKGDKLYECKLSHSHGTIENFVKRWTGGSAVAVETVGNWYWVVDEIEAGGGKPQLVNARLAKLMMGSVNKSDKLDAKGMNRLQRTGTLPTVWIPPSSVRDARELPRTRMVLSRQRTQLKNRVHATLGKYGYRVEGASDAFGKKGRQIVAELMAKLPPHTDQALRRVLDQLDHVCENLKWIEEKMIEVFVPCPETTWLKTLPGVGDILAVVIWTEIGTIERFSRAEQLASYSGLVARENSSGGKVRFGPVRRDVNVYLKWAFVEAANSSVLNRKRCGYDHISRLYERIKARRGHGKAKVAVARHLSEASFWMLKKGEPYREPMSSTQR

SEQ ID NO: 459926 - protein, 309 aa, unidentified
MKEQLVYLGVDIAKSHLDAAIGEEKRRFSNDTIGHRQLIKWVRQLSAAVQVICESSGGYERGLVRALVGARIKVSLVQANRVRQFARAAGILAKTDRIDAEVLCEFGKVMQPQTVTAATLEQEHLRELESQRRHLTHLLVMEQNRGARVSDASVQRLNRSLINQIKKQIEKLDLLIKEHIEQSPGLSAKAEKLTSIKGVGLRTAALLLAQMPELGQLNRREVAALVGVAPFNRDSGKMRGKRAIYGGRRFVRHGLYMAALVAARHNPILRNFYVRLRAAGKPAKLALTATMRKLLIVLNSALKTDLGYA

SEQ ID NO: 459927 - protein, 324 aa, unidentified
MSSHEIVGIDVAARKLVVIGERLTLAQYENTAAGRSKLVNALCRNQRPVRVVLEATGIYFLDLACALAAAEIAVMVANPKATHHFAEAILQRRKNDPVDAAMLREFGRRMDFVSWQPPRHELFGFRALTREVQALSKTVAAARNRLHAITATQLAPTAVIGALERQIAHNQALIDELVAAAVAQTESDPELARLLARTDSVPGFAAKAAVLVIGELAVLPPMTARQWVAQAGLDVREECSGTSLARRPRLSKRGNKRLREALFYPALTAARCCPAAQAFVDRLVAHGKTRLQAIVALMRKLLHGLHAMWRNDEDFDAEKLFAPA

SEQ ID NO: 459928 - protein, 365 aa, unidentified
MQTVNRSQTLFVGIDVHKDTHTAVGLSPFGEKVFEMKIGNQSDDFISLVEKTKVEAERAGLVPSFGLEDVHSWGERLSSFLVEEGLPVRTVAPILVDHRRSKTTHPEKSDSLDAQGVAEVMIQRIDTLPVYKLTEEAQKAKQIRELSLEREWLVKERARLKNQLHILLHRIHNTGYRTKFKDSFSKKALRYWSRSIPKNTDMILAQRTKRALRRVLDLREEIQEIEEELTAMMKENKQTLSTASGCGTVIAAEIIGEVGDVNRFHSPGALAKYAGCAPREHSSGKTIRWRKTRSGNRRLNRAFHRMSLSQISRSGNDAARVYFKRKISEGKTKAQALVCLRRQLVNVVWMMLKHRTEYVYPQKNV

SEQ ID NO: 459929 - protein, 348 aa, unidentified
MDNATRWIGIDLHRRRSQIAVIDEHGELELSRRIVNDRETFLELLGDPDGTHVALEATYGWEWLAELLEEAGYDLHLAHPLRTRAIAAARVKTDAIDAKTLAHLLRAGFLPEAYVAPRELRDLRELLRHRATLTRMRSAVKNRVHAILAKHGIANEHSDLFGKGGREFLAELELRDAPRRRLDSLIALICDFDREIQTTTAEIEQRAKADDRVEVLTQIRGVGRYTAMLIIAEIGDIHRFPTARHLCSWAGLAPSVRSSDGKARLGHITRQGSPALRWALVEAAQKITTGSGPLREKFERIAKRRGRKIAKVAIAREILTLAYYGLRDGEIRCLARRSRASAKEKLAA

SEQ ID NO: 459930 - protein, 323 aa, unidentified
MENIFIGCDVSKSKIDYCVLSKDKDKNNSFYGQFENSLDGYEKFLKTIAVNFSFQNPIIGFEATGAYTASFQKYLSDNAILHKMFNAKKVSKYTKSLDIQGKTDKSDSYAIAHFASIQDLNVFSFKYSDLKEKYTKFTTSLRLIMKMRVQLNNSVKSLSRGNDLFLLMDELEKSKYELKRREKNIKDIAIEQLKLDYPVVNEINEKYSGVSYGLLLSLVPKIYDDIEQYSINQTVAFLGFNPVSFQSGQMRLNDKLNIFGDKELKRLVYMSALSSVSHNLILKQKYQEYIKKGKTKKLALTIIGRKLLVLIIKDIKKYKRLKK

SEQ ID NO: 459931 - protein, 391 aa, unidentified
MVCVGIDVAKDKHDCCILDSDGMVRADCFTIPNNMDGFKQLLQTIRNCTKKSDKIKVGLEATGHYSYNILGFLLDNGLPTYVINPLHTNLYRKSLSLRKTKTDRVDARTIATMLLSDVDLKSYTDIAYHNEELKSLTRYRFDKVQERAKLKQSVSRLATILFPELEGLVSSIHGTSIYALLSEYPGTKQISEVHLTKLTNLLTTASKGRYGKEKAIRIREAARASIGSVMPAKSLELKHTIKLIQELASEINEIEDSIQKIIDELNPPILSIPGMGVNSAAVILAEIGDFSNFSSPDKILAYAGCSPSTYQSGKLTNCYAHMEKRGSRYLRHALYNATKYVCYWNPVFAEYLAKKRAEGKHYNVALSHAMKKLVRLIYALQKSGKAYLAAA

SEQ ID NO: 459932 - protein, 331 aa, unidentified
MKIREIIGIDMSKLDFHACIHTTQVFASFENSTKGFKALLKWVAKNSPHKPSQTLFVLEHTGRYSHNISYHFSANEIEFALVPGLEIKRSLGITRGKDDKIDAAKIALYGYRLRDEIKPTKLPGKQLDKLKRLLTLRDRMVRQRAGYKASLKEDRHVFCEEEAREIIEHQEDIIKVLSAKISRIEKQMGEIIKANKKLNKLFKLLTSIKGVGEVTARYTIVYTAAFTKFATWRKFASYCGVAPFPHRSGTSVKGRNKVSNLANKKIKSLLTMCVGSAIQSNPEMKAYYERRLKEGKSEMSTQNIIRNKLLARMFAVVKRGTPYVNTMKYAA

SEQ ID NO: 459933 - protein, 465 aa, unidentified
MARKSKNVKSKGHKRLPRSLKTIYANAAGIDLGSREHWVCGPPREDGTPNVQRFGTTTPELFRLADWLKEQGVKTLAMESTGVYWIPLFELLDSRGLEVVLVNARHISNVPGRKTDMIDCQWIQLLHSCGLLRGSFRPSDDICRLRALIRERNTMVEQRSDWVRRMQKALDQMNICVHHAVSDITGVTGMAIIRAIVEGERDPLALARLRDARCRKSEKQIAEELTGHWRPEHLFNLRQALKMYDQLCAVIEDYDTEILTYITKHQPEQAASHPAPAHNSKSKARTLAKRGQEPLRQALYAFSGFDLTTIDGIGVDTASVILSELGLNFSMFPDESHFVSYLRLAPNLSISAGKKVPSKFKPTTCTRVSTALRMAALTLRNSKSALGGLYRRIAWRKGASVAIFSTARKLAQLIYRLVRYGQAYVDTGTEAYDARFNQRRLKFYTKALKEMGYTLQPLTENTLAA

SEQ ID NO: 459934 - protein, 418 aa, unidentified
MQVETDEPEVIERVAALDVGKAEVVCCARVPGPGGQRMQEVRTISTMTAAVLALGDWLADLGVTRVVMEATSDYWRAPFYLLEDRFQTWLVNAKDVKHLPGRPKTDRLDAVWLCKVAERQMLRPSFVPPPQIRQLRDLTRYRVDLIAERTAEKQRVEKLLEDALIKLSVVVSDPFGVSGRAMMAALVAGERDPAVLAGLARGTLRSKTARLGEALTGRFTDHHAFLLDRMLHRIDGITADIAAVQNRIDAQIAPFAQAVARLDAIPGVGVTAAQTILAEVGTDMSRFPTPAHLASWARFAPGVSESAGRKKGNAGTGHGNRYLARVLGEAAVGAARTDTFLGERYRRIARRRGKNRAIVAVGRSILVIVWALLSDQEAQFVDLGPDYYDSRTNPERKVRQHVRELQSLGYTVTLSPAV

SEQ ID NO: 459935 - protein, 342 aa, unidentified
MQITTIGLDIAKNVFQVHGIDAGEKVVVRRQLRRSQVLAFFEALPPCLVGMEACASSHCWARELTKLGHQVQLMPAKDVKAYVKRNKNDAADAEAICEAVRRPTMRFVQIKSVEQQARLMLHRARDLLMRQRTQLINALRAHMAELGIVAAQGREGVKELLRIIASEQDARLPVDAHASLVVLAAGLQALQTMIGSIERRIIAQHRSDEASKRLRSIPGIGIVGATAIAATVPDPKLFRSGRDFAAWIGIVPRQDSTGGKQKLGPISKQGDQYLRRILVVGAHAVLKQARHQPEKYPWITQLLARKPFRVVAVAVANKMARVAWALLAKGGTYRAPALAAAA

SEQ ID NO: 459936 - protein, 359 aa, unidentified
MQRNKISFKGQKIYIGIDVHAKTWEVCVLTESGYKERHPQQASAKTLFDFLKKHFPDGEYHAVYESGFSGFSTYYALKEYGINCVVTHAADVPTTQYEEVMKTDKVDAAKLARSLRSGDIRPIYIREKENIDDRSVIRIRKTIQKQLSGYKARVKHLLHCNGVEIPERFARPGTHWSRAFIKWLKEDVVLLSSSRLSLDLLVKQVETICQTLLDATKSIRRLAQTDRYRNNYELLMSIPGIGVSVAMCILTEIYDVKRFRNENQFASYLGLIPTCHNSGEKTASGEKTFRGNKHLGPMIIEAAWIAIYRDYGLGMAYARYKQSMKPQEAIVKIARKMSNIIFSVLKNSRKYEPYRWDKE

SEQ ID NO: 459937 - protein, 348 aa, unidentified
MDILGGFDVHRKQITFDYVEMESGESHRGKIQPADRENLRSWLEQFTERFSGKQTAIAVEATTGWRYVVEELRRAGVEPHLAEPAETRALQGRKKRAKTDRLDARHLRELLVIGRLPESWVPPEHIQEIRTLIRMRHSMIEERTAHQQRIHAQLFHNGYPQERNLLAAERRERLERLELPAAACTVVDLSLAMIDHINEELEPIEAKLRAYARSQVGCQALMEHYGIGELTGVAILSELGDTRRFSNSKKAVRFAGLDVTVHSSDGKRAAGKLSRQGPPVLRWAAFEAAMVARRKGSPDHDYYVETKERLGANRAALSIARKLIRRAHHTLRELGEESMSEPAISSSA

SEQ ID NO: 459938 - protein, 351 aa, unidentified
MKYYISTTEFNCGIDLHARQMYACVMDRQGKKLLHTNIVGNDWEYFLKRVAPYRHDLTVVSECTFNWYWLADACFEADIPFVLAHALYLKHIHGGKNKNDRIDSEKLAHLLRANLIPPSYVYPAERRPVRGLLRQRMSYVWERATLKTHLSMNQTAEGLVPASKCDHNRDTWEERIVAQYSNPLHQFAASRDMDMIRAYDTQIEKLEAEIIRQIKKDLGRDYHLLLSVTGIGRVLAMTLLYEIDSIGRFPTVKDFLSYCRLVKGSVASAGKVQGLTGGKMGNAYLRWAFGEAAVIAKRNHPLLKPYAEALTAKHGKFKGNAILANKLARAVYFMLQKGTGFDAERLVATAI

SEQ ID NO: 459939 - protein, 411 aa, unidentified
MLFVGDDWAEAHHDVEVVDEAGRVLARRRLPEGVTGLAALHGLIADHLGDHAEPAEVLVGIETDRGPWVQALVATGYTVYAINPLQVARYRDRHGVSGAKSDPGDAHVLAELVRLDRAHHRPVAGDSETAEHIKVLTRSHQGMIWSRQRHTNTLRSMLREFYPAALVAFADDLAGRDALAILAIAPTPEQGRALSRPRIEVALRRAGRQRNHAAVAERVQAALRSEQLAARPGVVGAYGVSVQALVAVITELVAQTAVLEAEVGASFGRHPDAEIYLSQPGLGPVLGARVLAEFGDDPHRYADTRARKNYSGMSPITRASGTKRVVLARHARNRRLADALYHQAFAALTSSNGARRYYDSHRARGATHHQALRALSNRLVGILHGCLRHHQRYDENHAWQPPTTNTQENAA

SEQ ID NO: 459940 - protein, 411 aa, unidentified
MRLFVGDDWAEDHHDIEVMTGAGTVLAKRRLPEGVTGIAQLHELTGRFLGEGAEDAEVVIGIETDRGPWVAALAAAGYTVFPVNPLQASRYRERHGVSGAKSDGGDAHMLADMVRTDSHQLRPAAGDSPQAEAVKVVSRTHKTLIWERTRGVQRLRHQLREYFPAALAAFEDLDAPDALELLAKAPDPAHAAKLTRAQVSAALKRARRRGIAGKTDAILAALRGEQLGQPPALTAAFAATARSLIAVIITLNEQVKALQGQVEAHFGRHPDAEIYRSQPGMGAILGARVLGEFGDDPHRYADGKARKNYAATSPITRASGKKKVVAARFIHNDRLVDALNAQAFAALNASPGARAFYDELRARGLEHNDALRRLANRLVGILHGCLKTRTLYDETTAWGHRENLPQSSVAA

SEQ ID NO: 459941 - protein, 342 aa, unidentified
MNHYAGIDVSLECSSVCIVDVKGKIVREAKVASEPGALIAWLHSSGFELERIGLEAGPLSQWLFAAMKAAGLAVELLETRHVRKAFEAMPVKSDRNDAQGIAQLMRLGWFRPVHCKSMDAQEVRATLTARKLVQSKLRDVENSLRGILRGFGLKVGKTTEREFAGRIEELVSGHPRLEVIARALLAVRAVLRKEFAAFEKQTRKMAQTDARARLLMSTPAVGPIVALTYASAIDDPSRFKSSKQAGAHFGLTPKKYQSGETDYTGRISKIGDSAVRTVLYEAAHIMLTKPLKGCSQLKSWAMRIARRAGMSKAKVALARRLAVIMHRMLANRTPFNAAAAAA

SEQ ID NO: 459942 - protein, 313 aa, unidentified
MCTLGIDVSKNKIDLCLLTAGPGGKKKHKVLTNEPAVARKVVDWLNAQKCVPESVTVVLEATGIYHENLAYGLHEAGVSVCMANPCRVREFAHGMDILNKNDAVDAFVLACYGELKSPAVWVPPSPEVRKLRALLRQRDALREDVQRTVNRLEKANSTSTPQEVIRSLERTKSWLNEELARIEKLITDHTDNDPGLKADLDLLKSIKGVKDQVGREMLALLKDGTFKSASQVAAYLGLTPVEKTSGSSVRGRPHMSKTGPSGVRAKLYVAALTASRWNKQAKAIYERLVAKGKAKKAALGAVMRKLVIYALAC

SEQ ID NO: 459943 - protein, 414 aa, unidentified
MQDLLEVCCGLDVHKETIVACLLKGSVNDEKPGKTIRTFSTLLKDLEELKTWLETENCHHVAMESTGIYWQPVYNVLESAFDGNISIIVANAKHMKNVPGKKTDMKDAEWIATLLRAGLLSGSFIPPQEIRELRNLTRYRKSIIEEISSQKNRIEKHLQSCGFKLSNFLTDIFGVSGRAIIDHIAEHGSITAKEVENYVRGRARNKIEDIKLSINGRMNKHQREFLKLLLKHLDETYKHLYEIEESINAEIEKYKRQIEQLDGIPGIDVTAAAAIIAEIGTDMDKFKTAEHICSWAGLSPGNNESAGKKKSTRVTKGNTYIKRILCEVAWSITRIRDSYLATWYWKVKQRRGTKKAVVALARKILVIIYTMLKNNTDYDERIFDEVRKKQEIIRVKRIINEARKLGLEVTVSQI

SEQ ID NO: 459944 - protein, 304 aa, unidentified
MKILACDVAKASLVHFDGVSVAQTDNTPKAIQKLLDAHPEHLVVCEPTSRYHQPLVDAADRLGHQVILVNPREARKYKDSISFRAKTDPLDARYLYEFVLRNRDLLRVYEPVTPALTKLRELIGQRQAAVSARTALTQAFGGELTKVQKEAIDALNNVVREMDQAMEEIAKQFSSYARFRQIPGVGPLAGCVLVYALESRAFADSAALVAFLGLDVRIRQSGKYRGMQKVSKRGDPLLRFILCFAGRGLLHSKLGLEKREQLTAKRRQFPERMVIAARKILRVAFHLFKTQQDFDPQKWSWALT

SEQ ID NO: 459945 - protein, 384 aa, unidentified
MNKHSILFIGLDTHKEFNEVAYIEEHRGSQPVHLGRIPSSKVAVQKLVRQFESKYPGATLHFVYEAGPCGYWIYRLITSLGHCCYVVAPSLIPKKSGEKIKTDKRDALKLSKLLKSEDLTPIYVPEPEDEAVRDLSRAREVAMKDLKDAKYQLKALLLRNNINYKGTANWSQKHLRWLTELVLPHPAQHIVLQEFLHTITERISRLERLDNELTHHVHQWRYYPVVKAIQAMRGVRLLVATGVVAELGDLSRFDHPRKLMSYLGLVPSEHSSGGKRHIGAITKCGNGRARRLLVEGAHTYRYAANISTDMQKRQEGLPKDIIDIAWKAQLRLCKRYKKMIAKGKHYNLVVTAIAREMIAYIWAIAKEVVLTPVNTKLRLARVPA

SEQ ID NO: 459946 - protein, 357 aa, unidentified
MIEGSWVGLDVHARSVLAGVLDAGSGELYTLGVPAVSEQTVAWLQTLPQPVRVAYEAGPTGYGLARACAEAGIACTVAAPSKIPRASGDRVKTDRRDAERLARLLRLGELVSVRVPDPLEEAARDLVRAREDARGDLMRARHRLSKLLLRQGLVYEASAWTIAHNAWLRRQRFARRPLALAFDESYGVVLQAKARRDALDRAIAELAYEPPFADVVARLVCLRGVSTLTALALTVELGDWHRFRPLSLGPFLGLTPSEDSTGGRRRLGGITKAGNTHARRLLVEAAWHQRRPLRASAALERRRQGQSAQVRARADASARRLHARWHALESRGKRRTIVAVAVARELAGHCWALATMT

SEQ ID NO: 459947 - protein, 446 aa, unidentified
MNDRSGLSRGDRNRNARLARLRQLLPLDHAIVGIDLADDKQAAVVTDHDSRVIARRRVNARAWELGELLDWAVVKASAAGFASVTVACEPTGHRWRVLDQLAAGRGLALVCVQPLLVYRAREGEDLTRDKSDPKDAVLIARLASELRCYEPERADAVWARLRHLGARRRQLTTDATAQVNQIRDLLECAWPAVLGASGSPFRSVTWCAALAVVLDRCAGDLGRVARLGPARFEGAVRRELPRWGGVRPCLRIVRALYAALRDPAGVMVHRPGALERAHLALGDWRDTRARLADAEARMAEVLDDLGLTALVTTIAGLTPAGAAAILAETGDPARFASPRSLVKHAGLCPRDNASGEHQGKTSISGRGRPALRLAAWRAVWAAMPNNPVMAARFTYLTTRQDNRLARQQARTACAAALLRWIHVVVTRRVTWDPAIAAGGTSLQHAA

SEQ ID NO: 459948 - protein, 374 aa, unidentified
MHMMHHRQIRYLGLDVHKATIAVAIADESGAPTSYGSIANEPSAIRTLMTRLGGSDVQLHVAYEAGPTGYALHRQLTTIGIDCIVVAPSLIPKRAGDKVKTDRRDALKLARLLRSGDLTPVWVPDQAHEALRSLVRARADAKADQLRAKHRLSKFLLRQACWPPIGVRNWSQRYFSWLRQLEFEHLPDRIVFADYLAEVTAAGERIKRLEAALHQCAQTSSQLALIRALQAFRGIGFLSAVTLVAEVGDLRRFRTAPQFMAYVGLVPSESSSGGKQQRGSITKTGNSLLRHVLGEAAHHVRRAPRVSGALKRRQADVSPEIVELAWRAQLRLHARYRHLSLRVGALKALTAVARELAGFIWAAGQVLLEEPAAA

SEQ ID NO: 459949 - protein, 379 aa, unidentified
MTLDKYFRQCVGIDISKDKFTACLYMYDMASDAGCCTESIDFPNNRTGFNQMVKWSRKESQKGFPLVYLMEPTGSYYEPLAYHLHKIGQTLYVVLPNKARKFCEYEGIKTKTDAMDARCLALMGCKNRKLRPWEPPLPIYRELRQLTRLRADLVKMQTQMLNHIESIDHMEDVAPEVRKSYEKLLDTIEKQLEKNEKDIAAKLAQDKELETKVKRIATAKGIRVGTVTCIVAETQGFHLISNRKQLTSFAGLDVKARQSGKDDPRHHITKKGNAHIRAALYMPALSAAHCNRQMAQAYGRICAKHPDVKMIGVTAIMRKMLLLVYSLWKSGEEYDETRDNTHTPRKKEPQPTNSPEDCLKPNAEPTDWNAADKEGNPPF

SEQ ID NO: 459950 - protein, 323 aa, unidentified
MNAPIYCGIDVAKRNFVIGFSHQKKTKTETNNAKGIQHTLDYLSQFNVALITLEATGGLEIPVAKALARAGYRVFIANPLKASEFAKSQTRAKTDAKDAVNLAFYGLTCELKGEVEHQLYVPLSEPEEQLEALVVRRRQLVDMRVAELNRLQQSHETQLDNIQQHIEILDKLIAELDKDIDDQSKHFSDKADLISDIKGVGKNCVAVMMSSLPELGKLSSKRIASLVGVIPHPQESGQWKGKSFCYGGRAIVRNALYMAALSAIRFEPVFKAFYTRLVAKGKAKKVAIMACMRKLLTIMNALVRRNEKWDATRYLSTESVGQN

SEQ ID NO: 459951 - protein, 367 aa, unidentified
MISVGIDVSKGKSTVCILKPYGEIVSKPFNITHTQKDLSELSSMLFRLNDEVKIVMEATGIYHLPVLTYLQEKGFFVSVINPYLMKSYRNESLRKAKTDKIDSRIIANYGIDHWFKMKEFQTSGEIYEELKLLGQQYRHYMKLHLLSLAELTHLLDLTMPGIKNLLASWNETNRKDKRSDFVERFWHYDVITSMSEQEFTEEYILWAKEKKYVPSQEKAKVIYTLAQESIPTLPSETSSVKMLVTEAVRVLKEVDATLGLILSRMQEIAKTLPEYSVVREMGGVGNTLAPKLIAEIGDVRRFRNGKALVAFAGIDPPPYESGQFVGCNRKISKRGSASLRKVGYETMRSLKMRSRPEDPVYRYVVKK

SEQ ID NO: 459952 - protein, 301 aa, unidentified
MTIVNTRAITGGVDTHADMHVAAALDPIGGLLGVQEFPATAGGYAGLLGWLGGFGTVALVGIEGTGSYGAGLARHVTAAGIRVVEVDRSDRQDRRRQGKSDPLDAVSAARAAQSGRARGAPKGRDGAVEAIRALMVAKRSARSERVQTINQARALVVTGPDDLRTRFARHTAAGLVSGLASLRPRPGDVVGYATRIALRELGRRAEFLDAQLERLDELIAPLVAARAPGLLALHGVGPDTAALLLVAAGDHPERLRSEAAWAHLCAVVPIPASSGKVTRHASIPAATARPTTPYGGSCSHG

SEQ ID NO: 459953 - protein, 468 aa, unidentified
MNNFYLGGDVSKGYCDFIILNEDKKTALKNFQLDDTAKGHHLLSNVLIDFVSEHPGCAIIAGVESTGGYENNWFESLCELQDRIEISVARINPIGTHHSSRASLTRVITDKKAAVNIAEYLINYKDKLIFKKTDKFCSLRRHWKFVRLLTKQRTQLYNQLEGNLYNANPELLRYTKYGYPKWLLMTIMQYPTAKHLSKARISALSSIAYVSEARAAILINRAKSSVASAADNITGELIISLVKQIISLTKLINKRSKLIADNCQLPEIELLKSFNGIGDYTAVGLILKIVSVDNFSSTKKLASFFGLHPVWKQSGDGTSGMHISKQGSREARALLYNVAFTAIRSNPLIKEIYVRHCSKGMKKIKAIVACMHKILRIIYGMLKNNEKFNPEKDKANSKKMLDNHLKSKKVTSKLRRFQELDSDAPVSSKQYRKRKQQEMSQNEITSLNTGSVSHCSTESESQNSTEKN

SEQ ID NO: 459954 - protein, 466 aa, unidentified
MAAVMIGVDPHKASHTAVAISAAEEPLGELRVRACAAQAERLLTWAVEGAGGLGHLLAQQLLAAGERVLDVQPKLGARVRLLAAGDVNKNDPNDARSVAIAALRSAGVGEVRPDDHAAVLKIWSKRHRDLGRTRTQVVCRLHAVLCELIPGGVSKAITAGQATRILASIAPPDAVAAARCELAAAFLEDLRGIYARILETKKKLIAAVQASGTSLTGLFGVGPVVAATVIGGVRDVSRFGGRDHFAAYNGTAPIEVSSGGRKVYRLSRRGNRRLNHAIHMAAVTQVRHRHSEGRAYYDKKLAEGKTRKEALRSLKRQVSNAMFACLQADARRAAARAEGPGGQQGNDSVASAAGLHPRHRLFGQATPGPGHHTTTAAGNPPSGPVPSQSDGAPGRAGHSPVAATLPSATPQVQVERPQRSEDERPGGAARRRPYSGREEGQRPRSAVKPQGPKATSHAAKRTRRNS

SEQ ID NO: 459955 - protein, 340 aa, unidentified
MPLYGGIDLHANNSVIVLLNEQDKVIYRKRLSNDLSAILRQLDPYRPEIKGLVVESTYNWYWLVDGLMEAEYRVHLANPAAMQQYSGLKYTDDDSDARWLAHLLRLGVLPEGYIYPKAERAVRDVLRKRAHLVRQHTANVLSVQNILARNTGARFSGKRIHELTKQDLTTVLADETQVLAVTSSLVVLDCLRHQIKTLEQTVHKHLHHTLSYEQLLTVPGIGTILAQTITLETGAISRFPSVGHYASYCRCVDSTKLSNGKRKGTGNIKNGNPYLAWAYMEAAQFAMRFQPEAQRFYQRKLAKSRHNTVLARKAVAHKLARACYYLMRDLVPFEATKAFG

SEQ ID NO: 459956 - protein, 371 aa, unidentified
MSELLAGAKPARLRVGVSPRPPWAQKPGTELGAALTLAVPNPDSRLGLSPHSQGRVMDELSAVFVGIDVSKDRLDVHLRPTGDAFWVPRDAKGLDSLTGRLNDLPAALVVLEATGGFEATVAAALAGAGLPLCVVNPRQIRDFARAMGHLAKTDTLDAEVIALFAERVRPQARPLPEPEKSHFAELVGRRRQIIEMIGMEANRRHRATDKQLARRLDRHVAFLETELAEVDRDIGQAIKTSPAWREAEALLKSVPGIGDVTARTLLAELPELGTISRYQLAALVGVAPINRDSGLMRGRRNIAGGRTSVRNVLDMASLTALRRRSPFRAFYDRITSRGRPKKVALVAVMRKLLTTLNAIVRDHTPWQPLSA

SEQ ID NO: 459957 - protein, 332 aa, unidentified
MNYKHYVGIDVSKEKLDITLMNDQGCIFQQFIIENSAKAWKKLLNSWFKNGLVVLNKTLFCLEPTGHYSNITVATLLGAGAKVWVATPSDIRNSIGMQRGKNDCIDAARIAEYAYRFVDKARLVQSNEMQRQELQQLLSQREILVKDRAKYTAQINDYKGRIGEQPYKLIGKINHQIIQQLEKAIKTLEQQLEAMINNIPELKQQLELLKTIPGIGNVLAQTIIVMTNGFTRFDNPKALACHAGIAPFEYKSGSSIKGKNRVSYRSNRRLKSLLHLAALSVIRTKSELSIYYMRKVAEGKNKMSVINAVRNKIIYRIFAVLKRNTPYRLELP

SEQ ID NO: 459958 - protein, 394 aa, unidentified
MGVRYGLTLFYLLEFEQNVRSCLFAQYPEYPSGEKTKGDLSLYKLIKMMNLLKQVLGIDVAQKELVVSLGRMNADLSIDLYAKRVFANKESGFIALIKWVGKLTDESIAVHYVMEATGVYHQKIAYFLDDRGYQLSIILPNKISSYMRTLDNKTITDSTCADAIAQFGLERKLDPWQRPNILYKKIQQLTRERSQVVDERVIAKCQLHAENAEAQPNDNSIKRLKSRIRFLNQQEKEIKQDIEACIKEDDAITKNIKNLTSIPGIGRLTAAIVLAETNGFELIRNKKQLTSYAGLDVREKQSGTSVKGKPRISKKGNRNLRKSMYLPALTAVKHINDYKELYARLLSKSGIKMKGLVAVQRKLLELTYVLFKNNTTFQNDYKQEKSATAKADTL

SEQ ID NO: 459959 - protein, 414 aa, unidentified
MQVLYPRCAGLDVHKQTVVACVRIAGEREATTEVRTFPTTTAGLCALAEWLAEHGVTHVAMEATGVYWKPVWHILSDSDMTLILANAAHVKNVPGRKTDVNDATWLAELLAHGLIRASFVPPPAIADLRTLLRTRKQLVREHASHIQRVQKTLEDANIKLDSAISDIMGKSGRAMIEAMIAGETDPHKLAALADRRIHAPRAVLVEALTGRVGSRHRFLLRLHLDQIDALERATAQLDAEVEGSLAPFHDAVKLLDTIDGVDVLAAEVILSEIGLDMTRFATDRHLLSWACMCPRNDESAGKRRSNRIRKGARWLKATLIQCAWSAVRMKCRYLSGLYYRLKARRGPKKAILAVAAAILTAAYHMLKTGTPYRDLGPSHFEPRQRHAAARRLLKRLEGLGFAVEITPVTPTVPA

SEQ ID NO: 459960 - protein, 329 aa, unidentified
MHYLGIEVAKAKLDCCLLLELSSCKRKTKSFSNNDSGFTELVHWLDKQRISASDTHAVMEGTGVYHERAAIALHDAGMQVSIINPAQARDFAKGLAIRSKTDGLDSLVLARYGALVQPTIWIPPTPQARALQALLSRVDAVHQDLLREKNRQEKADATDTPELIRQSLADSIMFLQTQLKKLRQGIDDHINRHPELRDDAALLITIPGVGIKTSQHLLSVIHLHHFHTAERLAAYLGVVPIQRQSGSSVLGRPKLSKTGPSHIRAVLYMAAVVASRHNPHVKALYERLIASGKSKMSALGAAMRKLVHLCFGVIKNRQPYNKNYSQESC

SEQ ID NO: 459961 - protein, 350 aa, unidentified
MNPCLSRMTVGVDTHADTHVAAAVDPLGRTIATAAFPTTLAGYADLLAWARSHGDIDGVGVEGTGCWGAGLTRFLADHDVRVVEVLRPDRRDRRSHGKSDTLDAEAAARAVLAGTATNTPKSRDGVVEAIRALRSARDGAIKARSAARNQLRCLIVAAPAGLRADLEDLTWTRLVAACANLTAGDLTDPAEAVKTALASMARRWQHLHAEITALDRQLDTLVTAAAPQLLERTGIGVQSAADLLITVGDNPQRIATEASFARLCGVAPLPASSGKITRHRLNPGGDRRANRALYTIVITRMRLDERTRDYVARRTEQGRSTREIIRCLKRYVAREIYRDLIAPTQPVTTP

SEQ ID NO: 459962 - protein, 401 aa, unidentified
MKEFNTEAVRIETASALATVRLAQALVRYPAYIGLDVHKETIVVAVARAGRDAPESREEIANKPKTVAKLVDRLNREFDGEVLLFCYEAGPCGYGLYRQLLELGHDCQVVAPSLIPKKPGERIKTDRRDACKLARTLRNADLTAVWVPDEEQEAMRDLTRARDDMKGQERKARQQLNAYVLRHGHAWPSNKTRWTQTHYNWLESLKFPHDWQQVVLQEYIDAVKAASQRVADITAQMERVLPQWSLAPVVDSLVALRGIDKLAAMVLLAELGDISRFDSPRQLMAFLGLVPSEHTSGGRRRQGAITKTGNSHARRMLVESAWSYRFPARQTAHLKRKAASASDEAKVIAWRAQKRLCGRYRTLLQAVKNTKQTTVAIARELVGFIWDIACHEMPKVRQTSR

SEQ ID NO: 459963 - protein, 404 aa, unidentified
MVTVDIGVASNTGYCATVDGRDIKPFKFDNSREGFEKFWHMVVATKSRFACDEIIAGYESTGPYGEPLAHYLMSKPVSIVQVNPMHTKKMKEVNDNSPLKTDDKDPRVIADIIRLGRTLAVVVPEGDAAYLRRLNNARERHVGEQTALLNQLQQLVFVIFPEFKTVLKNMKGKTARYLLTRYTTPEKISTLSRETLGEEMRKRSMGKYRSNDAEILINLARNTIGIKEGVSGIVLDIRHILIQLEAEARYIAEIEAEMVVTLQRIPASGRLLSIKGLGVVSVAGLIGEVGDFSKFRTRSEIMKLAGLDLYEISSGKRKGQRRISKRGRSLLRKILYYAAIQMVKKNGIMYDYYTRLTNRGMLRMKALIAVARKLLGIIHAIVRDNRDYIGAYHAPKRRMIKKAA

SEQ ID NO: 459964 - protein, 415 aa, unidentified
MALARWVGRAIGLDVPRDFCVVAICEDGTVRSAGRVPSTPEGLAMLAESLLRSDRVALEVTGSCWEVARILEAHVDRVVVVSPDDTGISSARAKTDRLDSRTLASLLWRGELEAVWMPDERCRILRRRLARREQLMRARTRAKNEIHASLQRRLQARPPCSDLFGVKGRQWLAGLELPVEERESVDAGIRQIEFLDAEIAAAERLVAQQALSWPEIRRLMTVPGVNLVCAATFIAAVGNPNRFLTSRKLVAYLGLDPKVRQSGEGPARSGRISKRGSASARWALVEAAWSAVLQPGPLHAFYERTSARRGHGKAIVATARKLAILFWCMLTRSEDYAHQQPSLTKKKLRRLEITAGAPKRTKTAAGVWSTNEMMREAELQLARQAEVSYRRMVTDQQAGAPARPKVGAGVTPERA

SEQ ID NO: 459965 - protein, 322 aa, unidentified
MASFLGIDVSSLSLDGWVRPQAVRIAVSNNPAGFEELERTLRKFSIKRILLEATGDYERDVLRFLQDAGYKVIRVNPARARKFADSMGVKAKTDAIDAEVLAHYAEVIPDQPTLQISPDRALLRELLMQRDRLVQQRDDDRRRLKQAQSLVVANFLKANLQHFRSQIRLVEQEINQQAAKLNDERIARLTQVKGIGMVTAGKLVALLPEIGRVESREIASLVGVAPFNHDSGKSLGKRSITGGRFEVRRTLYMALLVAVKYNPALKARYEALRGRGKLAKVALVACMRTFIVRLNAMIKTGTPWRDLILPQPAGTTQIEKAA

SEQ ID NO: 459966 - protein, 426 aa, unidentified
MRVMYERVAGIDVHKDMIKVGIRVPGHRPWTRASEVLEYRTFFGVLLTMAADLRRRGVTHVVMEASGVYTEPVYYALAGRGFEQVAVINPAHAKALKGHKTDAKDALRLAELFECGLLRSSYLPPQDLKDLRDLTRYRAKTVQARTSEIQRLAKALESAGIKLDSVVSDLTGKSATLMIDALIDGERRGQVLADLAIGRMRTAGKLADLSQALTGRFTGHHAALCRLHRDRIALFDAAIADLEYDIVVKAAPYQRELDLLKSVDGFGDAVAWAWLAEIGPAPHEYFASHEKLASWVTLCPGNHMSAGKRAHGRTGTAGTYIKPMLVQAAWAAIRHEGRLQARYHKLVRRFGGPKNPAAVKKAILAIAHTLLKIAYQVLKSGQPYQDLGADFYTRRESPQQRRAYLLRQLEKLSPGCTITITPAEAA

SEQ ID NO: 459967 - protein, 414 aa, unidentified
MRMETGQKGRIQTRKENIIYVGIDLHKETHKAVMLDCWNQKLGEIIFENKPSEFHKLTKKVSRFVTEEKTAVYGLENAYGYGRALAVWLLKKGCAVKDVNTALSYAQRKSVPMYQKSDSYDAEAVALVLINMLDKLPDAVPDDAYWTLSQLVNRRDNICSYQQRLKNQLHEQLCVAYPSYKQFFGDISRRTALYFWLRYPSPEHLKGKTAEELAAELRSISHNNCSVKRAEKILERVRTDGLTTREHQESRDAITCSIAGDLEHYREQLEIVETAIENMLPTFNCTLMTMPGVDVITAANMLSEIGDINRFPNANKLAKFAGICPINFSSAGKGKDMCPKQGNRRLQAIFYFLAIQMIQVSTNGTPRNKVFREYYLKRVAEGKNKQQALICIARRLVNIVYGMLKNHTEYREPE

SEQ ID NO: 459968 - protein, 284 aa, unidentified
MRFYTQQHLYYCGVDLHARSLYVCILDQAGAVQVHQNLRADPQAFLHFIAPYRQDLAVAAECMFAWYWLADLCEREGIPFVLGHALYMKAIHGGKAKHDRIDAHKIAALLRGGLIPTAYVYPARMRATRDLLRRRMHLMRKRAELLTHIQNTTSQYNLPAFEKSIAYETNRAGLADHFDNPFVRKSIEVDLALIDHYDPLLKALELYILRTARQHDPNALYRLRTVPGIGKILSLVILYEIHDVRRFPRLQEFLSDARLVNCAKESAGKRLGSGGKKIGNVHLK

SEQ ID NO: 459969 - protein, 369 aa, unidentified
MELPKTRGTKKGAAATKQQAIQYLAFDVHQATVVGVARDERGSIVLRATIPTEARAILQLVKSAGPRVHVVFEEGTQAQWMHDLVVPHAEKVIVCNTRRRNESGNKNDRLDAEALSEQLRLGSLKPVFHGVTGVLTLKELVRSYNNLVEDSTRVMQRIKALYRARAIPTKGTSVYRTTQRKEWLAKLAGGSRVRAAVLFSHLEVLLKLRPPAKAAMLAEARRQPGWKVLRSIPYLGPIRVAEILAIVRTPFRFRTKRNLWPYVGLAVVTRSSADQEFVDARLPKRRRPPLTRGLNRNHNPILKSVFKGAANAATVRPGPLRDFYEASLARGVREELAKVTLARKIASVALRLWKKGELWDPNKLTMQVA

SEQ ID NO: 459970 - protein, 424 aa, unidentified
MDVVYSKVLGIDVHQAILACCMVSCNESGELVTEKKTFKTYGQDLHELANWAKTANLDLVIMESTGIYWYTPYQVLEKVGIRAAVVNAREVRQMEGKKTDMGDAEWLAHIGRLGVFCRSFIPEKIYRELRIPSREIIKLTDDLSAEKNRFGKILNEQGFRLNVVFSDIFGVNATIVIDGLLSGKSIEEILNEINFNVLKKDPSEIKAAIESGTLNESACITLITIREHIQFLERQIENLRSYLHEKVEQLHPESLHFLQTIPGISLDSAVQLLVELGGDDMTPFVNAERLASWIGVCPGNNESAGKRKHGHIRKGNYYLRRILCECASAGVKTKGTTFQSKFRALRIRKNYKQALIAIVHKMVHVIFVLLKNRQCYIDPQIDYEKESADKNARRWVKLVCELPNWKIVARNLSNGERFASSNNA

SEQ ID NO: 459971 - protein, 354 aa, unidentified
MKKIFIGIDFSKEKFDATLIKAEGLKECAPSVHEVFDNKTSGYRRLVKWVKAHAEGLAADAWLFCGENTGGYSIGLSNYLYASGYDMWLECAYKIKHSAGIQRVKNDKADSRAIAEYAMRNYDKMMPYKPQSASLTCLREVFLYRHSLVRQKVALQVRRDEKRLTQEKSDVRAFMSFTSKHLVTEVNKAIAKCDQKIKDIIAADDELREIFDIITSMPGIGVQNATCLMVYTNNFQKFDLDSRKIACYYGIAPFGRKSGTSVNSRRQVSPFANRMIKSLLSQAALAAIKFDINLHSYYQRLIERGKHPLLAHNNIKNKMLHILVAMVRDRVKYNPDNVYRTSNEVNLAPQVLNI

SEQ ID NO: 459972 - protein, 396 aa, unidentified
MLYLAIDQHKNYLTINIRNEQGDVLQKGQVSTSPDDIDEFFVAFVKKARKHRGYMAIVEVCSFNDWLLEKLKKTQCKEIVVIQPNHTAVNKTDKRDTDALGALLWNNRKRFEGGQRPNGIRRIFPADPADAQVRQLANFRQRLIRQRTMLINKIKGVINKHNLAHDAPTQDSTTQKFRKWIKTVQLPVVDRLEVNMNIETWELYDKQILEVENELVKRSEDSKGRMSEVYRLKSIPGISGMGAITLLSRIGDIKRFKNPDSLANYFGLTPGCHNSGGKHRIGGITKRGNAIARQTLNFAVTHIVRKDPAMKEWHKKIKKRRGAKTARVAVMRRLATIIWHILRWGKPYQFRYDPPPTTPKKGDLRSPKEVLGGMDNRNHSRQKEGTSSKCRGKAKA

SEQ ID NO: 459973 - protein, 445 aa, unidentified
MIRFFGIDIHKDVAYVCAVDGQGRIVLSLAVPMNHAFDQFAAQLTKADHVAVEASTNAFAIHDVLARYAGEVVVVNPIKTRLIAEARIKSDKLDAQNLAQLLRSGFIYQVWVPPTEIRELRSLVGQRTGLNKQRTQVKNALQALLRTHRIEYETGKVFTQAGRRWLRSLELPGLATFQRDQHLTLLESIEVNLAAYDKEIARLAGDNPVAKRLMQQTGINYYSALAIYAEIGDIERFSSPKKLCSYAGLVPTLDQSGKKCRVGRITKAGRKRLRWILVECAQVACNHDPSLKKCFDRIAQKKGRNVAVVAVARRLLVRIWHLWHEDENHRHMKKDLWTRKLQDLAYDIGCRELGKQSTDFIQDTAQELEVKLTEEQARGRARNRKKKEAVAEQTAPAPTTTGADPGSELADPDQPRQDKDKVLKVQAGWVDLETGELLKRRPSGT

SEQ ID NO: 459974 - protein, 350 aa, unidentified
MKVTTSGIDVAKSVFQVHGVDGRGNVVLRRQVRRSQVAPFFSRLEPCLIGMEACASSHYWARKLTALGHTVRLMAPQFVKPYRKNDKNDGNDAEAICEAVQRPSMRFVPVKSPEQQAELAVHRIRRRLMGKRTALINQLRGLLAEYGLVLAQGANHVRSKLPALLEECSESLPPLAVELFRDLYEELVQLEQRIGAYERRVERLYRGNSVCQRLGQLEGIGALTATAFVATVAHAAQFKNGRQCAAWLGLVPKQDSTGGKTRLLGISKRGDVYLRTLLVHGARSAMRHTPKRNDPKSRWVEQLRKRRGENIAAVALAAKHARILWALMVRGESSPQPATHGIDPLEQPAV

SEQ ID NO: 459975 - protein, 424 aa, unidentified
MNVTESTPSYDLLVSLDRSDRTAAQALMDLRRGVFITEATIDLAPEAMDAWWRGLRAAHPQARIAVAFEQPAPNLLAFFAPRKPAAIYALNPSATWAYRQSLTVSRARNDPSDARDQALYVSKHLEQLKPWAPPAAAVVQLERLTLSRRKRVDERTALTNQLQAALKRYFPQALDLLHEHLWRAMNLEFLRKWPSVQKLQTVPLSRLRKFYHQHGSRSEARWTQRTGLIAKLVPLAEAGLSDELEVAALVDQIEVLNESVHKHDQAIAELFGSEGERAERIAALPGAGPILAPRIYAAVERHAPNCESAQAMAAAVGVAPVTDQSGKKERVYRRLRCDNHTRQGFIEWAKESAKQSVWAKAFVEQRQERGQGFYAIIRALAYKWIRILWKCWQDGSAYNEEQYIERLRQKGSPLVPKTEAISTA

SEQ ID NO: 459976 - protein, 241 aa, unidentified
MALTLGIDVAVWAEHQATRARDGATVWRGRKFWTRLAYLERMWADLDLPDPAELTAVVEPTRNAWIVLAEWFRRHGARVVMVTTAQSADLRKYYSKHTKNDRIDSELLARLPLPAFAELAEDIAHEAEQALFLTRQIKQIDERVANLYADADPAGIVASAPGVGAVISAVIAGRIGDPHRFTSLAAIRAYTGLVPKVSQSGVCKVESSITKAGIRCCVRCCAPLPTRLAGSIPSSRRSASG

SEQ ID NO: 459977 - protein, 404 aa, unidentified
MRHIGLDVHRDFCEVAISEAGEVRSPGRIETTPEVLELFARSLDRKDEVALEVTGNAWEIARIIEPHVKRVVVVSPSDTGIRQARAKTDRLDARTLAKLLATGSLDALWMPDERTRALRRRLSRRSQLVRARTRAKNEIHAALIRRLIAKPKVSDLFGLAGRRWLKGLELPAVERETLDGCLRQIEFLDQEIAEVERVIALDALARGDVKRLMSVPGVNVITATTFLAAIGKANRFPSQRKLVGYLGLDPRVRQSGSVPATHGRISRQGSAPARHALVEASWSAVRQPGPLRAFYERLRVRRGHQVAIVAAARKLACLFWCLLTREEDYAFAQPSLTKKKLRRLELTAGAERGQVKPGIWSTNKALGKAERELAEQAEVAYRRLVADWQSQRKKKGAGVPVGRD

SEQ ID NO: 459978 - protein, 382 aa, unidentified
MQSIKTWVGVDVSAKTLATKRRRKNEEKDEASEFSNDAAGHRELLKWMGKGGRVCMEATGVYHLQLALMLVAARVEVIVINPRVAKDFGRALMNRSKTDRVDASTLLEYVWRMDFVAWEAPRAAVLELRELGRRLSELVHAGAEEKNRFHAKNVAAISRTVIRDVEAHVVQIEKRVNQIEKAAAVVIRGDAGLNEQFAILTKIRGVARRSAILLLTELAVLDPAMTVKQIVGHAGLDPREYESGSSVQKPTRISKLGNARLRAILYMPTLTAIRHDRGARLFYAQLMARGKKKMQAIVAVMRKLLHGIWIVLQRRMTFDSSILFAASLAKAESADSAVAANQPEPSQDHPKGRSEAEELRQQLDPGSAEATRSRRRKRSKAA

SEQ ID NO: 459979 - protein, 367 aa, unidentified
MKKVTTTSMGRRPGKLRDGKLTVGLDLGDRSSFYCVLNGAGEVIVEEKVATRPEAMKETFGRMPRSRIALETGTHSPWVSRLLTELGHEAIVAHARNVRLIGESRRKDDRLDAQALARLARIDPQLLSPIQHRSAQAQADLSVIRARYALVRARTALVCAARGLTKSFGERIRGRNPKGFSLATSETLSPPLQVALAPLLSALAAITARIREYDAQIEKLAEESYPETALLKQVKGVGTLIALTYILTLEDPRRFRKSRDAGCYVGLQPGRRNSGQSEPQLHITREGDSHLRMVLVQGAQHIIGPFGEDSDLRRWGLKLAERGGKRGKRRAIIAVARKLAVLLHHLWISCEAYEPLHNTRKRRLAAA

SEQ ID NO: 459980 - protein, 460 aa, unidentified
MNRKRSKSRVDRTMPMMHPNAAAIDVGATLHMAAVRADRATEPVRSFGTFTTDLHQLVDWFTECGVETVVMESTSVYWIPIFELLDARGFTVFLVNARDAKHVPGRKTDVSDAQWLQRLHSYGLLRASFRPKGQIAELRAYVRQRERLLEYAASHIQHMQKALTEMNLQLHHVVADITGSTGLRIIRAILAGERDPEVLACLRHYSCHSSAETIAKALTGSYRTEHLFALEQALALYDAYHEKASACDVRIEAVLKELCIHRGRGIGSVAPAPRRRHRTDQANALAFDVRAALFALLGKDITTIDGLGPYLSLKLVAECGDDLSSWPSAKHFTSWLGLAPSNKVSGGKMLSSRTRRSGGRAAALLRLAAVTIGRTDTALGAFYRRLSSRIGKAKAVTATARKVAVLFYNAVRHGMEYVDPGASSYETRYRTRVVNNLHRRAKAFGFVLQPLEPKAGAVVS

SEQ ID NO: 459981 - protein, 315 aa, unidentified
MSDVPCFIGIDVAKAQLDIALRPSGERWAVPNDASGVAMLVERLQTLHPTLIVLEATGGLERAATSALAAAGLPVVVVNPRQARDFARATGQLAKTDALDARALAHFADVIRPTPRPLPDAQTQELRALLGRRQQLIGMRTAEQNRLAGASERLTKDITAHITWLNVAIATLDDDLETMLRASPLWRANDDLLQSAKGIGPVSAHTFLLELPELGTLTRQQIAALVGVAPLNCDSGTLRGKRTIWGGRAHVRTVLYMSTLVATRFNPQIKVFYERLLAAGKVKKVALTACMHKFLTILNAMLKHRTPWQPQEVQS

SEQ ID NO: 459982 - protein, 429 aa, unidentified
MNYNTQNAKIASITEKTLIIGIDVGSETHYARAFSWRNYEYSKKPFAFSNDEAGFAAFKEWMDDIAEKHGMEVIIPGMEPTGHYWLNLGAYLQEQGMKPVHVNPHHVKKSKELDDNNPSKNDRKDPKTIAGLVNEGRFSYPYIPTGIYAEIRNLSNLRIQTQEEITKIKNRMARWFSIYFPEIKDVYRNPDAVSGLMVIKQAPMPCDIRELGVEGVNKIWRDARLKGAGIKRATTLVTAAEHSIGNTEAPRSARKEIRNLLEDYEGYKKRMDELMEEIEKTLSEIPYIDKLMKINGIRIKTVSCFIAEVGDIGRFDNPKQVQKLAGYAIVADSSGKHNGESRISHRGRKRLRYALYESAISVIGKNKEFKEIHSYYRTREKNPLKKMQSVIAVACKLIRIFYTILTKGVDYDGQKMLNDIVRPEIQPAA

SEQ ID NO: 459983 - protein, 342 aa, unidentified
MQVTTIGLDIAKNVFQVHGIDAKEKVVVRKQLRRSQVIAFFSALPPCLIGMEACATAHYWARELRKLGHEVRLMPAKDVKAYLKRNKNDAADAEAICEAVRRPTMRFVQIKSAEQQGQLMQHRTRDVLIRQRTQIINALRAHLAELGIVAAQGDTGVNELCAIVADDRNERLPIDARASVIVLAAQLEALQTLIGSIEKRIKMQHRSNETSQRVETIPGIGVLGASAIVATVVDPTIFRSGRDFAAWIGLVPRQDSTGGKRKLGPISKQGDRYLRRILIVGAIAVLRRAQENPGKYPWLTQLLARRPFKVVAVALANKMARTAWALMAHGGTYRAPELAEAA

SEQ ID NO: 459984 - protein, 336 aa, unidentified
MLYVGVDLHRKASQVAVVDEQGKLIFNRHVPSQREDLLRIFGEAGPTESLQVAYEATYGWGWFADLLEDVGIPAHMAHPRANKAIASARVKNDAVDAKTLAQLLRTGLLPESWIAPPETRQARRLVRMRTAMVRIRSRLKNQIHALLADQALHPEGSDIFAHDLTRMTKQLPAVTKQRAEANLRLIEELDKEIDLADSHIHKLFARDEGVRRLLPIPGVGLITAAIVVAEVGEIARFPTARQFSSWCGLTPTEHSSAENIRRGHISKQGSRWLRWVLVEAACHAYRNRELSNFEAGIASRRGDQIARVALARRIATLCYHALRSPQGCLAFPARTR

SEQ ID NO: 459985 - protein, 353 aa, unidentified
MEKQKLAMDIINPHCAGIDIGSRSHFVAVGQDLEDVKEFGVYADDLTDICVHLKEHDVTSVAMESTGNYWQNLYVELIKHGFDVTLANGKFTKNIKGKKTDVKDARWIQKLPSIGLLTSSFLPDETTEKLRTYCRQRQNMLTLAAEASHKMQKYLKILNFRLDVVVNDICGLTGMAIITDICKGNLDPEKLSGHRHGNCRKSKEEISKALKGNNREDYLFGLKQELESYQFYQKKIAECDKQIGAFLKQQINTYPEKKKLKTTDKTHKRINKNAIKGIDLNQASFQYFGGVDLMNIEGMSHATVLSIISEIGPDGFHKFETAKHFTSWLRLAPNNKVSGGKLLSSKTPGEATD

SEQ ID NO: 459986 - protein, 339 aa, unidentified
MKITTIGIDIAKSIFHLYAISKMGRYVKKKQLKRHQLLAYLARLEPCVIAMEACGGANYWAREIKALGHEVKLIAPQYVKPYVKGNKNDYNDAEAIAEAAQRPTMRFVPIKSIEQQDIQNLHRQRERIKKARTALVNQIRGLLAEYGIIINKGVAAVRKGLPDILEDAENGLTMRSRELFADLFEELRLLDERFKESEKQITTSNQKNEVCQRLDEILGIGPITASAAYAAAGDGKDFVNGRHFSAWIGLVPGQHSTGGKPTLLGISKRGNAYLRTLFIHGARAVLRHSAGKADRFSLWAQALLERRGHNKACVAVANKMARMAWVIMARGETYRPAMR

SEQ ID NO: 459987 - protein, 346 aa, unidentified
MGKIYIGLDVHKKSWGVSIFTKHGEYKSFSQTPKAETLMKYLQHHFPGAQYHSVYEAGYCGFWIHDQLREKGIQNIVANPADIPTQDKERRNKRDRVDCRKLARGLRSGDIKGIYTPPRWRLEDRSLIRTRLSMGRKQGRCKNQIKSMLLFYGVDIPEQREMGHWSRRFIRWIEGIRMERASGDMALKIHIEELCHLRQVIAKLNRAILALSRTEEYQGWVSLLRTVPGISTLTAMIVLLELGEITRFPSLDQLSTYVGLVPDIRASGEKEHVGGITKRGHAYLRWLLIEASWIAVRKDPAMMDAFNEYCKRMKKSKAIIRIARKLLNRIRYVLKNKAEYVPCVIE

SEQ ID NO: 459988 - protein, 410 aa, unidentified
MHVSFLGRRPVQHCVERQGGTPTTAREAGTPTRLVRSNDGMDSSPSCNLVGIDVPRSRFNPCSKEEPMEKTTVVGVDLAKTVFEIAVSNTPGQVSDKRRLPRTKFLSFFKELPPATVVMEACGSAHYWGRVFEGFGHTVVLLPPHLVKPYITRNKTDRADAKGILEAYRNDQIHRVPIKTLEQQTLGAVHRLRSRWIKARTAQVNTARGLLREFGINIPVGIEHVVPQVRLLVEDADSKVPDPLRPLLVGVCEQIELLGQQIELAEQQLEDLAEQTPLVKRLRTIPGIGLISGTALSAFVGTVDRFPTSRHFACYLGLTPSERSSGTKRRLGSISKLGDIYLRTLLIHGARSVITHARRAKSNDRLRSWALRLVSRTRYNKAVTALANKLARVTWAVWKSERDYEPQAAV

SEQ ID NO: 459989 - protein, 369 aa, unidentified
MDHYAGIDVSLEYSSICVVDATGQIVREDKIASEPEVLIAWFGSLGYALTRIGLEAGPLSQWLYAAMKKAGLAVELLETRHVRDAFKAMPVKSDRNDARGIAQLMRLGWFRPVHCKSIGAQEIRAELTARKLVESKLRDIANSLRGILRGFGLKVGATTERSFPGRVRELVKGHPVLEAIAEALLSVHEVLLREFNGFQKRVQSAACSNVKARLLMTTPGVGPVISLTYAAAVDDAARFKSSKKAGSHFGLTPKKYQSGETDRSGRISKIGDASVRAALYQAAHVILTKPVKGCPELKSWGMRLAKRAGQEKAKVALARKLAVIMHRMLADGIPFNPNAKAERMAATAAKAASKVLALPASGTTVAEAV

SEQ ID NO: 459990 - protein, 311 aa, unidentified
MRITIGIDISKDTLDAYQLPDNQHIQVANDQTGHKTLVRWIGKYDLPLVVFEATGAYHRNLEAVLTASDTAFAKVNPLQARRFAEATGRLAKTDRVDAIMLAKMGAVLELKGHKPRSEALLILKELITARRALMKDKVAAKTRLQTTTQTLLKNQINARLRQIDIQIRQVDVAIAQKIAQDEALSHKLGILISIPGIAEATAFSMLIEMPELGTLEGKQAASLAGLAPFSRQSGKWQGKERIQGGRAFLRQAIYMPALVATRYNPDLKAKYDQLIGAGKPGKVAVIAIMRKLLIMANALLREGRKWSEIRP

SEQ ID NO: 459991 - protein, 387 aa, unidentified
MTVLTVNNLPAATHGETVRCLFAIEMSGLNWVIAFNTPLSEKISRRTLTGCKWKRLLELIEEVRARVGRETGRAVEVISCYEAGYDGFWLHRQLSAHGISNYVIDPASLQVDRRARRVKTDRIDAERLLRSLMAYLRGEPKVWSVVRVPSVAEEDARRLHRERDRLVSERVQHVNRIKGLCALQGIYDYNPLRPQAMARLEQLRTTQGGALPPRLKSEIKRELQRLELVVEMIATLETERDAIVKDDASTHVNAKKIQNLQKLKAIGPEFAAVLVGEVFHRDFTNRRQVASYVGFAPSPFQSGSVAHDQGISKAGNRKGRTTGIELAWLWLRYQPDSDLSVWFRARVGTTKGRIRRIAIVALARKLLVALWRYLETGVVPRGAVLKG

SEQ ID NO: 459992 - protein, 304 aa, unidentified
MPTFAGVDVSKSFLDVFDSTEIKRYTNDPEGWAGIAEETRGPYAIEATGIYHIPVARYLWREGRTVYVVSPLQVRRYAQALMARNKTDNLDARVIAAYAEAAGDRLRPWTPLDADLSAIRVLVGYARGISQQSAANRNRLHTVRFAYPEHAGNIVETVAELKKTARRFYREALKVAHENPTIAHWIDQMTEVSGVGERVALTVMAYGGNLERFDNARAFAAYTGLTPMRKQSGEKEGKARISRMGPGALRQAFYIAARVAVMKDERYRAYYERKRAEGKAHLLVMTAIARKLAVVTWKKAVGRP

SEQ ID NO: 459993 - protein, 422 aa, unidentified
MIGDFDFYVGIDLAAEKHQACVVNRTGKVVGELAFEHSGTGLIDFIHSLEKLSGSLATRVGIVLETPRGPVVECVLERGYSVFSINPKQLDRFRDRHTVAGAKDDRRDAFVLADSLRTDLPLFRRLQQEGAQTIRLRELSRLEDDLAQDHNRLINQLREQLHRYFPQLLQISSAAEDAWVWDLIEIAPVPAVACKLTRGRIERVLKRHRVRRLTSEEVMAALRLPALKLAPGSAEAASEHALLLLPRLRLIRKQRLDIATRIETLLNQLSEVGSDTSDHGSERPTDVAVLRSLPGVGRIVAATLLAEASQAIADRDYQALRSYAGVAPVTRQSGNKKIVVMRRGCNNRLRNAVYHWSRVATMCDERSRSYYGQLRARGHSHGRALRTLADRWLTALVAMLRTHETFDSARWNACVITPQATL

SEQ ID NO: 459994 - protein, 348 aa, unidentified
MLIIGCDYHPGFQQIAFVDTETGEADERRLTHREEAEQFYKTLKARRVRIGMEASGHGRWFERLLNDLQFELWTGDAAEIRTKRVRKQKTDRQDAQLLLKLLMEDRFPRIWVRDAENRDLRQLLWHRHGLVQMRTRIMNQLHVVALNEGVRRKKALWRPAGRSELESLVLAPWALRRRRDLLDLFDQLTPKIHDLTRALEAEVEKRPIARRLMTHPGVGVLTALAFELVIGTPERFACGKQIASYVGLVPSEESSGDRRRLGHISKQGNALLRFLLVEAAQVMVRSQPQWRSKFFHLAMRRGRKIAKVAMARKLAVHLYWMWRQGWDYGQFEKLGSHAGEPGNRHGVH

SEQ ID NO: 459995 - protein, 386 aa, unidentified
MLAATSLSESPTAIRVDLGAIFVSLELSRSKWLVTSLSPGGGEKMSKHTVAGGDLAGLFECFGLLQEKARARTGRCYRIIVIQEAGLDGFWIHRALEKEGIESHVVDPASITTSRRRRRAKTDKIDGEALVRALLAYKRGEPRVCSMVRPPSPQEEDRRRVLRERKALTTERVRHVNRIKGLLFAQGVSGYEPMRRDRRARLEALRTGDGRELPCRLKTQILRELDRLELLLGQIKAIEDERDALLATDEAAAPAAMLMKLKGVGPEFGAILWSECLFRRFDNRRQLAAYAGLAPTPWQSGKVNHEQGVSKAGNPRLRATLVQMSWLWVRHQPQSALTLWFEERVRRNGGKLRKTTIVALARKLLVTLWKYVTSGVPIEGAVFSAA

SEQ ID NO: 459996 - protein, 425 aa, unidentified
MNIDGTDEPCFAAFVAIDWGDKKHAWSLQPADSDRRERGEIEHSPEAVAEWAAMLSARFANQPVALAVEQSRGALVFMLSKYEQLHVYPIHPRAASQFRAALVPSGAKDDPSDAELLLDLLVHHRARLRRLQPDSEQTRLIQHLVEGRRKLVNERTRQTNRLTANLKLYFPQLLDWFDAVDSPLACALLQRWPTLEALQKARPDTVRSFFTAHNCRSQELIQRRLEQIRQAVPAVRDKALIEASLAMTKVLVELIATLREGIASYDRQIAQAVATHPDFAIFDSFPGAGPALAPRLLAAFGSQRDRYRSAADLQTFSGIAPVTERSGKSKWVHVRWACPRFLRQTFHEWAAHSIGFCDWARAYYRQQRDRGKDHHAAVRALAFKWIRIAFRCWKDAVPYDDARYMQSLRRRGSPLMAALAKPVLP

SEQ ID NO: 459997 - protein, 387 aa, unidentified
MRKTITYVGLDVHKDTIVVSLADAGLRGSRGEVREYGKIANTAAALERLARKLASNGNELKFCYEAGPCGYGIQRQLSGLGHQCDVVAPSLIPRKPGERIKTDRRDANKLAKLHRAGELTPVWVPDQTHEAIRDLVRARHAAARELRRARQQLSSFLLRNGHAYHREPWRPSHRRWLADLKFDQPMHYLVLEDAIAAVEAAQERRQRLEAQIEATLPGWSLAPVVKALQALRGVALVGAATLAAELGDVTRFDNPRQLMAFVGLVPSEHSSGGRRRQGEITKAGNRTARRMLIEASWSYRFPARISREQLLQQETLAKPIRDIAWKAQDRLCRRYRALARSGKLSTVICTAIARELAGFVWAIACEVSRSGGAKSAGKRAVHRVAVS

SEQ ID NO: 459998 - protein, 425 aa, unidentified
MGITKPIDSKSNYERGDNVNKLFVGIDVGSRDNAVYIMNPDGCKHSCFNVQNNLGGAQALSKRVVSALRETNIGVVDIGMEATSVYGENLTCFLREDGALGRFERRLFVLNPKQVSKFKAMYSDLPKNDPVDAFVIADSLRFGRIGTPIYLDDYRYQALQKLTRARFYAVQNQSREMQRFMNHLYLKCSGLAQEKVFSDTFGATALALYEAFETPDDIITTDIEALSVFIAEAGKNRSPYPDEIAKAVQAAARGSYRLPKTVNDSVNQVLSISISSMRAIKAQIKALDKEIERQFENIPNTLISIPGIGPVLSAGIIAEIGNINRFDSQEKLAKYAGLAWSQYQSGIFEGQNTRLIKSGNRFLKYYLYEAAFHHVRCDTDYKRFYDLKFKEVNKYQHKRALALTARKFVRLVFRLLKDNRLYIPA

SEQ ID NO: 459999 - protein, 431 aa, unidentified
MKYKQNQMKNQRVQQINDDTLIIGSDMAKSVHVARAIDNRGIELGSRCKYTNNRQGFLTFLNWVQQLQVKHNKRKVIVGIEPTGHYWFPFERFVREEGIQLVLVNPSHVKKTKELDDNSPTKNDTKDAKVIAELVKNGKYNYHIYLEQEYSNLRILMNQRERTIKSLVRVKNQIYQWLGRFFPEYWEVFKDWEGKTSLIVLNTFPFPHEIVKVGPLGVLAQWRKTIRRGIGIKKATQLVEIASKTIGIQEGIEAARMELKLLLEQYELLNKQNDRILTEVDQVIDRIPYATFLLTLPGVSKTLIAGFLAETGDLNKYLDGQQIIRLAGLHLKENSSGQHQGKTQITKRGRSQLRALLFRSVLTLVRNNSEFRVLHQYYTTRSQNPLKKKQSIIALCGKLIRVLHTLGTRKIVYQPEAVFGPGIQNMLTKAS

SEQ ID NO: 460000 - protein, 358 aa, unidentified
MSTNTIETELTSERASVETGVTIKLGLDVHAGQITVCRQDGGQVPKPAQRKSWPEFLRWVQALAAGPGPVISCYEAGPCGYGLHRQLSAWGVTNYVVVPQRWDEQGKRVKTDARDARELCDRLDRYVRGNTKAFSLVRVPTPEQEQRRALGRQRGALVKERQRCVVRGHGLMLSQGIQAPAGWWQPECWAQFQCALPGWLREQVQAWQQQAERLEREVTRWSLRVEQAAPGQPRPKGVGQLTAALLAGEILDWHRFQNRRQVASYTGLCPSEHSTGQKRRQGGVSKHGNPRVRHQLVEASWRLLQWQPDYPPLQKLRAAVGARARKRAVVAVARRLAIDLWRINTGQCPAQKLGLLLR

SEQ ID NO: 460001 - protein, 362 aa, unidentified
MFRPHTLYIRIRIVRKVSEPAFAMKDQDVTDVIRRKQQTAMRYIGIDVSKATFVVAYSSDKGGEIRTFNNTTTGIKQFIGALPKDGSIHGVMEATGNYSALLLYMLNVAGITVSMENPLKVKNFARAMLSTVKTDKIDARLIALYGEKMNPQPFKIQGEAILRLRQKRTVIRQLTKQITAMSNLRGSLACLPVPDKGATHTVDETIKFLEKRRDRLQSELTDLVEVEFSRQLALLTTIKGIGITLATALIITTGGFTYFQNAKQVSRYLGICPTYEQSGTSVNIRGHINRNGDAYTRGLLYVAAWTASRFNTKCGETYTRLRQNGKPGKLAMIAVANKLVRQAFAVVTHDKEYVDGFVSNRP

SEQ ID NO: 460002 - protein, 324 aa, unidentified
MIDAILGIDVSKNTLDVSISSCTKVRTKSFANSSDGWHHLLDWLVAQKIQRVHACLESTGRYSLGIACSLYEAGHVVSIINPAQIRDFVRTKLGRNKTDGIDASRIREYCELFKPSPWAPPSEAHRRLGELQTIRAGIIAGLTEWKNRKNSGIVDTEAQALADATILHFTSQLGAVDKAIALTIDNDSDLRSKRDLLLSINGVGDTLAGVVLAELPGPDVLRSSGEVVAYAGLNPRQHQSGTSVDRATRISKIGNAVLRAALYMPALSAMRYNPAIVALVTRLKSRGRLKPKQIVVAAMRKLLVLCFGVLKTGKPFDPAITMGC

SEQ ID NO: 460003 - protein, 360 aa, unidentified
MRIIGCDLHARQQSVAMLDTETGEVVNRTLMHEGKEVREFYSQLPRPVLVGIEAIGPMQWFLQLLDELGIECRVGDATKIRAAEPRKQKHDRRDAELILKLLLENRFPAIWRPSQELLDLRALLLHRHQWVRLRTQIQNALQAIALANGLRRGPSLWSYDGQAKIAFLPLPPHASYRRSMLQALYRQMEEEVEQLTAQVAEQAEQRSGARLLMTHPGVGPVTALATEVFLGDPQRFPDGKALASYVGLIPREYSSGAHQRLGALTKQGSPFLRFLWNEAAAHAVRRDPDLQRFYRRKLVQKGLGKSRVAAARKLGIRLWIMLRDQIDYEEFCRRGQKHSSAVCAGMPEVAFGANRHRPVD

SEQ ID NO: 460004 - protein, 344 aa, unidentified
MEHFAGLDVSVKETSVCIVDDAGRIVREAKVASEPEALLAVLNNPRYRFRRIGLEAGPLSQWLYSALGEANLPVICVETRHMRAVLKAQINKTDRNDARGIAQMMRVGLYRPVHVKTLRSQKLRMLLTHRKLLQSKAIAIENDLRGTLRNFGLKVGVVGAAKFEARIKQLVDNLPDLALLVEPLLVVRRVLREQIAILHRRLLDIVRDDEVCRRLMTIPGVGPVVALTFRATVDVPARFRNSRAVGAVLGLTPCRHQSGESDRTGAISKCGDEMMRVMLYEAAQILLVRSTRWSWLKAWAMQIARRRGLKKAIVALARRLAVIMHRIWVDGTEFRWARQEAAAA

SEQ ID NO: 460005 - protein, 425 aa, unidentified
MHTKQYNRQMEKRQMIGDHTLVVGMDIGSEFNAACFMDKEGNVFGRYPTIYNSRKGFDYFQTMLVKTKRKHKFTDVLIGMEPTGHYWRKIAFFAKEKGYEVRFVRTTAVKHQRELDESSSGKSDIKDAHTIGNIVREGKYIDTVIEDSVFRQLRTLAHARERILRYIVGSTHGLQAVLNDYFPELRHLFWSMKAKGLWTLLETYPFPEDVRNAGLAAVVTLLAKGTGKKRHVREQAEQVYQAAAESVGLKAIGKADRARLTMYLEEIKRSDARRRLLEREMKELLKEIPLAQYILSLPGMGKVGCAVFLGELGNPEHFKNPRQIIKYAGYDPKENDSGLRVGRKIISKKGRWLLRKCLFFMVLRLVHRSSFFKAYYEHKKKGFDRPLEKTEALCAVILKLIRVLFALMRDRRTFTEELPRCEKAA

SEQ ID NO: 460006 - protein, 391 aa, unidentified
MLICGIDIGKFRHEACIIDETGKQLAKTLSFTNTQDGGEKLLDYYKQHNPDNQPIVVGMECTGHYYLSLYCFLFDKGYQVNAINPIQSDAIRNLFLRKTKNDAKDSFLIAETIRIGRFSSTPLADEDILSMRQLCRHRTDLVDYIADQKRKIIGVMDRVFPEYQHIFSDMFGKTSTELLNKAVTPEELLAIDTNELCELLKKNSRGRFGEAKAEELRSAAKRSFGITIGTSAFSMQLRQLLEMIALLEKQLVELEEEITQYLRKMDTYITTCPGIGDVLGAIILSEIGDIFRFTEPKKLVAFVGVDPSVKQSGEFTGTQNKMSKRGSPHLRRAIFLAANVAAFRDPVLSAYYQKKREQGKHHYTAVGAVSRKLICIIYAVLRDNKPYVPNC

SEQ ID NO: 460007 - protein, 325 aa, unidentified
MDLGDRNSRYCLLSNEGEILREGQVATTKTGMTETFGSLGRARIAIEVGTHSPWVTRLLQSFGHEVIVANPRRVKLITESSRKDDRLDAQTLARLARIDPQLLRPIQHRSEKAQMALMTIRVRGALISARSSLVNTARGLAKALGERLPKCDADQMGIPQSKSPPPNIQRILEPLLKEVESLTKKIKDSDREIEQIARKDYPETALLQQVGGVGPLIALTLVLTVGDKNRFQESRDIGCYVGLGPRRSDSGQSQPQLRITKEGDPYLRVMLVQGAHYIISRRGPDTDLKRWGLRLAERGGKRGKKKAVVAVARKLGSAGLKPAWK

SEQ ID NO: 460008 - protein, 392 aa, unidentified
MAQRNRAFSRAGLTLTLTHPNAAGIDIGSASHFVAVPPDRDDETVREFASFTADLERLAHWLRECGVDTVAMESTGVYWIPLFELLDARGFTVLLVNARYVKNVSGRKSDVLDCQWLQQLMSYGLLRGAFRPADGVCALRSLSRQRAMLLRSQARHVQHMQKALTQMNIQLANVISDLVGETGQKILRAIVAGERDGRVLAAMKNVRIHASAEEIVKSLQGTWRAEHLFALKQALEAFDFCATQLAQCGTEIEAQLLSLHAHDGEPAKGKKRARARNAPKFELRKLLFQMCGVDLTRIDGIDVTTALVVVSEVGADMSRFPSDKHFASWLGLCPGTKIAGGRVMSGKTKRCANRAAQALRLAAAALRSRVTFPIRRQRPVRTRMRGVVGAGG

SEQ ID NO: 460009 - protein, 427 aa, unidentified
MQSRLERRCIGLDVHRDFAQVAIWQGGVVKQAGRFATTPEGVRAFAQGLGPADEVALEVTGNTWAIATVLTSRAGRVVVSNPAKTRAIAEAKVKTDKVDAEILAQLLAADYLPSVWLPDAETSALRRQVLRRAHIVRQRTRLKNQVQAILARNLVPRCPAADLFGIKGRAWLARQELPPDEQAAAAALLRQLDFHAQELALIDRDLGQAALGRPEVLRLMTIPGVDATVALSIVAAVGDFTRFRTPERLVSYLGLNPRVRQSGGQPASHGRITKAGPAHARGMLVEAAWSASKAPGPLRAFYQRVRARRGMHVAAVATARKLAVLCWHLIIKGEDYAFALPSLIAHKQRKLELRAGAPPARGRKGQAAHYSLAAVRAAERDLAAQGEAAYRTMVAAWQPARPPGGPGGARAASAAASTGTRLIKPTG

SEQ ID NO: 460010 - protein, 408 aa, unidentified
MISILNVLNKISCGLDVHKSFIVAVVIDNTKEEKYTKKFGTMPCELKELKEWVLSYKCTSVAMESTGKYWIPVYNILENSSIDLTLGNSREIKNMPGRKTDFNDAVWIAKIHSHGLIPKSFIPPLEIRELRELTRYRRKLIQAKSTEKNRVNNCLTISNIMLDNVVTDVFGKSGNNIIDLILKDEKINIDTLSNITYGQVKKKGEEILKSIDSAISSNTKEKMKLLYGHIKTIDEMLDTINELIDEKTKKYKKEIELLITIPGVQKRSAEEIIAEIGIDMNQFEDSDHLASWAGLSPGNNRSANTIKSSRTCEGNAYIKRILAECSLGASKEKKSYLGAKYWTLKSKRGTPKAITAISRVIIVSIWHMLSKKENFSKVDRETYQKTIAEKNEKKMIKQLQKLGYKVEK

SEQ ID NO: 460011 - protein, 347 aa, unidentified
MRFYTRQHRHYCGIDLHARTMYLCVLDASGAVLLHKNIRSDPREFLEAVAPFRDDLVVAVECIFTWYWLADLCAEENIPFVLGHALYMKAIHGGKAKNDKIDALKIATLLRGGMMPMAYVYPRGMRSTRDLLRRRLYLVRKRGQLLAHIQNTHHQCNLPEPTRKIIYKTNREGLVARFDDPSVRKSIAIDLELVEHYDRLIRDLELDLVRTAKVHDPHTFFRLRSLPGIGKILAMTLLYEIHDIDRFPRVQNFASYARLVKCARESAGKRLGTGGHKIGNVHLKWALSEAAVLFLRNNPKAQRLLQKLRQKHGRAKALSILAHKIGRTVYYMLQRDMVFDMNKFLTT

SEQ ID NO: 460012 - protein, 333 aa, unidentified
MGKQVWLGIDVAKETFHAAVAASDDIPREWKKLPHADFVHSPKGINLLKQWLEQLGVEIIGVCLEATGQYSHRWMELAANDFVHASMINPAFGVEYGRSIGIRSKNDRIDACVLALYGQNHKPVPKSQRSPEQQILRELSRGMAALQAQFQANKQRLLEVPCKKVRAALMRVQKCLQNQINRLRKAMEEQIASMPILTQDVRRITTVKGIGTTTAVLIVAEFGDLRTYNRDEIIALAGLFAREHTSGKSVHKKARLVKTSKKQLRSALYMCAMSASRSNPHIRAFARRLTKNRKAPMQILGAIMRKLLLIAHAVVVTGRDYDPGYGMPIITTA

SEQ ID NO: 460013 - protein, 407 aa, unidentified
MLFLGDDWAESHHDIELQDERGRVLKRCRLPEGVTGLGQLHALIADHLADHDEPESVLVGIETDRGGWVHALVAAGYTVYAINPKQASRYRERLTTSGAKSDPGDAHVLAQIVRLDREHHRVIAGDSEQAEVVKTVARTHQTMIWTRQRQANQLRSMLREFYPAALEAFGEDLASRDALAVLAVAATPAAGRALSTARLVSVLRKAGRQRNLQARAQEISTALRAEHLGLSDALTEAYGVSVTSLVAVLTTMVAQAAALEGEVERCFGQHPDAEIITSQPGLGVVLGARVLAEFGDDKDRYADAKARRNYAGTSPITKTSGKSKVVLARYARNKRLADALHQQAFSALSASPGARAFYDHHRARGATHHQALRALSNRLVGILDGCLRNQTTYDETTAWAHRQPAAA

SEQ ID NO: 460014 - protein, 388 aa, unidentified
MRPTDKSRNQDLARSQGDHSTLYVSLELSRSSWLVTSLSPNSDKMSKYSIAAGDAPKLLALLARLRGRAEQLVGGSLNVVVIQEAGLDGFWVHRSLEANDIESHVVDPASVAVSRRRRRTKTDTIDGETLLRTLLAWKRGEPRVCEMVVPPTPEQEDQRRLSRERANLLRERIQHVNRIKGLLAGQGITGYDPLHKDRRTRLDGLMTGDGRTLPGRLKAALLRELARIELLLQQIADVEAERDVSIEADVDGRPSPVALLARLKAIGPQIGAVLYHEGLYRNFANRRDVASYAGLVPTPRRSGSIDREQGISKAGNPRLRHIMIELAWLWLRYQPGSALSGWFRARVGNERGRIRRITIVALARKLLIALWRYVTQGEVPEGAVLKAA

SEQ ID NO: 460015 - protein, 362 aa, unidentified
MIYVGLDYHTKRSYVSILGDGSEKIYSGEMDSQGELPGFLRNLPDEVKVLFEAGYGWPRLVRLLKEVDVELLMCQPDHNRRIACDRRKSDRRDADNLAVYLKADTFKRAYMPDANVRDQRQLVRNHTCLRHLSTGIKNSIHSLLAYAGEPKISSDLFAKKNRPYLESVKLPPLARQMLDNNLEVIDLIDDLLKRMDSRIAELNRDDPRARFLKTIPGVGDFTARLLLAEIGDIRRFPADKALACYTGLTPRQYQSGDTLRTTGLTKEGSSHMRWALVQAAWVAVRLDPALGERFEKLRKEKGCGTAICAIARRLAEVVWHILTKQVPYRPQKPQGEGQPVVARGKPESKDGVVCMSEAQASP

SEQ ID NO: 460016 - protein, 316 aa, unidentified
MLASKRCIGIDVAKGHLDVAVRPDAIQFSVSYDEAGLTQLLERLRPLEPTLVVLEATGGLEMPLTAALAAGGFPVVVVNPRQVRDFAKATGRLAKTDALDAEVLAQFASSVAPLPRPLPDAETQKLAALLGRRRQLIEMLTAEKNRLSHAGPAVRRDILAHITWLERRLRAVDTDLAGAIRQSPVWREKDDLLQSTPGVGPVLSQTLLASLPELGTLNRKQISALVGVAPLNRDSGLMRGKRTVWGGRAQIRTVLYMSTVAAVRHNPVIRAFFKRLRTGGKPVKVALTACMHKLLIILNAMLKHRTPWRWDHAFIA

SEQ ID NO: 460017 - protein, 458 aa, unidentified
MSIVHRCCAALDVHKQSVTVCVRTGISRREQTLETAKFGTFTEDLEQLAEWLKQRKVRHVAMESTGVYWKPVWNVLELTRRHFRLLLVNPAQVKALPGKKTDRRDAKRICGYLQQGLLRGSLVPGRQQREWRELTRRRAQLQGDRNRVINRIRRLLETVNVKLGSVISNVVGKTGLAILRDLAAGHTDPERLASNMFGRLKCTRTQMIASLRGRFTEHFRWELKHLLEQLDFLDRQVAEYEARISQSMAGQEDLLARLCTIPTVDLITAWTLLAEIGTDMSRFPTAAHLCSWAGLCPGNNESAGKRFSGKTRKGDRYLRRTLVQNAWAVSHMKKGRLKQMFFGVARRRGMPKAAMAVAHRILQIAYFIIRDSTMYREVGVEMDERKRQRTAKRLARRLEEIGFEVSIKPRSGPPGAHARIPNAPGPLPGQTCKMCNAWGRACIHARNAVKTPPPTPPT

SEQ ID NO: 460018 - protein, 358 aa, unidentified
MEKLYLGVDLHKRSCWVTVLDADGHLRESRRMGTDKPELEAYFGQLRKPAAVAVEATFNWYYFLNVMEPLGLELHLVHPWKTRAIAAARIKHDRLDSRLLAELLRTGFLAEAWIAPRPVREERQLLRYRVHTVQWATRAKNSIHGVLNRNGIRTPLRSPFGPQGRQFLEQVELARTDRWEVDGQLERLDLLGDQLRALDREIRQQAKASPVARALEQIPGIGPFIASLILAEVGDIRRFPSAKQLVSYIGLAPSLQASGEHRWGGPITRQGSSVLRWALVQAAHRAALHPRFYGFYQRQRERHGTSRAAVALARKLAAIAFYRWRHALQVAATPPQVEKLRERTSAGAWSEHRPLSSD

SEQ ID NO: 460019 - protein, 344 aa, unidentified
MKHYAGLDVSVKETSICIVDEAGRICREMKVVSHPEDLLAVLCDPAWRLERVGLEAGPLSRWLFSGLAEAGVPAICIETRHAKAFLKAQVNKSDRNDARGIAQMMRVGLFQPVHVKTLASQKRRALLAARKILQEKALAIENDIRGLLRNFGLKVGIVGVVGFEQRIHDLVEGVPELADIMEPLLAARRVLREKFAKLHRKVLLLARDNEVCQRLMTIPGVGPVVSLAFISTVDVPARFRNSKAVGPSLGLTPVLNQSGESHRVGRISLCGDEAMRALLYEAAQVMLTRVQKWSWLKAWAMNIAKRRGQKKAIVALARRLAVIMHRMWSDGTEFRWTREMAPTI

SEQ ID NO: 460020 - protein, 400 aa, unidentified
MLSIGIDVSKGKSTVCGMKPGGEIVYTPFEVQHTREGMSELVSLLRSSGEEVRAVLESTGSYHCPVVTALLENGIFVSVVNSLRMKRFCSQSIRKVKTDRIDAMQIALYGLAYWQELQPARLPEDTYRELQLLARQYYQMTSLLIKAKVDFNAICDQVLPGMQELMSDHAGRHKLSDFVLRYCHTTHILEMGETRFRKDHCKWAEKKGYRNCERMAALIFATAQNGIPVLPNAPSTQIVITEAIRVLHTVEASRDAILTQMQALAKTLPEYSLVREMPCIGDTLAPRLIAEIGDVRRFHSKRALIAYAGIDAPPYQSGKFCANNRHISKRGNRYLRKTGYEVMQSYVMHKPANDPIFIFIEKKRGEGKSGKLAMVAGLNKFLRVYYGKVTELYRSLPAIE

SEQ ID NO: 460021 - protein, 338 aa, unidentified
MQISTIGLDLAKSVFQVHGVAASGDVVLRKRLRRGEMLRFFANIEPCVVGIEACGTAHFWARELQVLGHEVRLIAPSYVKPYVKRGKKNDAADAAAICEAIQRPAMRFVAVKSVEQQGALMLHRSRDLLVRQRTMLVNALRGHMAEFGIVAPRGLWHVKALAALVADETESRIPAVARPALRALSDQIAALAGPIRDIETAILAWHQAHEASRRLATIPGFGPLVASGIAATIGDGRQFRSGRDFAAWLGLVPRQNSTGGKERLGRISKMGDRYLRRLLVIGATARLRYAGRKAAPDGAWINQLLARRPPRLVTVALANKMARTAWALMAHGDVYRAA

SEQ ID NO: 460022 - protein, 397 aa, unidentified
MYIVGIDIAKRKHEAAVIDGEGTVIIKPFSFTNNCSGYNRLLAMLAKAKLPLDEVSFAMEATGHYWLALFTRLQKEGFRVQVINPVQTNSIRSFYIRQAKTDPRDALLIAEVIRFGHFSESTLHPENIYELRELCRGRHAIVSMQADVKRKVVALLDQVFPEYETAFTNMFGDTSMAILQTCPTPKELSEMPLEELCHLIEVSSHKRFRMAKAQELQALAHGSFGFAMAGDVFSTMIRLYAKHLDFLKQQVREMDRKIAEIMDTLDTPITTITGIGPTLGAYILSEIGDISRFSSAAKLAAYAGIDPTMRQSGEYNGVRNRMSKRGSPYLRHAIWLAASSAVLHDPALKLYFQKKRDEGKPYMASVGHACRKMVSIIYAVMRDNKAYTPCIPNEISA

SEQ ID NO: 460023 - protein, 322 aa, unidentified
MAMLSFGGIDVSKDRLDVMVLPEEQCSSVPNDAAGWAKLVEQLRGFSISAVGIEASGGYERGAVRALLAAGMSVRQVNPFKLRQFARASGVLAKNDPLDARMIASFIAIMPTRPAQPHAPAVERLAEILTVRRQLSDAKVAAENASRLLEDAMLQRLSRRRIARLAADIDLLDGHLVEIVAADAALVHRYRLLTSMPGVGPVLACTLIALLPELGRMNRKQVAALVGLAPYAFDSGKLKGARCIWGGRASIRRVLYMAALIAMRCNPALKAFHNRLAATGKKPKVVIVAVMRKMITTLNAMLRDGTTWVDRYSGRRSASTAR

SEQ ID NO: 460024 - protein, 345 aa, unidentified
MERYIGIDVHRDSTTICVVSATGKRVRREIVETNGQVLVRYLMLLRGTLHVCIEESSWSEWLHEVLSPHVAKLVVYQSQWTPGAKSDAIDAHGLAEKLRLGQVGPGVFKSPHRYRKLREWARVYQALTQDVARAKNRLKSQLQRRGVRCVGTSVYDPRQRDSWLRQLPVSMRPTTQLLGLELDGLVELRTQAEAALLEESHRHRVTKILETAPGLGPIRTALLIATVITPHRFRSKRQFWSYCGFGVVTRSSADWIQTESGWIKARAVQTRGLNRNHNPTLKGIFKGAAITVIHQTQADHPLKEAYARLLDGGTRPPLARLTIARKIAATVLAMWKTEEVYRAGS

SEQ ID NO: 460025 - protein, 431 aa, unidentified
MDTQQFEVIRPKCAGLDVHKKSVVAAVCTSDPVTLTASYKTKVFNTTNSDIAALRDWLLAQDCRDVCMESTGKYWIPIFNILEPHMHVILTHPKYVKAIKGKKTDKRDAKWIANLFRFDIVKASFIPPADIRALRELSRYRLKLSYMRTAEKNRYQNSMTISRIRIDCVLTDPFCLSATRIMDYLLSDEPFDEETCRSLIDRRVKASKDEVMDAVHGYHILEEQKFKMTHAKAHMDFINRTIGEIETELFVRSRQYDSQVRRIATVPGITELSALFILSEIGADMSVFESDRHLCSWAGLTPANNESASKKKSTRCSKAGQYLKPLLIQCALAAVRSRKEPYFAIKYQRLSKRRGKKKAIIAIARMMLTSIYHILSKGESFHPNDYEATINPPKQKPVILTIENTLQFLREQGADPESLKLIQQQCAAQVG

SEQ ID NO: 460026 - protein, 320 aa, unidentified
MPQQGRIVGIDVSKLKAEACIRSLQQRLSEPSTPQGEAALIAWLRANAVALAVMEASGGYERSWAEALRKAGIAVRVVDPKRVRYFAKSAGRLAKNDPIDAEMIAWFGETFTPEAEPTHDPERAALDQLVTARRRLIGLATQVAQLAEHRQPRLVAQAQQAIGKIIKSQLAKLEIAIDAKIAANAAFRARAAIIRSVPGLGPHFTAGAIAWLPELGRISSKAAAALVGVAPYDDDSGEHQGERRINGGRREIRDLLYMATLAAASRHNPVVKAYYQRLRAKGKKAKVALVACMRKLIVILNTMLARGQNWNPPAAAGVLA

SEQ ID NO: 460027 - protein, 327 aa, unidentified
MTQKPIDVLGIDLGKNSCSVAGLDANGTVVLRRRMTRESLVAFASKLPACIVAMEACCGAHFLGRSFAAQGHTVRLMSPEYVQPYVKSQKTDDRDAEAIAEAATRPTMRLVTLKSEAQLDLQVLHRARERLVTARTRLTNQLRAVLLERGIILPKRRTPLRHRLHELMAGELPISPRVIRLLHDLREEWENLDERIRAYDDELAAMTRENQQARQLATIPGIGVINATALLAAVGDGSAFAKGRDLAAWLGLTPRQHSTGGRTKLLGISKRGNKYLRTQLIHGARAALTHFAKTSTRIGAWIRQLLTRAHPNVVVVALAAKLARIVW

SEQ ID NO: 460028 - protein, 320 aa, unidentified
MAQNTRIVGIDVSKAKVDGCIRSLQLRLSRPSTTEGQAAMIAWLRENAVGVAVMEASGGYERLWAEALRAAGIAVRIVDPKRVRNFAKSAGRLAKNDPIDAEMIAWFAETFDEAAGHPPPDPEREELDRLMTARAGLIEVKTQIENRGEHRQSRVVATAHRAILRTVRTQLAKIEAMIAAKIETNARFAQRAEIITSVPGFAEQTAAGLIAWLPELGQIGNKSAAALVGSAPYDDDSGQHKGKRFIKGGRRKLRNLLFMPVMGAATQHNPVIKAHYQRLRAKGKEPKVALIACMRKLIVILNTMLARGEKWDTSRYPALA

SEQ ID NO: 460029 - protein, 462 aa, unidentified
MMNIQEQREMVEKANRILSEMKSFTWRDLETQGKFKKNDKLSFISDDMLILGCDIGSEKHYVRAIDTRGRELSRKALAFDNNAEGFQKAHDWAVQLAASNDKKQIVLGLEPTGHYWFCLAAWMVSNRISVVQVNPYAVKQTKELEDNSQQKDDRKDPKLIANLVKDGNYGMPYLPEKVYAELRRLSMFREQLMEDRNRNMNRLHREMKIYFPEYKDAFGKVDGAFCMEVLKEAPFPEDILGLGIEGIREIWHKAKLRGRGYRRAVEIVKYAETSIGLKDGTAAGKEAVRWFAEKIMELDEELAGIENRLNEKCKEIPHAENILEISGIGERILSGILAEMGDISRFDDAKELQKLSGLGLVSCSSGKHKGETRISHRGRKRLRYWLFQAARSAVAHGEEYKWIHAHYTTRAGNPLQKMQSLIVIACKILRVIYTMLKTGKPYDPEKLLKDIRYPENVQTAAA

SEQ ID NO: 460030 - protein, 414 aa, unidentified
MEIMHPRCAGIDISKRDAKVAVRIAQPGDAPIMEVRTFGAMTQDVLGLKDWLVDQRVTCVVMEATGSYWKQFFFLLEDENFELLLVNARHVRNLPGRKSDVLDCQWLADLGAHGLVRASFVPPEPVRQLRDLTRLRTHLRREQAREKQRLEKVLEDAGIKLAAVVSDITGVSARLMLKGLVQGLDTDSLAELARSGLRAKIPVLRQALNGRFNDHHRYLVLMLVERIDRTESDIISIENQIDSLMGPFRDTKQLLLTIPGVSNDTAEIIIAETGGDMSVFPTAQHLVSWAGCAPGSNESAGKKKSTTTRPGNTYLKGAVGIVALQAARRNTTYLSALYRRISPRRGPVKALVAVENSVLTAIWHMLTNNEPYEDLGPDYYQKLDPEKAVNNMVKRLRNLGYEATLTPLTPAIAG

SEQ ID NO: 460031 - protein, 416 aa, unidentified
MESSQDNEEIIERIAALDIGKAELVCCVRIPGQGPGGRRRQEVSTYSTMTRSLLTMADRLRELGVTRVVMESTSDYWKPVFYLLEAAGVDAWLVNAKDVKHLPGRPKTDRLDAVWLCKVAERQMIRPSFVPPAPIRTRYRVDLIAARTAERSRVEKLLEDAQIKLSVVASDIFGTSGREMMAALIAGQRDPKILAQMARSRLRAKITQLEDAFVGRFSEHHGFLLTRMLARIDAITADIAEVNQRIEQQIGPFGDVARRLDEIPGVGPATAHVIIAEVGVDMSRFPTPAHLASWARFAPGVKESAGKSKGSGSTGHGNSYLARVLGEAAVAAGKTDTFLGERYRRIARRRGNRRAIVAVGRSILTIVWHLLRDPATHFNDIGSGFYDTRVNPERRKRNHIRQLEALGYTVTLAPAA

SEQ ID NO: 460032 - protein, 316 aa, unidentified
MEKPQPFVGIDVSSKLLDVDTLPASCRFSKPNTEDGIASLVAHLKPLNPKIVLLEATGGYEIPLAYALFEAGLPVVVMNPKNLRHFAKAIGRLAKTDKLDAQVLALYAQTLQPQVRPLKDREQLELANLMTRRRQLQGMIGMERNRRRTCTPKVRGNIDRSLAHLEQLLKDLDREIHDAIRRTPLWHENSEILQSFDGIGPKVSAALIANMPELGTLPRSKATALAGLAPMNRDSGQYRGQRKIQGGRPAVRQALYMAALVASQHNPVIKEFYQRLRLAGKPAKSALTACMHKILVILNAMLKNRTYWNPQLPLAA

SEQ ID NO: 460033 - protein, 419 aa, unidentified
MARIHSIAQDAVLVAIDISKKRNDVLIQMPGSPRRRRLVVLNQRAEHDRFIQRLKAFDRPVVTGFEATGNYHRALAWRLVDAGIKTRLISSMALARQREAIHNGWDKNDPKDAQVILHMLATGLSQVYLDPLVAGLADIQELSKTHEAVSRARTQTIHRILTHYLPLYFPEIEKFLGSSRRDWFFALLETFPPPASITALSPEAFSAAAWDIVGKKVSKARLIVDICETAKESIGLPVPVDSRAIAMFRMVLAEARSLNRQRNTIEAEAEALLGGTPDFEALKQIPGIGPIIALTILAEAGDLRRFGHHRQFLKFCGLDLSTHQSGTFRGQTKLSKYGNARLRRALWMAGLVAIRQKENNFRDKYTRYIARDPDNPDLRRKALTAVTAKMARTAHAIIKSGKAYRPFYEGAVPGGRISL

SEQ ID NO: 460034 - protein, 360 aa, unidentified
MTIVADLYDLIIGVDTHAASHTLAVVTGGPGAVLAKATFPTTPAGLSRAVGWVRRRTADRSVLLVVEGIGSYGAMLTGRLHAAGFLVAEAPTIPSVLRRGKGKTDQVDAVLIARATAGLTTGELRWPRTEDGTRVALQVLTGARDQMNNERTRHINTLTALVRTRDLGVDARRRLTTTQITTIAAWRSREEEPWVAVCRREAVRLATRIRALDAELAANYRDLTQLTTVQAPELLALPGVGPVVAAAVLIAWSHPGRVRSEAAFAALAGTCPIPASSGNTTRHRLNRGGDRQLNRALHTVVLTRMRYDPTTRAYVTRRTADGKTSREIRRILKRYATRQLYRTLTAAHPATALPIVPAAA

SEQ ID NO: 460035 - protein, 356 aa, unidentified
MLYIGIDVHKKWCYATIKDRDGKELDQFRFLNKTSGFQRLINAVTGHPARAVVESTANLWLRLFFALESAGIEVILSNPAMNKAITHARLKSDKVDSSTLADLLRADLIARCYVPPAEVRAARNMIRMHMNLVNDRARVKNRIHSVLHRYELPKFEGSDQFGKAGMIYLKGLKLSEDDQLILDSYIRQIECLNQLIGESNQRVAQAAVKRMDIKRMMTIPGIGFYSAMLIISEVGDITRFSSADKLVSWLGLAPRVHQSGNSCYHGKITKKGSPRVRSILVECAWTTIRLDEYFRSKYTRIVDRRGKKKAIVAIARELVVAFYHMLTRGEDYRRKNEQQVRGKYKRLEYEVRRVLC

SEQ ID NO: 460036 - protein, 384 aa, unidentified
MTQAPGVLPTPTVLDYERTLILAIELSNTSWVLAAQIPGLSGVKAKRSIEPTPDALMAAIEDYRARAVKAGRNVERVVAIYEAGWSGFWLARWLAKYSIETHVIQPSSVPVDRRTRRAKSDGIDAELLLRTLLAWLRGEPRVCSMVPIPAETDEDARRRVRERAELVAERGGLVNRIGAVLVGEYNPIRRDRRQRLDELRTALGDSLPTHARAKIVRMLDRPELLLIQIAELEKSRDAVLEDANPDKAASMIQQLAKLRGVGAQSATVLVREGFVREFANGKSLGSYAGLTSTPYSSGGTEREQGIGKAGNARLRTLMVELAWLWQRYQPDSAQVSWFRKRVSGTGRRMRKVMVVALARKLLIALWRFATQGVVPEGAVMKPAS

SEQ ID NO: 460037 - protein, 410 aa, unidentified
MEVLHPRCCGLDVHKATVVACVRRVIDGKPVKEIRTFATTTASLIALSEWLAETKCTHVAMEATGVYWKPVWHILSDEDFRLVLANAAHIKNVPGRKSDVKDSDWISDLLAHGLIRPSFVPDGPTQEMRTLLRTRKQFAREKSSHILRIQKTLEDANIKLDSVITDIMGASGRKMIQALVAGEKDPAKLARLADPRVKASQESLREALRGRVTKSHRFLLSLHLGQVDVIDAAIAEIDREVEAGIAPFRTAVEQVSAVPGIKSLAAQTILSEIGIDMSRFPSSAHLISWACICPRSDESAGKRRSTRIRKGSPWLKSTLVQCAWAATRTKGSYLQAQFYRIRARRGPKKAILAVAASILTAIYHMLKDGTLHQDLGPNYLNACNKERQKNRLIKRLADLGYVVELTPQAS

SEQ ID NO: 460038 - protein, 346 aa, unidentified
MNIIGCDLHTRYQVVAWVDEETGEIVTRRLEHENGEARSFYASRPRGARVGIEATFPALWFERVLAECGHELWVGDAARIRASEVRQQKTDTRDAEHLLDLLRTDRFPKIWVPSLEERDLRQLLVHRMKLVRTRTAVKNQLHALAMSQGVCRKGKLWSPRGRAELESLALLPWASRRRQELLKLLDELAGPIAELDRAVEEEAQKREAAVRLMTHPGVGPVVGLALVLTLGPVERFPNRRKLVSYLGLNPREHSSGGRQRLGAISKQGNSMMRWLLVEAAQTAARFDPELRRAYQRLKFRRVSGVAKVAIARRLAVRLYWMLRARRNYAQLVRMSGSPSSAVVPVS

SEQ ID NO: 460039 - protein, 349 aa, unidentified
MEAYDGPQIVGMDLHRRRSVLVRMAEDGQKLGTARIANSPARLAAEIRRAGLHPKVVLEACYGWYWAADTLTAAGAEVHLAHPLGVKAFSHRRVKNDELDARDLADLLRMGRLAEAWIAPAEIRELREITRYRGKLVQLRTSCKDQVHGVLAKLGIEVTCSDIFGAWGTRWLDDLVLPQPYSWKVASLRQLIGWLSAEIIVLEQVSADLLAGHDAYRAVQQLPGIGPVLGAVIVAEIGDITRFRHPARLCSWAGLTPRHRESDTKVVRGRITKQGSRPLRWALIEAVQRTPDGTPVRQARDAIIARRGSQARNIAKVAAARKLLTYVFYAMRDGHVRALDIPAAEQEAR

SEQ ID NO: 460040 - protein, 421 aa, unidentified
MMNDELHVVHARAAGLDIHKAHITATVRCASAAAAPTCETREFNALDSGLKSLVAWLHSHRVEAAALEATGIYWHTPWQALTDAGIEAQLLNAQQVKQLRGRKTDIEDSRWLARVCQFGLGRPSFVPSQTFRDLRSLSRHRRSLVAQRSRVRNQAQKVIDRAGVRIGTVLTDIFGANGRRILDGLVDRRDRADILASLSPHVRGKLDQLGDALSLTLRDAERFLLADLLSEHDRLCQRILHFDRLINEALAPWDESCRLLETLPGIDRSSACAILAEIGPDLSVFGNRHRLAAWAGLCPGNNESAGKRRSGRTRRGNHTLRDILVECAHGAARTKDCQFREYHKALAVRRGYNRAIVATAHKLARCLFAVLRNRSPYRDPETDYEALLVRRNAPRWLRKLREFHILVPDANGALAVRWPVA

SEQ ID NO: 460041 - protein, 327 aa, unidentified
MTNVAIGIDIAKDKLDLATIDRQSGRPLDERSGANTAAGHAGVVAFARTYDHVHLIMEATGTYQALAKALSEAGLLYSVINPLQLKRFAQMKLRRLKTDRSDAQLLAAYGREQRPPKHTPQPALEQQIKQISTHRRQLVKQRTALKNLAHASRYLPEAVPVCTEVCEHAIRHLEQGIARLDAALRARVTKAYAQVNRLIESVVGVGPRTATTLIAYVGSLDRYQSYKQIVAYAGLNPVPKQSGTSLNARMHISKQGQAELRTLFYVCALSARRYNKVCRAMYDRMRAAGKPKKVALIAVANKLIKQVFTAVKTGVEFDNDYQEKKPS

SEQ ID NO: 460042 - protein, 358 aa, unidentified
MDCSSDDFKVCFLNFDTEQTYKVKSSRKFDNRPGCFKELVDWTEKRRKDKSVPLRITMEVTGVYHERLAYYLHETGYEISIVAPNKAKHYLRSLGHKTKTDKMDALGLARMGAEQRLEKWQPSSKQMLKLKRMTRHRAALQKQITMTSNQLHALNRAAGDNQEVMDMKRALLDFLRQQVKQTDKQLEAILAQDEQVSQKVRAIAASLDGVGELTVMSLVAETDGFKHFSSEAQLTSYCGYDVVANQSGKTNGKTKISKQGNTHIRRALFMPAFNVVRYETGKFPALYERVHQRTKIKMKGYVAVQRKLLCLIYTLWKNDTVFEENYGEAQSQDVQQEQTADLNIGQCRAGAPLSGVAA

SEQ ID NO: 460043 - protein, 326 aa, unidentified
MVDTETGEHTERKLNRNEAIAFYRGLEGKAIVGMEACGNTLWMERLLAELGHELRLGDAAKIRAMEVRKQKTDRRDAELLLKLLLENRFPQVWIPSLQQRDTRQLLLHRHKLVNLRRQIKNQLQHLALNQGVQQKQKLWTAKGRTLLEELPLAGWTARRREDDLKLLDELNRSIGELDVAVEQEARNHPIARLLQTHPGVGPITALAFVLTLGQIERFPHSKNVVSYVGLNPAEHSSGGRQRLGSISKQGNPMLRSLLVEAGQSAARGDTELGRAYQRLKHKKHSGVAKVMVARKLAVRLYWMWRTQQPYTATRMQGSPSHLVGAR

SEQ ID NO: 460044 - protein, 329 aa, unidentified
MMKVVLGVDIAKKKFDVTLLNAKGGKRRKTFANTEAGFKALYVWLQRLIDEQIHICMESTSVYWEKLAEYVHKAGYQVSVVNPARIKGYAMSELRRSKTDALDGDIIANFCRNNELKLWEPPTEEQRKLRALVRHLETLKKSRTQQTNRIQVMRDPETKESLGKVIAVINDEIEKITERIHTLVNDSPNLKEKKELLESIKGFGAKTAIHILAEMYDLDKYANARAAATDVGVTTSHYSSGTSVRRRSKMSRMGKASIRGALHFPAITATQHNPVIKRFVQRLEKNGKGSGVIRVAVMRKLMHMAYGVLKHKTPFDPNYDLKGLDLLSC

SEQ ID NO: 460045 - protein, 417 aa, unidentified
MGISLPASSCEEVALKYVCGIDIGSQSCAGCICRPDKSLVVKHTAFANTKDGWNVLLDKLSHLDALPGEILIGMEATARYSENLYHALEQRGYQLCLLHPGQTHQFHQRQGLRAKTDRLDAVTIARVLLSGEARAGYIPNELIATYRELVRLHSQLSEQAARYQNQIHALVVVLFPEFTQVFADPCLSSALAVLQAYPSAQAMAQAGEKALYVLLHAQKHAHYGHPTAKKLLSLAATSVSSGRAEAGRSVSLRIVCEQLEQTQKNLERLQGELEHLLANDPAVKALQQIPEFGTKTVAVLRAELGDVDRFGRTDQVIAYAGLDVEIKESGLWKGQAKLSKRGSGLLRQTLYLAALRSIHLEGSAFGAYYRRLAERGLKKGSALMAVMRKMLAVTVYLLKHEQQDYDPSKVGVGMLAV

SEQ ID NO: 460046 - protein, 412 aa, unidentified
MQDILTCAMGLDVHRDIIVACLVKGAVDAEPEAETRTFSTLIPEMQKLRDWVIESECRNIAMESTGIYWQPIYEMLESCFDGEISILVVNARHMKNVPGRKTDMKDAQWIATLLRAGLLKGSFIPDKAFRELRHLTRYRKSVVHDITAQKNRIDKFLQSSGFRFTAFLSDTFGASGRNIIRHLIEHGSIDREALDKCLKTKTRNRIDEILVALNGSLSEHQRRFLNMVFRHLEDLEAHKHTVEDEITEEVLKHTDTLNLLCSIPGIDVTAAAAIIAEIGTDMSSFPDSQHICSWAGLSPGNNESAGKRKSVHINKGNPYLKSMLCEVAWIMASHRKLYLSGWYWKVKQRKGAKRATIALARKILSIIYIMLKTGTPYNEECFEQRRLRCERKRANRLVNELQKLGYVVVAPD

SEQ ID NO: 460047 - protein, 388 aa, unidentified
MDVLYQSCAGIDVHQATVVVCILHGPLTSTRPKREMAQFDTTTKGLKACHDFLSQFHVEAVGMESTGVYWRPVWHELCDDFELILAQPAHMKAIPGQKTDKKDAHWIAQLTRIGLLPRSFVPDETIQELRELTRQRKHYVESRNRETNRIHKILQSGGIKLTTYIEDIMGASGRNLLQLLIDETPVTPRMIHQSVYTSLKRKVPQLLEALDGYFSAHHRFMLAQSLEIYDFYQKQIDCLEERMNGYLNLYERPVEILDSIPGIDLTTASVIIAEIGVDMNRFPTAGHLASWAGLCPGNNESAGKKRSTKIRHGNSYLKRCLCQTVFAAKKQKGSPLAERYYQIQSRRGPQKATIALAHQLLKIAYILLKENLTYQEFVLQKRLLETSQ

SEQ ID NO: 460048 - protein, 426 aa, unidentified
MKNTQNEKISQIKFSTLVVGIDVAKETHYARAFNFRGIELSKLLKFSNTAEGYQRLEEWMQNICQQHSKTDIIVGFEPTGHYWFTLGDYLKNQGHKLAMVSPFHVKRTKELDDNSPTKNDRKDPKTIAMLVKDGRYREVYIPEDVYQELREAVSERDRLVQRMSAISNQITRWLDIHFPEFHTIFKDWRRKAAMQVLRNYPTPDKIVAAGAVKIEETWKLTMKRTAGLKRAQELVKAAEKSIGRKTGLIAAETSLQHLLNEYDLYSQHYQQLEQLMLELLQQVPNAEKLLDIKGVGLVTAATFVGEVGDIRRFQDPRQIQKLAGFNLVENSSGKHKGKTKISRRGRRRLRHGLFMAMITILATNPEFRQLHKKNISRENNPLNKMQSIIALCGKLIRVFYALLRTGTDYSADKMLGDIELGMKAVA

SEQ ID NO: 460049 - protein, 416 aa, unidentified
MEVLHPRCAGLDVHKDTVVAAIRLATNGEPTTEVRTFSTTTPGLLGLSDWLSEHACTHVAMEATGVYWKPVWHILADGTFTLILTNPAHVKNVPGRKTDVADALWLADLLAHGLIRASFVPEPATQAMRGLLRTRKQLVREQASHIQRVQKVLEEANIKLASVLTDVMGLSGRAVLKALIEGETDPDQLVKLIDRRVKASPEQRHAALRGRVTDHHRFLLRLHLRQIDTLNEAAAEIDQRVDRDLDPFRAAVRLLRSIPGVADLSAQVIVSEIGTDMTRFPTANHLISWAGLCPRNDESAGKRRSTRLRKGAPWLKTTLIQCAVSGVKKKASYLYAQFNRLRQRRGPKKALCAVAASILTAIYHMLTDGTFYQDLGADYFKKDTPYGQAKKLAQRIAKLGFNCSITPKAEEEVVSV

SEQ ID NO: 460050 - protein, 419 aa, unidentified
MSFKIIKNNCCGLDVHKTWIFACIGITDSNNRTEYKQARFSSFTKGLNELCDWLAKYNCNDVCMESTGKYWIPVFNILEQRSLWVTLSHPKYTKPMKGNKTDRKDAKWICDLYMCGMVKPSFIPPADIRELRDLVRYRFKLTCMITGEKNRAQNCLTVSNLKLDDVFSDVFGKSSRSITEQILQHPGEKFDVSPFVDSRCKTPIEEIQAAVDGNISKEQAVKLRQCLDHIDELNKHISEVEQEILRLSDKYEVALNLIRTVPGFDKNPLTAIQVLSEIGGDMSVFPTAKHLVSWAGCCPRNDQSNQKIKSTRISRAGSYFKPVLVQVANALIKSKKHSEFTNRYKRIKARRGHKKAIIAICRMILTAIWHILSDLKPYTPEGFLESRPVKEEKVLSTSQALNLLKQRGYIIKDKPLAVF

SEQ ID NO: 460051 - protein, 350 aa, unidentified
MRFYTKQHRYYCGIDLHAKTMYLCIINQRGTILLHRNIKAKPDVFLKTIKRYRKELVVAVECMFTWYWLSDLCASEKIVFVLGHALYMKAIHGGKAKNDRIDAHKIAVLLRGGMIPMAYVYSKKMRATRDLLRRRMYLTRQRAQLIAHVQNTNHQYNLPDIGKKIAYKANREGVAERFPEEAVRKSIELDLKLLDYYDELLTKLEHELSLAAKQHDADSLFRIRSIPGVGRILGMTILYEIHDINRFQRVQDFVSYCRLVKSARESAGKRYGSSGKKIGNAHLKWAFSEAAVLILRRNPEARKYRDKLAKKHGKAKSMTILAHKLARATYYMLKRKTVFDMKKFLNKQTG

SEQ ID NO: 460052 - protein, 338 aa, unidentified
MTIRTIGIDLAKNVFEICGLDENGEIQLRRRVRRETLLRAVGEIPACVIGIEACTGAFFWQRQLEVFGHEVRIIAPQHVKPFRRRQKNDRNDAEAIAIAITQPRMRFVPKKSVMQQDIQSLHRARRRMVNHRTALVSQMRGILLDRGIAFGQSITRARHMIPEIINDGNNDLTDLCREILSSLLELMRGIDKRVREFDHRIDRVFRSTEACQRIGRIRGVGPKTATAVIAAVGDGKDFDNGRHMAAWLGLVPRQHSSGDRTILMGISKRGDQHLRTLLVHGARAVVRTAAGKSDRFSQWVNELRERRGTNRAIVAVANKNARIIWALLARNEEYRPVI

SEQ ID NO: 460053 - protein, 404 aa, unidentified
MKDYSVVFGIDVSKAKLSVSVLIKKKEIDHFDIANDAVGFKSLLEQLQEFAQPVVIFEATGVYSLSLEAFLNYKGYDYVKINPLKAKKLMDNNLRHNKTDRVDAHRLAMIEFITPQALSTQQPKEYRELQAASRYYEELTQDTVKAKNRLHRALQMVFPQIEQLMSTPSGKQYWQLVKLYPHSQLVLNDSYDQITEKLTEISNIGKRKASNLANSLLNLAKLAYAYYDYDSVQVKLVRRLVQQLIDLEAEKSEIIDYMEEIAPKDDLELYLSVPGIARITALRLIAELGDLRRFKSTNQIDAFVGIDPGRYQSGEYDGHLGISKHGNRIARKILYLAIGQIASASSSNPCHIANYYNAKKQSSHSRSYKKIAIASVHKLIRTLYAMIINGQAYDYNVATHNQRL

SEQ ID NO: 460054 - protein, 411 aa, unidentified
MSQMLIGIDVSLRSHHVQFMAGDGRKLASFSVTNDRHGADTLIRRMLDTAAEVGCQTLRIGMEATSNLGWHLAHYLKDQLAPYEPNVQAQVYVLNARKVARFKKGYDTLPKTDRIDAWVIADHLRFGRLPHDMNEVVQYQALQRLTRTRFHLIHSIKREKAYFLNQVFLKFSGMRIDNPFSDTFGATSLAVIQELDPERIAEMPMEELIEFLQEKGKKRFANPQEIAELLKKLARSSYRLDKAMSDPVNISLSVTLSVIKNMEAEVKKLDKQIDKIMKGFQQTLTSVKGIGAVYAAGILAEIGDISRFDDHNALAKFAGLVWNKYQSGDFEAEDTERVMTGNKYLRYYLVEAADKVRKYDSEYEAFYHKKFNEVTKHQHKRALVLTARKLVRLVFMLLKTKKLYTPPERRN

SEQ ID NO: 460055 - protein, 380 aa, unidentified
METATARSGNYTTNFTVLHLAFELGNKTWKLGFTIGLGQKPRERVVPARDLPRVLEEITAAKRRFKLPDSTRVVSCYEAGRDGFWLHRALVAAGVENQVVDSSSIEVKRRARRAKTDRLDLGKLMTMLIRYHSGETKVWSVVHVPNVEEEDQRQLHRDLADLKTERAREINRIKGLLASQGIGLEKRGQAKVDLDGVRLWDGSCLPEGMRGRLRRAQERVEFLNCQIQELETQRAEELEHSPRVDIHQARALMSLKGIGPTTAWVMVMEFFGWRKFRNRRQVGGLSGLAPTPYQSGDSAREQGISKSGNRRVRARAIEMAWMWVRYQPESALSRWFQERFGQGGSRQRRIGIVALARKLLVVLWRFLETGAIPEGAVVKA

SEQ ID NO: 460056 - protein, 270 aa, unidentified
MSQEKYIGMDVHQATISAAVMDVEGKLLMECVLETKASTIVGFIEGLRGSLYLTFEEGTSAAWLHDLLQPHVSRLVVCDPRKAALLKDGNKSDRIDARKLAELLRTNQLKAVYHGEHGMRSLKELGRSYLTITQDTTRVMNRIKALYRSWAIPCSGTTVYAARHRQAWLAKIVEPGVRVRAEHLYQQLDSLQPLRLEARRQLLRESHKHAAVKLLRQIPSIGPIRAALLVALLQTPHRFRTKRQLWAYSGFAVETHDSGEYRYVRGKRLG

SEQ ID NO: 460057 - protein, 435 aa, unidentified
MPHDRNAIKVSSLAQKLNLFCGFDWARHDHYFVLKNDSHDTLDEGYFSNSPEGFQQFLTRLDEKRQGGQPIALIIEATRGGAASVLANVDWITLYPVNPSKTRKLIELDGSGKGKNDPRDSHLLCDYLIGNHHKLRTENERDEDILCLRELVQTEDEYIGEQTRLKNRIKAQIVQFCPALEAMVGEKLDTKAYTQYLLAFDPRKPAKADLVKEHLNSHHVRSKGVVEKFLKRHSELKVLPLGKKLLAVHVEKLSALVRQLHTIQAELGWCQNEITTFFNELPNAEIYLSLPGLGERLAPRMAALFGKNPAKNFVSKNEACAYFGQSPVTDSSGGYDKKNGKERKRAPSKEEVKKRCSCNRQARHTAYLWSRATGCLNQVYAPWQREYLNRLRERGDKTATRYRKLGRKMIAVLYTCLVTNQSYSLEHYQKNAHAK

SEQ ID NO: 460058 - protein, 385 aa, unidentified
MAPPARPEIVIGLDVGKSSHWACVVTREGELLASKPVLNRENAIDGLYAQYPGALVVVDQVRNIGSLALSRARLAGMPRAYLPGLAAHGASRLFAGDAKTDERDAMVIAKTALGIPDALLPVADRPPEIEAARSLAAQRDFLTCENTRSKNRLRSILLESCPEFEAHADLSDPATLKLMAAVGGPWSISEASPQAVGALTRGCGRAKVAALVESVESSSRPHPAAVACEDRAVRLLARWISENAAEIESLTSEISALLSADETYRCLLTVPGIGPRTASELVISIDIADFPSHDRLASYCGLAPRNRRSGTSISSVSASRQGNKRLKNLLVFSCNCLARSRNRWGGYYARCRDRGMPHGKALKAVARKRLKVIYAIMRDKVPYSA

SEQ ID NO: 460059 - protein, 422 aa, unidentified
MRLQIVYERCAGIDIGKDIIAVAVRAPGEGPDGRKTIKRTFKTFYGVLRECARWLTGQGVTHVAMEATGIYSMPVYHALVAHGEFEVLVCNAGHVKNVPGRKTDLSDAEWLAQLLECGLLRGSFIPPADIKAARDVIRYRRKLIEHRTSELQRLGNVLQDAGIKADSVASSVTTKSVRAMVEALIDGERRPAVLAQLAKGSMRSKIPDLTRALEGRFDDHHALMCRLHLAHLDQLDAMIARLDDQIEQMMQPFCAQRQLIASVPGIAMHGAAAVISEIGADPAPWFPSAEHLASWVGLCPGNHESAGKRHHGRPRKGNQHLAPVLVECAWAAVRTDGYLREYYRRQVHKFGGFRSPSAKKKAIVAVAHKLIVIIWHVLATGRPYQDLGADYFTTRIDPEKERRRLIAKLEAQGFKVTLEPAA

SEQ ID NO: 460060 - protein, 340 aa, unidentified
MRKYIRIGVDIAKNSFQVHALESEDCSATKRKLSRSGIVKFLAEVEPCAIGMEACGSAHYWARRFRAMGHEVKLTPPIYVKPYVKRGKNDAADAAAICEAMSRPNMRFVAVKSEDQQATLMAHKTRELLIKQRTMSVNALRGHLAEFGVIAAKGIGHVEELVERAAGADLPAMVQATLGVLLAQLRSLDAAIDELERAIVADHRRDPVSRLAASVPGVGALAASAILASAPDPHAFKSGRDFAAWLGATPKQNSTGGKEKFGSITKQGNRYIRRLLVLGAISILRAAPKRKGVLCDWLAALRARKPAKVVAVALANKLARIVWAIITTGEAFRSSIYAKA

SEQ ID NO: 460061 - protein, 306 aa, unidentified
MLRPDGRHRTKKFANTTKGHDELVSWLKGHKIDHAHICIEATGTYMEPVAECLYDAGYIVSVINPALGKAFAQSEGLRNKTDTVDARMLAEFCRQKRPAAWEAPHPLERALRALVVRHQALTDMHTQELNRTETAREVQRPSIDAHLLWLEAELKRLEKQIKDLTDDDPDMKHRRKLLESIPGIGEKTSAVLLAYIGLKDRFAHARQFAAFAGLTPRRYESGSSVRGASRMSKAGHVSLRRALYMPAMVATSKTEWGRAFRDRLAANGKKGKVILGAMMRKLAQVAYGVLKSGVPFDASRHNPVAA

SEQ ID NO: 460062 - protein, 359 aa, unidentified
MTENTNMESPVLWIGVDVSKKTFAAAARLPWEEKAVYPKASAEFENNRAGARRLCKWIGELEKEHGGPFGVAMETTGPFSMKLHGNLQKARPGLHVAICNPLSVSYYMRSFGMNKTDKADAAAIARYAAHVRPCKYREPSRDEAELKRLTRDRTFMVDSRTQYKNRLGSEADARSCKRIRRVIKALDKEIDDIDKEIAEYIATKASAECRNEIELMKSVPGVRTTSAAVIYGELGSLSGYTRKQLSAMSGICPTTLQSGTSLRKGGLSKRGSKWLRRILFLDSMQNIHGSPAMAAFHAKMLSKPDSTTMGTRVACMRKLLLVLRGIVVSGKPFDPNYVSVRPTSLDKKQKNPEKPDVTA

SEQ ID NO: 460063 - protein, 419 aa, unidentified
MTGISAMKKHIYRTKKINAIDWIQMKEQLQGSPVVFAIDVAKEKQYALLANADSSVSELLSWNHPEQTREVLTHLENLACPLTAVMESTGTYGDALRYQFRCSDFEVNQISAKRVSDARELYDGVPSLHDAKSATVIMRLHRDGLSIPWRESDDAERELDALRREYDLHQSQYQRNKNRLEAYLSRHWPEVLPLLPLDSVTLESLLIEYGSPEQIAKNTEEAAKNMHLWSKNQLKNEKIAVVIQSAVNTLGQPCIDAERRYLQALTAEMRHSRQQQKEVKDILEATVKADTGLSKLTSVIGLITTAVLLSCRLDPRNFRNARSFQKALGLNLKEKSSGRDVGRLKITKRGCSMVRRYLYFAALRLINNDPVVKAWYQKKVDARAKNKTVIAFMRKLAKALWHVARGERFDATKLLSVTA

SEQ ID NO: 460064 - protein, 366 aa, unidentified
MKRVMAGMDLHGNNVMIGIVDADGTRLRHRRLACDLEEVIAFLDPYKPLLDRVAVESTFNWYWLVDGLKAAGFPVVLANPAKIDQYEGIKHADDKNDAYFLAELLRLGILPTGYIYDPESRPVRDLFRRRMGLMRLRTTLLLSSKSLHHRTTGHSLAVGQLKALSPTDLAALYSHPANRLTAEIQKELIEALNQCIRRIEKTVASEALKKPYYKRLQTLPGIGGILGLVISMEVGEIERFAEPGQFASYCRTVDSNRVSNGKKKGSNNEKCGNKYLAWAFVEAAHAARRYDAHCRRWFDRKSAKKGTTIATKALACKLAKAAWHVMAKAVDYDPARMFPELAAGRIEQISGRQTSASKGVGPEPED

SEQ ID NO: 460065 - protein, 342 aa, unidentified
MMQVTTIGLDIAKSVFQVHGIDGCGRVVLRKRLARTKVLAFFANLPRCLIGLEACGGAHHWARELTRLGHDARLMPPQYVKAFVKTNKHDAADAEACCEAVQRLSMRFVPVKTEAQQATLMLHRVRDQLIGQRTATINALRGHLAELGIVAAQRQAGLSTLLAALGAAEDDRIPPLAREVLQTLVAHLRALAAKIAALDRRLIAMTRSDPICRALMAVPGVGPVIASAFAASVPDATAFRSGRHLAAWLGLVPGQHRTAGKALRLGLSKRGDAYLRRQLIHGARALVRVSQRREGKLWSWINTPAPTATVQRRGCGRRQQAGPHHLGDPAPRGRPIVRPEIA

SEQ ID NO: 460066 - protein, 294 aa, unidentified
MNIQQTAYPKLYIGIDIHKHSWKVHCATDLFAGKSFSMSPDPKQLHTYISKHFGEYKVTTAYEAGCCGYYAHRCFEGYGWVSLVVNPAEIHRKGKEKHTKTDKIDAQLIARELKDGRLESIKIPDKKREELRSLFRRRNDLVKDFRRVKCYIKMQLLYFGIKEPEELDNDHWSHKYRNWLDDIVFEYPTAKATLESRLRFFRFVDQELRDVSTQLRIYCKVNYKKDYLLLRSIPGIGGIVACGILCELGDLRRFNNIKHLAGYVGLAPSVYQSGSSQRTMGMTPRSHRLCEVIL

SEQ ID NO: 460067 - protein, 351 aa, unidentified
MMIIGCDFHPRFQQISFLLEETGECGQRRLMHTAEAEQYYRSLSGTTVRIGIEATGSYGWFRRLLSGLGHELLVGDATQIRASNPRRQKTDKRDAEHILGLLVEDRFPAIWQPPAENEQLRQLLLHRSRLVRLRTRVTNQLDGMAKNEGLLVPGGWSGKRRKGIEALSLPGWYGERRKDLLVLLDRLEERIAPLNKAVSQAAANNAEACLLMTHPGVGPVVSLAYVLTIGNWQRFPRGKQVGSYLGLIPSEDPSSDKRRLGHISKQGNTLLRWLLVEAAATAQRYDPNWHRQYLRLSMTKHHGVAKVAIAHKLAVRLYWMLRSGEDYQHARERGSAARQSECPGGRETTAD

SEQ ID NO: 460068 - protein, 534 aa, unidentified
MRINEILRGWLRREVGRYFNGVFTRERKNPNRSVVPDRAPSTLVKFVYRKEDGLSRRRDYVFLHDSAVVNPANQEEGTMVKRKKQSKMESKGSVTVGVMNPDAAGIDIGATELYVAVPAERDNQVVRSFGAFTEDLHQLADWLQRCRIKTVAMESTGVYWIPAFQILEARGFEVCLVNARHVKNVPGRKSDVADCQWLQYLHSVGLLRSSFRPVQEVCAVRSLMRHRDGLVKMASCHVQHMQKALTQMNVQIHNVLSDISGVTGLAIIDAILAGERDPAKLAELRDRRVKADKATIAKSLVGDYRPEHVFTLKQALAAYRSYQQLIGECDAEIERHLMAFESKAEASVPDQGKKNPPSRRPRANDPEYDLRSHMHRILGVDLTLVPGIGSMTASTIFSEIGADVSKFPTEKHFLSWLRLCPENRISGGKLLSSHGCGSANRAAQALRIAAQALHHNHSLLGTYFRRIQARLGGPVAISATAAKLARIIYHLLKTRQAYDETIFAENEKQHKERLERRLRNQAQVLGFKLIPAAA

SEQ ID NO: 460069 - protein, 488 aa, unidentified
MNSGMAAVNVPACGLDVHKDVIEAAVIDAEGNFVQRTFDTMRKSLFELRAWLISLGCMKVLMESTGIFWIPVYEMLEDVPGMDVGIGNASHMKNVPGRPKTDKEDSKWIARLCMMGLILKSFVVGRKFRELREFTRYHKKLVQERVRVINRIEKLLQMNGFRLSSVLSALDGVSAIKILRRLQEKGTVTVADIEQLRARGLRKSSEEIERAISGQMKWTSRLLLGRMLTRLKTLDTEIDEIYALMVDMSKDHAPAIKIIDSIPGIAEQSAIYILAEIGTDMSAFRTANHITAWSGLAPKISESAGKVRSSKTKKANVYLKTILTECAWAAVKSRGTRLHNWYWRNVKRLGEKKAITAVARKLLVYIYAMLKSGTLYDGSLDVADTEIYKAQKLASARKTIAHHQGSAVKKEQRDSENQKTPTGTLPPPAQAGHGPPNVAGQAEPPKKGGRPRKVSITLSAGSDNNQEQVTPKKRGRPRKKSEIEGRVA

SEQ ID NO: 460070 - protein, 342 aa, unidentified
MTYYAGIDVSLEYSSVCVVDGAGKIIREQRIASEPEALIAWFRGLGFGLERIGLEAGPMSQWLHAAMRAAGLAVELLETRHVRDAFKAMPVKSDRNDARGIAQLMRLGWFRPVHCKSMAAQEMRALLTARKLVQSKLLDVQMSLRGLLRGFGLKVGPTTPSRFAGRISDLVEGNATLEVIAAALLVVHETLRRELAGFEKRVRSIAGSDGRVRLLMSTPGVGPIVALTFVAAIDDPARFKSSKGVGAHFGLTPKKYQSGETDITGRISKIGDKGVRTALYEAGHIILTQPLKGCTALKSWAMRLAKRAGMKKAKVALARKLAVIMHRMLVDGTLFASAAVAA

SEQ ID NO: 460071 - protein, 451 aa, unidentified
MNNEPEIVLDDEHELVIERVAAIDVAKASGKVCMRMPHPSRPDRRMSKVRDVDATTRAVTELANDLLGEGIERVTVESTSDYWRIWFYLLEAAGLRVQLVNARDVKNVPGRPKTDKLDAVWLAKLTEKGLLRPSFVPPAPIRQLRDYTRFRVDLTRERARYWQRMEKLLEDALIKVSAVVSRMDSMSVRDMLEALIAGERDPRRLAGLARGKMRPKYKALVEALSGRFDEHHAELARMLLDQIDALGAQISTLTTRIDELLAALIDTPGPAADGSVRDRDGEVELMVTGLDAAERLAEITGIGPVSAQVIIAEIGLDMARFPTAAHLVSWAKLSPRTIQSGAIQRSGKAGKGNPYLKGALGEAAAVAARTDTFLGERYRRIVKRRGKLKALVAVARSILVIVWNLLSDPTARFHDLGPDYYTRRIDTERRARNHLAQLAALGYRVTVEPAA

SEQ ID NO: 460072 - protein, 342 aa, unidentified
MTAIGVDTHKATLAACAIDDLGRAIDEATFNNDPAGHVAFIAWARAIAPEVTIGVEGSSSFGAPLARAVQSAGLCVREVPPHLSRFERRRTRRPGKSDPGDALAIARVTAREPNLPPIRLPDRTSEIRLLLEAREDLIGETTRARNRLHAHLRVLLPGYGGKVANLVAARHRTMVRSLLRGNATVQGELARSLLDRLLRYERECATLTHRIEALVAGHPLLALPGAGPITVARLVAEAGDMRRFRTPDAFAALAGVAPIPASSGQVQRMRLNRGGNRQLNRAMHVIAVTQSRFYPPAKAYVTRRIEADGKTWREAIRALKRQLVRPVFRLLVEGSEVRLEAA

SEQ ID NO: 460073 - protein, 347 aa, unidentified
MFKSQDIILAVDYHETNTVIRVFNGRTGEENVLKIPTSRSGLHKVAADALEFADDDQAVWWVMESMTGWVRVQMAMPDRVRFVAANVLALPRPPKAKRKKTDKIDTKRLLRECLHNTLPAAYCAAKDIRQLRRLTGYREKLISQRTGLRNWIDRFLAHETWRSRNRLWAKEGMAKLSAFAATLGGSDQLVVSCKLEELEQLEVRLKLVVKEIERISANSITTRRLDAIFGIGQISAVSIAARIGDIGRFADAGALIGYAGLAPGVHRSDQTSWSMHLGGPGTDARLRHYLVEASVWARQIPRYVKTYERVERRRGKKVGRLVVTRLLLRSIFKMLRDGVEFVPTQAV

SEQ ID NO: 460074 - protein, 312 aa, unidentified
MTSLCAAGVDVGRDYFDVGLAPSGQVFRVANAARGIELLVERLKAAGAVRVVLESIGGYGARLVRALAEAGFEVGVIDPGRIKALRTAEGKRAKTDALDAALIARFALIMSDAARPIPSARAFEIRALSTRRRQLVEMIAMEKTRLGQTLDEPIAASCRQVIAHLAAERAAVEARLEAEIESQPDGRQRRSLLQTIPGVGPAISLTLLADLPELGGLDRKAVASLAGLAPHPNQSGTRTGASHIHGGRPCVRAALYIAAVSATRSEAGFKREYLALRAAGKPGKVALVAIARKIAVAANAIIKSGQPWQKPT

SEQ ID NO: 460075 - protein, 351 aa, unidentified
MQIVGALDVHRRQITFKTLEPASGECSRGRISPAAREPLRQWLERFDGLEGEFVLEGTTGWRFVVEEIERAGHVARLADPAETAARRGRKRRAKTDDADCDLQLRLLLAGELPEAWIPPAGILELRTRVRLRKTLIDQRTAWLQRLQAQLFHQGVPPGLKPGTVAGRDALARVELSPAGREAVELYLRMLDQLDRELVPIDRALRAFARRQPGCRALTEQLYGVGAVTATAILAELGDARRFRSSDDAVRHCGLDVTVWQSDRKRAAGHLSHQGPSLLRWALFEAAQCAARRSSPDHDYYLEVAKRIDHNRACLSVARKLCRRAHHILRELGDDALAPSDPPRAELVDAAA

SEQ ID NO: 460076 - protein, 320 aa, unidentified
MEANLGIDVAKAKFVVALLTADGKVRHKSCANTPAGFADLAAWLQRQRVSPVHACLEATGTYGDALATWLHDQGHVVSVVNPAIIHAYARTQLARSKTDRIDAELIARFTATQHPPAWTPPAPEIRALQALVRRLDALHGMRTQELNRLAAGVTVAEVRASIDVVVTQLDAQIAHVQQLIRDHLDRHPGLRAQRELLTTIPGIGEATAAVLIAELFDKPYTSARQAAAFAGVVPRVDESGTIRKPARMVKIGPGRLRKALYFPALTALRCNPTVREMRTRLRAAGKANMVIVGAAMRKLIHLAFGVLKSGRAYDPTYVRS

SEQ ID NO: 460077 - protein, 317 aa, unidentified
MPEDARRPAQAAIRTELGAIFVSLELSRRIWLITSLSPGGGAKMSKHSVPAGEVHGLLGRFAELRRKAAARTGRDFPIIVIQEAGLDGFWIHRVLQSEGIESHVVDAASILTSRRRRRAKTDRIDGETLVRTLMAYKRGEPRVCSMARAPTPQEEDRRRVCRERRTLVGERVRHVNRIKGLLFAQGVFGYEPLRKGRRERLEDLRTGDGRPLPVHLKAQITRELDRLEVVLDQLKTVEAERDALLKPATDEAASPPAMLVRLKGIGPETAAVLWSEGLFRRFDNRRQVAAYAGLAPTPWQSGSIDHEQGVSKAGNSR

SEQ ID NO: 460078 - protein, 337 aa, unidentified
MSKITLIGIDTAKNVFHLVGIDKLGNYTYRKQLSRQQLLPALAKLESCEVVLEACAVSHHWARHIAQSGHRVRLISPQHVKPFRRGQKNDYRDAEAIISAALSPGIHFVGVKSVGQQAEQALHRVRSRLLSNRNAAASELRGLLGEYGLAFSKGIKPLRTGAARFADSDQAQALGLVELVWDVLEELDQLQHRLDEYTHRIEQRVRSDATSQRLRDELLGVGPLGASALRVKVADVRDFVNGRNFAAYLGMAPGHRGTGGKVKIGKIRKGHDRYLRQLLIHGARAVVQHLGDKQDPQSCWLRGVLERRGFNIAVVAQAHKNARQAWAILAREQALQG

SEQ ID NO: 460079 - protein, 363 aa, unidentified
MHEDTTVTVGLDVHARSIRLAAISADELLDERTLPYDLEALAKVLRRWPRTRCCYEAGPTGFGLYRHLVERGIDCIVVAPGLVPQRPGERIKTDPRDARKLARLHAGGLLEPIHVPSPELEAARDLVRAREAARLDRMRDRHRLSKFCLRHGLRLPGASWGVTRRRWLAEQRFSYAAQQQAFDGYLHALDLVDARIAALERAIAEAAEQGPWHELVARLRCLRGVDTLTALGLVVEIGDFHRFASAEEFMAFVGLVPAEHSSGEHRRQGSITKVGNAHVRRLLVESAWHARRRPSVGYALERRQRGQDALVLERAWRCQQRLHRRWRRMAARGKPSQKIVVACARELAGFVWAIATEQPLRAA

SEQ ID NO: 460080 - protein, 419 aa, unidentified
MSFKILKFNCCGLDVHKTWIYACIGITDSNNRTEYKQARFSSFTKGLNELCDWLAKYNCKDVCMESTGKYWIPVFNILEQHGLWVTLSHPKYTKPMKGNKTDRKDAKWICDLYMCGMVKPSFIPPADIRELRDLVRYRFKLTCMITGEKNRAQNCLTVSNLKLDDVFSDVFGKSSRSITEQILQHPGEKFDVAPFVHGRCKTPIEEIQAAIDGAISKEQAVKLRQCLDHIDELQKHISEVEQEILRLSDKYEAALTLIRTVPGFDKNPMTAIQVLSEIGGDMSVFPTAKHLVSWAGCCPRNDKSDRKIKSTRISRAGSYFKPILVQVANALIKSKKHPEFTTRYKRIKARRGHKKAIIAICRMILTAIWHILTDLKPYTPEGFLESRPVNKEKVLTTSQALNLLRQRGYLIKDDPSLAS

SEQ ID NO: 460081 - protein, 346 aa, unidentified
MTIVGCDFHPGWQQVAVFDSETGEIRELKLMNGDGEAERFYRQLTAPALVGLEACGNTQWFEDLLERLGHEVWMGDAAKIRASVVRKQKTDRRDAAQILKLLMNGEFPKVWRPSAEERDIRQLLIHRHRLVGIRVRVKNALHHLMLNKGVQMKHKLWTQAGQKALRELPLEGWAARRREDLLKLMAGLDPQIAALDEAVEQAAQANPRAQLLMTQPGVGPITALAYVVTMGDVSRFQRGKQVGSYLGLIPSEHSSSNRRRLGSLSKEGNPFMRMLLVESAQAVNRLDEGFRKQYQHRCHRMAKGVAKVAAARRLAVRLFWMLRTNTAYPEIVRIESSPAQAVVGAS

SEQ ID NO: 460082 - protein, 354 aa, unidentified
MSQKLDSEIAVIGIDIGKNSFHLVGQDRRGSIVLRQKWSRGQVEARLANLQPCLIGMEACVGAHHLSRKLQALGHDARLMPAKYVRPYSKGEKNDYRDAEAIAEAVQRPTMKFVATKSADQLDLQALHRVRERLVGQRTSIINQIRAFLLERGIAVRQGLHFLRAELPTILAKRTDVLSPRMLRVIEDLAGDWRRLDERIDALSDEIMTLGRQDKGCERLMTVPGIGPIISSAIVAAIGTGDAFAKGRDFGAWLGLVPKQMSTGDRTILGSISRRGNRYLRKLFVQAAWVVLAKITPEGWERYGLKSWIEAAKQRLHRNVLAIALANKLARIAWAVLHKGRAFQCVKTNAPRAA

SEQ ID NO: 460083 - protein, 353 aa, unidentified
MIATYLPTEYDIFVGLDVDKKSFAFTVKDHTDMKRSKKIPSNPEQFFTYLQNNYSDKKVICAYEAGPTGFHLYDYLTRKEIPCLVVSPLAIPKAPNERVKTNRIDSEKLAQDLRSGSLESIRVPQGDYRQLRYLVKTRENYAQLRKKTKQRIKALLLSAHLDACIKDDYKQWSCNYIKELKQLPCSDAVRASLDMLLRDLEYAREQTLEIHRKVKTFCKNTPPIDHYRRCLQSIPGIGFIVATTILGKLGDPGNLRNPREIGAFVGLVPTEQSTGDAIKRGSITHLGNKTLRFLLIEAAWVAIRKDTKLQQFYHRIKGRHHPRIASKKAITAVARKLTLIIYRVLKEQRMYTP

SEQ ID NO: 460084 - protein, 339 aa, unidentified
MKVTTFGLDVAKRVFQVHWVDMETGEICRRQLKRSEVVEFFANREAAVVAMEACGSAHYWARKLSVLGHEVRLIAAQFVRPFVKSNKTDAADAQAIWEAAQRPGMKFVAVKSEGQQAVLTLHRMREQLVKMRTMQINQLRGLLYEFGADLPAGRQRGMARIPEALAKLEQTLPAMVIEAMRSQLKHIEGLDQDIAEIKKKLFVWKKEDAASKKLMEIPGVGLLTATAVVATIGDARAFKSGREFAAFLGLVPRQSGTGGRVKLLGISKRGDVYLRTLLIHGARAVITHQKQRGPWLDKLLARRPFNAAAVALANKMARTIWALLAHDRTYQKGYVAKAA

SEQ ID NO: 460085 - protein, 333 aa, unidentified
MHYVGIDVSKRSLDVCLLAEGSKGSRKTKTLSNGQDSAQNLAKWLILQKCELSQTHVIMEATGIYHEYLACGLHQMGILTSVINPCRSREFAKAMGIFTKTDAVDAYVLAFYGCLKQPEAWTPPKEEVRKLRALLQHRDSLLNDKLRIDNRLNTLKSTEAVQEVMDSLSLVNQYLKSEVARIERLISSHIAQHPGLKRDLKLLMSVDGIGKQIGWNMLAVLRGNNFKSAEQLAAYLGIVPVERRSGTSVHGRARLSKIGSSNIRAKLYMGALTAISKNSHIKALYERLLAKGKMKMSALGAAMRKLVHLCYGVLHTQQPYDEKYKAKIINFSS

SEQ ID NO: 460086 - protein, 411 aa, unidentified
MGLLLREVPASCLVVAVDPGKAFNRVWLATGDGGLIGEPVSLPVLRDGVDALERLIAGSGVAGPPVIGLEATGGLHRAWAVEIERRWPGSLRLFAPSETAAARAQLGSRRFKTDDRDCAALVWLVRQGAGRRAGDLSAVEAMLGAVRHRRQLVDARRVLQQRLHDQLNALCPALSAPAAHGRALRIESPTGQAVLACAAAFDGRPPARRSLLARAPGRMTDATASFWADRWKRLLDPPSDAQLRARRLGRDLGRWQDLEADIAMAERELAGLLAQTDGQVLTTLPGVAVVRAAEFAAYTLPIERWPTPEHLYSATGLAPATYQSSMVTRRGRISRQGLPEHRNALMGIAWGLSQNSDAFKERDRELRARGFRPIQARVALARHACRLCWRLLQAQHPYDERRYAHARQRGR

SEQ ID NO: 460087 - protein, 347 aa, unidentified
MDQYVGLDVSQDETHICVVDRDGNKLWEGSCESTPESIGASVRKHAPNAVKIGLESGHLSTWHWHGLNDMGLPAICIDAYHAHGVLRLQMNKTDKNDAHGLAQIMRCNWYKEVTIKSFENHESRALFRTRSNLVSMRTDVVNQIRGMLKTFGILIKGIAGVSFENRVQEIIGEYTAIAAPLQVQLDMLQMIKQKIDELDELVLDHAYACQNCRILMSIPGVGPMTAANFVLAVYDADRFKNSKSVGAYFGLTPRRRQSGEMDYNGRISKRGDRVIRHQLYEAANSILTRVKKPSSLQAWGLRIAKRSGMKKARIAVARKLAVIMHQMLQTGELFCFNPATGERAIYA

SEQ ID NO: 460088 - protein, 324 aa, unidentified
MAKRTTICAGIDTGKRKLDVALDGTSLQLQVENTAEGHKVLLEWLRHHKVKRIGIEASGGYEQAVVIELRRKRFVVVVFQPAQVRAYAKFHLQRAKNDKIDAALIAACTAAVKKIHPAPDPRLQPFAEHLTMIEQIGEDIKLYKNRLETCRDPRIQKIWKEEIARLAKRERSELKALVAAIREHRDLAQRLDLIYSVGGAGMPTAVAILVRMPEIGQLSREQAAALAGLAPYDDDSGEQVGARHIDGGRKRLRRALYTAALPASFRWNPQLIALYQRLKAAGKEHKRCLIACARKLLIFVNTVVARGTPWQDQPPPTAAIAPAG

SEQ ID NO: 460089 - protein, 382 aa, unidentified
MSSITLYLGLDVHKDSITIAIAEPGPKGEIRTFGTISNDMGRLEHALGRIRKAHPQALLEVAYEAGPCGFVIARRLKQLEVPCLVAAPSLIPKQPGAPFKTDKRDACAIARLLRAGELTAVYVPEATDEAIRDLCRARTDAVDDQRRCRYRLKAFLLRHGYRYQGKANWSQPHMRYLRELVLPHPAMKAILEEYLQGIDAAHNRVRRIELSMLALLESWRLKPAVQALMAFRGFQLVAAMITVSELGDIHRFEHPRQLMTYLGLVPTEYSSGPRQRLGGISRCGNGHQRWLLAECAEHYLLPPKISKELSKRQQGQPEAVRQLSWKAQTRLHLRFIKLLSRRLQRNKAKVAIARELCGFIWALLRTLDCYKQTPISQPPAAN

SEQ ID NO: 460090 - protein, 338 aa, unidentified
MKVQILGIDLAKNVFQLHGVDRKGRSVLVRRVRREQLLRVIGELEPCLIGIEASTGAFYWQRQFEKLGHAVKIMAPQYVKPFVRRQKNDTNDAEAICTAVQQWNMRFVPKKTLEQQDIQALHRARQRLVNHRTALISQMRGLLLDRGIAIAVSATRARRLIPKILATADDELTVLMREIVSSLYAFMLQIDERIRAFDRKIAAIFKASEVCQRIAKIRGIGPKTATAMVAAIGDGSDFKNGRHLAAWLGLVPRQHSSGDRRVMMGISKRGSQHLRTLLVHGARAVVRTAVRKTDSRSMWVNELRQRRGYNRATVAVANKNARIIWAVLMSGEPYRSAA

SEQ ID NO: 460091 - protein, 383 aa, unidentified
MNDLIRIGVDTSKSVFQLHGVNAAEQPVLRKKLRRRQVIEFFQKLPATRVGIEACGASHHWGRELSALGHEVVLLPPQRVKPYVERNKNDAADAEAICEAMSRPRMSFVPVKTAEQQAALMLVGVRDQLVGRRTQLSNAIRGYAAEFGLVAAKGTDKIEPLLIRIAGDENFPPLAKDLFATLGNEYVRLKPELRKIEARLMAWHRGNELSRRLAEIPSVGPIGATLSVMKVGNPHAFRSGRDFSAWLGMTPKDHSTAGKVRLGAITKAGDEALRSVLVAGATSVIQQVRKGRGRPSPWLVALVKRKPPKLAAVALANKTARIIWKLMVSGERYNPQRAPQRFVPPTDSLAPGTRRQGQAACGGDLRSALTAPALCAPSAPPSA

SEQ ID NO: 460092 - protein, 353 aa, unidentified
MGIVVALDVHRRQITYKTLDRDSGEVRRGRIAPAARVDVRAWLAQFAGHEVEFALEGTTGWRFVVEEIERAGHRAHLADPAETAAKRGRKRRAKTDNADCDLQLRLLLAGELPESWIPPAQILELRTRVRMRKTLIDQRTAWQQRIQAQLFHQGVPAGLRLRTQAGRDALAQAELSPAGRELVALGLRMIDALDRELAPLDRELHAFARRQHGCRTLIAGLYGVGPVSAAAILAELGDARRFSSSDDAVRHSGLDVTVYQSDSKRAAGRLSHEGPELLRWALFEAAVSAARASSPEHAYYLQVAERLDHTRACLSVARKLCRRAYHILRELGDEALAPVDPDPQAEEAIAAAA

SEQ ID NO: 460093 - protein, 418 aa, unidentified
MTHVDLLTRPGGVVVSVHVAPVTSSTIVVAVDVGKTSALFSVSDAARHRLIGPSEFAMTGSGLTAAAARATAVVPPAGRVKVGVEAAGHYHRPVLDHRWPDGWEVLELNPAQVAEQRRVQGRRRVKTDVIDLEAITELVLAGYGRPVSDRDVVIGEVNAWAVHRSRRVATRSATKNQLLGQLDRAFPRLTLALPDVLGTKIGRLVAAEFADPARLAGLGVNRLIRFAATRDLQLRRPLAERLVAAARDALPTRDGVIARQILAADLILLADLDDQIHAAETALESLLPRSPYATLTSVPGWAVVRVSNYAAALGDPQRWPGPRQIYRASGLSPMQYESAHKRRDGRISREGSVALRRALIDLGIGLWLNEPAAKNYAKGLKARGKHGGVVACALAHRANRIAHALVRDHATYEPTRWA

SEQ ID NO: 460094 - protein, 371 aa, unidentified
MKKISTLHVGLDVHKDTIDVAIATDERDGEVRHLGTIGGDLAAVDKVLRKQISAGHKLHVVYEAGPCGFVLYRHLAKQGIEVEVLSPSAIPKAPGERIKNDRRDAIMLARLARSGDLKGITVPDAADEAVRDLLRARTDIVHAQRTARHQLKAILLRNDIRYEGKSSWTAAHLRWISRLVMPYPEQQIAFQEYVLAVTEATERIVRLDRAIETAVNVWRWQPVVEALCALRGIALLSAATLVAEIGSIERFQNPRQLMAYLGLIPGEHSSGPKRRQGSITKAGNSHARRMLIECAWLYHYPAKVAPILQNRLEKVTPQVREIAWSAQIRLCGRFRKLAARKLQHNKIVVAIPRELVGFIWAIARVQGPRAN

SEQ ID NO: 460095 - protein, 402 aa, unidentified
MIFINCLGIDIGKSESVVAHYKDEVLVKEMVIQNNQNGYRYLKNYIKHLDSLFILFESTGIYSRGMKRFCEIHKIDYLEMNPLEAKFKTSSLRSWKTDKSDAHKLALLAFRMKDSKVQRQSEEIYFELRERARFHLEMEINQNRLKVELVETLHQTFPGLEKLFTNRYSKIALNIAKAFPHPDFVSTLTHDELVEKVLHSTDKGISVNKAHKYVQKLIEIQINSFPNVDKSSFLLQKVQYLCDKLLIGIEEMKEFDQEMIDLAKNTTEFENIISIPGIGELTATLLIGELGNIREFKTNKQLNAFVGIDIKRYQSGTSKSRDTINKRGNKKARRLLYLIIMNIIRGRNHYQSHIVDYYYKLREQPHGKTHKTAVIASINRLLKTIHYLIVNNKLYDYQKAPH

SEQ ID NO: 460096 - protein, 344 aa, unidentified
MITFGVDAHKRTHTIVAVDDRGTPLGQTTVGTTSKDHLGLLRWAARFGAERRWAVEDCRHLSRRLERDLLSAGECIVRVPPKLMAHVRDSARTYGKSDPIDALAVARAAQREPDLPMARLDGPDRELRLLVDHRESLVAERTRLICRLRWHLHELDPAWEPKARSLDAQRTLDEVQARLQEQAGVVARLARELASRCAELTAAINALEKEIAQLVEQLAPALLALPGCGPLTAAKIIGETAGVDRFKSRNAYARYNGTAPLPVWSSNKTRHRLSRTGNRQLNAALHRIALTQARWHPPAKAMIDRRKKGGNSGREAIRILKRRLSDAVFQALLHDQTDALIPAA

SEQ ID NO: 460097 - protein, 343 aa, unidentified
MKLFIGLDVSLAKTAVCVINEYGKIAKEAQVPSDPQAIVDFANTLEGAVAIIGLEAGRLSQWLHRGLVGARLHVVLMETRQVKGALKAMPIKTDRRDAEGIARLLHMGWFRPVHCKSVSAQEVRALLAARKAIQQGMIALELSLRGLLRNFGLKVGAISRGQFDARIRKLVDGNAMLQAAAGPMLRARASLRQELAGLERQVRLLAKDDAVCRLLMTMPGIGAVVALTFRSAVDDPARFSSSKKVDPWVGLTPSRNQSGERDVIGGITRAGDANLRRALCQAATVMIHRGRSTWLRSWAAQVAKRRGAKRAMVALARRIGTILHRMWRDGTEFSTVPLIAKSA

SEQ ID NO: 460098 - protein, 423 aa, unidentified
MISAAIERCAGIDVGKKFLAVCILTGPLDGEPRVERRRFGTVTAELESLRDWLKAEGVTDVVMESTGSYWKPVFNVLEGSLKVCLANPQEVRNRKGHKTDDKDGWWLAHLLRHAMIYPSFIPPRAIRELRDLTRRRKRLLSDATSEKNRVQKVLEDANVKLGNVLTDVFGVSGQLMLEALLEGKAGPMEIAQLAKRGARKRIPEIIQAVEGHRMSDHHRKMIRYSLKHMLFLEEQIAELDRDIAAQIGSAGLGQAQQLIQTVPGIQDRSAANILAETGADMQQFPSAKHLSSWAGVCPGNNRSAGKNKSSHTTGGNPWLRSALTECAWAAAATKNCSLKDKFWRVTSRAGGKKAPALIAVSHVMLTLIYQVLQTHQPFEDRKLPPLGEPHKQRMIRHHVRRLGKLGVAIPRIVYQPPDPSASH

SEQ ID NO: 460099 - protein, 402 aa, unidentified
MNSVGIDISKGRSTIAVMRPFGEIVISPFEVRHTDSELSELARRLKSLNGETRVVMEATGNYHAPVAKLLHDAGLYVSVVNAKLVHGYGNNDLRRVKTDRKDAVKLANYGLDRWLTLPRYVPEENTRLLLKNCYRQYRQYSKVQTVLKNNLISLLDMTFPNANRLFVSPARADGSEKWVDFVAEFWHCECVSERPLKSFVNKYWRWCRKHGYNFSEEKAHAIYDEASGHIGVMPKSETTKLLVEQAVSQLSATSAALAALKQEMQSLSSQLPEYPVVMGMFGVGPILGPQLIAEIGDVRRFYSKKALVAYAGIDAPPNDSGDVIGRHKSMSKVGASSLRRTLFLIMSAYLQNSPPNEPVYQFMDRKRSEGKPYRVYMMASANKFLRIYYATVKAYLETLEQF

SEQ ID NO: 460100 - protein, 349 aa, unidentified
MHSTTVAVDLAKNVFELAVADSEGNIGERLRLNRARFSSFFVHRPPCRVLMEACGSAHYWARRISAHGHAVQLLPAQYVRQYVRRNKTDRADAAALIEAARCTAIRTVPAKSLEQQQVLVLHRLRSQWMSTRQRYLNTLRGLLREFGIAVPLGVRAARTRIAHYLAQPPQELPAAIRPLLAQMLNEVKELEHHIEQIERDLTALTRADPVVQQLRQIPGIGLLSSSAIRAAVGDVERFPCGRSFASWLGLTPREYSSGERRRLGGISKRGDVYLRTLLVHGARSALLAAHRQQRTGRPLDHLRQWALQCERERGHNVATVALANRLARIVWATWKHARAFDGNWGCTAQ

SEQ ID NO: 460101 - protein, 445 aa, unidentified
MEQGIRISSFGAAVYSGHKKEELMMRGLRVKRVRTVREGTLIATVDIGITNNTGYCTTLDGRSTKPFSFDNTKEGFEKFWYMTVASKNRFGCDEVLIGYESTGPYAEPFIHYLANRHVKIVQVNPMHTKKIKEVNDNSPLKTDEKDPRVIADIIRLGHALTIVVPKGDAAYLRRLNNARERHVGEQTALLNQLQQLVFLIFPEFKTVLRNMKGKTAQYILKRYGTPERIGTLSKEALGEEIRKRSMGKFGIKDAESLIGLARETVGIKEGIAGIFMDIRHILMQLEAEVRFISEIEAEMGTTLERIPCSARLLSIKGLGIVSVAGLIGEVGDFSKFSTQSEIMKLAGLDLYEISSGKRKGQRRISKRGRSLLRKILFYAAIQTIRKNGIMSEYYARLTGRGMDRMRALIAVSRKLLRIIHAIVRDNRDYVGQYQTSERRVIKMAA

SEQ ID NO: 460102 - protein, 333 aa, unidentified
MLPPNCGTATPYILRNTVGLDISKLTFDASAIVGNAEYSAKFDNDSKGLNQFSDRLKSLGCQNLHICMEATGNYYEEVADYFAQYYSVYVVNPLKISKYAESRFKRTKTDKQDAKLIAQYCRSAQESELVKRQKPTDEQYRLSRMTAAYAQIKSECAAMKNRYHAAKDEEAAKAYAEIIKAMNEQLEVLKEKIKEQTEKPNCKEGVKRLETIPAIGRMTAAVLFHHLTSSKFETSNKFAAFAGLSPQQKESGTSVRGKGKLTKFGNRKLRAVLFMPAMVAYRIRAFPDFIKRLEEKKKPKKVIIAALMRKLAVIAYHVHKKGGDYDPSRYKSA

SEQ ID NO: 460103 - protein, 390 aa, unidentified
MTLFVGVDIAKETHYAAMTDQHGVILIEPFPFQNSKSGFDLFLGSILSFLQESEKLIIGFESTAHYADNFIHFLVSNNLFFKVINPLVTSSLRNANIRNTKTDSIDALLICSALYKEEQKNTLHRDETFSEIYSLCCSRRNLTKMRTKAKIQLVSYMNRIFPELAPFFKNNLHINTSYALIKEYPLPQSIKKVRIDVLTRLLIKASHGRYKKDKALELKKIAGESIGIPSHSFALQAQMAVNQIELYDEQIASIDKQLEAFVNNFDTPLKPITGLGHLEISVILSVTNNLNNFDSPSKVLAYAGLDPVVRQSGKWHASKSRMSKRGNSLLRYTLIWASYNVCKNNKTFMNYYLKKTSEGKSHYAALGHCAGKLVRVIFKLIKSNESFNLD

SEQ ID NO: 460104 - protein, 433 aa, unidentified
MSLIVPTTIHPEREDQPLPYEWFVGIDWGSQQHQVCILDRDRRLVGERTVDHDGASLAQRAAWLWTVSAGHPQRVAVALEVPRGAIVEGLVERGFHVFAINPKQLDRFRDRHSVAGAKDDRRDAFVLADSVRTDRPSFRRLQLDAPHLLLLRELSRVEETLLEEFRRSANRLREQLHRFYPQMLQLCSAADEPWLWDLLHLAPTPAHAMLLSEAQVQRVLKAHRLRRLKAPAVLACLQAPALPVAPGTAEAAQAHCGFLLPCLRVLAEQLQTCSQQVSALLSTLAEEPGEGESPSDVAMVLSLPGVGRKITAWLFAEAAQPLAERDYQVLRTHGGVAPVTKQSGKRRQVVMRHGCNPRLRHALYHMARVAMQRDAHFSSVYAALRAKGQRHGQALRNIGDRLLRILMAMLRHRTCYDASRIRCAPVAQMGQKM

SEQ ID NO: 460105 - protein, 408 aa, unidentified
MEVIHERCAGLDVHKETVVGCLRVRERGHVRREVRRWGTATAELLKLVDWLRQAGCTHVAMEATGVYWKPVWHMLEGEFELLLANPAHIRNVPGRKSDINDATWIADLLAHGLIRASLVPPGPIQELRDLTRTRKQLMREIAQHKQRIQKVLEDANVKLASVVSDVFGESGRRMLKALCAGQTDPWQLAALRDGRLSASREILAMALQGKVTAHHQFLLSQHLRMIEYLEQTIVDFEEQIEVVLAPFRAAVARLVTIPGISATSAHVIIAEIGVDMSRFATVAHLRSWAGLCPQLNESAGKIMSRRLRHGAPWLKTVLVQCAWAATRNKHNYLYAQFVRLRARRGPQKAIIAVAASILSIAYYLLRNQVPYRDLGALYFTRTDQERTAQRLARRIKELGYEVEIRKAA

SEQ ID NO: 460106 - protein, 436 aa, unidentified
MEEVTDEPLYRDRVCGIDIGKAELHATIRVPSDKDPQRRMSETRCFAATRRGVLALADWLRSWQVPAVVMEATSTYWMGPFFRLEAEGLECVLADAGQVKNLPGRPKRDPSDSSWLAQCFERGAVRPCFVATAEFRVIRLHTRYRRDLINERTREKNRAGKLLETAAIKVSSVITDLHGVTGRDIMEHLIAGERDPKVLAQLARTRARAKITELQHALEGAEFFTSHHARLLKTMLGRIGQIDAQISELTAVIEELLAPYEEQLAQAESMPGWGRRSAEDAVAETGVDMTRFATGGHLVSWAGRAPLDKQSGKRKGQARHKKGNTYLGGVLGETAISAGRTQTREGARYRKLARSRGKAKACVAVGNTQLRVYHKLLSNPGMRYEDLGPDYYERRAATRRKVTWHIRQIQAEGFDVTITPREPAPTEDAHPSSGTA

SEQ ID NO: 460107 - protein, 338 aa, unidentified
MNTVTLLGIDIGKNTFHLHGQDARGNQLLRKKLNRSQLLPYLAQLPNCKIAMESCGGSQWLARQVEGLGHRVQLIAAQHVKAYVTGNKNDFIDAEAICEAASRPRTRSVPVKTLEQQILSTEHKLRKSWVDNRTGIINQVHGFLLEFGIICPVGYAALEQVPALMENHELPIRLRNAVERMLLDIQRLTRDIKAIDVEIKQQLSEDAAGMRLLSIPGIGPLTASALLADVGDASTYKSSRDFAASLGLVPRQYSTGGKTSLLGISKRGDKYLRCLLVQGAHALMIRIDKRNDALGAWVRKLLASKPPNKVACALANKMARIVWAVLARGGSYNVQQVV

SEQ ID NO: 460108 - protein, 409 aa, unidentified
MDRQLERCCGLDVHKDTIAACVRIGGPSGRAAQHVQTFRTTTADLLVLRDWLAAQGVTHVAMESTGVYWKPVYYALESDFTCLLVNAAHIKQVPGRKTDVHDCVWIAQLLEHGLLRGSFVPPVPIRELRDLTRYRKGLIHDRTRVANRLHKALEDAGVKLASVASDILGVSGRAMLEALAHGTTDPEILAQLARGRLRGKLPALRSALAGRFRSHHAFLVAQLLAHLDYLEEAIATLSTEIESRLAPFADQLTRLDSIPGINRRTAEVIIAEVGVDMSVFPSAAHLASWAALCPGNNESAGKHKSGKTRKGNRWLRNALIEAAAGASRAKDSALQARFRRVLRHRGPKKAVVALAHALLRIAYHVLADGTTYRELGADYSDRRHTQRLTRRAIRLLEGQGYRVTLEPAA

SEQ ID NO: 460109 - protein, 417 aa, unidentified
MKNWNEISHYAGFDWAKDHHQVVIVDREAKIVADFEFDHSLEGWSKWREQIRAYPALVVAIETNQGLAVEQLLQGELTVYPLNPRSAQAYRQRKVPTSNKTDRLDAWSFADALRVDGHAWRPLQPLDPLIQELRLLCRDELHLIEQRTGLVNQLQQALSEYYPAALKAFDDWTLPSSWKFLERFPTPETLGKAGPRKWENFLHCHKLYRPQTHARRIECFQQANQFGGSPAVTRAKSMLALSLVKLLTVLEKQLQGYRKQIEQLFASHPDHHLFGSLPGAGPKLAPRLLSELGEDRSLFPDVQSLQCYAGTAPVSYQSGQVHKVYLRRQCNKHLRCAIHLWADLSRRWCQWAQVYYRQLRQRGKSHSQALRCLGQRWLKVIWKMWQSKTVYDPELHTRNQLEHGSWVLQLMNAKSGE

SEQ ID NO: 460110 - protein, 343 aa, unidentified
MSEITAVGLDLAKRVFQVHAADREGQAVLRKRLRRSQVLSFFAELPACLIGLEACAGSHYWARELQALGHEVRLIPPQYVKPYVKTNKNDATDAEAICEALIRPTMRFTAVKSIEQQSVLMLHRTRELLVRQRTMLINALRGHCAEFGIVAAQGRSRARELIELVEDPADERLPSIARQALQCLTSQVQSIQIQIASIAKKLLAWYYSCEASRRLAEIPGVGLITATAVVASVGNATQFRSARQFAAWLGLVPQQRSSGGKERLGRISKRGDGYIRRLLVHGARARLAWSRRKKEVRSAWLTSLLARRPTNVALLAMANKTARVAWAMLSRGERFENRIGAAA

SEQ ID NO: 460111 - protein, 312 aa, unidentified
MKTDDSVGIDISKDFLDIHRLRNGKVARFPNAPSGFRSLSKWLGRDIPTRVIFEATGPYHRRFELAFSGKLPLVKVNPLQARRFAQACGTRVKTDAVDARMLASMGRALTLEPDRPIDGKQQELKELFSARGGLIRDRSRLLNRLKTQSLALVCRQTKARIDQITRQLKALQFDIDARLKDCPQRARAQAILRSIPGIGEVAAAAILIEMPEIGTLQKKRPASLTGLAPMTRQSGKWQGKASIQGGRKHLRDALYMPALVAARFNPDMRKKYEAMIKQGKPQKVALTTIMRKLIELANTLVKYDREWVQKSA

SEQ ID NO: 460112 - protein, 343 aa, unidentified
MQSISTIGLDIAKSVFQVHGVDAAGQVAFRRQSRRQQVVAFFQKLPPCLVGIEACASSHHWSRELKTLGYTVRLMPPAYVKPYVKRQKNDATDAEAICEAVTRPNMRFVPTKTVEQQSCLMLHRARHLFVRQQTAVINSIRAYLAEFGIVAPVGRRGVEQLLEVVADPADRRLPELARACLAALGSQLRALKAQIPKFDRRILAWHRSSAASKRLDAIPGVGPALATALVASVADARAFRSGRDFSARVGLVPKQNSSGGKDKLGSISKQGDRYLRSLFTAGALAVIRYAKIHGTGHRPWLTALLARRPTKVAAIALANKLARMVWAMMARYERYKEPAALTA

SEQ ID NO: 460113 - protein, 310 aa, unidentified
MDAIYVGIDVSKDRLDVQVRPSGEAFAVARNSKGLNELIERLLDLKPTLIAVEATGGFETIVAAAIAGAQLPLAVINPAQVRHFAQAVGKRAKTDPIDAAVIAHFAEAVKPEPRELPDEAARLLAELVSRRAQLIEMLVAERQREKRASAGRVRKSLARHITALEKELPEIDRDIDTMVRGSPVWREKEDLLITFPGVGNTLARTFLADIPELGRLTRRQIASLVGVAPFTRRSSQWKGKSMIAGGRPTARSAIFLAALSASRCNPVLRIFYQRLLAAGKPKMVALIAVARKILTILNAMLRDKRQWQAA

SEQ ID NO: 460114 - protein, 357 aa, unidentified
MPSSDVKYIGLDVHKEAIAIAVLNGAGKLVTESIVETKASTLLDFLHGQHGELHATLEEGTWAAWLYDVLKPHVLEVVVCNPRRNALLKEGSKSDKVDARKLAELLRSGMLRAVYHGENGLRALRELARSYEVVSKDLRRVMNRLKALYRAWGIPCTGTQVYSRRHREQWLKKIREAGVRRRAELFYQQLDGLQVLRRTVRGELLAESRKHQAVKVLRQIPFIGPLRAAQLVALMQTPHRFRSKRQLWTYSGLAVETHDSAQYRYVDGQLQLSKKPQLVRGLNQNHNHAMKEIFKSAALSATGRAGAFQDCYAGLLAKGMKPELARITLARKIAAITLTLWKKGECFDAGYVKRQAA

SEQ ID NO: 460115 - protein, 347 aa, unidentified
MRFYTRQHRYYCGVDLHARSMYVCVLDQQGNVLVSQNIASAPEPFLELVAPYREDLAVAAECMFTWYWLADLCAREGMMFVLGHALYMRAIHGGKAKNDRIDAHKIAALLRGGMLPQAYVYPQGMRATRDLMRRRNYLMRQRAELLAHITNTNHQYNLPALGVRPARPAERSALAEHFTEVPVRKSIEVDLSLVEHYDRELPRLERYLESNAQAHDPMALAIVRTIHGMGKVLGLSILYEVQDIGRFARVQQFLSYCRLVKPTKESGGKILGHSGKKIGNAHLKWAFSEAAVCFLRANKPAQALRARLMAKHGKGKSLAIIAAKLARAVYFMLKRGQAFDAQRFFAH

SEQ ID NO: 460116 - protein, 417 aa, unidentified
MLKIVFPICCGIDVHKTFLVATIASTDRSSVTTYQTKRFSTFTKDLENLSKWLLDNQCADVCMESTGKYWIPVYNVLELTCEVILAHPKYVKSLRGKKTDRKDSVWIADLFKHGLVKASFIPEKAIRDLREVMRYRTKLVSMKSSEKNRYQNALTVSNVQLASVVSDTFGKSAQALINQLLQQPKDTSFDVLPFLHGSLKKKAEQISESLNGSIDDIQAQKIRSCTSHMAELDSHIEDLQVAADLIASPFTAALRIIESVPGIGHLSALTILSEIGTDMSKFLSAKHLCSWAGLTPCNDQSAGKKKSTRISRAGCYIKPILVQCALAAIKDKSFPYYGQRYKVLKHRRGHKKAIISIARMMLSVIYTLLSRGELFSKELYEESLKNPMVILSPEEQFQRLAKKFGYVVVKVHEPVPV

SEQ ID NO: 460117 - protein, 357 aa, unidentified
MLTEMVDHVIGIDPDRDWITAAVVDAKTTGIVSSARFRADSSGYDETMAWAYVYTVAGERAWAVEGTASYGRGVTAALSKAGEWVIEFDRPDHKASKDGAKTDELDAVRAAREALGRDKVRVPRAHDGHREAIRVHMVTRAAAVRTRTAAINELKALVVTAPDGLRSDLRNLTTPRLVDKCAGFRDTPSRPVAERCTRNTMRLLARRIQHLNDEVTVHDTALKCLIDEAAPQLVAEFGIGYVTAAMFYIAWSHHGRCRNEAAYARLGGTSPIPATSGQTQDRHRLNRRGDRQLNNALYIVALSRIRTDPETKAYKAKRLAEGKTDREINRCLKRYIARRVWRLLEHQSPGELALDKT

SEQ ID NO: 460118 - protein, 398 aa, unidentified
MKVFVGIDVSKDKFNYAFVDENDGLLGQSKAEMNRGGFTQFWKACQSFEEAFFAMESTGSYHVNLLSFLLSNTEHVFLLNPCLVKKHQESNSLRKTKTDTTDAVAIARFLKEKGNDLHQTVPQQVQSLISLARLRENIAEEVAKTKTQIKQKLNITFPEFLVYNVFTNFALEMISHYPSAKSIRNTKTEKFIATLQPLLDKVGRPAKYSLEQVYQLAQESIGTADPNLESVVLFHIRHLKFLTENLDVVTDHFTKECDKTFGDQISIMTSVSGIGKITTGHFLTEISSIDRFKTAKQMIAFCGTDPSIKQSGKMSIHGKVTKRGSKSLRRTGFLMATSVPKLRDPVFRDYYQKKRNEGMPYRKAVIATWNKLARVIFAMLKGNLLYNPDCARTGIIYS

SEQ ID NO: 460119 - protein, 364 aa, unidentified
MFTERTSVGLDVHARSVAAAAIDGVTGELFQSRLTSSYEHIGSWLAGLPGPVAVAYEAGPTGFGLHRHLTAAGIRCEVAAPSKLQRPSGDRVKTDARDAVHLARLLRLGEITPVAIPTLDQEAARDLVRAREDCRGDLMRARHRLSKLLLRHGIVYYGGDAWTGKHDIWLRHEALPQLTCRSTRLTFDNDYEAVLATKARRDRLDAAIEQMAADSEFTPVVRRLGCLRGVGTLTGFGLTVEIGDWHRFTGNSIGTFVGLTPTEHSSGESKVRGPITKTGNGHARRLLVEAAWHHRPRYRIGKTMRDRWDLAPAAARIRGDEGNRRLHQRWVKFIDRNKRNTVANVAIARELAGWCWSLATLDDG

SEQ ID NO: 460120 - protein, 391 aa, unidentified
MAQSHMRKEPVMNKVRFIGLDVHAETIALAVAEPERGGEVRSLGNIPNRAESVRKMIKKLGPAEQLRACYEAGPTGYVLYWQLTELGVKCEVVAPTLVPVKAGDRVKTDRRDAEKLARSYRSGELTPVWVPDPAHEALRDLVRARLAAKRDQLRARHRLSKFLLRHGRRPGAGVKAWTAAYLAWVKKGVHFDQPAQEATLADYLHEVEHAQERIARLERSIDDAIGTMPERMRAVVEALQALRGIAKISAVTVVAELGEISRFKKPRQLMGYSGTVSSEHSSGERTRRGGITKTGNAHLRRIVVEAAWAYRHRPCVGATLAARQKTASPEVKDIAWKAQHRLHSRYRKLLAKGKTKQQVVTAIARELLGFIWAIGVIVEQRHTTCEQNQAA

SEQ ID NO: 460121 - protein, 310 aa, unidentified
MDAIYVGIDVSKDRLDVHVVPSGQAFAVARDGKGLSELVERLSSIGPRLIAVEATGGFETIVAAAIAGAPLPLAMVNPAQVRHFAQAVGKRAKTDPIDAAVIARFAEAVKPEPRELPDEAARLLSELVGRRVQVIEMLVAERQRERRASAVRVRRSLARHIAALERELPEIDRDIDTMVRGSPVWREKEDLLITVPGVGKGTARSVLADLPELGRLSRREIASLVGCAPFTRQSGRWKGKAMIAGGRPHVRAAIYMAALTAAKHNSVLHNFYRRLLARGKPKMVALVAVARKILTILNAMLRDKKQWQRA

SEQ ID NO: 460122 - protein, 424 aa, unidentified
MKFKMQDKQNQLIERISDKHLVVGIDIAQQFHVARAVNFRGIVVGDPLTFENNEDGFTILLHWINKLKRTNNLDTALIGMEPTGHYWINLSKWLFEQNIDVVTVNPYHVKRNKENRDNTQSKSDKKDALVIADMVKNGYYSIVRPTSESFEELRVLMSNRDVIVKRLVSSINQLNRWVDVVFPELRQVFKDVKGKGAIATLRLFPTPMELRSMQPQNVVIGWKSLMKRQPGLKKAQLLIHLAKRSIGTKQALDAYKFHLQQLLEEFDLATTQLERVEKQVTEVLKQIPYANQLLTIKGISEISLAGILGEAGDLSGFAHGNSLLRHAGLHLAEASSGKWKGQIVISKRGRSRLRRFLYLATMSLVMNNPEFKALHTSNVKVKKIKKMKSIMKLVGKLARIFVGMAKRNESYYPEKLQPLSSLAA

SEQ ID NO: 460123 - protein, 351 aa, unidentified
MLIIGVDYHPSFQQISFLDQETGECGDRRLNHSEGEAERFYKELKQRGVSVRVGLEATGYSRWFERLLAELGFEVWIGDAAEIKRQRGRKQKTDREDGRLLLRLLLENRFPRIWVPNPENRDLRQLLWHRHRLVQMRTRIMNQLQAVAMNEGYRWKKKLFSEKGRALLEKLWLAPWASRRRKELLELLDQLDPKIAELTAALEREAQQRPEVVRLMTHPGVGPLTGLAYVLVIGTPDRFPCGKQIGSYTGLIPSEDSSAGHQRLGHISKQGNALLRYLLGEAAQAAARCNPDWRRRYRHLMMRREKSIAKVAMARKLAVRLYWMWRNGWQYSQLVEFGSYAGKLGTGHGVK

SEQ ID NO: 460124 - protein, 464 aa, unidentified
MATLRIIGIDLAVTAAHRAIVLDSASNQFVSHVISFHANPAEIEGVLAIARKGAPANTRLIAVLEATGMAWFTVGTYLQRRGVEVYRVNGRQTADQRKVYHRHAKSDRIDARVLPRLYLNAAERITRLFLPEPRIMELQRLCREVTRLSQQISASKNRLLAIDNFAWLGIKDILPPYEAPARWFRRQWYNPWRVYQAGSEALKQAWLQSHADPEQDLSWVEALVAQAQQVMAFYGEPAPIDYPRLQAFLGREQARLEQVEAQKHLLQLKMLRPLYRQLYPQRYLESLPGVGQDSAAVFIAFVGDIRRFPSLNDFLGWSGMIPFSSQSGQGQTRGLHITQAGPDLLKRTAFLTANIARLYDPQIAVVYYDQMVNKGKHHLQAVCACATHLLTRVFVVLRENRPLELRDVDGSPISKQRARAICQQHYTVPEQVRRQNNHRVRTQRAEQRLEQRTQRRQLKQRSKG

SEQ ID NO: 460125 - protein, 317 aa, unidentified
MNTKPETTQSPAYAGVDISKEALDLSLAGQSPCRYANDAAGIAKLVKALKKLPEPAWVICEPSGGYERDLLEALWAAGIMVSLVNAARIRAFARAQGLLAKTDEIDASVLREFGELLRPQALEAPSPQRQRLAALVQRREQLVNLLSMEEQRLVQSRDATVRKLGERLIKELQKQVEQIEEMIETQIDDDATLKAQSERLQQVKSIGQVTASTLLAEMPELGKLSRNEAGALAGVAPYNRDSGVLRGRRTIRGGRVQVRRVLYMAALVATRFNPILKAFYQRLLADGKPKKVALTAVMRKLVVLLNHLLKNPEFKLA

SEQ ID NO: 460126 - protein, 343 aa, unidentified
MLTKNVIAIDLAKNVLQACHISIHGELMSNKPLSRQKMKEFLAKAKPSIVAMEGCCGCHYWGQLAEKFGHEVRIINPKKVKGYLEGHKTDHNDALAIANAAIQIGIKYSPPKSLEQQAMHSLETSRRFLSRSVVSLALHIRGTILGYGIANPRGEKGLKASVQTVLDGDTPIPSNVVSVLSMLWEQYKELKAKLIAFEKEKNALTRQIEPCQRLMGIEGVGETTAAMLYTTLGDGKQFKNGRQASAFVGLTPKQHSSGGKVFMIGIDKCGGVKELRSLLYLGAMSYVGRLPEKPKTQKDAWLRSIIDRIGFKKACIALANKVVRTAWAMLRYETEYKPVLLTN

SEQ ID NO: 460127 - protein, 361 aa, unidentified
MAKVRSWAGLDVHARSVLAVTLDATTGEIRRQRLSAATATVVEFLAKLPGPTRVAYEAGPTGYGLARALGAAGMGCVVAAPGKIERPAQDKVKTDVRDAERVLRLLMIDALVSVRVPTVEEEAIRDLVRAREDVRGDLMRWRQRLSKLLLRHGIVYEDTGSTWTQRHRAWIRSQNLGGGAQVTLLDHLGAVDTLELRRGQLEKTIAELVPDSPYAQTVARLRCLRGIDTLSAAGLAAEIGDLRRFDRPGKLMSYLGLVPSENSSGETRRQGRITKTGSTHARRLLVEASWHYKKTPARGVSLQRRQEGQPATVVAISWQAQQRLHRVWRRLCDERGKRSTIVAVAVARELAGFCWALAATD

SEQ ID NO: 460128 - protein, 419 aa, unidentified
MASIKSKKVKRINKKTMIATFDIGKNVHYGYFRAPDGRDCKPFSFNNSQKSFNRLWTEICQFKHDHRLEQVVIGFESTGPYAEPLFHFLRKKPVKLVQVNPVHTKRVKELTGNSPNKTDKKDPRVIADVISLGHALTLVVPSGASAHLRRLTQARERALRDRTATINQLQHLIFVVFPEFLRIMKNISTKTARYLIKHHPAAQDIDSLGVEDLTAIMRKISRGKLGRERAEELIAAAKNSVGIGEGRESIFLEMAHLNAKIENENRFIDRLENQLDEYLQQIPYSRSILSVKGIGVVTAAGLIGEVADFTKFDTISEIMKLAGLDLYEISSGKHRGQRRISKRGRPLMRKLLFFAAINAVKSNGIMHETYQRMLERGMLKMKALVAISRKLLGLIFAIVRDNTKYIEDYGEKHHYKLAA

SEQ ID NO: 460129 - protein, 327 aa, unidentified
MNNTFYIGIDIACKKFDVAIYKENKKALHNTFDNDKKGFESLLKWINKDTQNLHVVMEATGIYWEELAYFLYDKKAKVSVINPKCIKAYGIGQNLRNKTDKIDAMLIARFAAKEQPQAWQPPPKAQRALLLRLRQLEHLKQAEQKERTRIKMMSDSESISSAERLANFLREEIKAFEKQIDETIKTDTMLKQNAKLLSSIPGLGKKSVAWLLAYLGDGSRFKNGKAAAAYAGLTPMHHQSGSSINGKPRISKIGQTDIRKILFMPAVAYSFGNYKDRIYKTFVDNLLAKGKDKKVIIVALMRKLVAIAQTVLKNQMPFDASLHQKTM

SEQ ID NO: 460130 - protein, 409 aa, unidentified
MNLYLGIDVGKNKLDFCALDSDQRCCFQGETTNDLNGAIKIKQTVLTETQTHHYEKITAGMEATSVYNFHPMTFLAEDSELQALGLSVITINPYTSHHFSQLFNDGKTDAIDAKQLADLLRVEPLGTPVARQENYVALQRLTRERYHLVKQMTDSKNHFLNNLYYRCNTLERELPTSVFGSAMMTLITDEELTLDEAAALPLDELVTHLQQLAHGKFGDAEAVAKAIKKATRSSYRLSKVVTDSVDEILAVYANEIRMLKKQIQVLDKTITQISTQNTDINCLTSVPGIGPVYAAGIVAEIGQIERFPDESHIAKYAGLAWLPHESGTSVRQATPRTRKGNQYLRYYLVEAVNSIRRYDITYQRYYHKKYEEVPKYRHRRAIVLTARKLVRLVEVLLRNHQFYIPPKVV

SEQ ID NO: 460131 - protein, 446 aa, unidentified
MVFIPWGVAPLSASTGVMGQHGQPGDIQEEIDVTTVRWFVGIDWAADAHEVCVLDREGRIVERRQVAHQATALQALVEALRAGADDDPATVAIAIEVPRGAVVELLVERGFRVYAINPKQLDRFRDRFTTAGAKDDRRDALVLADSLRTDSQAFRLVRLDHPLVIQLREWSRLDEDLGSELTRLTNQLRDVVYRVAPGLLALCPAADEPWFWTLVSLAPTPAEQQRLSVRRLERLLGGHRVRRLQAAQVREVLQRPAVYTAPGVVEAVSAHCQLLVPRLTLVAAQRRDAARQLERLMAALEAEDAAGNQREHPDVAIIRSMPGVGTRVAARMLAEASQPLVDRAYHRLRATMGLAPVTKQSGRRRTVVMRYACNGRLRDAAYHWARVGVQRDAASRAYYAALRARGHKHGRALRSVADRLLRILCASLKHGQLYDPMHRSLAPAAR

SEQ ID NO: 460132 - protein, 422 aa, unidentified
MSYCPVAGIDVSKRFSDMCILSPDNKIFAQEKIYHDETSINRANALLQKAERLFFRKPVIVMESTSHYHLILFQFFSEHGYDVIVVNPLQSNSMKDFSIRKRKTDRVDAFKLAMMYRTKTLRPSQIPQTATRALRQLCRHRAELLNDVSSYKNRLTALLDQTFPGYDKVFSDVGGVTSCAVLVRFPTPTILLVEEESELVEVIAAASKSGYSFAKKKAGLLISAAQKAQTLGIHSCADETLIVCTIQMLRTLSESVLQIETAIDNLLAQIKEMRNNVSLLQSIPGIGSHSAALLLGEIGDISLFKKPKQLAAYFGLDPTERQSGSFRGTKNKLSKRGSPYARAALHMGVVNSICKRGKDSAANPVLLSYYEKKCKNKPAKVAQAASMHKLVFIVFAVLRDQKPFELKTPEQHAVEQGFVKAA

SEQ ID NO: 460133 - protein, 315 aa, unidentified
MIEEVFVGIDIAQDQLDVHVLPEDTHVRFTNDAQGVAALTTRLQGEHPTVIVMEASGGYEIALAAALGAVGLPVAIVNPRQVRDFARGIGKLAKTDAIDAYVLARFAQTNRPVAKALPTEDEKQLKELVTRRQQLVDLRTAEKNRLHRARTERVRDSIRAIITALDDQLKDIDRDTKHLIRKSPLWREKEDLLMTCKSVGPVTANALIAKLPELGKVNHHKITCLVGLAPLNKDSGKLRGKRIISGGRADVRTALYMAALSAIKHNPAIRPFYDRLIKAGKPFKVAMVACMRKLLIILNSMMKAKKAFQPILGLT

SEQ ID NO: 460134 - protein, 421 aa, unidentified
MTQPYGNTGRDVLVAIDVAKKQNAVLIRLPDGARKKLTVINNLAGYRELSSYLKKLKRPCKIGFEATGNYHRTLAFYLHQQGFELELISSVAASRTREAMYNSWDKNDPKDAQVILHMLQTGLTQIYYDPLEHRINDIQELSQTYCQVSLRKTRVQHSIMTHYLPLYFPEAAKYYHTSRAAWFTSLLMTFPNPAAVLRYSREDFIKAAQAVSGRKVNKAAWLRDFYETARESISLPVPEDSEAIRMFRLVLQEHQDLCRMRRAIEERAELYLKDNADYLRLRTIPGIGAVIALIILAEAGDLRRFSHYKKFLKYCGLNLSTQQSGAFRGLSKLSKYGNSRLRYAFWIAGTSAIRMRENTFRKKYENYVKSDPQNPDLKRKAYTAVAAKIARVAYGLVKSGREYRCYHESSVPSGIILSTGR

SEQ ID NO: 460135 - protein, 364 aa, unidentified
MNDTYYMGFDVHKKSVSYCAKTASGEIIQEGELAARREVLRAWAAAQPQPWRGAMEATLFSAWIYDTLKPYAQQLDMGHPARMKAITAGKKKSDRLDARTLADLLRCNLLPTGYVLSPEMRDLRRLLRYRQLVVAQSVRMQNKMAGLLMETGAPFVKAKLHGKKYFHQLLATLQEVPESVKDLLRMSRGALEMFETSQKQRVKRLLVEPALQARVERLATIPGVGPITALTWALEIVDPKRFPSIGDAESYCGLTSAFRSSAGKEQRGPLSKQRNVWLQTTLIEAAKLAPRWNPQLAAVHERELQRGHRNRATLQVARKLVAYLMAVDKSGKPFQLRSSPAVEAALPPKKKGKARRPAEVLQPA

SEQ ID NO: 460136 - protein, 409 aa, unidentified
MERQLERCCGLDVHKESIAACVRLGGRTGKAEQYVQTFGTTVAELLVLHDWLAAHGVTHVAMESTGVFWKPVFYALESDFTCLLVNAAHIKQVPGRKTDVQDCVWIAQLLEHGLLRGSFVPPAPIRDLRDLTRYRKALIHDRTRVANRLHKALEEAGIKLASVASDILGVSGRAMLAALVQGTTDPAVLADLARASLRRKLPALRQALANRFRPHHAFVLGQLLAHLDYLEEAITTISTEIERVMAPFAEPLRRLDTIPGINQRTAEVILAEMGPDMSAFPSARHLASWAALCPGQHESAGKHKSGKTRKGNRWLRTALIEAAAGASRAKNSALQARFRRVLRHRGPKKAVVAVAHALLRMVYHVLADGTVYREAGADYYDRHHSQRITRRALQTLERQGYRVTLEPPA

SEQ ID NO: 460137 - protein, 370 aa, unidentified
MVNQTWAFRSNPQLFPRKRERTAIWPALQGMVVERPSSYSSNQSSPSFHSKEVMHVEPIVSVSAGLDVHKAKVVCTVLSGEPDSAPVKTTKEFRAFKKDLHSLARWLCEMNVELAVMESTGIYWQIVYEILEEANIKTYVVNARHVKNVPGRKTDVLDSEWLAELARFGLLKASFIPPRDFRELRMLTRYRRKLRGYAAAEKNRLAKTLDACGIRLGSVVSSIDGVSAIRMIEALIEGKLSPQDIAKLGKGRLKAKRDDLAIALEGNISDRHRYLLQQILKHMQWLEEQIQDIDSQIVAAMKPYMEQWQLLQTIPGINEISAAMLLAEIGVDMEQFGSSSRLCSWAGMCPGNNESAGKKKADGLGMPTRT

SEQ ID NO: 460138 - protein, 410 aa, unidentified
MKVLHRRCAGLDVHKAEVVACARVFAGRKVVHEVRRFGTTTRELMALAAWLKSLKVTHVAMEATGVYWKPVWHILEADFTLILANAQHVRNVPGRKSDVNDATWIADLLAHGLIASSFVPPQPIRELRDLTRTRRQAVGEAVRHQHRIEKILQDANIKLSSVLSDPMGVSGRRMLAAMAAGETDAGKIAELGSPRLECGRGALIEALSGRVSEHHRYLIGWHLRLLDEIEAKIAELDQRIEAQIAPFRAAIERLTGIPGIKQVAASAIIAEIGADMSIFPTAGHLLSWARIVPRLDESAGKKRSRRVKKGGAWLKPVLVQCARAAARKRDSYYGAQYRRLKARIGDQKAIIAVAASILTAIYHMLRDGTEHADLGAAYLSRREGDSKAIAHQLARRIRALGYQVDLREAA

SEQ ID NO: 460139 - protein, 364 aa, unidentified
MTDCITWVGMDDSAIKINIAILQGQEINPRQELVIVNDPGGLGRLAKKLKSIPGEVRCVYEAGVNGYHIQRFLTKHGISCDVAAPSLTPRRTGKRVKTDKLDAKALARLYRAGELTSIAIPEKEQESLRDLVRGREDALEDQQRARHRLARFLMRRGLKYKPGKNWSLGHLTWIKNLRFEDDRDQMVLDEYRTALQEQSERLTKFQQRIEELAKQAPYQKRASYLMALKGIQALTAMTIIAEALDLRRFTNAPAFMAAIGVVPSESSSGEIERRGSITKTGNSHIRRVLIESSWHYQHACVAGKTLKKRREGLPAEVLEIARKCDQRLHKKFRHLVNRGKDRRKAAVAVSRELAGFIWALGRVA

SEQ ID NO: 460140 - protein, 354 aa, unidentified
MNIKYIGMDVHKEAIAVAVMNGDGKVVMESIIETKASTILQFIQGLRGDLHVTFEEGTWAAWLYDLLKPHVTELVVCDPRRNALMKEGNKSDKIDARKLADLLRGGYLRSVYHGENGLRTLKELARSYLTISKDLTRVMNRVKALYRSWAIPCEGQQVYAPRHRAEWLNKIGESGVRRRAEFFYQQLDALLALRQAVRRDLLAESRKQSATKLLCQIPAIGPIRAALLIALIQTPHRFRSKRQLWTYSGLAIDMRDSAQHRYVGGQLQRSKKPQQLRGLNQNHNHDMKAIFKSAATMASSREGAFHDFYQGLLTKGMRPAMARLTLARKIAAITLILWKKGAHFDAKQMKLQAA

SEQ ID NO: 460141 - protein, 339 aa, unidentified
MSNVPVFVGLDYHQDSIQVCVLNQQGDVLLNRSAANNCDELGRLVGPLGVVRRVGIEACCGAADLGQELVERLGWNVSLGHAAYIARMKNSPDKTDYSDGRLLADLTRVGYLPRVWLAPAAIRELRQLVNHRQRLVDHGRALKLQAGAILREHRVKIDKERGSRWSKAWTAGVRDNERLPANVRWIVNDLLDDMIHVQGKIAATEGKLRAATADDQVIARLRRQSGVGEVTAWVLRAYVGDFGRFKTAKQLARYCGLSPCNASSGGKVADAGLIDGCNKLLRMTIVQAAHRLIRTVERWGRMSDAMRKRGKPACVVVAAVGNRWLRTLHHAMKEPQAMQ

SEQ ID NO: 460142 - protein, 339 aa, unidentified
MRLYVGADLHANNLFVAMVDKKGKRWEQKKLPNDLSIILEYLAPHRKEIVGIVVESTFNWYWLVDGLMEAGYKLHLANPSAIQQYSGLKHVDDKHDAFWLAQMLRLEILPEGYIYPKGDRPIRDLLRKRRHLVKLRNSLLLSLQNIISRNCGVQFRANEVKRLKEDRVSPLLEGNEDLALAGKASKEMIDHLTRQIYRIETSIVQRVELKESYRDLLTLPGVGKILGLTIMLETGPIGRFADVGHYASYCRKVSSRWTSNEKTKGKENRKNGNKYLAWAFSEAAEFARRYDAQARDYYTRKMRKTNFMVAHSALAHKLARAAYYLMKDQVPFMPEKLFS

SEQ ID NO: 460143 - protein, 319 aa, unidentified
MAQNDLVVVGIDVAKDKVDACIRSLSSGRTFPNSSAGRRQLTSWLRRNKVCKAVMEASGGYERGWAKTLRAAGIEVRIVDPKRVRSFARSAGRLAKNDAIDAEMIAWFAETFGQAPGQAYDAAREKLAQMVNARQGLLDLQTALQNRSEHSEVEEVQKMHARLLKKIAGEVVRLEAAITALIKSTKDFAELAEIIESVPGLGEITSAGLIAAMPELGQVSNKIAAALLGVAPYDDDSGKRRGERQIKGGRRRVRNLFYMACLGAATRHNPVLKAFYRRLIMKGKEPKVALVACMRKLIVILNIMIARRQKWDPALCAAG

SEQ ID NO: 460144 - protein, 356 aa, unidentified
MNNSNKLDFTGQPIYIGLDVHKKSWSVSIFSRHGEYKTFSQPPQVETLVRYLGHHFPGALYYAVYEAGYCGFWIHDQLVKQGIHCTVVNPADVPTKNKEQRRKGDRVDCQKLSRGLRNGELEGIYVPPRGRLEDRSLIRTRLSMGRKQTRCKNQIKSMLLFYGVAIPEEKEMGHWTRRFIQWIEGIRMERASGDMALRIHLEELSHLRQIIAKLNRAILALSRTEEHRGWVRLLRTIPGISTLTAMIVLMELGEITRFRSIDQLSSYVGLIPDTQGSGDKEHVEGVTQRRHSHLRWLLIEASWTAVRKDPALMEAFDQYCKRMKKSKAIIKIARKLLNRVRYVLKNRAEYVPCVIE

SEQ ID NO: 460145 - protein, 347 aa, unidentified
MRFYTQQHQFYCGIDLHARTMYVCVLNQDGEIMVHRDMKASPEPFLKAIAPYREDIVVAVECIFTWYWLADLCAQEGLPFVRGHALYMKAIHGGKAKNDKIDSQKIAVLLRGGMLPQAYVYPAAMRATRDLLRRRMHLMRKRAELLTHVQQTNHQYNLPAFSKNIAYKANRDGLAERFADPAVQKNIEVDLALIGYYDQRLNDVELSIVRTAKQHDPATFYQLQSVPGIGKILSLVLLYEIHDLRRFPRVQDFVSYCRLVKCAKESAGKRYGASGTKIGNAYLKWAFSEAAVLFLRDNPAGQKYLTRLEKTHGKGKALTVLAHKLARAVYYMLRRHTAFDIHKFLGQ

SEQ ID NO: 460146 - protein, 370 aa, unidentified
MQFIGIDLHTNRFTCSYRDEHSPPEAKRGKRIETFELTGEGLGKFYQTLKHESYVLVEATITTFAFVRLIQPLVKQVIVANTYELKQISLARTNTDKIDADILSRIIKMQVLSGEQVVSAVVVPPDQIQQLRSLFSTYRLYKKQTTQIKNRIHSLLKEKLYGFTQQEIFDRKSRQKLRGLESGSSLSFQINQLFDLLEYMEKSIQELKDQIMEQAQPYMKEIEILTSMKGVSVFIAIAVIADIIDVRRFKNSKVFTSYLRSAPKVSNSNTSVSIRGTNKKGRKTSASLLTQPLGHMLAASQKLNRWYTRLTAYKKAGLVRSGLRRKVFAEIYQMLKKGEYHYARDQKNHEAKMLQYRKFLEKRKILLERA

SEQ ID NO: 460147 - protein, 338 aa, unidentified
MKVHVLGVDLAKNVFQLHGVDRKGRCVLVRRVRRELLMNLIAELDPCLIGIEACTGAFYWQRQFERHGHTVKIIAPQYVKPFVRRQKNDSNDAEAICTAVQQPNMRFVPKKTLEQQDIQALHRARQRLVNHRTALISQMRGLLLDRGIAIGVAATRARSMIPKVLNEPNEDLSSLTREIITSLYDFMLQIDARIRFFDKKIDAIFKANEACQRIAKIRGVGPKTATAMIAAIGDGSDFKNGRHLAAWLGLVPRQHSSGDRRVMLGISKRGSQHLRTLLVHGARAVVRTAVRKTDPRSIWINDLRERRGHNRATVAVANKNARVIWAVLRTGEPYRAAT

SEQ ID NO: 460148 - protein, 440 aa, unidentified
MLNDHAAGIDVGSTRHHVAVPEDAASPCVRTFDAFTEDLVAIADWLCACGIKTVAIESTGVYWIALFQILEERGFKVCLVNSRDWRTAPGRKTDVDDCQWLQYLHACGLLRASFRPDQQVCAVRSLLRHRDGLIASAASATHLMQKSLNQMNLVLHNVISDITGKTGLAIIDAILAGERDPAVLSELRDPRIKNSKEIVAKSLVGDYRTEHLFTLKQSLASYRHYQELIGECDREIERLFSEFDSHPGSGDVPLTSGAPKRDRGNKLRFEHTNLTEELRRLLGVDLTLIPGFGALTIYNLIGELGRDLSAFPTYKHFVSWMGVCPGNHISGGKSLSSKTRYVPSRAAHIFRVAAQSLWHSQSALGDYYRRICARLGRQAGNTATAHKLARIYYHLLTTHSEYDEAAFAKENARLEKRRHSRLHKDAARMGYQLVPMAAQG

SEQ ID NO: 460149 - protein, 409 aa, unidentified
MDVLYPRCAGLDVHPKTVMACARVASTTGPVHLQRGFGTTTRELLALADWLTAQGCTHVVMEATGVYWKPVWHTLEGQFELVLANAMHVRNIPGRKTDVNDATWLSDLLAHGLIRGSFVPPPSVGDLRDLTRTRTQLVREAARHTQRIQKVLEDAHLKLTTVVSDILGVSGRAILTALIAGERDPERLADLTRGRLKASRADIIEALHGRLTEHHCFLLKVHLAQIDTLEQAVADVEARIGERLGPFQRAAELLNTIPGVSHTVARVLIAAIGIDMSRFPTAGHLISWAGLCPRMDESAGKRRSTRTRRSGCWLKTTLVQAAWAAVRTRDSYLRAQFLRLKTRRGPKKAILAVAASMLTAIYHMLGHDVPYKDLGGQYFDRRDKHRVAQRLIRRLEALGIHVEVTAPAA

SEQ ID NO: 460150 - protein, 428 aa, unidentified
MQYALPLVLPDVPAGGVCAGIDWATADHVACVVDLAGRVTDRFCAAHDKAGITGMITRLRKNKVTEVAIERGDGPLVDALLTAGLTVVVITSRQVKNLRSRYGAAGAKDDRFDAFVLADTLRTDRARLRPLVPDAPATISLRMAVRARRDLVRHRVAACNQLRAHLAVAFPAGITLFHDLDSPISLAFLARFGSQDAAAGLDEQAIGAWLATIAARGRPAPASELHARLQAAPPGATGADGAAQAGITAALTATLTALSTQIKALEAQIAGQLAAHPDGHIFTSLPRPGTVRAARLLAEIGDCRSRFPDPESLAGLAGVAPVTRRSGTRIAHGFRWSVNRQLRDAVCDFAADSRHASPWAAAIYDAARARGKDHPLAVRITARAWTYVIWRCWHDGTGYDPAKHRALQAILSRQQAAQAAGPAPQEHQ

SEQ ID NO: 460151 - protein, 359 aa, unidentified
MRNQGNKIFAGQSIYIGIDVHKKKWQVTIMGEEYEHKTFSQDPKVEILSKYLKKNFPGADYTAVYEAGFCGFGVCRKFREQGILCEVLHPADVPTSRKEKMQKTDKIDSRKLARSLRDRQLEFIHIPDPELESDRALVRQRNRMSKDLSRTKNRVKSLLLQFEIDVPKDFTTGQSRQWSKAYVNWLRKIQINQPSLRLTLDNYIRMGSMQKEQLLIINGQIRALSRTKRYKKSYELISAIPGIGLITGMTLLVQIGDINRFKSLDELCCYIGLIPSMHGSGDKMRAGRITSRGRKELKIRLIESAWVAIRLDPALMLKYNELKKRMNGNKAIIRIVRKLVSRIRHVLQTKQPYEIGIVE

SEQ ID NO: 460152 - protein, 350 aa, unidentified
MAQRVGQPATISVAVVNADGKLVMQSVIATHAATILDFIHGLRGTLHLTFEEGTHSAWLYDLLARGVARVVVCNPRQNALLKAGNKSDTSDARKLAELLRAGLLAPVYHGEGSTRTLQELVRSYAALTEDTTRVMGRVKALYRSQAIACAGKKPYGRRHRREWLSKLSEAGLHRRAERLYEELDALQGLRRAAKRELVLESRKHAAAKLLRTVPLLGAIRAALLIGRVQTPHRFRSKRQFWAYCGLALETRSSADYRFEDGQLVRAKKPVFIRGLNRNHNHDLKNLFKSAATTASALHGPFREFYEGLLAKGMQPAMARLTLARKIAAITLSVWKKGESFDAEQLKPQAA

SEQ ID NO: 460153 - protein, 419 aa, unidentified
MSFKILKNNCCGLDVHKTWIFACIGITDSNKRTVYKQARFSSFTKGLQELCHWLAKYDCTDVCMESTGKYWIPVFNILEKNNIWVTLSHPKYTKPQKGNKTDRKDAKWICDLYMCGMVKPSFIPPADIRQLRDLVRYRFKLTCMITGEKNRAHNCLTVSNLKLDDVFSDIFGKSSRSITEQILQHPGETFDVAPFVHGRCKTPIEEIQAAVDGAVSKEQAVKLRQCLNHIDELEMHKSEIEREIFRLSDKYEDILTLIRTVPGFDKNPMTAIQVLSEIGGDMSVFPTAKNLVSWAGCCPRNDQSSRKIKSTRISRAGSYFKPVLVQVANALIKSKKHPEFSTRYRRIKARRGHKKAIIAICRMILTAIWHILTDLKPYTAKGFLEPRPVSKEKVLTASQALNLLKQRGYVIKDEPIFIS

SEQ ID NO: 460154 - protein, 365 aa, unidentified
MYDSTTTTVTVGLDVHARSIRLAAMRGDRLLEERTLPYDEEAVERVLRRWPAARCCYEAGPTGFGLQRYLVERGIDCQVVAPGLVPQRPGDRVKTDSRDARKLARLLAGGLLAPIHVPSPELEAARDLVRAREDARLDRMRDRHRLSKFCLRHGRRLPTSTWTVARRTWLSEQRFEFVAQQQTFDTYLHTVDLVDARIEQLERAIRETADQQPWRELVGKLRCLRGIDTLTALALVSEIGDFTRFRSAEEFMAFVGLVPSERSSGERRRQGSITKVGNSHVRRLLVESAWHARRRPTVGYQLARRQRGQDALVLERAWRCQQRLHARWLRMAGRGKPSQKIVVACARELAGFVWAIATEQPLRSA

SEQ ID NO: 460155 - protein, 337 aa, unidentified
MSRARIYKEGYLTVQPNCSAKSWAGIDVSKDWVDVVVLVEEQKAESLRCDRSAEALAQLAQQLLPHGPQGVVLEATGGLEAAVITALGAAGLKVMRINPKRVRDFARAQGLLAKTDALDAYILALFGARMQPPLRAWPEAERQQLAAWVTRQQQITVQRAAERTRLHQATEPQLQKSIQRVIDFLGKELALLDKQAAAWVAQSPTWTSQEALLRTAPGVGPKTARLLLAQLPELGQLNRREIAALVGLAPLACDSGKWRGKRRIQGGRCAVRAILYLASWTAVRVPGSLREFNQRLVAAGKPKQVALIAVARKLLLALNEMMRTSQPWRAAKEPLSA

SEQ ID NO: 460156 - protein, 461 aa, unidentified
MQEFEFFVGFDWASQKHVACLLDSAGQVMGEREVDHAGAGLSAFIDWLLTKTGVAPDRIAIAIETTHGPVVETFLERGFAVYAINPKQLDRFRDRFTVAGAKDDSRDALVLGDSLRTDARAFRPLMADPPLVVELREWSRLRDELLGERVRLTNRMREQLWRYYPQALKLTDDLAQEWFLALWQLVPEPSRAAKFRKPPIERILRLHRISRINAEEVITILREEPITVSKGTVAAATAHIQSIIGRLKLLNVQIKAAEKKIDEFTKAIENAEENEPGQTCGQRDVAILSSCAGLGRIVLATLLTEARQPLNDRDYQVLRCLAGQAPVTRRSGKSHVVLRRTACNKRLRNALFHWARAAIQRDPASRARYASLRARGHGHPRALRAVGDRLLLVACTMLERQTFYDPDLPSGRAPRAAAVKDAKHRQSRRAKRVLDGVSTALQCLLEDKPKLPCTKILLAKW

SEQ ID NO: 460157 - protein, 269 aa, unidentified
MTFRPHALHLKAELFVKSSRVHVRDDGFTRCNFHLKFFIMVSRGIDISKSSFVAAYPSTNGNPTKTFPNTTARMRELIGTLAVAEHHCVMEATSNYGCCCTCSIRTVLPSVLPPPKKQIKHFSRMMMPVTKTDEKDAYMIAMYGEKMNPPIYKMPSQATIRILTTEGFTYFDNAKQLSRFIGICPTYQQSRTSVNIREHINRNDDERLRSLLYIAFWTALRYNSRECYIRLKANEKPFKVALIAVTNKLVRPVLTITTINSIYRWICPG

SEQ ID NO: 460158 - protein, 417 aa, unidentified
MPESTVTPKTYYAGFDWAKDHHDVVIVDDQGQIEAEFQFQHSAAGWQEFRERTRQFPRLLVAIETSRGAAIEQLLRSAVSLYPLHPKSAKSYRARQLPSGTKTDRYDAWALADALRTDGHAWRPLAAIDPLVERLRLLCRDEVVLIEQRTALVNQLQQALQEYYPTALEAFDDWVLPAAWEFVAAFPTPKALQAAGRRQWEKFLHVHKLARPQTYAKRLEIFQRATQFCSGEAVTAAKSQLALSLVRLLRTLEAQLDQYRAEIERLFREHPDHDLFGSLPGTASKLSPRLLGEVLGRPDLKGKPAALQAIAGSAPVTFQSGNFKFARLRHQCNDHLRHTVHLWADQARRVCTWAAVYYQAHRAKGQSHADALRRLGNRLLKILSKMLETHTCYDAELHARNQQRHGSWVLKLQPAKP

SEQ ID NO: 460159 - protein, 347 aa, unidentified
MNFYTRPHKYYCGVDLHSRTMYICVVGQDGAVLLHRSLPCDPVRFLLAIAPFREDLVVAVECVYSWYWLADLCAREGISFVLGHALYMKAIHGAKAKSDRIDSGKTAVLLRGGLMPVAYAYPADMRATRDLMRRRLLFVRQRGSLLAHVQITHHQYNVDPPGKRITYRSNREGLGEGFEDPSVRHSIAADIALADHYEVTIGELELAVLHQARIHDPNALALLTSVPGIGKVLALTILYEIHDISRFPSVRDFASYCRLVKCERSSAGKSLGTGGNKIGNAYLKWAFSEAAVLFIAKSEQGRTVLKRLERKYGKPKALSVLAHKLGRAAYYMLARKQAFDPQRFVAA

SEQ ID NO: 460160 - protein, 341 aa, unidentified
MKTYTYFIGVDISAEFFTASIYTNKNTLVAVGETFPNTTTGYSSFHHWLSAHDATSNNAVICLEATGVYGECFCYAIASYDFPLAVEPPLKVKRAFSQRTHKTDAVDSTQIAEYAFRFVDELQLWKPKSEILEQIRTLLTAREHCVTQSAATQTALKSLKHKYVQTPTAINALSNAIEQQKENIAMIDAELKRLCKSDDSFHTMINLLQSIPGVGFLLSVHMLVISDGFTRPLIARQLASYCGIAPLQHQSGSSIYRAPSSMGNGHPILRKLLYLAALSVRTHHQQSKKYFLRKVEEGKSKRLVINNLSNKLLKIICAIAESKQPFIVNYRSVNPALLKSA

SEQ ID NO: 460161 - protein, 350 aa, unidentified
MKTTHPVIIGIDTHKASHVAVAIDTQGTRLATLSIPTNPKGYLELERWSQSLGKVQAFGIEGTGSYGAGLSRSLLAHGHNVIEVTRPNRQLRYTQGKTDSLDAEGAARSVLSGQATARPKTQTGSSEMIRHLKIARDTAVKSRSQAMVTLKTLIINAPADLRDALDHIRGKVALIRHIAAFRPGDIDNPLASAKAAMRAWARRWLWLHEEIIAHDKELERLVTERAPELMTSHGMATLTVAQMLILVGDDPTRIRSEAAFAKLCGVCPIPASSGKTHRFRLNRGGNRQANAALYRVAIVRMRSHEPTLAYVKKRTKDGKSKSEIIRCLKRYIVREIYSQLCVPKSSQIKA

SEQ ID NO: 460162 - protein, 406 aa, unidentified
MEKRTIEYEQVIERGCGLDVHRDTVVATVMGKGIATETRTYHTTTGSLNELGEWLKSLQVEAVAMESTGIYWKPVLHVLRVYPLKILVVNARHIKNVPGRKTDRADSQWICKLLMSGLLKGSFIPPENIQVIRDLHRYKRKLVRMIASEKNRIIKVLEDANIKLSSVFSDTSGVTATQIINGLIAGRRDLEKLVSECYHNRLQATAKQIVEAINGRLTEHLSFILRTMQMHIEYLETQIAEIDTQIDKYIKEFEQEIDLLQTIPGVGKEGAISIIAEIGVDMDVFPSEHHLASHSGMCPGNNESAGKKKSTRTRQGNKHLKATLTELAWSATRTKNSFYKAKYESLVVRRGKKRALIAIGHKILCASYHIIKNKEPFKELGYEYLAERKKEKPFRVLETRVKGTWI

SEQ ID NO: 460163 - protein, 319 aa, unidentified
MFVGVDVAKAELVVAVRPGGARWTVTNDERGVRTLVERLREVPPTLIVLEATGGYELLGVAALAAAELPVVVVNPRQVRDFAKATGQLAKTDCLDADILARFAEKVRPALRPIATAETQELDALLTRRRQLLEMLGAERNRLGQVFGKGKRPVKKSLKTHISFLERELRIADSGLDDAVRRSPVWREQDDLMQSVPGVGPVLSHSLLADLPELGRLSRRAIAKLVGVAPLSRDSGTFRGRRFVQGGRAPLRGVLYMGALVAARWNPVIRAFYLRLVAAGKPKKLALVACMRKLLTILNVMVRTQTRWSIQAAVPTLVGT

SEQ ID NO: 460164 - protein, 417 aa, unidentified
MSEYAALVAVDWADQQHAVCLLDPSTGEREQSIVKHTPAALQEWALSLHQRFAGQPIAVCLEQSRGPLIYALLQYDFFVLYPINPATLAKYRQAFSTARGKDDPTDADYLLDLLEHHRNRLRPWHPDDEKTRTLRLLVEQRRRLTGDRTRVSNRLTALLKGYFPQVLDWFEDIRTQLVCDFLERWPQLSLLQQARPATIDKFLRSHHSTSKPTNLRRLTEIKTALPLTTDAAVMSSSVINVKALVAQMKTVIAAISEYDRHLEALCQTHDDYHLFAALPGAGPVHAARLTAALGSDRSRWQSADELVTFAGIAPIIERSGKQFRIRWRYFCPKFFRQTFHEFAAQSIQDSFWARAYYSMQRAKGKDHHAAVRALAFKWIRVIWKCWHTRTPYNEVIYLESLRKKGSSLLKFAVDYQQ

SEQ ID NO: 460165 - protein, 400 aa, unidentified
MLSIGIDVSKGKSTVCGMKPGGEIVYTPFEVQHTREGMSELVSLLRGSGEEVRVVLESTGSYHCPVVAALLENGIFVSVVNSLRMKRFCSQSIRRVKTDQIDAMQIALYGLAYWQELQPTRLPENTYRELQLLARQYYQMTSMLIKAKVDFNAICDQVLPGMQELMSDHAGRHKLSDFVLRYHHTAHILEMGETRFRKDYCKWAEKKGYRNHERMAALIFATAQNGIPVLPDAPSTQIVITEAIRVLHTVEASRDAILTQMQALAKTLPEYSLVREMPCIGDTLAPRLIAEIGDVRRFHSKRALIAYAGIDAPPYQSGKFCANNRHISKRGNRYLRKTGYEVMQSYVMHKPANDPIFTFIEKKRGEGKSGKLAMVAGLNKFLRVYYGKVTELYRSLPTIE

SEQ ID NO: 460166 - protein, 334 aa, unidentified
MSNVTTVGIDLAKNVFSLHAVDGRGVVVLRKTVPRARLAAVVAQLPACLIGLEACSGAHEWARRFAQHGHSVKLMAPKFVAPYRKSGKNDGNDAEAICEAVSRPSMRFVPVKSVEQQAVLTLHRVRLGFVEERTATINRIRGLLAEFGVVLPQRVVEVRRGAAATLDQLPTLAQRALTDLLAHVRVLDERIGEYERELEQHARRDERAKRIQKLSGVGPISASAIVASVAEGHEFKNGRQFAAWLGLTPKQYSTGGKTRLGRITAHGDAYLRTLLIMGARSMLQTALRRTDRLARWARGVRARRGYHRACVAIAAKHARIIWAMLAKNQPLQLA

SEQ ID NO: 460167 - protein, 325 aa, unidentified
MNIIRVGVDIAKSVFHVHGVDRHGQTHWQGKYSRSKWLEALSRKVPTGAVVGMEACASSHYWARELQRRGYHVRLIAAQFVKPYVKSNKNDRVDAEAICEAMSRPNMRFVTPKTVAQQDIQAAHRIREELVGQRTAKANQIRGLVGEYGIIAPVGIQQLRRALPGWLEDAENGLTDSFRVLFNGLAEDLRHLDDRIKTLDERITESVKQDPVAKRLMTLRGVGPLTASALAGALGDGKAFRKGRDFAASLGLTPRQHSTGGRDRLLGISKRGDSYLRKLLVHGARAVLRHVDSKEDGLSHWLKSLSSRKHINPPCHRSCPVGVFA

SEQ ID NO: 460168 - protein, 335 aa, unidentified
MKKIYVGIDISKEKCNLCYRDGLEIVLEEESVNDVKALKKSLTAALKTFSVTIDEFLVCAEYTGRYIYPLTVACQELDIFLWMDDPTRIKNSMGLTRGKNDAIDAARIAEYAYRYSDKASRYCIPDAELVSMKSLLVDREFLLVDKKRYQSQINDQKRYMAPGDFKHKYARWKKVIKAIDEQIKAIDAEIESIIAASPVLTRQKELLTSIDGVGDRIAINMIAITGGFTRFQSARQFCSFAGLTPYKYDSGTSVRSKAKISKRANQTMKALLHLAAVGAATHMKKSEYRDYFERKTKEGKHVMCILNVVRAKIVHRMFSVIIRDTEYTKAYKPAV

SEQ ID NO: 460169 - protein, 337 aa, unidentified
MARYVGVDLHKNMFVVSFYEGSGHRIGEYRLNELDRFIGELRSDDVVGVESTNNTRYFVNEIREHVGEVKVINPSQFKVISKSVKKTDENDAKVIAEFLSKDMVPEVRMKDKKTAQINSLANTRDKLVKLRTALKNKIHNILSSHGILLKKESLSSEKGLQRILEQSVDSTARVELEVIVSQIRSLNEGIKKLDKELEDKGSELPGHENITSIKGIGKKSGSILLSVIGDINDFENEKKLAAYFGIVPRVSNSNETERQGRITKRGSKLGRTTLVQCTLIAIRYSPRLRAFYDRIKARKGSGKAIIATAKKLLNVIYYTLKENIVFEDFASGVIKTT

SEQ ID NO: 460170 - protein, 414 aa, unidentified
MDVIVGRCAALDVHKDTVVACVRRPGAKGREQEVREFRTFTASLRQLRVWLDGEGVTQVAMEATGVYWKPVWHVLAGLQGVELLLVNAQHVKNLPGRKTDVSDACWLAQLLECGLLRGSFVPTPVMARLRDLTRYRKKLIEQRAQETQRVQKVLEDAGIKLDSVVSDVLGKAARNMLEALIAGERDTELMADMALTRMRPKIGELRLALEGHFSPHHALMLDMHLTHIDHLTVTIERLDAEVDRELRPFGEQMLRLRTIPGINRRVAEVVIAEIGVDMSRFPSARHLASWAGLCPGNDESAGKRRSGRHRKGNPTLQSALVEAAWAAARTRNTYLSAQYRRLLRRFGKKGETRASFAVAHTIVVIIWQLLAQRVDYAELGADYFERRTDAAAQTRRLVRQLEKLGHHVLLEPAA

SEQ ID NO: 460171 - protein, 345 aa, unidentified
MEIVTLGIDLAKNIFALHGVDAAGKVVLQRPAVKRAKLLELTAGLPPCLIGMEACSGAHHWAREMTRQGHDVRLIAPKFVAPYRMSGKRGKNDAADAAAICEAVSRPAMRFVPVKSVEQQSELFLHRARQGYVEQRTALINRVRGLLSELGIVLPQKAETVRRELVHLLEDLPGHCNTVAADAITDLERLDARIAEYDKHIAQCAKKNADARRLMQLSGIGPTTASALVATIGNAHDFASGRQFAAWLGMVPGQYSSGGKQRLGRITKAGDRYLRTLLILGARSVLQSARKKEDAISRWTKDVEGRRGYWKAVVAMAAKNARLAWAVLRRGEDFKLYGQEVPAGA

SEQ ID NO: 460172 - protein, 356 aa, unidentified
MTSTKYVGMDVHKESISIAVMNSAGKIVMECVIETKASVLLQFFNGLRGDVRVTFEEGTWAAWLYDLLKPRVSEVVVCNPRKNALLKDGSKSDRIDAHKLAELLRGNHLKPVYHGEHGLRTLKELGRSYLTITKDVTRVMNRLKALYRGWGIACAGHEVYVPRHRSEWLGKISEAGVRRRAEHCYQQLDVLRLLRQQVRRDLLLESRKHPAWRLLGLIPGIGPIRAALLIALIQTPHRFRTKRQLWTYCGLGLETHDSAQYRVVEGQLQRSKKSVTLRGLNQDHNRDLKDIFKGAATKVSSSNSGPFHDFYEHLLAQGRKPTMARLTLARKIAAITLIVWKKEVRFDASYLKSQTA

SEQ ID NO: 460173 - protein, 481 aa, unidentified
MAKRKLSIFERVRSGGKLNPQQRREVQRRLNAADPGLEIVHPDAAGIDVGNQSHFVAVPAGRDEQPVQEFGSWTADLQRMAAWLKACRIRTVAMQSTGVYWIAVQEVLEQAGIQVYLVNARGTRNLPGRKSDVQECQWLMKLHTYGLLRNSFRPPEQIRAVRTIWRQRGRLVQEAGRTIQQMQKALTTMNIQLANAISDVSGVTGLAIIRAILNGQRDPRELAKLRDRRIQASEEEVAYSLEGHWREDVLFELGQVVEGYDFYRRQIAACDQQLQKYLAVLPDRKVTSATEGDRATPPEPENKRRKSKPRKNHPDYNLQAEMHRIFGVDLTRIDGINIIVSQVILSELGPDLSAFPNEDAFSSWLELAPRRDITGGKVIRQKSRESKNRVADALRMAAESLSRSDSYLGARYRRFRGRMDGRKAVKAMAHYLARLVYRLLTKGQDYIDRGAAYFENKRAEREIVGLKRKAAELGMQLVPVA

SEQ ID NO: 460174 - protein, 334 aa, unidentified
MKKRYFMGIDVAKATLDFCLLSKNATLLWRGQLANESQAIAQFLAQLRARGYKLAQIHFCCESTGVYGQRLVEALDQSALACSVLNPAQVKFFAISVLRRTKNDKVDAEIIARFCRERQPLATRPLRPIEAELKLLVHERESRVNEQNRERNRAQKDPYQIALPKLIGQQRKSRLKQLAKEIAQFDAAIASLMASDESLTNQSRLLCSIPGIAKVTAAKLLCELAGKEFQSARQLAAYAGLTPQECRSGYSSYGKTVLCKIGNAFLRKALYLPAAVAKRWCKPLQPWIALLESRKLHTLSIRGAIMRKLLHIAFGVLANQQPFNPSLVFIPKTP

SEQ ID NO: 460175 - protein, 368 aa, unidentified
MRFYNSQHQFYAGIDLHARKMYICVIDNQGKKIFHKNMDADPLHLMQALEPYKADIIVRVECVFTLVKSCAFCSGKHPAWYWMADCCEDNDIPFILGHALYMKAVHGGKTKNDKIDSFKIATMLRGGMFPVAYVYPRKMRAARDLLRRRQYFIHHQSALLAHIQNTNTQYNFPVFEKNILHASNRVNISDRFDNQFARKSIETDMALLDSYHRILLDIEADIRKQAIHHDPISHQLLRSVHGIGPILSLVILYEIYDIKRFPNVGNFISYARLVKCSHESAGKRVKGGHNKIGNAHLKWAFSEAAVLFLRKNEPAKKMQQRLTNRYGKGKAISLIAQKLGRTVYYMLKRKELFDAKRFFKDSMHELAI

SEQ ID NO: 460176 - protein, 324 aa, unidentified
MLPTLGIDVSKDSFHVELSINDKLRHRKFSNRQEGFGELKGWLAKHKTQSVHACLEATGSYSEELALYLHQQGHTVSVVNPAQIKAFGESELLRNKDDRPDAGLIRRFCESQRPAAWTPLPTHLRELQALTRHLENLHETRQQQLNRLEGTKTKDVVKSLRKLITYLDTEIERTEQQIENHIDSHPDLKQQSQLLVSIPGIGNRTAAKLLSEIEDIKQYQSARQVAAYAGLTPRNNRSGKQRGRTRLSKTGNARVRKALFLPAMTAKRYNPIVRNFCQRLASRGKNKMEIIGAAMRKLIHIVFGVLKSGKQFDPNHELSRNSAC

SEQ ID NO: 460177 - protein, 287 aa, unidentified
MLEATTIGLDIAKHVFHAHGADERGAQVFSRRLSRGKLLDFFIAHPRCVVALEACGGAHHWARELRAMGHEVRLIPPAYVKPFVKRHKNDAVDAEAICEAAQRPNMRFVAVKTEEQQAAALVFRTRDLAVKQRTQIGNALRSHLAEYGWVAPKGAAHLAMLADLLDDGGEIGETLPEAARPMFAMMVDMLADLDERVAALDKEITRRAREDEVARRLMTIPGIGPITATAIAAIAPPAETFAKGRDFAAWLGLVPKQASTGGKQKLGAISRMGERMNRAGFVGGPNS

SEQ ID NO: 460178 - protein, 423 aa, unidentified
MKLTYKVCCGVDVHKTFLVATIITSSFVLPQYQQKRFSTFYSGLLAFKQWLLDNDCKDVCMESTGKYWIPVWNVLEDSIHVVIANPKWVSAVKGNKDDKKDSKWIGDLFRMGLVPGSYIPPKDIRILREFTRYRNKLVSMRSSEKNRFQNAFTVCNLTLDAVVSDMFGKSSTDILNYLLDTDTVDPDHCVSLLRRSLKKKASDVVEAVNGFNMTAEQKERVRIVQGHFTDIDKRISQIDQIIAKLTTEYEGTISLLCTIPGIDRRLAITIVSEIGTDMTEFGSSKRLCRWAGLTPGNNESAGKKKSVRISRAGVYLKPALVEAAHAAVKASQKNPYFRVKYERIMKRRGKKRAIIAIARMMLTAIYAMVSTGETFNPCDLQKFDMPEELKKKQIISDAKDAVKLLVSLGLVTDGSISLEALAG

SEQ ID NO: 460179 - protein, 429 aa, unidentified
MNYTQNKKIEQVTETTLVIGIDVGSEFHYARAFDWRGYEYSKKAYKFSNTISGFTEFLAWMHHIKDLHGKEIILPGMEPTGHYWFNLGKYLMNNEINPVLVNPHHVKKSKELDDNDPGKNDRKDPKIIAGLINDGRYSYPYLPEGIYADLRIASNLRFTLTKELTRIANRIQRWFNIYFPEYKDLYGKFGAKSSMMLLKRATLPDDIIALGAEEINQIWRDAKLRAVGMKRAKTLLEAAERSIGSREGLIAARMEIAILLEEYESKQIKLDKVMLLIEELCKQIPMAEKLLKIKGVGIKTVSGFLAEVGDIRRFNNPKQLQKLAGLAIADNSSGKHKGETKISKRGRKRLRLLLFEVTLPLVSKNPEFKKLHHYYTTRDVNPLKKMQSLIAIACKLIRVFYAILTKGVDYDPAKMLDDIKYPLKLAQAA

SEQ ID NO: 460180 - protein, 428 aa, unidentified
MNVEESNRLKEFRQLKKEIRGSEEHVIVGIDVAKNKHHAFFGTATGKTLLKRLVFENDIDGFGRLRDRTEAMKVQHRLSKVVYGVEPTANYHKPLAEYLIKCGHNVVLVSGVAVNKNRELLDGRWDKHDTKDSANVADLISQGKCLYYDYPSMPLRDLRDLLSLKRRLKKQEHGTRVRIRNHLLAQYFPEFDRYFGKGCSESLPIVKWRLNPSMIAGMEYEEFVQLVAPRMKTMGQERRLKSIWGMAIDSIGCEAGDALDFEAKLMVEDLEQVKDSIRVVDDHIEDICLGFPEYSYLLTIPGFGPDVSSKVLGAIGNPFRFDNGKQVLKLAGYDLSANRSGKSSDSAVPVISKRGKAYLRYALYQAAFVASTSNRHFIIYYTNKLRGRDKEKGIKTKMKVKLAAKMLIIAWTLMKKKEPFDPEFLNID

SEQ ID NO: 460181 - protein, 387 aa, unidentified
MAEVLGKLMGKLDVPTVATSAQENRRGNTFGPNRDRLTVGVDLGDRWSQYCILGLEGETLTEGQLRTTQEDVRGFFQALSVARVVIEVGTHSAWVRDVIREWGHEVLVANPRLMEGSKRRKRKSDRIDAHKLARLGRVDPQSLYPIRHRSREVRQDLVVLRARDALVSVRTELINTTRGLVKSMGTRLPRCSSPSFADKVKDAIPVEVKEALLPLVQLVETVNECITRYDQKIEELGREKYGHTTLLRQVKGVGPITSLAYVLTLEDAQRFSNSREVGPYLGLVPKQEDSGDSQPQLGISKTGDRMLRRLLVGSSQYMLGAFGPDSDLRRYGLRLCERGGKNAKKRAVVAVARKLAVLLHHLWVTGDVYEPLHHRGAETRTAQARAA

SEQ ID NO: 460182 - protein, 340 aa, unidentified
MLYVGLDIHTKHIALCVLNESGQVVRRARVRGIEEMLALLKGLPDRFEVCYEASCGYGHYHDLLQPLAARVVVAHPGQLRLIFRSRNKNDRNDAERLAKLLYLGETPTVHVPSLDVRTWRELIHCRSQVIAKRTRAKNALRALLRGAGVVPPRNPGLWTKKGLAWLRQLELATFSQQLRRDLLLEEVEGLNRQVRRIEQELNRRAQQTPAVARLRSIPGVGIRTAEAVAAYIDDPHRFRHAKAVGRYFGLVPCQDQSGDRNRLGHITREGPAVVRQLLAEAAWQAVRRSPTVRAFFERAQRGDPQRKKIAVVATAHYLVRVMWALLKRGTVWQENEARAQ

SEQ ID NO: 460183 - protein, 456 aa, unidentified
MTKGKKKQKWIQVREDMPPINRNAGGIDVGATAMWVSVPPDRDAEPVQQYGAFTRDLYAMADWLKRCGIETVAMESTGVYWIPVFQVLEERGIDVLLVNARYAKNVSGRKTDMLDCRWLRTLHTYGLLAGSFQPSAEIGVLRSYLRQRQMLIDSAATHIQHMQKALTQMNLQLAHVLSDVTGTTGMRIIRDILKGERDPKRLAGLRDVRTKSDEETIAKALEGNYRPEHVFALKQAVELFDGYQQKISDCDQQIAGYLRTLESKINIQAQPLKPAREKKKKRRNAPGFDCRHEAYRISGVDLTQIDSISESAALTILSEIGADMSPWKTEKHFASWLTVCPNNKITGGKIFQRQTRKSANRVRELLCICAQSLINSKSALGAFCRRMCSRLGPQKGIVATAHKLALLIYRLLKFGKDYVDIGEEAYERQYKERVVKNLARKAKQFGFQLVLSPATP

SEQ ID NO: 460184 - protein, 344 aa, unidentified
MPTEAAQSVYAGLDLHKRNVFCGLINQEGQPIYRRRLPAELPMILQALQPYRPQLKAIAVESTFNWYWLVDGLQAAHYPVRLANPAEMQKYSGLKQTDDETDALWLAEMLRLGILPEGYIYPPAERPVRDMLRRRMLIVRQATQTLLSLQSMVTRHSGQTVSAAQLQGWTLKEVRDTFGDPYSQQTASALLELLGEQRRIQHGLEKQVLAVAKPTGPFQRLSNIPGIGNILGLTITLETGPMERFASAGDYASYCRAVTSRCESDGKKKGENNRKNGNKYLGWAYVEAAHFAQRYSPRAQAWFASKMARAGRVVAVKALACKLAKAVFYVLRDAVDFDENKLFG

SEQ ID NO: 460185 - protein, 411 aa, unidentified
MEIIHARCAGLDISKKDAKVCVRVAGAGWRKTVETVTTWGSMTSQILALREHLIAERITCAVMEATGDYWKPFYYLLEGAGFEVLLVNARHVKNLPGRKTDVADATWLAQLGAHGLVRGSLVPPEPIRQLRDLTRARTAITRERSREVQRLEKLLEDAGIKLSAVASDILGVSGRAMLESLIAGNRDPAALADLAKRRLRSKIPALTEALTGRFTDHHAFLARVHLDLIDQHTAAVADITARIEATIKPFHWFRDLICTIPGISTLTADVIIAETGADMTRFPTAGHLASWAGTTPGNNESAGKVKSSRTRPGNPYLQGALGAAAMACAQNPVTYLGARYRRIAARRGPQKANVAIQHSMLIATWHMATNGCLYHDPGADYFNQLHPERAEKRAISQLEAMGYHVTLTRAS

SEQ ID NO: 460186 - protein, 425 aa, unidentified
MNTGQAEYAVVIGIDWAHTTHALSMRDMTGQITALELEQSPEAIRRWIEDLKAKYPGQRMAVAMEQTKGPLAYALREYVHVLDLYPVNPMTLASFRKAWATSGAKDDPSDADFLRLLLEKHRELLRLWQPTDQQTHQLAFLSEKRRKLVDIRTKLVQQLMAALKDYYPQALTLIGTDLHDVMSCNFILAWPTFEDLKRARRETITTFYYRHNCRSQKRIQERLDRIAAEVPLTTNPALVEPSKMMAVALVKQIVQMNASIRQFDKAIAETFKTHQDAPIFRSFPGAGASLAPRILAIFGTDRDQWADASAVQKFSGIAPVVERSGKTEWIHRRFACPFFARQTFHEFAGSSLVFSAWAKAYYKLQRSRGKGHQAAVRALAFKWIRVLFACWQTKAEYNEAAYIETLKKRNSPLLAFMIPEPVSTT

SEQ ID NO: 460187 - protein, 342 aa, unidentified
MYYIGLDVHKKTISYCVKDVSGRICQEGKVGATRWELDIWIKTLPQPWTVAMEATIFTGWIYDHLRPHAAAAKVAHPLMLRAIAAAKKKNDSIDAGKIADCLRCDFLPECYMAATEIRERRRTLRYRHLLVRQMVQMKNRVSGLLMETGVSHNKQRLHKIGYFPELLANADEVSPSIRPLLQLSRESITRLQRTEGAIIRSLQRDPLLAERVRRLQTIPAVGKVTALSWALEMGDISRFRSIRQAISYCGLCGDEKRSADKVARTPISKQRNKHIQRVLVEAAKLAPRRNPDLALVYENARQKGNANCATLAVARKLVAYLMAVDREQRDFDPVRVFAGIAA

SEQ ID NO: 460188 - protein, 362 aa, unidentified
MKNKILAENSRIVIGVDVHTDNHVAAVKHEGRIIDRVKMAGTPRQWTAYLRRFPACELHIVYEAGPNGYNLRDCLQQLDGEDGRVVCVYMAPPSMIPEAAAKKKIKTDRRDAEKLIVAFESGGFRPIAVPSPEKRAARQLARERDRIKKDIKKIKNRIHGFAKFHGIDYPDAARWSETWRRGLLAGAENKDSAGHIHFSLWMEMQALKAMESLLLAVEKRVAELFRRGELKDLLRELMGQTGIGAVAASVIATEVADFRAFDNSDAFASYTGLVSGARSSGKTTRMGPITKVGNRRLRWVFVESAWAWVRFDPAAKAKFEELKARRGARRAIVAMARKLAVKVYHRVVNNAPADSAYYCLTA

SEQ ID NO: 460189 - protein, 427 aa, unidentified
MAKVEHTSDARVLVGIDISKHRHEVLIAVPGKSRRRRLTITNSTDDFMRLIAILRDYGLPVRIGFEATGNYHRVLMYHLGTAGFDLKLVSSVALARTREALHNSWDKNDPKDAQVILHMLQIGAVQIFQDPMVAGTNDIQELSKTHDAVSRAKTELWHRILTHYLPLYFPEADRFHRSSRTDWFLAFLEMFPSPHMISALTKEEFTKAAWEVVGRKVEKSLMLSDIYETAKVSAGLPVSPESDAIRMFRLMLAEGRSLIRQRNAIEDRAIDLLGERPDYQLLRTIPGIGPINALTILAETGDLRRFHHHRQFLKFCGMDLATVQSGMFRGRSKISKYGNARLRRTLWLAGQTAVLKKANSFRDKFERYIAQDRHNPDLRRKAYTAIAAKMARTIHAVIKSGEPYRPFFEGTSPGGRTPLCRAVEAGS

SEQ ID NO: 460190 - protein, 337 aa, unidentified
MQHLAIDLGGKESQICVRDSMEQILEEKRWPTRKLGEYLAKQPHSRVILETSSEAFAVADLARSAGHDVRVVPATLARALGVGARGIKTDRRDAQALSAVSCKVELRSVHIPSEQARAWKALSSSRDALVSSRTKLTNAVKSQLRGRLVSNCPRISKDMTTAIRARWTQLEGQVPAYVERLLVTIEALNIQIAAADKEIRQLVKDHEICQRLMTVPGVGPLTALRFVATIDDVTRFQTAHDVQSYLGLTPGENSSSSRVQRTRLTKAGSPHMRWLLVQAAWCTRRCAPSHPITRWATKIAERRGNQIASVALARKLAGILFALWRDRSTYDPVHGAA

SEQ ID NO: 460191 - protein, 363 aa, unidentified
MRKSAQAARVPSVVQQPTESTIGIDLGDRWSRYCMLDAGGTIIEEDRVRTTAEAMAERFGKRAATRIVIEAGTHSPWVSRLLESLGHRVIVANARKVRLIYESDRKNDRLDARMLAKLGRLDVSLLCPVQHRSAEAQADLAVVRSRDALVAARTQLINAVRGMVKAIGGRLPKSTTAAFAPKMTVLIPAELKTAVEPLLKSIRVLSEQIGRYDEQIEHLAEKKYPETRLLRQVKGVGPLIALPYVLTVEDPTRFRRSRQLGSFLGLRPRQRESGDSAPQLGISKCGNNHLRWLLVQAANYTLSRLAPDSRLRRWGLGLAARGGKNGKKRAVVAVARKLAVLLHRLWVNGEVYEPLYGVEPQAA

SEQ ID NO: 460192 - protein, 368 aa, unidentified
MSKAIICGTDMHDNSLVCRVAVGKEDAKTKRYGNTDSGRKHLFGDLKGMSMKHGGGRIIVAYEASTHGFCLYDDCRDVGIECYILAPTKMRKSKKEQKKKTDESDAQLILETIKGHILAGNELPSIWIPDDKTRADRETVRARLDLGTKLTTVKTQVQTLLKAHRMKKPADVNKAWTKPYRKWLMSLSKDWPALATLVRQIESLEREIMILDLEIKKLSETERYAIPSKALVENIKGVGLLTAMVYLTEMGDLSRFSSRQKTGSFLGLVPSSNESGETDDRKGHITREGSFRVRRVLCQATWSHVTHGGVETQLYNRIVKRNPKHKKIAVVAVMRRLGIRMWHIGLNAQKSANVFNDVEKKVEVKKVA

SEQ ID NO: 460193 - protein, 365 aa, unidentified
MSEITNTTSFWHIDAAGGRPHQQYKRIAIDTSKAVFTIHCIDDRDRPVLRTNLRRGQLLSFFKKLSTTEVAIESCSGSHHWARELNALGHTVHLLPPQYVKPYVKRGKNDRNDAEAICEAAGRPGMHFVPVKSLTRQAQGMVLKVRETLIGQRTVLGNTIRGHAAEFGIVAGKGIGTIAPLLSAIEQEAAVPPEAQEMFALLGQQIEEIGARIKEIDAKLNAAHKASEVSTRLATIPGVGPVIALTLATEIDPAAFESGRHLAAWVGLTPKEHSTGGKQRMGGISRAGNERLRALFVSGATSVINAAMKPGSRQMTEWLRALLLRKPRKLAAVALANKIARTAWAMMTSGEVYRRPSNVNDAVPA

SEQ ID NO: 460194 - protein, 343 aa, unidentified
MTNRLLKQVAGIDVAQKELVVSLGKMDENAVTTVYANKVFTNNEKGFARLTEWVTRQTIAEYPLRYVMEATGVYHERFAYFLSGKGYTVSIIMPNKISNFFKTLEVKTVTDKSMSMAIAMFGLEKQLDDWTQPKRVYRSLRQLTRERSQLIAERTMIKNQLHAEQAEAFPGEDTIRRMHDRINMVNAQIKQILSEIKEAITADTALKQTITTITTIPGIGLLTASVILAETNGFELIRSKKQLTSYAGLDVKEKESGTSVKGKPRISKRGNKHLRKAMHLPALAAIRYSERYKAIFTRIVSRNGIKMKGAVAVQRKLLEMAFTIYKTNKPYQADYLKLQAENS

SEQ ID NO: 460195 - protein, 385 aa, unidentified
MRGKTFIPRDYDVFAGLDVDKRSISVTFSNHQGFISSLHMPYSAEHLIKHVRKHFGDQKVAFAYEAGPTGYGLYDGIVAQGYRCLIAAPAMIPRAPGQRVKTNRLDGVSLSENLRGGQLKSIHVPTPIYRELRHLVQLRDTVMSEVVATKQRIKSLLLFEGLDFPTAPAGSQWSLKVKRQLQKLTCSKGVRFKLDELLDSLEFLEKKVVKSTREIHRFCNDDPELLQCIQYMMSVSGIGWIVASQLLARIGNWREIQNVRQLAGFLGLVPTEHSTGDRIRRGSITHSGDGRLRSKLIQASWSAIRQDGELRDFYRSVCRTHARHLGPRVAIVAVARKLSARIAVVLMQQRPYVVRKKVDSAPLTQEETVPQGTTRRQAVPGEKTS

SEQ ID NO: 460196 - protein, 344 aa, unidentified
MDRVSTIGLDIAKSVFQVHGVDDAGVVVIKKRVSRAKVLDFFGGLSLCLIGIEACPSAHHWSRALQALGHTVRLMPPNYVKAYLKRSKNDANDAAAICEAVTRPSMRFVPIKTKEQQTGLMLHRTRQLLVRQRTMLSNAIRGHMAELGIISAKGRNGTAELLKVIANTEDDRIPPIARFCLEVLARRYVIVTAEIGAIDKRIYAWHRSSEHSRRLEEIPGIGPIVATALVAEIGDWKQFRSGRNLAAWIGLVPRQHSTGGKERLGSITKQGNRYLRWLLVAGAMAVIRYARQHGTKRAWLTRIMARRPVKVAAVALANKIARMAWAVMARGERFTEPGLLPTAA

SEQ ID NO: 460197 - protein, 412 aa, unidentified
MADRVALVGVDWGDKKHTFEVRTREGMVWQGAIEQRPEAVHGWVGELRARFPEGTIAVAVEQSRGALVYALGRYEFIEIVPLHPRQTAAYREVVRPSGAKSDPIDAALICDFVERHGDQVRSWYAADPLTRELLLLVEWRRKLVDGRCSSCNQLRDALKQYFPQALDLVGDLDAPMTWAFLKRWPTLEQLKASRSATVRSFYTTHGCRSKARIEQRLAQIASATALHSDGALTRPLPLMVQSLVRLIRTASEQIALVDVQIDRLWSSHPDREVFDTLPGAGRVLAPRLAVALGTDRTRWSASAMQAFSGIAPLTVTSGSKRWVHSRWRCPKFLRQTFHEFAACSIPQSPWAATFYRLQRARGKGHHAAVRALAFRWIRIIVRCWQDRARYDEARYTNRLIATHSPLAASIRP

SEQ ID NO: 460198 - protein, 415 aa, unidentified
MALKIVYKICCGIDVHKTFVVACIASTNDKGVTSYESHRFSTYTSGLKTLLQWLLDRNCKDVCMESTGKYWIPVYNILEKDCSIVLAHPKYVKAIRGKKTDKKDAKWIADLFKHDLVAGSFMPPSDIRQLRDLMRYRFKLTCFKSSEKNRLQNCLTVSNIQLGNVVSDTFGKSAQAILDKILEDPADTSFDLEPLVFKSLKKKLPELRDAIDGYITPEQAGKLKVIKAHYENLEARKAELEELILALATPYQQELAILQTAPGISSDFTAIGIISEIGTNMEAFPSAKHLCSWAGLTPTNNESAGKKKSVRVSKAGCYIKPLLVQCANAVVKSNKHPEIRNRYLRIKKRRGHKKAIIAIARMLLTALYHILKNGENYNAELYRKSDLPPVDREITVEQALMIARNQGYKIKSATA

SEQ ID NO: 460199 - protein, 414 aa, unidentified
MQTMIARCCGLDVHKKQLTACVRLLIDGAVTEIVQTFGTTTPDLLALRDWLVAHQVTHVAMESTGVYWKCVYYTLEDDFECLLVNARHIKHVPGRKTDTIDAAWIAQLLACGLLRGSLVPPREIRELRDLTRYRKALIYERSRAVNRLHKLLEDAGVKLAAVATDVMGVSGRQMMRALIEGQADAEALAELAKGKLRRKLPELRKALEGRFRPHHAFLLERMLAHIEELEDDIDALSARIEEQIAPFEPAVTLLRTIPGVEQRTAEVIIAETGGDMSAFPSAEHLASWAGMCPGQNESAGKRKSARTRKGSPWLRATLIESARAAARTRETYLAERYRRLAARRGDKKAIIAICHEILTATWHMLQTGELYREQGADLLRQRDRDRIRRRAISQLEKLGHKVTLEDLEQLPQAA

SEQ ID NO: 460200 - protein, 350 aa, unidentified
MLLIGCDYHTRFQQLAMVDTSTGEVTERRLEHANGEARKFYASLPGPARVGMEATFHAQWFERLLAEYQHELWVGDAAQIRAAEVRKQKTDARDARHLLDLILQGRFPKIWIPSSEERDRRQMLRHRNKLVGFRTSIQNQLQALAMGQGVCRKSKLWTKRGRQELEGLELDPWASRRRQELLQLLDQLNPSIEELDRAVEKEAARRPEAVLLMEQPGVGPVTALAFVLTVGPVERFRNSRKLVSYLGLNPSEESSGGRQRLGAISKQGNSLLRHLLIEAAQAAAKYDPELRRDYLRLKFRRGISGVAKVAVARKLAVRLYWKLRAAQPHTAAHLQGSPTKPMVDDSPSSS

SEQ ID NO: 460201 - protein, 348 aa, unidentified
MDHYTGIDVSLECSSVCVVDGSGKIVREGKVASEPAALIDWFGSLGLRVERIGLEAGPLSQWLYAGLKRAGLAVELIETRHVRKALETMPVKTDRNDARGIAQLMRVGWFKPVHCKSLAAQETRAMLTARKLMQAKLHDVEMSLRGILRGFGLKVGKTTARSFAARIEELAAGHPNLETIARALLAVRAVLLREFNGFEKSVRIMARSDARARLLMTTPAVGPIVALTYACAIDDPGRFKSSKAAGAHFGLTPRKYQSGETDITGRISKIGDAGVREALYQAAHVMLTKAVKGCAQLKSWAMRIARRAGMRKAKVALARKLAVILHRMLADGKPFNPTVRRQPVAAAA

SEQ ID NO: 460202 - protein, 343 aa, unidentified
MQVSTIGVDLAKNVFQVHGVDSAGKVVIIRQLRRKQVIDFFSKIPPCLVGMEACGTAHHWAREVSKLGHTVRLMPPSYVKGYVKRSKNDAADAAAICEAVTRPSMRFVPIKSADQQALLMLHRTRDLLIRQRTQLINALRAHLAEFGLVAETGREGLAQLAAIITDESNREALPSAMKQALQAIVDQLAALELQIGTLDRAIHAHHRANDMSCRLETVPGIGVIGATAIASTVTDPSDFKSGRDFAAWIGLVPRQHSTGGKERLGGISKQGDRYLRRLLVIGATAVVRHARQHPQKHPWIMRLLARKPAKLVAVAVANKMARIAWAIMAKGGYYRAPELAAAT

SEQ ID NO: 460203 - protein, 410 aa, unidentified
MIKENYMYVGIDLHKETHTAVIIDCYNQKLGEITFPNRPADFPKLVTKVKKCNTDGKEVVYGLENAYGYGRALAVWLIDKGYFVKDVNTAISHRQAKHRGAMYRKSDSDDAKAIALATLNMLDKLPDACPNDAYWSLGQLVHRRDNIMKQRTRLVNQLHEQLCIVYPSYKQFFNDISRPTALYFWEHYPSRKYLKGKSVEDLRAELVPVSHNKCSTKTCEKILDAVASDKVKNNNFQDARDMVTLSIVSDIQHYDKQLVEVDKMLEQMYKMLGCTLTTIPGVNVITAVKILAEIGDIKRFGNANKLAQFAGIAPLHLSSSGKGKDVATKQGNRRLQATIYFLAIQMVQVSSKGTPRNPVVRAYYEKRKAEGKTSQQALICISRRLISIIYGMLKHGTEYRMPVVESAGEK

SEQ ID NO: 460204 - protein, 424 aa, unidentified
MNCNQNFKISQVTEGTLVLGIDIGSNTHYARAFDWRGLELSKVFKFKNSFEGFQSFVLWVNDLCCKYNKSKVIAGLEPTGHYWFSLGELLKENNITIAIVNPYHVKQSKELDDNLQTKNDSKDPKVIAKLVIDGRYSFPYIPEGIYGELRVADKLKNDITQQIISIKNKIHRWLSIYFPEYENIYSSIDSKSGFLLLKETPLPKDIVELGSEGIVERWKQTKLRAVGLDKAKKLEEAAKKSIGCKNITSSARFEIKLLIEDYEYKQNQLNSITEELNKLCEKIPMIKEIAEIKGIGIATAISFVAEVGDIRRFKSAKQVQKYAGLALKENSSGKHKGLTRISKRGRKKLRTILFRATIPLIGFNKEFSSIYNYYIERKDNPLKKKQALTAICCKMIRIFFTILSKGIKYDETKMLHDIKRPVAA

SEQ ID NO: 460205 - protein, 351 aa, unidentified
MTVTIVERPAHPRVITGGVDTHAEVHVAAALDPVGGLLGVQEFPATPAGYAQLLGWLGGFGAVCLVGVEGTGSYGAGLARHITAAGVRVVEVDRADRQDRRRQGKSDPLDAVSAARAAQSGRAAGAPKGRDGAVEAIRALMVAKRSARAGRTQTINQARALVLTGPDDLRIRFCAHTPAGLVAELAALRPRPGAPVGYPTRMALRELGRRAVFLDAQLQRLDELIVPLVTARAPGLLALYGVGADTAAMLLIAAGDHPERLRSEAAWAHLCATAPIPASSGKVTRHRLNPGGDRQANHALWRIVFTRMGSHPATRAYVARRSKDGLSKKEIIRCLKRYVAREVYPHLRTPG

SEQ ID NO: 460206 - protein, 351 aa, unidentified
MTNNAKTEIVATIGIDLGKNTFPICGMNACGVVVLRQKFSRRSLGQQLANLPPCLIGMEACAGAHYIGRHLTTLGHDVRLIPAQYVKPFLKGHKNDYRNAEAIAEAVQRPTMRFVPLKSADQIDLQALHRVRSRLVGQRTAVINQIRGFLLEHGITVRQGPAGLRQALPTILAQRSDVLAPRIMHLIEDLAEDWHRLDTRVDDVTREIVQLARQDENCKRLQGVPGVGPLTASAVVAAIGNGAAFAKGRDFSSWLGLVPKQISTGGRTILGSISRRGNRYLRTLFVQGARSVLLATKNLSKHELGRWLAAAAPRLHRNVLAIALANKLARIAWSVLHSGRGYEVNFKNHVA

SEQ ID NO: 460207 - protein, 350 aa, unidentified
MKIKHPIVIGIDTHKATHVAVAIDTQGTRLAVLSIPASSKGYLELERWSCGIGHVQAFGIEGTGSYGAGLSRSLLAQGHHVVEVTRPNRQLRYTQGKTDSLDAEGAARSVLSGQANARPKTQTGSSEMIRHLKIARDTAVKSRSQALVTLKTLIINAPADLREVLDQIKGKIGLIRHIAGFRPGDILNTLASVKAALRALARRWLLLNDEILSHDKELERLVTERAPNLMQSHGIATMTVAEMLILVGDDPTRIRSEAAFAKLCGVCPIPASSGKTHRFRLNRGGNRQANAALYRVAIVRMRNHEPTLAYVKKRTKDGKSKSEIIRCLKRYIVREIYSQLCVTQTIKIAA

SEQ ID NO: 460208 - protein, 340 aa, unidentified
MSEITTIGLDLAKHVFQVHGIDAEGTTVLRRRLRRNQVLAFFSRLPRCVVGLEACATAHYWARELGALGHEVRLMPAQYVKAYVKRNKHDAADAEAICEAVGRPTMRFVSVKTAEQQASQLLHRGREQLVRQRTMLVNALRAHLAEFGIVAAQGLRNVGELIAIVRDDGNKHLPDVARQVLKVLACQIEQIEAAITALERQLLAWHKTNAVSQRLASIPGIGPIIATAIATTVADPKVFRSGREFAAWLGLVPRQNSTGGKTRLGGITKRGNRYLRRLLINGASANLLRSKATKADPWVIGLRRRRPPLVVAVALANKTARIAWAVMLREKEYQPRAMAA

SEQ ID NO: 460209 - protein, 443 aa, unidentified
MSKDCSAHLRGERGQAFANLIRGIPPEQILCVSLDISKYFHVAIIHNGLGEIVTPTFEVDIYQSGFDQLCQAIDQAKARTHAQVVLVGMEPTGHYFENLARHLLTGSQPVKLINSFSVKQNREQQLMRREKTDQIDVAAIGDLLRRGEGTLYRPATGVYLQLQQFDRVRLGKAKIERILKNQIIGHMDRIFPGLLLLNDAAKERYTSLFGTDFWQCQTLQNLIRICPNPNELVGMSSAQLVKAFHAQNCRLGPATAGRIIAQAHQTLLPDPQLAAIRCELLQHDLALLDAVQARLTLLEQRLASLVTQTPYQVLAKLKGLSIIQVASLAAAIGDPANYTNAAQVFRRSGLVSGRNDSGNHQYKGKGNHILKTGDVYLRTALMNATATLILHQPVLGSYAKQLQITKPAGVARVATARKTIGILWAILRDQSSNTLINCKGADM

SEQ ID NO: 460210 - protein, 343 aa, unidentified
MKLSRVGIDLAKNVYQLHGVDCFGETMWTRRLKRHQWFKVLLDKTTADCVIGMEACGGAHHWARELQARGYTVRLIPPQFVKPYVKSNKNDANDAEAICEAMSRPNMRFVAVKSVAQQDIQATHRVRAECMAHRTAKGNQIRGLVSEYGLVAPQQSAALRAAIPCWLEDAENGLTSRFRALLHGLWEDLMRLDERVAALDADIALIAKTDPVAKRLQQLRGVGPLIATALVASVGTGEQYARGRQMAAALGLTPKQHSSGGKDRRLGISKRGDGYLRGLLIHGARSTLWHAKHKQDRLSRWMTDLSARRHPNVAAVALANKTVRMAWAMMRNESDYDPEFAAA

SEQ ID NO: 460211 - protein, 342 aa, unidentified
MQETIYVGLDLGSSRCQQTVMGADGLVRFSRIVLTSEQHLRSAFEKLGGDVRVHLEAGELAGWVAAVIKPMVSQVVVSHPRSLAWIGKDSVKDDKVDAGKLAELLRLGRVHEVYCEEDNKRRTFKHLVTHHEQSSREQARQKSKIKARLRTLGVIRKDARLFSASGQAALLESTADMAIRKMIAQSFSVLNQMLESEREARAAMLEYSKRFPEVRLLQTAPGVGVITACRFVGYLQTPRRFSNKRKLWRYSRLGITRRESNGKRLGHPRLDNAGVGSLKDVSRKVFEAARRCKGDNSFTRCYEQSLENTKNVVHARLATQRKILGCLRAMWLSNRAYRDFGG

SEQ ID NO: 460212 - protein, 417 aa, unidentified
MQYAAPVLEAQPANGLTCGIDWARDDHAIAIVDAHGQQVHRSTVEHNAAGLRELLALLARARVSEVAIERPDGPVVDALLGAGVIVVVISPNQVKNLRGRYGSAGNKDDRFDAFVLADTLRTDRARLRPLVPDSSATVALRAAVRARKDLVAHRVAVTNQLRDHLKRVFPGPLGLFADLDSPISLKFLTRFDCQDRADWLTPNRLGAWLRSVRYTGRTDAAMLHQRLTTAPRGATGQAGVAHSQITRALVATLNTLVDQIKILSEQIGQQLANHADAHIFTSLPLAGTVRAARLLAEIGDCRARFPTPEALICLAGVAPSTRQSGKMHLVGFRWSCDKNLRDAVCDFANDSRRANPWAADIYNRAIARGKDHPHAVRILARAWLYIIWHCWQNNTAYDPANHRGLQALLKQRQQPAA

SEQ ID NO: 460213 - protein, 298 aa, unidentified
MPRILIGVDVSREFLDVHVRPTATQRRFANTTAGIAELVAWVRPLGTERILFESTGPYHLAAVGALLAAELPAVVINARQVRDFAKAMNHLAKTDTIDAAVIAHFAEVATTTVRPLESEELRTLREWSDRRGQLVHMLAMEKNQRHSATVARASAKVLRSIEQHIAYLEKQIRDLNGRLDRLIENSATYRARNEILQTLTGFGPQVSRTLLIHLPELGRCTRTAIAALVGLAPFHDDSGDHAGLRHIRGGRSKVRVGMYQAAIAAIRHCPRTRAFYAAMKARGKASRVVIIAIAASSW

SEQ ID NO: 460214 - protein, 371 aa, unidentified
MKENTIFVGLDVHKNTISVGLADEGRDGEVRYFGVIDGDLESVHKVARKLQSKGATPRFVYEAGPCGYGLWRFLTSKGFDCIVAAPSKIPRKSGDRVKNDRRDALTLARLYRAGELTPVYVPKEEDEAMRDLTRGREDAIKALRVAKQHLLAFLLRYGHRYSGKSYWSKAFWNWIADIKMPHRAQQIMLQEYVHAVHEQRERVQRLTDQIRELVPQWQLAPMVKALQALRGVSLIVASTTLAELGDLSRFSKPKQLTAYLGQVPSEWSSGDSNHRGSITKTGNGHVRRVLTEAAHTYAHPARESRALLKRLEGLPQRVQQIAWKAQVRLCARFRRLMARGKTRNKVVSAIARELSAFIWAIAQELQPKSQA

SEQ ID NO: 460215 - protein, 436 aa, unidentified
MSTASQQPAGRKARKIHAKALKRKARGSQRQQGEGNQPRSELRITNPDAAGIDIGSQVHYVAVPEGRAERSVRSFGAYTAQLDELVQWLKECGVKTVAMESTGNYWIGLYQKLEAAGFEVLLVDARQAKHVPGRKSDVQDCQWLQQLHTYGLLRAAFRPEDSICRLRTLERHRKNLVEAAGMFVQHMQKALNEMNLHLHHVLSDISGYSGLAILDAILAGERDPRKLASLADYRVKKSQAQIEAALTGDYRPELLFVLNQSLEGYRQIQQQLAQCDLAVEKQLAQIADCTNPSQDSAPKQPSPDWASSKRGKTKAKDALEVSLAGHLKRILGVDLTTIPGLNVVAILTLVSEIGTNMAKWRNEKAFVSWLGLNPNNKISGQRVLSSRTRKVVNRAATTLRLAAMVLGHTNTRWARSIAENALNSALQRPLRLPQGN

SEQ ID NO: 460216 - protein, 462 aa, unidentified
MKRKAKSQATHSGLAVVNPNAAAIDIGATMHVAAVGADRASDPVRSFGTFTADLHRLADWFAECGVKTVVMESTSVYWIPIFELLDERGFEVILVNARDAKHVPGRKTDVSDAQWLQRLHSYGLLRASFRPKGEIVELRAYLRQRERLLDTAASHIQHMQKAMTEMNLQLHHVVSDITGATGMRIIRAIIAGERDPAVLASMRDTRCHSSAEVIEKALTGHYRGEHLFVLEQALALYDVYQQKVAACDIRIESVLKELSSIRGRKEDARADGSGSPRRRSRQSNGPDFDVGKALNSLLGKDLTRIHGIGPYLALKLVSECGDDLSAWPSAKHFTSWLCLAPSNKISGGKVLSSRTRRSGSRAASLLRLAAVTIGRTDTALGAFYRRLSARAGKSKAVTATARKIAVLFYNALRHGMDYVDPGASYYETRYRERVVKNLHRRAKAFGFILQAAEMPAAEQAVS

SEQ ID NO: 460217 - protein, 431 aa, unidentified
MNYNQNKKIAQITSQTLIIGVDIAKFKHVARAQDFRGIEFGSPCQFENTKEGIEYFLNWISEIKKEQRMDKVMVGMEPTGHYWFNLAHILKENGIKFVAVNPLHVKKSKELDDNSPTKNDVKDAKVIAQLVKDGRYAEPTIPQGVYAELRVAKKIRNLLTEDLQTVQGQVHNWIDRYFPEFLTVFKKWEGKAALQFLRLYALPHEIVNFTEHELLSHLRKSVTRSVGLHKIQELKQAASKSIGLRQGSNMAKLELKTLLDKYELIQLKFEELDSKIDILLDEIPGVPQMLAIKGVGRDTIAGFFAEVGDLNEYTHPRQIIKLAGLSLKENTSGKHKGKTTITKRGRKKLRALLFRVCMILVAKNSAFKALHAYYTQRPDNPLKKMQSLIALCNKLIRILFSIGKKQFEFSEDRMLKDIPHMTVMNETELAA

SEQ ID NO: 460218 - protein, 273 aa, unidentified
MATELYFGVDVSKDSLDVAIGAARDIVTFTNDQKGVDALVKKLSQINPALTVFESTGGYELLATSCLAEAGLAVVIVNPRQVCDFAKSAGILAKTDAIDARVIARFAEAVKPDVRQLKDRQTSELTALVTRRRQIIEMIVAETNRLRLANKRNKKDIEDHIRWLKKRLDKIETDIGKMIQSSPIWRCKDDILQSVPGIGPITSASLICDLPELGVLSPKMIAMLAGLAPLNCDSGKYKGRRRIWGGRAAVCSGLYMATDVICNQTPLRSTVHR

SEQ ID NO: 460219 - protein, 367 aa, unidentified
MTKSITVTVRQTRDFAEKKYTVGLDLGDRWSWYCVLDERGDVVFEHKLSTTPKALREVFGAMPHSRVALETGTHSPWVSRLMKELGHEVIVAQASKVRLIGESRKKDDRLDARTLARLARIDPELLGPIQHRSARAQADLIMIRARAGLVRARTALINAARGLTKSYGERLRGCNPRNMDAEKRKGLSVELQLALEPLLRAIESLSQQILDYNERIEQMAGDGYPEVARLRQVKGVGTLIALTYVLTLEDPQRFRKSREAGCYVGLQPGRRNSGSSTPQLHISKEGDPYLRTLLVQGAQHILGPFGVDSDLRRWGLKLAERGGKNGKKRAVIAVARKLAVLLHRLWVSGEAYEPLRNQRAVELPAAA

SEQ ID NO: 460220 - protein, 355 aa, unidentified
MNDGKYIGLDVHQATIVVAGMDSTGKLVMESILETEAATILQFFAGLRGTLSVTFEEGTWSAWLYDLLNPQLDKLVVCNPRKNALLKDGNKSDRSDARKLAELLRGNQLKPVYPGETGVRMLRELSRSYLTIVKDLSRVMNRLKAVYRSWAIPCAGRDVYYRRHRAQWLAKIREAGVRRRAERLYEQLDMLRHLRQQARRELLAESRKHAIATKLQKIPYLGPIRSALAVALIQTPHRFRTKRQLWAYSGLALETRISAEYRLVEGQVRRSKKLLSIGGLNKDHNHDLKGLFKGAATMASVRPGPFQDFYQAALAKGIKPTMARLTLARKIAAITLTLWKKGENFDAEKLKSQAA

SEQ ID NO: 460221 - protein, 368 aa, unidentified
MEQYSTDQIWVGLDVHQSSITAAILEGDSHDPEVVRMNSDLNTVRRLFRRLSKRGVPRSCYEASGAGYVLQRALGRDGFHCEVIAPSLIPRKPGDRRKTDRLDAIMLAKLYRSGHLTPVAVPNEEQEAVRQLVRARLAVQTHITRLKHRIVKILATHGYRFTGTKSNWTQKHRTWLRQMRLDLTGPLATVIGIHLEHLEYLETQQRSLDAEIERFSQSAPWRAGADALRCFRGIKTLTAMTILTEVGDIRRFRSPTQLMAYTGLVPSERSSGEVERRGPISRTGNRYLRRVLVESAWHYRHRAGANLLLTRRRQGQNPIVVAIAVKAQHRLQKKFWRLAEKKHTNKAVVAVARELTGFIWDALMTVAD

SEQ ID NO: 460222 - protein, 407 aa, unidentified
MKYQARAVYGGVDTHEDIHVAAVIDDVGTLLGCKSFPTTPLGLRGLERWLARHGQVQKVGVEGTGTYGLSLQRVLQQAGHEVVEVNRPNRQTRRAKGKSDIVDAEAAARAALAGQARAVPKGHDGIVEAIRVLLVAHTSTQQALQRLDGRLRALSVTAPEAIRIELTGLAGKRRASKAARLRPGKDSSDVATATRLTLRTLARQYLALDQDLREVTAQLEQLTTQANPGLRQVHGVGPVTAAQLLIAAGDNPDRLASDAAFAALCGASPVPASSGKTTAMRLNRGGDRRANSALHRIVLVRMSTGHEPTRDYLAKRTAQGMPRRSIIRCLKRYVAREIYSHLVNPKPAVRTDDLRARRKAIRQPMRLVATALGSSIIEISRMERGTNHNPDLAHRYRHWLHDQEAAS

SEQ ID NO: 460223 - protein, 437 aa, unidentified
MSYKYLQQKREYIMDKIVIGIDPSKHHHQALILGPDRLQIGKTFSFRHSSEGFQIKLWNYIQKYIDDLDKSNIVFAIEASTDVWQNLAYYLVRSGHLVVLVSPRITWSSRRLPDQSYSKTDPKDALVIAQAACSGYYSVFKIHTENQEALRTLAITYSKLKKNLTQTKARIRSVVSKYFPEFISILSPGTDTAGYLLRHYLHAEDYHNLDVQNEAPVILKISKQQHGVDTLVKLKKAAQKTIGIPRSGTEIEIDRIVLDAWLNTQDTIKSQLDVIEKRLHALAGQTDYFHILTSLKGISSTLAALFIAEVVDLYRYDHYKQIQKLAGLDIQMSQSGSYRGRGKISHMGNRRLRWIIYLMTRETVKYIPEVQIKYLKRQIKRVNYTKNVIACTSPLLQLIMALVRDRRVYGYREESIAQIVQLKNKYEKERKKRSRVA

SEQ ID NO: 460224 - protein, 342 aa, unidentified
MNAVHTVVGVDVAKNVFQAYWVVAETGEIRNMQIKRAKFLEHFAGRPRCLIGMEACGGAHHWARELSKHGHDVVLLPAKAVGAFVAGNKSDAIDARAIWTAAQQGGIKRVAVKSEAQQAVLALHRMRQQLVKVRTAQSNALRGLLMEYGEVFRQGRASLARGIAAALERIEQRLPRVVVESLMELWQRVGQIDGQVKQIERRLKSLLTEDRNAQRILQIPGVGMLTATAVSATMGQASAFKSGREFAAWLGLVPAHTGTGGKTRMLGISKRGDSYVRTLLIHGARSVFSSTKHPGPWLQKISQRRPLNVAVVALANKMARTIWALLAHGRTYQPDHVSRAST

SEQ ID NO: 460225 - protein, 341 aa, unidentified
MYYIGLDVHKKTISYCVKDASGQVHREGTVGATRNELDCWIRTLPQPRIMAMEATIFTGWIYDHLLPHAEQVKVAHPLMLRAIAAAKKKNDRIDAGKIADCLRCDFLPECHMASTEIRDRRRTLRYRHLLVRQMVQMKNRISGLLMETGVSHNKQRLHKVGYFGELLSSNAEVQENIRPLLRLSRETIVRCQRTEYALVSSLQRDPLLAARLKRLRSVPGVGPITALTWALEVGDVSRFRSVKQAISYCGLCGEEKSSADKVLRTPISKQRNKHIQSVLVEAAKLAPRQNHELALIHEREKQKGNRNRATLAVARKMVGYLLAVDRREREFVPAEGRGTAA

SEQ ID NO: 460226 - protein, 361 aa, unidentified
MKKIAYVGIDYHSKTLTCAVLIENEKDFYNTIRFKNNDKIIKKYMEKLSDKYFIKTCYEASCNGYCFQRKMQSWGFHCDVIAPSLIPKKPGDRRKNDFRDAQNLARHYAHGMLAIVHPPTEKEESVRHLIRCRMAMRKNEKSVKQQINSLLLTQDLRWPKTKWTGQHRVWLKKLRLRDKHSQQVLDELLGLLDYLGSRIQYLDKEIEGVAQSELYAPSVKKLKAFKGIQTLTAMLLIAEITDFGRFPNPRALMAFLGLIPSEDSSDDVKKPGAITKAGNSRCRTQLIESVIHYIKKPIISIRMKNDLKEIDSHSANIAIKCMKRLHKRYWFLVMRGKNSNKAKTAIAREFVGFIWAMMQPV

SEQ ID NO: 460227 - protein, 395 aa, unidentified
MFIVGIDIAKRSHEAIIIAEDGQVVRKVFSFRNNCTGYNLLLEQVRRLTLVKSQIVFAMESTAHYWLALYARLLKDGYAVMVLNPIQSHSLRELYIRKAKTDARDSLIIADLVRFGRCKASNVPQDKILALRELCRSRAYLVDMAADLKRKLIALLDRIFPEYESLFDSVFSKASIAVLSKYSTPQKVKNANLRKLTDILMESSNGHFGEWKAHQLKEAACSSFGIDDSGGVYSMLLGMFLEQILSLTAQADSLEEQISVFFQEFNNPLTSIPGIGTILAATILSEIGDITRFSSADKLLAYAGLDPSVKQSGEFKSNQNRMSKRGSPYLRRAIWLASTVSVHRDPMFQTYYEKKISEGLHYMNVIGHVSRKMTAVIFAVLRDGQPYQPILQSTG

SEQ ID NO: 460228 - protein, 423 aa, unidentified
MEVMHECAAGLDVHKDSVVACVRGMREGKAKREVRGFATTTEELEALRDWLTSCGCALVAMEATGVYWMPIWKILSEGAFTLIVANAAHIKAVPGRKTDMNDATWIADLAAFGLIKASFVPDEAFQELRTLMRTRKQLVREQTGHVQRIQKTLTEANIRLDSVISDVMGANGRRLIEAMIEGVRNPRQLAALADRRLKASAKELYDALHGRLTEHHRFLLKLHLGQYDALGATIRTLDAEVEARVTRMDREVTADKASFSGLIDLLVSIPGVSQVSALTILSEIGRDMSRFPTCGHLVAWAGLCPSQNESAGKRKRSRLRKGSPWLKTMLVQCAWAAKRAKNSYYKAQFFRLKARRGPQKAICAVAASILTAIFHMLNDGVAHNDLGVAYFDARKPEAKVQRLVRQIKKLGYEAALTPIAKAA

SEQ ID NO: 460229 - protein, 367 aa, unidentified
MPNPVSLDERSNTVQSMLSGQVDHVIGVDTHRDTITAAILDARHGGVVEQRTYGTQRMNYRHALRWAKQHAPDRRAWAVEGAGSYGSGLTTYLLGEGETVYEIDRPARLARRNGAKNDEIDAVRAGREALAREHLAMPRARGQREAMRTLVITRNGAIHARTEAISHLKSLIVTAPEGLRDQLRGQTTVHQIDRCARLRVRPEHSLEHRGTIRALRAAARRVQFLEAEAGELELTIRELVEANCPTLLDLHGIGVITAAQVYIAWSHPGRIRSEAAFASLAGAAPIPASSGQTIRYRLNRGGDRQLNRALHTIVLTRLRTDEQTKAYAAKRTAEGKTPREIKRCLKRAIARQLYRHLSANTQHPTAA

SEQ ID NO: 460230 - protein, 369 aa, unidentified
MKKTIKNIGLDVHKNSISIGIADDGRDGEVRYYGKIDNDINQLDKVIRKLISKGAVLRFVYEAGPCGYTIYRYLTKNDMDCVVVAPSKIPQQSGNRLKNDKRDCLSLARLHRAGELTSVYVPTEEDEALRDLVRAREDATRALRTAKQQFGAFLLRHDFVYSGKTKWTKAHFNWLSDIAMPHPAQQIVFQEYIDTVENCSNRVQRLTEQVRQQSRQSHLYELIRALQSMRGISLIVAATIAAELGDLTRFENPGKLMAFLGLIPSEHSSGERVKKGSITKTGNKHVRKALVEAAHAYRFPARKSRAIRKRQEELPKGVVDISWKAQCRLCTRYQYLTAKGKKANVAKTAIAREIAGFSWAIAKELERAA

SEQ ID NO: 460231 - protein, 348 aa, unidentified
MSSLTEPAEPVTGGIDTHKDLNVAAVVDRVGRILGTKEFSTTSAGHRALLRWLRRHGDVVRVGIEGTGAYGAGIARFLASQDIEIVEVDRPNRQLRRRRGKSDPVDAEAAARAALNGEATGTPKTRSGNVEAIRALRVARRSALKARGQASNQLYALVLTAPDELRARLRGLPLGQLVETAARFRPGARNAALTGTKTAMTSIARRWQFLSSEIRDLDAQLEELVGQTAPELVARHGVGTDTAGALLVAVGDNPHRLRSEASFAALCGVTPIEASSGQHQRHRLNRGGDRTANNALWRIVLVRMAHDSKTRDYVLRRTTEGRSKKEIIRCLKRYVAREIYPDLLSLQQ

SEQ ID NO: 460232 - protein, 412 aa, unidentified
MISRVNRACGCDVHKATIAATILSADSSMESRQFSTHVTGLLNLRTWIEDHNVERVLMESTGIYWIPVHAILEGIAEVHLVNPLLIKYLPGRKTDLQDSAWLAEIALNGLYKPSYIPPQPIRELRDLTRTHRKLVEERTRHKNRIHKLLVKNGIRIAGVLSSIFGPSGIKFIEGLTQGKEIPEILQSLKNRRIQKKSAELERAICGRLSENDMYIIQQSLAAIRFLNGQVTEYAARIHGELQHYQSDLAILMSIPGIGFTIGAVLIAEIGDINQFSNPKQLVSWAGLAPAVYESAGKTRYGHITKRGSKHLRTALIEAAHVIARGGPKHLKEFFQRIRRKKGYKIAIVALARKLLTIIHHLLTHQEFFESEEKPKGKSRLPRSMPVQQYDVQQMIEILINAGYTVGNLKEPG

SEQ ID NO: 460233 - protein, 347 aa, unidentified
MLALHQDLDVVIGVDTHKDTHTAAAVSATGAVMEHLTVPADPAGYRQLIAFGRRHGATLWAIEGTGSFGAGLTTALLSRCARIVEVDRPQRPARRGGVKSDDIDAVRAARQALAGVGLSEPRRRGDREAIRVLLATRAQAVTFRTRAISALHALVASAPDGLRERLRTLPLGQLLQTCAGLRDSSRRSVEESATVLAMRSTARRALACEREAAELEVQLDRLVRRLAPELLGKLGIGPVVAGQVIASWSHHGRVRSEAAFAKLGGAAPIEASSGIITRHRLNRSGDRQLNRALHTIVLVRMRQDGATKDYVQRRLAQGKTIRDIKRCLKRYIARQLFRQLEALSSTT

SEQ ID NO: 460234 - protein, 347 aa, unidentified
MELHTIGIDLGKTIFHLVGLNRVGEVVVHKKLSRPQLLRFTANLHVELIGMEACGGAHFLGRALREQGHEVRLIPAQYVKPYVKTNKSDYIDAEAIAEAVGRPTMRFVPIKTDQQLDLQSLHRVRERWVMRRTAVINQTRSLLLERGITLRKGRCHLETALPGIVEDATAKLSSALRILLTQMKRELVRRIEEADAGIKEVAQQNEACRRLATIPGVGPITATALIAAIGNGAAFHKGREFAAWIGVVPREYSTGGKQKLLGISKRGNAYLRRLFVQGARSVMMHRHKQSSGLSQWLEKLSVHKHHNIALVALANKLARMAWAVLATGQVYRPPLVTHTGSPRLVSI

SEQ ID NO: 460235 - protein, 351 aa, unidentified
MQEYIAFDSHKRYTWVDRQDHSTGKSSGYRLEHAPGAVRNYLSSCEPGTAVAVEATGNWYWIIDEIEQAGLQPLLVNPRKAKLMMGQTNKTDKLDAQGLNRLQRNDTLPTVWIPPGKLRDLRELTRTRLVLVAERTRLKNRLSATLAKWGTPASEYSDPYGKSGRAELEKHLEGLPEQTRWVSQQLLAQLDFIGAQVKQLEARLDDLVEVTEEMQWLMSMPGVGVILAATIALEIGDVKRFPSAMHLASYSGTTPRVHASGGKVRYGSLRSDVNRYLKWAFAEAGNSVAVNHLRRPDAHVSQLYRRLRARKGHPKAIGAVARHLSEAAFHVLQKKETYRDPSFGRGRTSQV

SEQ ID NO: 460236 - protein, 420 aa, unidentified
MEEITEEPGRLTERVAALDIGKASLTACIRVPHEDKPGARRQEVRTYATTTPALLDLRDWLTCQGVTLVVMEATSAYWKPPFYLLEDDIACQVVNARDVKNVPGRPKTDKLDSVWLAKLAERGMLRASFIPSRPQRQLRDLTRYRRTLTQERTREKQRAEKLLEDAQIKLSVVISDIFGASGRAMLDALIAGQASPHELAALARGKMRAKTSALQEALTGHFTGHHAFLLGMMLDRIDALTAQIATLTTAIEQAIAPLAAQVAQLDEIPGIGVTAAQDLLAEIGADMSRFPTPGHLVSWAKFAPRARQSAGRAKAATTGQGNPWLGGTLGEAATSAARTKTFLASRYKRIVRRRGKQRALVAIGNSILTIAWHLLSDPAAHFTDLGPDWHDRLAPLRRKRQLIAELERLSGKKVTLQDTV

SEQ ID NO: 460237 - protein, 350 aa, unidentified
MRHFIGCDAHKKYSVFVAIDEEGNVKPAVRVNHEREQYRAFLKGLPAGSPIAVETIGNWYWIVDEMRDAGHEPRLAHARKAKLMMGEIDKTDKLDSRGLATLLRTGTLPEVWIASREVRDQRELLRLRMTLVAMEVRLKNRVHAILGKYAIELNVKDVFSKEGRRLLLGSLKELPVQTAEVVRQQMELLESTEKQRQDAEQQLRTIIKERWDVQLLRTLPGVGWILGTVIAFEIGDIGRFDRAAELASYAGTVPRVHSSGGKTWHGRVHPDVNRYLKCAFVEAANVTVMHQKRLSHTHVVTLYRRLRQRKGHAKAATAVARHLAEAAFWVLKQQQPYKEPQGCRVSSTHR

SEQ ID NO: 460238 - protein, 474 aa, unidentified
MVMHVDAGDKDVLLMSLKGLVSQNNQEDVVVQGSGLSRGDKRRNGQLARLRELVPVDNAILGIDLADTKQAVVVTDHDSRVLARGRVKAKAWELGPVLDWARQVAHARGFTDVTVGCEPTGHRWRVLDQLAAQQNMALVCVQPLLVGQARQREDYTSDKRDDKDAVLIARLVSQLNCYAPERAEETWAQLRQLGARREELITQATRCVQQLRDLLECAWPAVLDAAASPFDSTNWCAALAVVLERCDGDPRRLARRGRDRFSGAVRRELPRWGGQRLWRPIVGAVFSALSDPAGVLAQRRGALQRARWVLDDWRLVKIRRAEVETHMVTLLDELGLTELVTSIPGVSAVGAAAILAETGDPTRFDSPRAMVKHAGLCPRENTSGTYTGRSRISGRGRPRLRAAAWRAVWGALPTNPVMATRYRHLTTRKANPLKDGQARAALAAALLRWIHVIVTQHVTWDAALAGAGALAAAA

SEQ ID NO: 460239 - protein, 443 aa, unidentified
MINPDAAGIDIGHREHWCAVPTGRSDNPVRRFGTFTEDLEKLADWLQECGIKTVAMESTGVYWIPAFQILERRGFEVRLVNARAVKNVSGRKTDVLDCQWLQRLHSYGLLNASFRPTDEMCVLRSYLRYRDELVCARSVQCQHMQKALQQMNVQLHQVLSDITGVSGLRMIEAILAGERDAEKLANLADRRVRASKATIQKALKGDYRSEHMFVLKVAFELHDTYEKKIHACDEQVIAEMAKLPARIDPKQKPLPPRKPGRARVCDMVAGKDIREELYRWTGVDLTAIEGIGVLSAQVILSEIGTDMDRWRTEKHFTSWLGLCPDNRISGGKILSSHTRHVINPVADALRMAATTLERNKSALGAFYRRMKGRLGPPSAITATAHKLARLVYRLLKHGDAYVRQGMEVYEQKHRERLIHNLKKTAASLGFQLTGKEQVTQGVS

SEQ ID NO: 460240 - protein, 334 aa, unidentified
MEQITTAGIDLAKRVFALHGVDGAGRVSLRKTVRREQLMQTVAALPPCLIGMEACSGAHEWARRFQELGHTVRLMAPVFVTPYRKSGKNDGNDAEAICEAVSRPNMRFVPVKSAEQQAILALHRVRQGWIEERTATINRLRAVLTEFGVVLPNRAQYVRRGAMVAAEGLPALARRALEDLRSHLGTLDERIAAYDRELQAQARQSEAAQRLMQIRGIGPITAVAIVATVGNARDFRSGRQFAAWLGLTPRQHSSGGKQRLGHISRRGDAYLRCLLVQGARSVLLTATRHSDRLSRWVLSVQARRGYHKALVATAAKNARIAWALLSKNQTLRAA

SEQ ID NO: 460241 - protein, 427 aa, unidentified
METVFEVMNACCAFLDIHKETVEATVRILQGQRVRQETRRWSTTTGQIQAMADWLATHGVTHAGMESTGVFWKPIFNILETRFTVILTNPAHMKQVPGRKSDLRDSQWGAQLLQAGLLRGSFIPPRWQRELRDYTRYRSQLQAEQTRVANRLHKVLEDANIKLGSVATDILGLSGRAMIHALMEGEQDAATLAEMAQGKLRTRRPELKLALEGRVTPHHRRMLRMLWKELAAVEECIADVDREIQEVTQPYTSQIEQMDPVPGIDRRTAEVVLAEVGANVDPFPSDQDLASWAGMCPGNEESAGKRRTGRTTKGNRWLRAALVQAAWAASHTKRSYLGAQYRRLAGRRGKKRALVAVGHSILVILYHLLKDDRPYSDLGRDFFDRMNHDRLIRYYSRRLAELSQKVTVEPLPEVIPGEGMVNVPSPC

SEQ ID NO: 460242 - protein, 345 aa, unidentified
MEIIRVGVDLAKNVFQVHGVDGREQPVWQGKYKRNRWLEEVIKRVAPGAEVGMEACAGAHHWARRLQAQGYRVKLMAPQFVKPYVKSNKTDRNDAAAICEAMSRPSMRFVEVKSVEQQDIQAVHRVRTELVAQRTSKANQIRGLIGEYGLVAPVSLGALRRALPDWLEDAENSLSDRFRRLLAGLADDLRQLDARIADLDDEIASIADSDPAVQRLLELRGVGPITATALVAALGTGNAYRRGRDFSVSLGLTPKQYSSGGKERLLGISKRGDAYLRQLLVHGARSVIRTAADKDDSLSRWLQKLLARRHANVVAVALASKTARMAWALLHYDAVYQPSRAAATV

SEQ ID NO: 460243 - protein, 385 aa, unidentified
MNQTSCFATSTHALHCALELSKKSWLLAIQFPDREQPSVYSIKGGDTEKLMAKLTAARDCWAKVSGSLPVITLCYEVGYDAFWLARFLKARGIECLVIDPGSLQVNRRGRRVKTDRVDVKMLLRTLIAWCRGERHVWSPVRIPSVEEEDLRRSHRERSRLVRERTAHINRIKGLLFAQGIRDVNVKSQYKTLAVDKLLTADGHRLQPRLGSEIARELQRLAMVQEQIAEIERERDTAPTPCEATERKRQLLLQLKSIGPAISALLSREVYYRQFANRRQVGSFLGLTPSPYSSGEEERCQGISRAGSGQVRAIMIETAWLWIRHQPKSALTRWFVERTAGQSTRMRKIMIVAVARKLAIALWRYVEQGLVPQGAILNPPTTGRAR

SEQ ID NO: 460244 - protein, 312 aa, unidentified
MDTKKVEFEQVIERGCGIDVHKSLLVATVRGTGLKEETREYGAFTEDIESMSGWLKECKITHIAMESTGVYWKPVFNILEEDFEIILVNARHIKNVPGHKTDKKDSRWIAKLLLSGLLKGSFIPKQPIRELRDMTRYKRKIVEQISSEKNRIQKILEDGNIKLSSVVSNMSGAVATRIIEDLIAGEEDITKLVAHRHGKMQVSETDLAKSLVGNLTAHHRQMLQLIKQSIKDKELLIANLDKLIDEHLKANELELDRDLLSTIPGVGKEGAEYIIAEIGNDMSVFEDEQHLSSWAGMSPGNNESAGKKKVHE

SEQ ID NO: 460245 - protein, 412 aa, unidentified
MQVLYERCCGLDVHKDTVVACLIVVGPDGNPIKVIRTFTTMTAELKRLAQWLKEQGVTHVAMESTGVYWKPIYNILEGLFEIVVVNPTSIKKLKGKTDVTDAEWIADLLRHGLLRGSFIPSAQQRVLRDLTRYRTQLTDERTREVNRLQKVLEDANLKLASVATDIMGVSGRAILAQLIQGQTDPATLAELAKGRLREKRELLEQALSGTLKPHHRFMLIQHLGHIDYLDEALAKLDAEVAEQMRPFQAAVDRWDQLPGINQRVAQVIVAEAGADLKQFAKAEHLASWAAMCPGNHESGGKCKSGRTNKGNVWLRRALIEASHGAARTKKSYFSAMYHHLAGRRGKKRALVAVGHSLLVTGYCMITRQVDYKDLGNNYFDERNKEAVKRRMVKRLEQLGYQVELKPAMPTPA

SEQ ID NO: 460246 - protein, 454 aa, unidentified
MVMIMEHGMTQQDKPKKRGPRLEVTNPNAAGIDIGSASHYVAVPADRDDEPVREFKSFTVDVHKLADWLEACGVDTVAMESTGVYWIPVYEILERRGFTVLLVNARHVKNVAGRKSDVLDCQWLQQLHSYGLLRGAFRPDDQICVLRSLNRQRGMLLRMQARHIQHMQKALVQMNIQLANVISDVVGETGQKILRAIVAGERNPYVLAGMRNVRIKASEEEIVQSLRGNWRDEHVFALKQALELFDEYAKKVADCDQLMEQQMVMLHKHDGVPSKARKQSGRNKPKFDLRTRLYQMCGVDLTRIDGIDVGTAMTVLAEVGVDMSKFPTVKHFAAWLGLCPGTKISGGKVLGSKTQKCANKTAQALRQAASCLKNSQSALGAYYRRMCAKMDKPKAITAAAHKLARLIYTMITKGEEYVDQGQTYYEERYRQRVEINLRRKAESLGLRLVPMEAA

SEQ ID NO: 460247 - protein, 362 aa, unidentified
MLESTTIIAFDQHAATTVAAVLRPADRTAAVHPLTSDVPTIQRLVARVGQDGPVRCCYEAGPCGFELQRALTAQGIPCDVIAPALIPRRPGDRIKTDRRDAGQLAILYRAGALTAIHIPSEQEEAVRDLLRCREDIRADLLRARHRLSKFLLRHGRRFTATKRAWSRAHDRWLRAQTWPLPALDQTYRAYVRTGDEAVARLQTVEADLRALLDLEPLRTRVVRLRCFRGIDDLTALTIAAELGDPRRFATAPSIMAYVGLVPSEHSSGAKRARGGITKTGNAHLRRVLVEAAWHYRHHPFIGAALRTRQHGAPADVMARAWAAQQRLYRRYHRLASRGKPKQHVVTAVARELTGFVWSALTL

SEQ ID NO: 460248 - protein, 409 aa, unidentified
MDQLIERCCGLDVHRDTIAACVRVPGPNGKRQHEVRTFRTTAVELLALRDWLEAHAVTHIAMESTGVYWKPVFYVLEEAFTCLLVNAAHIKQVPGRKTDVKDCMWIAQCLEHGLLRGSFVPPAAIREIRDLTRHRKVLIQERTRAANRVHKLLEDAGIKLASVATNILGVSGRAMLEALVHGTTDAEVLADLARGKLRKKLPALRQALAGRFRPHHAFLVSQLLTHVDYLDEAIATVSEEVEGRLAPFAAQLTQLDTIPGINKRTAEVIIAELGVDMSSFPSDRHLASWAGICPGNNESAGKHKAGKTRKGNRWLRMTLIEAAAAATRTKDSALQARYRRVMRHRGHKKAVVAVAHAMLRAVYHLLAEGTTYREPGAAYYDRRHTHRVTRRAIQLLERQGYRVVLEPAA

SEQ ID NO: 460249 - protein, 441 aa, unidentified
MAKSKKRAESSELPVEEKKRGRRKAETSPAPTVEVRCERCAGIDVHKEQITVCLVVGDRKEIREYGTMTGDILECMDWLLEEGCEVALMESTSSYWKPIYNLFEASEIKIKVANAFSVKQISGRRTDVQSSEWLATLVRFDLVKTSYIPKRDQRELRELVRYRNSLVQHRASEVNRIHKVLEGANIKLSSVVSDMQGVTAISILRLMATGEVDPVILSLEAKGSLRSKVPQLQKALQGSIGQHQQKMLFLQLEHYDHLCGLIMELDEEIKKKLKSEDEVIDRLCAMPGVARRSAERILAETGTDMAHFPSADHLASWAGLAPGANESAGVKKKAPTLPGNTHLRSILIECAWAATKAKQNFYRSRYWRLAPRCGKKRAATGVARSMLVTIYHMLKNNTPYVELGADYFTRMDAEKIAKRSLRNLESLGYMVSVTPPQPVAG

SEQ ID NO: 460250 - protein, 379 aa, unidentified
MRIIGCDLHARQQTLAMLDTETGEVVNRTLLHEGTAVREFYSQLPRPVVVGIEAIGPMQWFLDLLQELEIECQVGDASKIRAAEPRKQKHDRRDAELILKLLVEKRFPAIWLPSKELLDLRALLLHRHQWVRLRTRIQNVLQAIALANGLRRGPSLWSYDGQAKIAFLPLPPHASSRRSALQAMYRRMQEEIENLTEQIAEQARQRCGAQLLLTHPGVGPVTALATDVFLGDAQRFADGKALASYVGLIPREYSSGARQRLGAVTKQGNPLLRFLWNEAGAHAARRDPELQRFYRRKLVQKGLGKARVAVARKLGIRLWIMLRDQIDYQEFCRRGQSTAVMPVRGCLKRGLVRIVTVRLIRLPASLLAKGVRITHHGPS

SEQ ID NO: 460251 - protein, 343 aa, unidentified
MNITTIGLDLAKSVFHVVCFNKQFKEVKKRMLRRNQVLQFFTQLPPCRISMEACAGSHYWGRELRIMGHDVKLIPPQHVKPYLRGNKNDYNDARAIAEASTRPSMTFVAIKTTEEQDMQAIHRMRAQCIRDRTALSNSTRGLLGEYGIVLSRGLSTLRKSIHGLLEDAENGLSDRFRNLLSRRYDQLVELDEHIAFYTNELEILSKQDDACQRLQTVPGFGPIVSSAFRSAIGNGQAYARGRDASASLGLVPRQHSSGGRNVLLGISKRGDRYLRSLLVHGARAVVIQAARKDDPLSRWINRIRAERGWNKAVVAMANKMARIGWVILRHNTIYQPASEPSVR

SEQ ID NO: 460252 - protein, 327 aa, unidentified
MNAIGVDVDSKLLVCRIQRGSQRQPIAEFDNNPIGFGKFIRWATKRRQPARVTMEATGVYSLPFALSLHQVPGIEVSVVNPRAIKNFAVARMQRGKTDALDATAILEYNLRMDFRPWCPPREELLELQHITRRVVQLNKELTRERNRHKAASRLGVIGRVVANDTAVNMRHLQRRIDAMEQAAWEIVSHDPLLKPKLDLLVSITGIARKTGPRILAELAVLPDDMIGPQWVAHAGLDPRPNESGTSTKKPRRISKAGNRYIREALFFPALVACQKDKHVKAFYEKLLAKGKKPMQAIVAIMRKLLLAIWGMFKSGTTWDGAKFYKIA

SEQ ID NO: 460253 - protein, 348 aa, unidentified
MNHYAGIDVSLECSSVCVVDASGKIVGESRVASEPEALISWLHALGIPLARIGLEAGPLSQWLYAAMQRAGLAVELLETRHVHDAFKAMPVKSDRNDARGIAQLMRLGWFRPVHCKSMGAQETRAMLTARKLVQSKLRDIENSLRGILRGFGLKVGKTTKRSFTGRIQELVADHPNLETIAEALLAVHAVLLREFNGFEKRVRIMARSNVQAKLLMTTPAVGPIVGLTYACAIDDPGRFKSSKAAGPHFGFTPRKYQSGETDRTGRISKIGDASVRAALYQAAHIILTKPIRGCPELKSWAMRLAKRAGMSKAKVALARKLAVILHRMLADGKPFNPAANAKTMAAAA

SEQ ID NO: 460254 - protein, 386 aa, unidentified
MDQATPSTASANTLHCALELSKKSWLLAIQFPDREQPSLYPIAGGDAEGLMAKLTAARDRWAKTSGALPTITLCYEVGYDAFWLARFLKTRGIECLVIDPGSLQVSRRGRRVKTYRVDVKTLLRTLIAWCRGERHVWSVVRIPSIDEEDLRRSHRERSRLVRERTAHINRIKGLLFAQGIRGINVKSRYKTLAVDKLVTGDDHRLPPRLAGEITREIQRLAMVQEQIAEIERERDAAPTTCEATERKRDLLSQLKSVGPTISAFLSREVYYRQFANQRQVGSFLGLTPSPYDSGEEERCQGISRAGSGHARAIMIEAAWLWIKHQPKSALTRWFVKRTAGQSKRVRKIMIVAVARKLAIALWRYVELGLVPQGAIINPPMTRKARS

SEQ ID NO: 460255 - protein, 389 aa, unidentified
MPSVSERPEAPTAIQTHLAASFVSLELSRSIWLITSLSPGSGEKMSKHSVRAGDVAALLARFSELKRKASERTGKSFPIVVIQEAGLDGFWLHRVLQSEGVESHVVDPSSIATSRRRRRAKTDRIDGEALLRALLAYKRGEPRVCAMVKAPTPEEEDRRRLCRERKVLIAERVKHVNRVKGLLFSQGISGYEPLRRDRRQRLDELTTGDGRPLPVHLKTQIRRELDRLELLLDQIKEAETERDALLAAPQPAAPAPTGRMLLEFKGIGAELAAVLWLEALFRHFDNRRQLASYAGLAPTPWQSGSVDHEQGVSKAGNPRLRTSLIQLAWLWLRHQPQSALTLWFKERVSGNGGHFKKSTIVALARKLLVALWKYVTAGVVIDGAVMKDA

SEQ ID NO: 460256 - protein, 355 aa, unidentified
MGWREDRIAGVDTHKDTLAVAVIDHAGRVVRQLELPNQDSGYARLLALLGSHNVVRVGMEGSGNYGWPAAIYLLEREVSVVDVPPLMTSRERLSRPGQGKTDPVDAVAIARITAREDALPPVRPMTGHAADLRVLTEYRDQLVTERTATANRVHTDLLWLRPGYQHQLPHLTNISHLHAALELLDGDDSVRAAVTRARLDRMLTLTEQLGELRTQIDALVRATSSTLPELYGVGPVVAATIIGHVVDVRRYPTRHHFATANGTAPIPASSGRTIRHRLNRGGNRQLNRAIYTIAITQIRADTEGRAYYQRKRAEGKTSREALRCLKRRLSDLIYRTLRTDLANAAQLSPTLSIAA

SEQ ID NO: 460257 - protein, 385 aa, unidentified
MPDVSSNASAKTTHTFVALDVHKNAITAGVLPAEGGQVELVQLEHSEKAVRRFVKRLGDPSRLAVCYEAGPCGYELYRLLASIGVACDIVAPSLTPVRPGDRVKTDRRDARKLVRLYRAGELTFVYPPSPEQEGLRDLVRCRDDLRRARTAARHRVGKQLLRYGRVYREGKKSWTLQHRAWVRRQRLDDPLAQAAFEHMLCHLDAIDAQIAAVDRQLDEIARSEPRCDPVRWLCCFRGISTLTALGLLAEIGDFHRFGSPRDLMSFLGLTVSEYSSGERRQRGQTTKTGNRHARRLLIEAAWHYQHPPRLSARVKANDGLVPPEALARAWQAQIRLHDRHRHLTRKGKLANVATVAVARELCGFLWATMTRQPLREQPQEVIRAA

SEQ ID NO: 460258 - protein, 322 aa, unidentified
MAMLSFCGVDVSKDRLDVLVLPEQQSFSVSNDVAGWAEVVARLRGFAIAAIGLEASGGYERGAMRALLAAGLPACQVNPFKLRQFARASGVLAKNDPLDTRMIASFVATMPTRPAQTRPLAIERLAEVLAVRRQFNAEKVAAENASRLLEDAMLQRLSRRRIARLVADIGSLDAHLVEIVDTDAALAHRYRLLTSMPGVGLVLACTLIALLPELGVMSRKQVAALVGVAPYAFESGKFKGRRCIWGGRAPVREVLYMAAMSAGNWNPVLKQFRKRLQGAGKLPKVIIVAVMRKMITMLNAMVRDDVAWADHLHGRRTVPTAC

SEQ ID NO: 460259 - protein, 338 aa, unidentified
MIVIGVDVHKHSLTAVAVDEAGRMLDEKTVTAADGELVAWASGLAGERLWALEDCRQLTRALERQLLAVGEQLVRVPPKLMAPERRAGRARGKSDPIDALAVARAALREPRLSRPRPDEQPFRELKLLVDHRDDLVDERRRAQQRLRWHLHQLDPSFVVPARRLDRLTHLERVARWLARREQEAQVRVARELVARCRSLTRAIVELDRELEQRTAETAPALLELPGCAALTAAKLLAEVGPIGRFETDAQLARHSGVAPLEASSGRVQRHRLDRGGNRQLNCALYRIAITQARYHPAARAYLERKQAEGKSRREAIRCLKRQLVRVVFNTLKASPALT

SEQ ID NO: 460260 - protein, 426 aa, unidentified
MTKLQPMRSDRLLVAIDISKHRHEVLIAIPGKTRRRRLVIKNTLEDFERLSATLAAYDFPVQVGFEATGNYHRALAHHLGRAGFELKLISSVSLARTREALHNSWDKNDPKDAQVILHMLEIGAVQFFHDPLVSGIHDIQELSKTHEMVSRAKTQLWHRVLTHYLPLYWPEAERFHRSSRTDWFLAFLEMFPSPHIISAMTIAEFTKAAWTVVGRRVSKTLLLSDIYETAVSSVGLHVSPDSDALRMFRLVLDEGRGLIKQRNIIEDRAVELLGHHPDYQLLTTIPGIGPINAMTVLAEAGDLRRFGHHRQFLKFCGMDLASIQSGMFRGQTKISKYGNARLRRTFWMAGQSAVLKRTNSFRDKFERYISKDRDNAHLRRKAYTAIAAKMARTAHAVIKHGEPYRPFFEGASPGGRTSLCSCRGGA

SEQ ID NO: 460261 - protein, 343 aa, unidentified
MEHFAGLDVSVKDTSVCIVDDTGRIVREVKVASEPEALLQVLANPAYQFKRIGLEAGPLSQWLFSALAEAGLPVICVETRHMRAVLKAQINKTDRNDARGMALMMRAGLYRPVHVKTLRSQKLRMLLTHRKLLQSKAIAIDNELRGTLRNFGLKVGIVGTVKFEARIKELVENQPDLAVLVEPLLIVRRTLREQIAILHRRLLALVRDDEVCRRLMSIPGVGPVVALTYRATVDVPSRFRTSKAVGASFGLTPAKYQSGEINRTGAISKCGDEMMRVMLYEAAHIMLTRTTKWSWLKAWAMKIARHRGIKKATVALARRLAVIMHRIWVDGTEFRWTRETAAA

SEQ ID NO: 460262 - protein, 347 aa, unidentified
MIIIGCDLHTRSEQIAMLNTETGELEERRLEHEDGEARRFYAGLKEPALVGIESTGYTRWFTEMLAELGHELVVGEAGKIRAKETRKQKHDRRDAEHILNLLLRGDFPKIWLPSAEERDVRVLLEHRHQLVELRTRAQNGLQAIALSYGLRRRRRLWSERGQEELKKLPLREGMERRRADLLRLVRQLDTWVQELDRRIEPEAAQREEAQRLMTHPGVGPQTALATVLVLGPVERFPDDRHLTSYLGLIPQEDSSAGRQRFGHLTKQGNRLLRWLLVEAAQTASRYDPRLARAYRRLTFRKGRAIAKVAIARKLAIRLYIMLRDKIDYAEFCRRGSHAGMLEDVALV

SEQ ID NO: 460263 - protein, 402 aa, unidentified
MPRWVGRAIELDVHREFCEVAICEDGQMRSAGRVPATPDRIRTLAESLLASDRVALEVTGSCWEVARILEPHVNRVIVVSPDDTGITSARAKTDKLDARTLASLLWRGELEAVWRPDERCRILRRRLARREQLVRSRSRAKNEIHASLHRRLQAKPPCSDLFGAKGRAWLAGLELPLEERESVDAGMRHIEFLDAEIAAVEKLIAKQALSWPEIRRLMTVPGVNVICAASFIAAVGDPFRFLTSRKLVAYLGLDPRVKQSGDEPARSGRISKRGSASARWALVEAAWTTVLQPGPLHAFYTRIKARRGHGKAVVATARKLAVLFWCMLTRKEDYAHQQPSLTRKKLRRLEITAGAPKYTRRATGIWSTNDPMRTAELELARQAETSYKRTVQDQQAGAPART

SEQ ID NO: 460264 - protein, 347 aa, unidentified
MRFYTQQHRYYCGIDLHTKTMYLCILDQDGNIQLHRNMTCNADSFLKAVALYRESLVVAVECIFTWYWLADLCAREGIPFVLGHALYMKAIHGGKAKNDKIDAHKIAVLLRGGMLPMAYVYPAQMRSTRDLLRRRMHLMHRRSELLVHIQNTNSQYCLPQFGKKIAYKANRQGVAEHFTDSSVSKSVEMDLSLIDHYDQLLTEVELYITQTAKVHDVNTFYRLRSVPGIGKILALVLLYEIHDIARFPTVQDFVSYARLVKCAQESAGQRHGFSGAKIGNVHLKWAFSEAAVLLLRRNPPAQKYLDRLTAKHGKAKALSILAHKLGRAVYYMLRKEQAFDMNRFLSS

SEQ ID NO: 460265 - protein, 357 aa, unidentified
MVVAVQYRRLPLKLNVMEQMYGIDLGMSSFEVSFFDVQGKLHQLKQVRNTVEGIARFLSLLPANACLCAEYTGVYGNLLLHMCTRAGVRICFVPGYEIKHSLGLQRGKSDEVDACRIREYAERFTDRLRDCFAPSEEMEELQELYRTRRQLVESRKRISTLNRGDNCKVMVSLAAARARQSLLDELDKQIKGLDAEIDHLIKSNPEQEKNYRILTSVLGVGPVTACDLIIKTENFQKLDTAKRCAAYAGIAPYPKESGKMKCNNHSSPLGDKHLKSLLFLCARSAKDHNKEILLYFIQKYQIEKKPYYLVMNNVANKLLRILYSLIHKGELYDRDYIQIDPRNYQKIRKERIVKLAS

SEQ ID NO: 460266 - protein, 350 aa, unidentified
MLIIGCDFHAGFQQVAMFDRTSGEISRRRLQHPEEARAFYAALPGPVLVGLEACGKTQWFEQMLAQMRHELWIGNAAQIRALCLRQQKTDRRDAEHILELLLTGRFPRLWVPTPAERDVRQLLVHRHQRVRMRTQVKNQLQAIALNQGLQKKRKLWTQAGRAELEALPLLPFAAQRRQQLLAALDRLNAEIGELDRQVAEQAERRPEAVRLMSHPGVGPNTALGFVLTIGEVSRFPRARQVASYLGLIPREHSSGGKQRLGHISKQGSAFMRFLLVEAGQSAARGDAQLGRLYRRLAVRAGRSKAKVAVARKLAVRLYWMLRHEWNYAQLCRSFVQGSPSHPVVEVRPTA

SEQ ID NO: 460267 - protein, 383 aa, unidentified
MTQETTRNAQNNISASTLFLAFELGTSEWKLGFSIGLGQKPRKRTIEAGNLERLQSEIAAAKKRFHLAETTPVLSCYEAGRDGFWLHRYLVKSGIENLVVDSSSIEVNRKKRRAKSDGLDADSLLRQLIRHHSGERKVWSVVQAPSPEEEDRRQLHRELRTLKKERTRTTNRIKGLLAGQGIRLKAPLDLSDVRLDAMRLWDGSGLRPGLKSWLKREWEHVLFLRGQIAVLRAERRRALRQSEEPDLDKVHQLSLLRGIGENGSWIFVREFFGWRKFNNRREVGSLAGLTPTPYQSGRMMREQGISKAGNRHVRAAAIELAWCWVRWQPKSKLTRWFEARFAKAGSRGRKVGIVAVARRLLIDLWKYLETGVLPEGAQLKAEV

SEQ ID NO: 460268 - protein, 346 aa, unidentified
MEYVALDVHKNYTWARVENSQGARLYESRLAHGHGTIKNFVNRWSGRSPVAVETVGNWYWVVDEIEAGGGTPQLVNARLAKLMMGNVNKSDKLDCQGMNRLQRTGTLPTVWIPSSSVRDGRELARTRMVLSRQRTQLKNRIHATLGKYGYTVKGASDAFGKKGREIIEELLLKLPPHTQQALRLILDELDHVTDNLKVIEGHMIEIFSPCPQTQWLKSLPGVADILAVVIWTEIGTIERFNRAEQLASYCGLVSRENSSGGKIRLGPVRRDVNVYLKWAFVEAANSALLNAGRCGYGHISRLYERIKPRRGHGKAKVAVARHLAEASFWMLKKGEPYREPMPSTQR

SEQ ID NO: 460269 - protein, 401 aa, unidentified
MAAVRDNAWVGIDVGKTHHWVCAVDADGKTLLSVKVANDEAGILSLIAAVTALTQRLTWAVDIIGAPSALLLALLAQAGQPVRYASGRVVAAMSAAYVGEGKTDAKDARVIAETARLRRDLAIIDTDTDLVRNLAVLTGHRADLIADRVRMINRLRDLMTSVFPSLERAFDYSSHKGALVLLTGYASPDRIRRIGQTRLAAWLRTRHVRGSADVAARAIAAAKAQSVVLPGQDLTASIIAELAGNVLRLDERLKSLDDQIEELFQQHPQAAIIQSMPGFGPFLGASLLVGAGDLRAFPNAGHLAAAAGLVPVPNDSGRRTGNLHRPLRYSRPLRHVCYLSAQTSMMRAGPNRDYYLKKRAHGRTHSQAVIALARRRIDVLWALLRENRAWTATPPQPAQAA

SEQ ID NO: 460270 - protein, 435 aa, unidentified
MNCVDDIRLEQFLQLKKEIRGSEKHLIVGIDAAKEKHNAFFGTARGKALVKNLVFDNALEGFQKLLAFVERIKVQYSLTTVVFGIEPTANYHKPLAEHLIKCGHLVVLVGGVAVKNNRPLLDGRWDKHDVKDAANVADLISQGKCLFYEYPLMTLRNVRILIALKRRLKRREHGMSVCIRNNLIAQYFPELDQHYGPLETLAVVRECLDPSEIAGMEYDSFCRTVAPGKMTLAKGRRVGAIWRAAVDSIGCTMGEAASFEAQVVVDSLKQIRQTIKSVEEKLEDACLEFPEYTYLLSIPGFGPDVSSKVLGAIGDPHRFTSAKQVLKMAGLDLCADRSGKKSNSTIPVISKQGKADLRYGLYQAAFIASLKNKDFIAYFTNKLKGRAKEKGIGTKMRVKLAAKLLVIAWTLMKKKECFDPKYLKQEDQDAQKKAA

SEQ ID NO: 460271 - protein, 412 aa, unidentified
MTTTNQFAAHVGLDWADKKHDVCVQFKNGERVFHVIEHTVEALDVWLTELHQKVKGRIAIALELKKGPVVYALQKYPFITVFPVHALSLARYRQAFSPSGAKDDPQDAELTLELMLRYPQNIKAIEPDNADIRLLQQPAEQRRQLVEDKRRFVNRIINTLKQYYPQPLEWFSHRGSLLLCELIIRWPSLQQLKRARRDTIRNFLNAKGGRAMALTEQRVASIDNAIPLTTDSSVIEANALMATALATQIKVVSEIIKTYDERIETLFDTLPDAGLFKSLPGIGPCMGPRMLAALGDNRDRFNSAEEIQNYAGIAPVTARSGQKSWVHWRWQCAKFVRQTFVEWAAKTVNSSYWARLYYQGQREKGKSHQSAIRALAFKWIRIIYRCWKTRTRYDEAKYLLALEARHSPLLRP

SEQ ID NO: 460272 - protein, 323 aa, unidentified
MQTPSAVLNIGADVAKDTIVVACSEGSFPVREVANQRTAVLAFLKSLPAGSRIGVESTGIYHELFAEVAHQFGFLVFLLNPKDTRHYAKAVGLRGKTDRVDAELIARMIAHEHAKLHAWIPPTPQQREIDRLIKRRATLISLREAVAMSLHDLGGFTDELKMLRTRFNRLIARIDLRVKALVEASPDRQGNFTRLCTITGVGPVVGTALVNTLERVPAKSADSFVAFTGLDPRPDDSGQHRGKRRLSKRGPAELRRLLYLAALSAVKTKPWRRLYEHYRAKGLSSTAALVILARRIARTAWSMYTYKTEFDPARLTNPASRTA

SEQ ID NO: 460273 - protein, 434 aa, unidentified
MCDDPVTAFFLTSQIQEEEYLKVVYPICCGVDVHKTFLVGTIISTTDGVQPHYQKKRFSTYNADLHRFADWLHTNNCLDICMESTGKYWVPVFNILEERNIRVTIANPKWVKAVKGNKDDTKDSKWIGDLFRLGLVPSSFIPSKDTRILREFTRYRYKLVSMKSSEKNRFQNAFTVCNVALDSVVSDMFGKSATAITDYLISEDTFDPDHCVSLLQRSLKKKANSVLESIEGYSITDEQKLRMRIVRSHLNYIQSLISQVDSAIDTMVAKHEPIISLLCTIPGVDRNSAITIISEVGNDMSQFGSSKRLCCWAGLTPGNNESAGKKKSVRITRARVYLKPALVQVAHAAVKATDSSYYRLKYEQISKRRGKKRAIIAIARMILTAVFQMMSTGEVWNPTDLFKIDMPEHLKEKQLSKAVKQATKFLQKQGLTVS

SEQ ID NO: 460274 - protein, 333 aa, unidentified
MQHPTIGIDTAKDVFHVVLADPAGRPIKKVKLTRNKLAAFMARQPVSRVFLESCACAHHWARTFAGQGHDVRQIAPQFVKRYRDGDKNDHNDAAACIEAGLRPTVRSVGTKSVEQQELQALQRMRSLAMRDRNALGNAIRAVLLEFGVVVARSVTALRRRLPELLEDAENGLTDGVRQLVAEEFGRWQQLAARVDELTIRIGQRSRTDATMKRLQLELNGVGPLSAAALWTAAADPKAFVRGRQFAAYLGLVPRQYTTGDRPRLMGIRKGGQNELRALLIHGARAVIRALGDKTDSQSQWLRALVERRGKNRAAVALANKNARQAWAILSQAA

SEQ ID NO: 460275 - protein, 406 aa, unidentified
MEGPIITVDVSKGSCHYQPFIENGHPMRKPKQLSATIDGFQKLGQTIKDLEAKTEREDIPVIFEATGVYHRPLQKYLEDHKIRYYIISPLLSATYRKTDLHSNKTDALDCAHIAKAYYCEKELRQYQAQPQEYKRLYQLSRIYESELVHLRKRKVSLRSMLDIIYPRIDKTFKGNQNLYDPIPMEILKRYPHPSLLLSHRKDTIVKTVGHRTGHLKGYTERIVHKIYEKAKECYSGCDIDDIEVVKLPSLIGNVQEQKKKCDSLLKEMIEIARTCPYFAPIVSIVGIGENLAARIIAELRDVSRFDNRAAIVAYAGLNPKIQQSGDIDGLHLKISKKGNKHLRCLLYLGAQCNYRLRKEDPLYEFTKKKRQQTQCPLSSKAAYTASAHKLLVIIYSLCKNGTLYHS

SEQ ID NO: 460276 - protein, 420 aa, unidentified
MTISHSIPTDAVLVAIDIAKVRNEVLIEAPSHKRRRRLSVLNSRAEHDRLIELLRTYGQPIVCGFEATGNYHRPIAWRLAEAGFEVRLVSSLALARTREALHNSWDKNDPKDAQVILHMLRIQATQAYHDPLRAGINDVQELSKTHEAIARAKTEIQHRILTHYLPLYFPEIDRFRGNSRSDWFFAFLDAFPTPASIMALTKEEFVKAAWDVVGRKVSKTQILMDIHETARTSIGLPLPLDAPAIRMFRMVVAEARSLIRQRNEIEAQADELLRHSQDYQLLRQIPGIGPINALTIIAEAGDLRRFHHHRQFLKFCGLDLSTQQSGQYRGQTRLSKFGNARLRRTLWIAGQVAIRQRENGFRHKFERYIAKDHDNPDLRRKAMTAITAKMARVVHAIVKGGSDYRPFVEGRVPGGRTSVS

SEQ ID NO: 460277 - protein, 400 aa, unidentified
MLSIGIDVSKGKSTVYGMKPGGEIVYAPFEVQQTREGMLELVSLLRSSGEEVRAVLESTGSYHCPVVTALLENGIFVSVVNSLRMKRFCSQSIRKVKTDRIDAMQIALYGLAYWQELQPARLPEDTYRELQLLARQYYQMTSLLIKAKVDFNAICDQVLPGMQELMSDHAGRHKLSDFVLRYRHTTHILEMGETRFQKDYCKWAEKKGYRNCERMAALIFATAQNGIPVLPNAPSTQIVITEAIRVLHTVEASRDAILTQMQALAKTLPEYSLVREMPCIGDTLAPRLIAEIGDVRRFHSKRALIAYAGIDAPPYQSGKFCANNRHISKRGNRYLRKTGYEVMQSYVMHKPANDPIFTFIEKKRSEGKSGKLAMVAGLNKFLRVYYGKVTELYRSLPAIE

SEQ ID NO: 460278 - protein, 423 aa, unidentified
MTEQAEAFLRFVGVDWGSEAHQVCVIDGSRKILLEKAFAHSGKGISELVEAVLAAGGVDSEQVAVAIEVPRGAIVDTLLERGLAVFAINPKQLDRFRDRHSVAGAKDDRRDALVLADSLRTDEPAFRRVRAGDPTLIELRELSRIHEELKAERIALGNRLREQMQRYFPQVLTIGNVYEDRWLWELLEKAPTPELAKRVSLAKIGSLLKRYRIRSLTPEAVREAVSAEALHVAPGVLEACRRHVALLLPRLRLVHEQKSAVEREIEALLEKLSEPLEGKAEHRDARLLQSLPGLGKLVCATMLTEATEPLEHRDYRSLRTLCGVAPVTKRSGKQHAVSMRTSCSRRLRTALFYWADNATKREARWKERYTALRAAGHSHGRALRGLADRLLALLVAVLKSGTPYDPARRGRPILATELTPASP

SEQ ID NO: 460279 - protein, 348 aa, unidentified
MVIIGADLHKRTHTAVAIDEAGRKLGQRTVGATPEGHLELLDWSRGFGERRWALEDCRHLSRRLEADLVRSGESVVRVPPKLMAGARRGGREAGKSDPIDALAVARAALREPDLPVARLDGPERDLRLLIDHREDLVTTRTQVINRLRWHLHELGLVEPAPRSLDRGPVLEGLRTALAGQPGTVARIARELVEVVAELTHSIGALGREIDALAGQLAQSLLDLQGCGGLSAAKLIGETAGIGRFRSRAAFARHNGTAPVPVWSGNETRHRLSRGGNRQLNVVLHRIAITQIRLGGAGRVYFEHRLAAGDTKTEAIRALRRRISDEVYRRMRQDEAAQTTQRALLAAAA

SEQ ID NO: 460280 - protein, 289 aa, unidentified
MEHYVGLDVSLKLTSICIVDRTGKVEREGVVASDPEAIATFIKLHAPHVVRIGLETGATSTWLWTELNKIGLPVICIDARHAKAVLKMQINKSDRNDAAGIARIMQCGWYKEVCVKDLDSHATKALLVSRALLVKIKRDIENQIRGLLKNLGLVIGRAKMNMFAMRAAQLAEDRSELFAAVDPLLKAREAVEQQIVDLDRKVLRLARNNAQVRRFMTAPGIGPVTALCFLATIDDPARFKRSRSVGAYVGLTTADTHPARLTGRAESRNAAIRCCEVTSTRRPMCCSHA

SEQ ID NO: 460281 - protein, 346 aa, unidentified
MKIIGCDFHPSFQQIAMLDLATGEWTKKKLPHASGEAEQFYRSLQGEAVRVGIEATGSTRWFERLLEELGQELVMGDAARIRSLVTRKQKTDARDAEHLLELLERDQFPAIWVPSAGERDLRELVLHRHKLVEMRTRIKNQLQHVALNEGLQKKRQLWTERGRRWLEDLALPPWTERRREDLLHFLDELDARIAQLDQAVGEAARQDARVRLLMTHPGVGPVTALAFVLVVGEVTRFPRSKKLASYLGLIPSEDSSGSRRRLGAISKQGNSLLRTLLVEAGQSAARCDPELRRAYQRLCHKKQHTGIGKVMVARKLAVRLYWMLKTQQPYRPARMQSSPSHSVSAA

SEQ ID NO: 460282 - protein, 348 aa, unidentified
MAQYYTGLDVSMEQTDIVTVDDKGKIVFEASIKTNPQSIDAALKQAGFPIQKMSLESGSWSHWLVKEISALGWNITCIDARSISPLLALKTNKTDRNDARGIAEAVRMQSQYIREVYQKSQKSIDLGALLTTRRMLVGQRTALGNTMRGLLKTFGLRLGIVEPSKFSESLQAKIAEQWPETTSPSEEYPVLALKTLARCFETLRKEIKEIDTILNLLSKKDDVLKRLMTVPGIGTLTAITYKVVIDNPKRFNKPRLVGAYLGMCPIQYSSGQIKRRGRISKKGPSELRMLLASSGMRILTHCKEPSKLRIWGLKISEKHGKKKASMALGRKLAIIMHHIWSKNTLFVP

SEQ ID NO: 460283 - protein, 351 aa, unidentified
MTELSVMPTAQTIGLDIGDRFSHYCVLGFDGEIAEEGRVRTTPEAIDRWFSSRSPGRVAVEVGTQANWIADLAGNAGHYVIVANARKVRAIYENTDKCDRVDAQMLARLARSDPRLLCPVTPRDSQTRATRSLLRSRDVLVRSRTKLINHVRGTLKIFGARVPKCSSGAMAKNAREQIPFQLRGSILPILDMIAELSRHIRFYDRRIEALARERYPQSQLLQQVAGVGALTAVCYIVTICDPKRFPSSRTVGSFVGLRPGRSQSGQSDPQLRITKAGDRMLRRLLVTSAHYILGPFGPDTDLRRYGMRIASHGGKAAKKRAAVAVARKLAVLLHRLWLNAEVYQPLRAQTR

SEQ ID NO: 460284 - protein, 379 aa, unidentified
MHHNTLFVGMDVHKESFTLCCYCAETEKFFKIQKISPDSSLVIKYLKSAKEYYDVNAHVVCGYEAGCLGYSLYRELSAAGVECIILAPSTIPVEKGKKRIKTDKRDAMNIAKCLANNTYKPVHIPTEETGEIKEFIRMRNDHKLALKRIKQQINAFCLRHKLHYAVGRHKWTQTHLEWLRKLKLDIMQREILDEYMLTLNYLIECIERLDKRIEELSQSPEYKEKVKKLSCFIGIKTITAMTTIAEVDDFNRFEDAGHFAAYIGLIPGEDSSGPKQNHLSITKAGNRQVRRLLLEAAHCYNRGQIGYKSKDLKQRQSGCSADVIAYADRANVRLKKKYFRLIARNKTPNVVYVAIARELACFIWGMMVNKFNRTPQTAP

SEQ ID NO: 460285 - protein, 402 aa, unidentified
MNAVGIDVSKGKSMVAIMRPFGEVVATPFEIKHTTSDINSLVKFINSVEGESRIVMEHTGRYYEVLAHQLSQANIFVSAINPKLIKDFDNDSLRKVKSDRVDAIKIARYALDKWQNLKQYSVMNELRNQLKTMNRQFGFYMKHKTAIKNNLIGILDQTYPGVNTYFDSPARSNGSQKWVDFASTYWHVDCVRKMSRNAFINHYQNWCKRKKYNFSQSKAEEIYGKAKELVPVLPKDEITKLIIKQAVDQLNSASTTVESLRTLMNETAFKLPEYPIVMAMKGVGPSLVPQLMAKIGDVSRFTHKGALTAFAGVDPGVNESGTYEQKSVPTSKRGSSDLRKTLFQVMDALIKTKPQDDPVYQFLDKKRAQGKPYYVYMTAGANKFLRIYYGRVKEYLSSLSES

SEQ ID NO: 460286 - protein, 322 aa, unidentified
MDGSTHNSNVSFVGIDISKSKFDVMILPEGTRLTCPYDSEGIEQLLAQLPKHDCIVVLEATGGFERRLAAELVEAGHQTAIVNPRQVRDFARGIGVLAKNDRIDARVLATYAQHVKLRLVEKRSEKQQELTALVVRRRQLVTLQNAESNRLEQTTVKLATQSIRQVLDLLRKELKKLDAKIARLIEADDDWRNKAELLQSVPGVGPGTSASLVAELPELGKLNRQQIASLVGLAPFSRDSGQFCGQRSIWGGRGSVRSALYMAAFNAKRCNPIIRAFAKRLQNAGKRSKVILTACMRKLLVILNTMVRNQTNWKTTVVPQNT

SEQ ID NO: 460287 - protein, 404 aa, unidentified
MISVGIDVSKGKSTVCIMKPCGEILESPFDIGHTADELDSLISLIKSFDEETRVVMEDTGHYHLPVATYLSSHNIFVCCVNALRMKKFCSQSIRRAKTDKIDSIKIASFGITYWNELVKAYPSNVIYDELKFLARQYYQALADVLSYAKDEEKTEREYFVEGIDQVMPKINDVLSNQGENHKLTEFVNRYIHFQNILDMGEMKFTSDYCKWAKKKGYRLNERKAAEILALAQNGIPTLPNSQSVKIAVSEAVKLIHSIEESRNTILAQMQDLCNTLPEYSVVKEMDCIGDTLAPLIIAEIGDVRRFKNKHSLIAYAGIDAPPYQSGAFHASERHISKRGNSYLRKTGYEIMQSLIKHKPADNAVYNFIQKKRSEGKCGKEAMIAGLNKFLRVYYGKVMEFYSEH

SEQ ID NO: 460288 - protein, 315 aa, unidentified
MSHHTFVGVDVSKSQLDLCVLPQRRRCRLGNDDAGLGELIAWLGDPAGTLVVLEATGGYQMAAVAALATAGFDVVVANPRQVRDHARSRGQLAKTDRLDAEAIAEFAQRNRPPVRPLPDQQTRLLQALMARRRQLLEMLTMEKNRLQQAAKPLAKPIAKHVQWLKKELKQLDDDLADQVRQSDLWREKDQLLRSVPGVGDVTSRTLLAELPELGQINNKQIAALAGLAPLNRDSGRFAGQRTIWGGRATVRTALYMAVVSAIRHNPIIRPHYQRLKKLGKPPKVALVACMRKLLTILNTMLKEHQPWQPRLPQNA

SEQ ID NO: 460289 - protein, 389 aa, unidentified
MLPNGDKYSNFSVANSHEGSTQLVKRILSALTSHSLDTVLIGLEATSVYGDNLVYFLREDATLAPFNRKIHVINPKQVKKFHDAYNDLPKNDYVDSFVIADCLRFGRINKEVYLGDYRYKALQNLTRARFFAVQNLVKEKQRFMNVLFKKYSTMTQEKVFSDTFSTTALAVYDEFESAEALANMDLHELTDFIIEKGKNRFPDPDAVAKAIQKAARSSYRLPKTVNDSVNQVLSISITSMKALESQIKEFDKAIKAQMELLPNVLISIPGIGPVYSAGIMAEIGDINRFNSQAALAKYAGLAWKQHQSGGFESEVTRLIPSGNRFLKYYLCEAAFSLVRCDKEYSDFYHLKYKEVNRCQHKRALALTARKFVRLVFRLLKDNRLYTSAE

SEQ ID NO: 460290 - protein, 400 aa, unidentified
MIFCGIDIGKNEHGFAIVAYGDNNLEKPIIVKNNLEGFNQILKLIRKHENNNSKVIIGIESTGHYWKTVACFFEEQGYRVDVFNPIVSAKREQQSVRGSKSDKSSAVAIAKVVRDDDYSTCHLGTDQTERLKSLLRQRDRIVDESKKAKIAIINYWDLTFPEIHKRLTSEQLSSVSGLSFIKKFAFAEEIGSAHLTSLKNILHRLTSVDVEELRCAARKSTGLNTAALHDAVLSEVRMLEVFNAEIKKLEKMIKEQDDEETILLKSIPGIGLVTASTFKAEIGDIKEFDQKDKSKPLCYRILAYAGAEPRIRQSGKYTGKIKMSKRGNKHLRTALFLAADNARKNSDYFKAIYTKQKKKGKHHYVALSHVMRKLVIIALAVIKPGEPFDEKKLNLELAIT

SEQ ID NO: 460291 - protein, 387 aa, unidentified
MIAVGIDIAKRTHEACFMGQDGRQIGKGRRFHNNRRGVRALLDDLQQLPQPVTIGMEATGHYWLAVHDELVRAGHTVQVLNPLQTHAYRKTTIRKLKTDRQDAWLIADVVRIGRGRAAYVPDETILQLRELTRFRWGLVDQIGDAKRRILTILDRVFPEYETLFSDVFIKSSRALLERATTAAEFVDADLDELTAVLKQKSRGRLGRERAEAVQMAARDSLGMTRLGGVASFELRALLDQITFLEHQVAAVEQQIEALLASIEQHVTDIKGISPVMAASLIAEIGDVRRFQRFESLVAYTGIDPSVVASGEFKATETHMSKRGSPHLRRALWLSAITASQSNPDLGEYLQRRLDEGKPWGTAMGAVARKLLSRIYVILRDNRPYEVR

SEQ ID NO: 460292 - protein, 403 aa, unidentified
MYYVGIDVAKEKHYVCILGDDREVASKPFWIYTDILGLQKLEKRLAELSNNKDEFIIGVESTGAFSENLYEYLTDSDYKVILLNSYQTAKFRDFSTMKKIKNDAIDALVIAELLATGKYKESHISNDAYHSVKVLGRLKASLDKKIKSIKREISTVMATVNPEIAKVFPNIFTKTGLAIIKEYPTATDIASATPKKLTRLFRHIRGNNFSEDKAKLLIELAKSSVYAGRASEARALMITSNIRILELYCQEKLQIEAQIKELIESEIDAIDNTVENIKSIPGVSIKTIASLLGECGDLRRFDSAKSFIGYLGLYPTQYQSGNSLSVGRLAKRGIPIAKHALYMAAVGSVLHNPQLKKLFYDKISSGKSKKEALIILSKKLATIIFAIAKHNKPYDPNRVFIPN

SEQ ID NO: 460293 - protein, 372 aa, unidentified
MPMFAEGSPGTQPPTVAEVYRFVVGVDTHAKVHQYAIVQAETGRVLDEGGFPTSSNGLARAAAWIGRRTGGNLDSVLISCEGTGSYGARLARVLGEAGYRVVDAPSPKRDRGQDKDDTIDAIKAARGVLGKRVDRLAEVRAGELQEALKVLLAARDRMASESTRSVNALTALLRGVDLGLDARRKLTATQLRQVTRWRTRSESPAAAIARAEAVRLAGRITQLRVELAANKTQLRQIVAAHAPVLLESYGVGPVNAAIVLSVWSHHGRIHHEAALAKLGGVSPIKIESGDFTEHRLNRGGDRQLNRALHSIAKTRMERDPHTQAYVQRRTRQGLSKRRIRRCLKRYIARQLFRTLAGTHAHQMNAQVMPSAA

SEQ ID NO: 460294 - protein, 413 aa, unidentified
MRLFVGDDWAEDHHDVELMDSAGRRLAKARLPEGVAGIARLHAMIGEQLGEDADEDDAGQVAIGIETDRGPWVAALIAAGYTVFAINPLQASRYRERHGVSGAKSDTADAHVLADMVRTDSHQLRPVAGDSAQAAAIKVVTRTHKTLIWERTRCTQRLRHALRDYFPAALEAFEDLDAADTLELLGRAPDPAAAAKLTTAQISAALKRARRRDIAAKAERIQAVLRAAHLGQPDIVAAAYAASVRALIAVLATLNEQVKTLQGQVEAYFGQHPDAEILLSQPGLGPVLGARVLAESGDDPGRYISAKARKNYAGTSPITRASGKKKTVMARHVHNDRLIDALISQAFTALRTSPGARACYDHQRARGAGHNPALRQLANRLTGILHGCLKTRTLYDEATAWPQYTATSEKTAA

SEQ ID NO: 460295 - protein, 487 aa, unidentified
MHPRTTNKFLETFDVYRFSFESAGALALDNEYSGFAVLPAHYIAFAERKRARPWTSIYHCGRYDVKPLATQQFTAYVGIDWADTKHDVCLQVPGNELREFDCIRHQLADIDQWAQSLHQRFGGPIAVALELAKGPIVYALQKYDFFVLFPINPLTLAKYREAFMPSRAKDDPTDAELALDLLMRHPERFTPLRPQSVQMRTLLSLTEHRRELVGDKTRFTNRLTNTLKQYYPHALDWFEQHDTLLFCDFLTRWPTFPQVKRARRASLEAFFYAHNGRRPNVISARLGAIKAAIPLTEDMGVIAPCRLQVLVLIEQLRTTLQAIDRFDREIAQLAPRLPDYCLFQDLPGAGPHLAPRLLAAFGEDRQRYQHADELQKYAGIAPVTERSGKKSWVHWRLRCSTFLRQTFVEWAGQTINKSFWAGAYYRQQRAKGSSYQATVRSLAFKWIRILHRCWQTRTPYDESAYLNALRKRGSPLLKHLELDAQSA

SEQ ID NO: 460296 - protein, 392 aa, unidentified
MFYLGIDIAKTNHVASLIDSEGNQLGKVIKFTNSTEGYERLITSLKESVINLNEVLVAMEATGHYWLSLFSKLEDENFNVSVFNPIQIKSFRESFTIRKKKNDNIDSLIIAHFIRTFGSNSSSLETDDFMSLKQLTRYRSSLVQNTSSCKVKVIGLLDKIFPEYSTLFSDVFGQASMQILLNYNTPSDILKINTRKLFNILSNSSRGRFGKDKALQLKEVAKVSFGIKIMKDATSFEIKQIVNQIIFIEQQIADLDKEIQLLFNKFNTHLMSIPGISKTLAPIILAEIGDIKKFSTPNKLVAFAGCDPSQNQSGNSNSTNEKTSKRGSPHLRHALHSAALVAVNNYEPFRIYYDKKRSQGKHHNVALASISRKLLIIIYAVLTEERDFFKES

SEQ ID NO: 460297 - protein, 310 aa, unidentified
MTHVYIGIDLSKDRLDVFDPRIGRASFHANSAAGIKALFAAGKPEDIVVFEATSGCDRLLLEACAKAGRPFVRVNPLHAWHFAQSLNLPKTDRVDARMLARFGSERQLAPHLPQDPARAELAELADRRDQLKRMETQEKNRLRKTASPAIRADIRASLKALAARVARFEQAIAELLRQTPELAHDATLLRTAPGIGPVTAAGLLAYLPELGHLDRRAIASLAGLAPKARESGKFRGQRRIGAGRETVRRLMYMAALSLWRNPATLGRQAHKMHDAGKPAKVALIALARKLLTIANAILRDQTPFQKVTQP

SEQ ID NO: 460298 - protein, 385 aa, unidentified
MSSKAFIPRDYEVFAGLDVDKKSISVTFTNHQGFIRSLRVPYSAEHLVNHVRKHFPDQKVAFAYEAGPTGYGLYDGIVAQDYPCLIASPSMIPKAPGQRVKTNRLDSRGISENLRGGQLKSIHVPSVLYRELRHLTQLRDTFVSELVAMKQRIKSLLLMEGLEFPPAPAGSQWSFMVKAKLRKLPCSSTVRFKLDQLLDSLEFNEKQIVKTTQQIRRFCQNDPELSQCIEYVVSVSGIGQIVASQLLARIGDWRELKNVRQLGGFLGLVPSEYSTGERTDRGSITHSGDPRLRSKLIQAAWSAIRKDGELREFFRSVCQTHARPVASRVAIVAVARKLTVLVSVVLMKQRPYVVRKKVHSAPLTQEETVPQGTPRRHAEPGAKNS

SEQ ID NO: 460299 - protein, 424 aa, unidentified
MQNTAARKRKQVPEGYLVIGIDPHKKRHAAVAITQDFTTQAKFKFDNTRDGLEMMLDRARVEMLKSGCRGVMFAIETGGHYWRNIAYYLDERGIPSRFINQYTLKRRREGKDINRRKNDYRDSEVAAQLLCTGEFVESVIPQGVYAELRTSHNAYQRLVKERTRITNLVKGLLDGLFPEFTRVFKDPGGLTALSVLSTCSIPRVIAGMTEDEFVATIEARHKGRRLMRKKLRALHYSAKTSIGIDAGARSLSYEIAFLVDKFELIRQQIRIMEGTLVKLVDETEEGKYLLSIRGLNYIAVAGLLAELGCFKLYRSAKQMIKMAGSNPTESESAGKKRSKTPMSKQGRPLLRYCAWTAVIPMLRFNSDFRAWAKQRRERPAHANPLSGREVVGAALNRLLRLAFALVKNQTYYQDVKLALMPVAA

SEQ ID NO: 460300 - protein, 418 aa, unidentified
MKVVFPTCCGVDVHKSFLVATIIKTPKESLQPSYQKKRFSTFNSDLNRFADWLHENDCLDVCMESTGKYWVPVFNILEKRGIRVTIANPKWVKAVKGNKDDTKDSKWIGDLFRIGLVKSSFIPAKDIRILRELTRYRYKLTSMKSSEKNRFQNAFTVCNVARDSVVSDMFGKSATAITDYLTSDEDFDPQHCVSLLHRSLKKKAEDVLSSIEGYEITLEQKCRIGIVRDHLHYIEKLIERVDICINTMVEKYDGAISLLRTIPGIDRSSAITVISEIGVDMAQFGSSKRLCCWAGLTPGNNESAGKKKSVRISRAGVYLKPVLVQAAHAAVKDKLNPYYALKYERIAKRRGKKRSIVAIARMILTAIYSMLSTGEIWNPVDLFKVDMPEHLKEQQLQKAMKQAVRFLKAQGLTVLDSA

SEQ ID NO: 460301 - protein, 334 aa, unidentified
MTMTKTMAPPPPAYIGIDVSATQLDVAVWPTGGHWCSPYPTAPHDPALTTVVRRIQAQAPALVVLEATGGWEVPLHTALTAAGLAVAVVNPRLVRDFARASGRLAKTDALDAQVLAQFAAQMQPPVRATPAPAIQALRALVRRRQQVVAMLVAETNARRLTRGAVQASIDRHRTYLQAEREALDTAIAEAIAADATLREQAARLQSAPGVGPVLAATLLAELPELGTLDRREVAALAGVAPLNRDSGRRHGPRRCWGGRATLRPALYMATRTAVRHNPLRRPLYARLRAAGKPDKVAIVACMRKLLIILNAMTRDQRRFHLPPSPSPASPGGVP

SEQ ID NO: 460302 - protein, 344 aa, unidentified
MKIMRVGVDIAKSVFHCHGVDRFEKMQWKGKYRRDRWLNALCKRVPQGSEIGMEACASSHYWARELQKRGYKVKLIAAQFVKPYVKSNKNDAVDAEAICEAMSRPNMRFVAVKNVQQQDVQVSHRIREELVCQRTAKANQIRGLVGEYGLIAPVGINQLRKALPIWLEDAENGLTDSFRILLSGLAEDLRNLDDRIQVISEQIAQHVHQDPVAKSLMALRGVGPLVASALAAAIGDGKQFTKGRDFAASLGLTPRQHSTGGKDRLLGISKRGNSYLRKLMIHGARAVMRHAKNRDDNLSRWVNELASRKHVNVATVALANKTARIAWALVYNEAGYDPAKAAHG

SEQ ID NO: 460303 - protein, 423 aa, unidentified
MATNSKAHAHLTLLPMLPQEALYVGVDIGKFRHVAGFLSRTLLARHERFEGCPSFSFEQSREGFRCFVDRLREYVPLEQAAVLLEHTGHYHRLLEQYLLELDITVYRIHVQKRAEGMLKTDKRDALGLANTLYTQLELGAQVMDKMQLVRRIAPPISAASQLQSVMRHRYELSHMSTQYRNKLTAICDELFPELVQVFHDPNLPTALAFREAFPTPHAVAVASLNDLRVVRQRNFPSETQLLRLQQLAKETIGTTDLDRQRGLVLEQGLLIRELRLIQEHLETLHTTITDIVQNCREGQILLSIPPIGSVQAATIIATIGNITNFTKACELKSYFGWAPRKKQTGISMDRTNLSQRGVRPMKQMLFLMASRATTLDCEWARIYQRLLPRLCTYDERTRDYRGKKKVLGRIAGQMASMICIAQD

SEQ ID NO: 460304 - protein, 343 aa, unidentified
MGEVSTIGLDIAKSVFQIHGVDADGAVVIRARVSRSKVLQFFTDLSPCLVGIEACPTAHHWSRQLQSLGHTVKLMPPSYVKAYLKRAKNDANDAAAICEAVTRPSMRFVATKSKEQQAALMLHRSRQLLVRQRTMLSNAIRGQLAEFGIVASTGRLGFNRLLEMVDGPEELGIPKVAWVSLMALAEQHQRLQVEIGKLEQCIQAWHRSSELSRRLEEIPGVGPIVATALVGTITDPHAFASGRHMAAWIGLVPQQNSTGGKDRLGGITKQGNRYLRWLLVAGAMAVIRHVQKHGTAKRPWLARLIERKPTKVAAVALANKIARIAWVIMTRGERYRAPTLLTA

SEQ ID NO: 460305 - protein, 366 aa, unidentified
MLGIESAQPIMVRNLKRRHNMVTIGHDAHLKTSTMTVLDSNGKKLMRRKIDNDPDQLLAFIRQFPGEKQLAIETCYNWPLFHELFKNEVDQFHLLHARKLRSVIESQAKHDGNDSDEIAYLVHSGRPLVHSHAADLDTRCFRRLLRTRVSFSLDITRIKNQVHAIINAYTFYSQRPQNFKDIFCKRGLKYIKSLTLPEQERFIVDKLLDKKNELDRRRNEFDEYIEHVDFHSDDLKWLQTVPGMKNGKLLKYIILSEIDNVNRFRHSRALVAYAGLIPKEHSSGDKNRKGHLRTECNQFLRWAIIQATLPAMIKDKGLRQYYKNLKERKNNSSSARIATARTLLEAIYCVLKERRPYRMAQAVNRG

SEQ ID NO: 460306 - protein, 437 aa, unidentified
MSYKYLQQKREYIMDKIVIGIDPSKHHHQALILGPDRLQIGKTFSFRHSSEGFQIKLWNYIQKYIDDLDKSNIVFAIEASTDVWQNLAYYLVRSGHLVVLVSPRITWSSRRLPDQSYSKTDPKDALVIAQAACSGYYSVFKIHTENQEALRTLAITYSKLKKNLTQTKARIRSVVSKYFPEFISILSPGTDTAGYLLRHYLHAEDYHNLDVQNEAPVILKISKQQHGVDTLVKLKKAAQKTIGIPRSGTEIEIDRIVLDAWLNTHDTIKSQLDVIEKRLHALAGQTDYFHILTSLKGISSTLAALFIAEVVDLYRYDHYKQIQKLAGLDIQMSQSGSYRGRGKISHMGNRRLRWIIYLMTRETVKYIPEVQIKYLKRQIKRVNYTKNVIACTSPLLQLIMALVRDRRVYGYREESIAQIVQLKNKYEKERKKRSRVA

SEQ ID NO: 460307 - protein, 344 aa, unidentified
MNNRNLIAVDLAKNVFQVCRVSKSGKTQSNKPVSRKRLKEILINSKPSIFAIEACGSSHYWGRYAQSHGHTVRILPPKAVKAFCQGHKTDETDAQGIAVAAQQESIKSCGLMNIEQQSLQAFDSSRRYIGKQCRGLANHLRALTYEYGLTIPKGDSALLKSIPGILEDAENGFPHRLRAVLHALYEQLKIQQGLFKIIEKEKAVQVKSIEPCQRLNALEGVGPVASSMLYSNIGKGEMFKNGRQAATYLGVTPRQHSSGGKTIIIGINKKGGNKELRSVLYQGALSVISRLPEEPTTEKQRWLIQLVKRVGVKRACIALANKTVRTAWALLSSGEAYRPQPLTV

SEQ ID NO: 460308 - protein, 341 aa, unidentified
MNIAVCGIDLAKNSFQIHGIDEEGQVSCKKKLKRSQVLKFFANKPVCLIGMEACGGAHYWARELSKLGHTVRLMSPQHVKPYIKGNKNDANDAAGICEAVTRPSMIFVGIKTQQQHDILLLHRVREQKVKNRTALSNQIRGLLAEYGYVLPKSLPKLRSQLLILLSEADDDKLSVLACRQFYLLYEHLLQLDDQIKALEKELHSIARQNEDCMRLASLPGVGLITATALVAHIGDISQFRSSRALAAYLGIVPRQHSTGGKEALLGISKRGNSYLRGLLVHGARSVLRHAKNKEDEHSQWFKQLAERRGYNKAIVGQANKTARRVWALLTNQTYYQVAEQA

SEQ ID NO: 460309 - protein, 355 aa, unidentified
MTSNIKYIGMDVHKESISVAVMNAAGKIVMECVIETKASMILQCIDGLRGDLHVTFEEGTSAAWLYDLLKPHVTELIVCDPRKNASMREDSQNDKIDARRLAELLRIDHLHPVYHGEHGLRTLKELVRSYLTVMKDLARVKTRVKAIYRSWAILCDGKQVYAACHRAEWLEKINEPGVRRRAEFYYQQLDALRVLRQGVRRELLVESKKQKAWKRLCQIPAIGPIRAAVLLGILQTPHRFRAKRPLWKYSGLAIETCSSADHHSIHGQLQRSKKNSVRGLNQNCNHDLKNLFKGAAIVASSKPGPFQEFYTALLAKGMRPEMARLTLARKIATIVLMVWKKAVCFDAQHLKPQTA

SEQ ID NO: 460310 - protein, 357 aa, unidentified
MKIIGVDLHTRQQTIAMLDDETGELVEKELNHSGEEVREFYSALPRPALVGFEATGSMHWFLRLMQELEIDCRVGHPAKIRAAEPRKQKNDRRDARLILTLLAEKRFPAIWMPSCKQRDLQVLLRHRHQLVRIRTRVQLGLQALALSHGLRRGSSLWTPRGQHTLRALPLAPNAAAQRDSLLALYPQLQHSIDRLDHQVEQQAQQRPHACRLMTHPGVGPVTALATEVFLGDPTRFADGKAVASYVGMIPSERSSGRHQRFGKLSKQGNSLLRFLWGEATLHAARRDPELQRFYRRKLVQKGMGKARMAAARKLGIRLWIMLRDQIDYTEFCRRGHLRRQCSGAVCAAIPKGDSGPN

SEQ ID NO: 460311 - protein, 404 aa, unidentified
MKFCGIDWANDHHDALSIDEQGRQLGSIRVAHTPEGLNRLDAYLENLVGELGHEQVACIIETTHGLLISYLLEHHWPVYPVNPRTVDRHRAPSGAKTDIIDAYLLAKTGRADFADLHRLNPDSELIQELKELTRDQDALVQMQTRLLNQLTACLKAYYPVALTLFSKLNQPATLAFLRAYPTPQQARQATVEELVVLLKKTRYPGVQAAASRLAQQLQPPALLANQVTTRTKARLLLAILDQLEPLVHQIAAYDEEIERLFLTSEDHDLFQALPGAGARLAPRLLAEIGEDSSRYQTASSLQALAGTSPVLFQSGTYAKAHRRVGCIKPLRNALHQFAFHSTRSEPWAKAYYQRKRAEGKSHTVAVRALANVWVRIVFAIWTKKEAYQTTTFEAAQLAHARCVA

SEQ ID NO: 460312 - protein, 353 aa, unidentified
MKCDKYMVMDVHQAMTVVVVLDADGKVILETMVPTEAAAIIRLMQSLSGPLRVTFEETTQAAWLYEVIRAHVTEVIVCDPRRNKLLEDGSKADKIDARKLADLLRAGLLRSVYHGHEATRNLKELVRAYETLSIDTQRTMARIKAIYRARGVRTAGRGVYQPKQRERWLELLPEAGIRQRAAWLYEQLEQLRPLRRKAKEAMLAESRRHRAVSLLRTIPQMGPIRSAFIVATVDTPHRFRTKRQFWSYVGLAVVTHMSSEYEMTAGRVVRRRKPVATRGLNHNCNRRLKEGFISAATGGSLHEPYKPFLERLKQNGMRAEMARLTLARKIAAVALIVWKKGVAFDPKKLNCTT

SEQ ID NO: 460313 - protein, 356 aa, unidentified
MTSLTDLREVVDVVIGVDTHVHTHSAAVVDAATGGILGEITVEATAEGYAELVEFAGEHATLRAWAIEGTGGHGAGLSRHLLDLGEIVVELDRPKRAPRRNGAKSDPLDAIRAAREALARTRLGSPRSGGERQALSVLLAARRSAVNAATEAQQQVFSLVIAAPEPIRARFRGQKLPGMLATAAAPRVHPSWDVETTTTVLALRSLARRFRALTKEAVEHQKAILAIIRCWRPDLLEQFGVGPIVAATVLCAWSHSGRIHSEAAFAMLAGVAPIPANSGQVTNRYRLNRYGDRQLNRALHTIVQSRIRYHASTRDYVARRTTEGKTSREIKRCLSRYIARDLYRLLESGPPRLDEP

SEQ ID NO: 460314 - protein, 317 aa, unidentified
MSNNSIICAGIDIGKRKLDVAVCGAKASLQIDNTSAGHEKLVTWLQRHKVERVGVEATGGYEQGVVRALRREGIPVMVFQPIQVRAFARFRLKLAKNDKIDASLIAACVASVDAIRAAPDPRFEAFAAAQTLIDQLTDDIVLYKTRLETARDEYSRAFWKGEIAGRKAQLRGTLKTLRTDMRAHADLAAKLDLITSVEGIAEKTAIAILIRMPEIGTLSREQVAALAGLAPYDDDSGRRVGSRRIQGGRSRLRSCLYAAALPAAFFWNPQLVTFYKRLRANGKTHKMALVACARKLLIFVNTVVARATPWQPKPAAT

SEQ ID NO: 460315 - protein, 454 aa, unidentified
MKLRNAIGVDPDSKGMVCCYVKINSGTLEKKEFLATKDGLSKFTTWLGNKTDIIIAIEGHNGQSKPIEKLLRSEGIIFYSFKPYDVDKFRSAVLGQNKNNSKDAESVARYAMALEAPGKLENYKRVWFPDEELQILTRTHEEITKEITREINRLWKLIRMASVDLYLALGGKNPDISINSNKIKNKGVLTLFYKMPDIHLWKKLSENDILVLMGGCNYKGRTNLIYELKKVSINFRPISKALSLLIKNTAFLINSLDSQKRDIENLLKSLTKDNQEVKILEQINGISTTTASKMVAEIINIRRFVKNDNLASYAGLCLKENKTGESEKMKHSFIFNHRLKDTLMVAARNYVMFNPDSHLSGYHRNLIKSRVKKNEARKRVARALVRVIFRKLNAISLDISPNIQQDRSENEMASGSSHEDHNNPGNISLSTPLDIQANIENKDKEKKKILVEIC

SEQ ID NO: 460316 - protein, 363 aa, unidentified
MEQFIGCDAHKKYSVFVAVNERGEASPAIRVGHDREQYRQFLERLPAGSQIALEAGGHYYWMVDEMEAAGHQLRLVHPLEAKKRMGKTGKKTDKVDANGLGILLRNGTLPEVWIPPSGLRDQRESLRLRMFLVQQRTRLKNRIQGALARYNIQIAGVSDLFGGEGRLRLGQRLGELPEHTRQSVELELVTLDFLEVQLGDIEKRLEELMKVTAEADLLKTLPYVGRILSMVMTLEIGKVERFASAAHLASYAGLVPRVHSSGGHTRLGQICGDVNQYLKWAFIEAGNLVVIHQKHLVGQHVVRLYQRVKRKKNHQKAVVAVARHLAEAAYWILKKQEVYRDPQPKPKAPAQAQAAHALSSTHG

SEQ ID NO: 460317 - protein, 343 aa, unidentified
MKHHAGLDVSVKETSVCIVDETGKICREVKVASYPEDLVRVLQDPAWKLERIGLEAGPLSQWLFSGLAESGLPVVCIETRHTRAFLQAQVNKTDRNDARGIAQMMRVNLFRPVHVKTLMSQKRRALLTARKLLQEKAIAIENDIRGLLRNFGLKVGQVGSIKFEVRIRELVAGISDIAEIAEALLVARSKLREQFAKLHKKLLTVVRDDSVCRRLMTVPGVGPVTAMAFRATIDVPARFSSSKAVGAVLGLTPVQHQSGESNRIGKVSLCGDAMMRTLLYEGAQSVLTRSTQWSWLKVWARIAKHRGMKKAIVALARRLAVVMHRMWVDGTEFRWAKDAVPSA

SEQ ID NO: 460318 - protein, 469 aa, unidentified
MADKLLPPVTGIDIAKGFSEIQTIDSFNQPYGEQMRMEHNHKAMLNALHRIQKIGKALGTRPIIVMEATGHYFRIVFYLFYNAGFQVVLVNPIQTKAFANAPKIRRATTDKISAKGIALLYRMGMLTPARIPTQERIQLKELCRDYWNFINQAGNWKRRLTALRDQIFLLYEGAFRNPFGLTALSIFLEYPPPERILKEKRETLALKIKRLAHKSLAWAEKKADTLKSLASASPTLPEEERTAIRRLQSYARTIATLKAEADALLEDINALVKDDPEYELLLTIPGIGPITAATILGELGEFRWFKSAGEIVAFAGIDPKVSESGKYKAPRVSMSKRGSPYLRLALYIIASAAALPKRNGRIPNPVLGAYYRRLRERGKPHKVAIGACMRKMVGYIFATLRDGQGFEVREPAKSKKETEQAKPQRPATVRETTFPVYDEENRVIAYATDPVPISRILPQVMEKLRTLRD

SEQ ID NO: 460319 - protein, 423 aa, unidentified
MGYRIAGIDVHKKKLAVVVADVEVEEEYHFERRWYGSNPEHLQLLSHWLVEQKVEEVVMESTAQYWKPPWSALERYWKPSSQNREGAGKMSGTLHLAQALSNRGRRGRKKDFRDAERLVKRLVSQELTLSFVPDGEQRLWRTLMRTRYQRTRDKVRLQNQLEALLEEAHIKLSSLVSDLLGASARRMLKALADGETDPAALATLGDKRLRATPAELQDALGACTELNPVYRRLVGLALDDLQLIEQQIGQLDQEMASLLREHQDAVQRLAEVPGLGVDSAQQIIAEVGAKAATFPSAKNLVSWVGACPGEDESAGVNRSKRSPKGNRQMRRILNQAANAAVKHKGSIFEIVYRRFVPRLGHNKTIGVIAHRLCQLIWIILHKGVRYEERGPAVSEKSQRLRTTRMIRTLRNLGYRVEPPVIPA

SEQ ID NO: 460320 - protein, 337 aa, unidentified
MKYYAGLDVSLDSTAVCVLDLDGEIVCETSVVSHADDIFSALSPYLATLEGIGLEAGPLSEFLVCGLKTKGVHAILMETRRVHAALSAIPVKTDRKDACGIAHLLRMGWYQPVHLKTPAARDLRLLLSARETLGRRMRDLDNSIRGLLRGFGLRFPVGVPGQLCALVRDLIDGNPVLIEAIAPLLAARDAISDQFTDLDKRVRDRARSDKVCRQLMSVPGVGAVISMTFRAAIDDPARFRSSKTVEASFGLTPRRYQSGETDRSGSITKAGDAGVRCALYQAAHVMMVRTTKWTPLKAWAMRVAARRGAKRAKVALARKLAVIMHRIWVDGTEFRSA

SEQ ID NO: 460321 - protein, 317 aa, unidentified
MSKHNTVCAGIDTGKYKLDVAIDESADQLQVDNSPAGYRCLSAWLRQREVERIGIEASGGYEQAVVSFLRADGFVVIVFQPVQVRAYAKFVLQHAKNDNIDAVLIARCTAAATDIHEPPDARLAPLAQRLTMIEQLTQDVAQVKTRREACWDQRIREFWKQEIDRFKRLLQAELKQLVAAIREHRDLSTRLDLIASVDGIGLRTAVAILVRMPEIGRVSREQAAAIAGLAPYDDDSGQRRGLRHIKGGRQRLRQSLYAATLPAAFYWNTQLKALYKRLIAAGKTHKLVLVACARKLLIFVNTVVARGTPWKSAPATT

SEQ ID NO: 460322 - protein, 412 aa, unidentified
MRRVVGIDIHRTFGEVVIWENGVLRHAGRVDMTRSALEGLGNRLVATDEVVIEATGNSLAVSRVLSRFVARVVIANPLQVKAIAHGHVKTDKIDAGTLASLRAAGYLPEVWTPDAATERKRRLVARRFQVVRHRTRLKNEVHAILHAHLIPKCPHADLFNGRGRTWLERQPLPDDEGSAIARHMRELDRLAEDLVILDREIAQEALEDPAVKRLITITGVNVTVAAGIMAAIGDIGRFKSPEKLVSYFGLNPRVRQSGLGAAHHGRISKIGRSQARAMLVEAAWAAAKTAGPLHAFFIRIRARRGHQIAAVAVARKLAVLCWHLLTKDEDYLWARPALVANKTRAMELQAGRPQRKGNKRGTAYAYNVKTLRDQEMQLAEQAERNYARFVARWKTRSPSDRVRERLTPARQE

SEQ ID NO: 460323 - protein, 409 aa, unidentified
MVVHAAPVTASTVVVAIDVGKNEFAVSVTDATRGKLLKPRLGCPMTAPSLRQVVEAIRQLLPHGAQVKVGIEAAGHYHRPLLRPQSWPAGWELLELNPGHVTEQRRVLGKRTIKTDAVDLEAMTELLLAGRGLPIRTGDTVLTELAAWSAHRIGRVALRTATKNQLLGQLDRSFPGLTLALPDVLGTKVGRLIAAEFADPARLAALGSNRFIRFGAARDLQIRRPTADKLVAAAKEALPMPDAAAARAVLTADLALLGDLDAQIEAATAQLERLVPQSPFKTLLTVKGWGAVRAGSYGGALGDPTRFATSRQVYRTAGLNPIQYESAGKRRDSVISREGSVELRRALIDLGIGLWLNDAAARRHATALRARGKKGRVIACAMAHRANRIAFALVRDQADYDPTRWIRED

SEQ ID NO: 460324 - protein, 320 aa, unidentified
MAQQGRIVGIDVAKLKADACIRSLQLRLSQPSTAQGQQDMITWLRRNEVGLAVMEASGGYERVWAEALRAAAIAVRIVDPKRVRYFAKSAGRLAKNDPIDAEMIAWFAETFAAAAEPAHDADRDALNRLVTARSLLVRLTTPIRQLGEHGQPRVVENAQRAILKTIKAQLAKLEAAIEAKIAANAQFLARRAIIASVPGFGDHFVAGALAWLPELGRISNKAAAGLVGVAPYDDDSGQHRGERHIKGGRRDIRTLLYMAALGAATRHNPVVMAYYKRLRAKGKKTKVALVACMRKLVVILNTMLARGEMWNPTPRTTAVA

SEQ ID NO: 460325 - protein, 338 aa, unidentified
MKLYAGVDLHSNNNYLGIIDQKDKRVYKKKLPNELSKVLEGLEPYRKEIEGVVVESTFNWYWLVDGLMENGYKVHLANPCAIKQYDGLKHSDDTKESFHLARLLKLGILPEGYIYPKEERPVRDLLRKRLLLVRNRTAHILSFQNLVSRSLGTKMNGDEVEKLREEEVEKIFNEKHLVLSGKANIAAIRFLLERIREIEKAVLQVAKLKGEYKKLLTVPGIGKILALTIMYETGDINRFPDVGNYASYCRCVGSTRLSNGKQKGTGNRKNGNKHLSWAYVEAANFAVWYYPYIKKYYQKKTSKTNKIVAIKTVAHKLARASYYVMKDQEVFIPKKAFG

SEQ ID NO: 460326 - protein, 343 aa, unidentified
MATQLEPHKKTTMSQIYGIDLSKEKFNVNFITPELIMKESEVTNKYDSICDFLSELPAKVTLCIEHTGIYGDLLVFLANSFEVSVCAIPGYDIKHSLGIQKGKSDPIDAARIREYGERFTDKLIPAEYADEDMQELRELHNLRQVLVKDRKILLTQQKDKGRLPFRSIRAHSITTQSIYYLKEQISLVEQEIQNIIDARQEYAENCELIRSIKGIGPVTANELIIKTHNFQKISTARKAASFAGICPFPNSSGKMVKKNRISSMGDRSLKSLLYLCATSAITYNKDMKNYYLKKKAEGKHSFVALNNVANKLLRTIYAILESKQKYDPNYLCLDPRLIDKKVA

SEQ ID NO: 460327 - protein, 349 aa, unidentified
MRFYTQSHTHYCGIDLHARSMYLCILDAQGEVLLHRNFNAEPAAFLQAVAPYREDLVVAVECIFTWYWLADLCAEEGIAFVLGHALCMKAIHGGKAKNDRIDAHKIAVLLRGGMLPQAYVYPKAMRATRDLLRRRNHLMRKRAELLAHIQNTASQYNLPPLGARVDRKAERATIPAHFPDAVVRRSVQLDLGLIAHYDGLLGKLEQELALMAKAHDAFAYHLLRSVPGVGRILTLVLLYEIEDVGRFPRVQEFLSYARLVKCQKGSAGKVYGHSGKKIGNVHLKWAFSEAAVLFLRANPEAQRYLERLANKHGKGKALSILAAHLGRAVYVMLKPRVPFDQGKFLARAA

SEQ ID NO: 460328 - protein, 351 aa, unidentified
MSNTAARSKKRITIGLDLGDRRHTFCVLDETGKVAREGTLGNTREELATMARSYPGATAVMEAGMHSPWVSCFLQELGLRVIVANPRKTRAIYQNERKSDRRDAMMLARLARMDATLLHPVKHGGQQAQQDMLQLKLRDSLVRTRGALINAMRFSLKSLGYSVSNPSSESFHKFVLKEVPESIGEMIAHNVAAIAELTQRIRALDASISRLAAKRYPETIYLQQVSGVGPITSLYFVLKVGSPERFGRTRDIGAFLGLCPKRDQSGETDKELRISKCGDRYLRRLLVGAAQYILGPFGADSALREHGLRLAQEGTAKAKKRAVVAVARKLAVLLLTLWKSREPYESFPTMA

SEQ ID NO: 460329 - protein, 352 aa, unidentified
MSRKPLPCDVTTIGIDIGKNTFHLIGLDRRGAIALRLKVSRGQLERRIANVPRCLIGMEACSGAHHIGRQLEALGHDVRLIPAQYVKPFLKSHKNDYRDAEAIAEAVQRPTMRFVRIKTPEQMDLLALHRVRARLVGQRTAVTNQIRGFLIERGITVRQGLTPLRRALPEILSATSGPLSPRTVALIADLVADWRRLDERIATVSSDIEALAERDDSCQRLMTVPGIGPVISSAVVAAIGNGAGFKQGRDFGAWLGLVPRQESTGDRIVLGKISKRGNKYLRTLFVQAAHVVLVRRPGTARRGLWPWIVRAAKRLHRNMLVIALANKLARIAWAVLARGHAYQPRTAVNAAA

SEQ ID NO: 460330 - protein, 357 aa, unidentified
MVSIAFDSHKRYTFSSVEDENGRILDERKIEHEKGALGKYLARFPRGAEVAVETIGNWYWIVDEIEKAGMKPLLVHARKAKLLSGSVNKTDKLDARAMNRLKRANTLPTVWIPPAEIRDKRDLLRTRMFFARQRTQIKNRMHATLDKYALGCFEASDIFGKGNRAELKKRIKKLPQETRLDAESMLLMHDALDEKVLAFEERIYKLFDCTEEAQLLETMPGIGFLLATVIIHEIGDIKRFAGPENLASYSGTTPRVHSSGGRTRYGPVRKDVNKYLKWAYSEAANSICLNHERKPHLHVSNLYVKVRSRKGHSIAIGAVSRHLAEASYWILAKKTEYKEPKGRLHQGGRERVDVMNQ

SEQ ID NO: 460331 - protein, 351 aa, unidentified
MKLEPTAQPKLYIGIDIHKRSWKVHCATDLFGGKSFAMPPKPEVLYEYVAKHFPGHQVTTAYETGCCGYYAHRSFKTYGWNSLVVNPADIHRKGKERYTKTDRIDAQLISRELKDGRFEGIHVPDVEREQLRSLFRRRNDLVKDYRRIKSLIKMQLLYFGIAIPEEFDNDHWSHKFRDWVDEVAFAYPSARETLDSRMRSFRFIDQELRDVSTKMRAYCRKHYKKDYYLLKSVPGIGGIVACGILCELGDLRRFNSIKHLAGYVGLAPGIHQSGDNQKSTGITMRAHRLMRSYFIEASWQAIRTDPVMQAYYRRHLGKNTKSIIVKVARKLLSRTLAVIKTEIPYEIGVIE

SEQ ID NO: 460332 - protein, 395 aa, unidentified
MFIVGIDIAKRSHEAIIIAEDGQVVRKAFSFRNNCTGYNLLLEQVRRLTLVKSQIVFAMESTAHYWLALYARLLKDGYTVMVLNPIQSHSLRELYIRKAKTDARDSLIIADLVRFGRCKASNVPQDKILALRELCRSRAYLVDMAADLKRKLIALLDRIFPEYESLFDSVFSKASIAVLSKYSTPQKVKNANLRKLTDILMESSNGHFGEWKAHQLKEAACSSFGIDDSGGVYSTLLGMFLEQILSLTAQADSLEKQISVFFQEFNNPLTSIPGVGTVLAATILSEIGDITRFSSADKLLAYAGLDPSVKQSGEFKSNQNRMSKRGSPYLRRAIWLASTVAVHRDPMFQTYYEKKISEGLHYMNVIGHVSRKMTAVIFAVLRDGQPYQPILQSAG

SEQ ID NO: 460333 - protein, 319 aa, unidentified
MDKEQTYAGVDISKDYLDVTIVDSDKKWRFANNQVGIKKVIKIFEGMTSVMVVFESTGGQELSLWLALTQAGIGAAPINPRQIRNFAQAKGQLAKTDNIDAQIIAQYGQAMKPHPQLIPETQELKELMARRSQIVEMISAEKNRLKAARQKLIKQDIQAHIDWLQKRLREADKELIQAIDDNPRLRDKAKLLRSTPGVGPTMTAALLTQLPELGTLNRHQVAALAGVAPFNRDSGRMRGKRTVWGGRASIRAVLYMAALVATRYNPTIRVFYQRLCAEGKAKKVAITACMRKLLIILNSMIKHKTLWQHSHSLLVVTCH

SEQ ID NO: 460334 - protein, 370 aa, unidentified
MNSITYVGLDVHKATVAVAVAEGGRGGEVRQLGVFENRPEVLSKLVRRLSNGDRRLSFCYEAGPCGYGLHRLLTGCGHDCVVVAPSLIPMKAGDRVKTDRRDALMLAKLHRAGELTPIWIPDAGHEAMRDLVRARATAGRVLSKARQHLQSFLLRHDRIYRGLRAWTSAYRRWLTTVRFDHPAQQIVLQDYIHAVQDAEARRDRLTRQINDLLPSWSMAPVAMALQAMRGVALVVAVTVVAEVGDFRRFANPRQLMAYLGLVPSEHSSGGSIRRGAITKAGNALARRVLIEGAWTYRMPARVSRKLHDRLEPLPAAIRDIAWKAQIRLCARYRRLAAAGKPKVIVTTAIAREMTGFIWAIAQIAQPPLAA

SEQ ID NO: 460335 - protein, 373 aa, unidentified
MGEDRTVCVGLDTHKAKIAVAVAEPGREGEVRFHGEIANQPEAVRRLIERLADKHGRLKVCYEAGPCGYGLHRQVTALGHDCTVVAPSLVPRRPGDRVKTNRRDAVALARLHRAGELTAVWIPDPVHEAMRDLVRARTAAMETLRRARQQLQGFLLRHERVFTGRKTWSPAHRRWLAGLRFAHPAQQIVLQEQIDTIEEAERRRDRLGQQIRELVPDWSMAPVVTALQAMRGVAFLSAVVLVAEVGDFRRFTTPRQLMAWLGLVPSEHSSGAKVERGGITKAGNGRARRVLVEGAWSYRFPARVTSPIQARLDDVPEAVRAIAWKAQVRLCARFRRLVAAGKNVNVVTTAVAREMAAFAWAIACQVQPKEAAA

SEQ ID NO: 460336 - protein, 419 aa, unidentified
MTKYDITASAPVLAAIDISKDRHEVLIEAPDKKRRRRVSVLNTLDEFDRLIGLLQGYQRPVRIAFEATGNYHRVLAYRLGSAGFEIKLISSIALARTREALHNSWDKNDPKDAQVILHMMTIGAEQFYHDPLMWGTNDIQELSKTHDMISKSKTELWHRILTHYLPLYFPEADRFHRSSRSDWFFAFLELFPSPHFIAAMTKEDFIKAAWDVVGRKVGKERLLADIYAAASKSIALPVAPESDAISMFRMVLAEGRSLIAQRNQIEARAVEMLEQNPDYQLLRTIPGIGPINALTILAEAGDLRRFRHHRQFLKFCGMDLATIQSGMFRGQTKLSKYGNARLRRTLWMAAQVAISQRANSFRDKFERYITKDRHNANLRRKASTAIAAKMARTVHAVVKSGEPYRPFFEGTIHSGRTLL

SEQ ID NO: 460337 - protein, 349 aa, unidentified
MKIIGCDFHPGYQQIVMWDKATGEMLERALSHERKEEVRAFYAGLQGPVRVGIEASGQSQWFEQLLAELGHEVWIGDAAKIRASCERKQKTDRRDAELLVKLLEEERFPRIWVPTPAERDARQLLLHRHKLVRMRTQLKNQLQALALNQGVQRKRKLWSEAGRKQLEALPLLPWASRRRAELLVLLDQLEASIGELDGAAAEQANTRPAVRRLMTHPGVGPITALAFVLTMGPAQRFRRGKQVASYLGLIPTEHSSGGRGQRLGHISKQGNPFLRGLLVEAAQSAVRHEPEMRRAYQRLAQRKCRALAKVAMARKLAVRLYWMLRREVDYAQLIQGSQAGQLESFRGRV

SEQ ID NO: 460338 - protein, 409 aa, unidentified
MEQQVERCCGLDVHRDTVAACVRTPGPNGRRQQEVRTFGTTTAELLALRDWLEAHGVTHVAMESTGVYWKPVFYVLEDSFRCLLVNATHMKQVPGRKTDVQDCVWIAQLLEHGLLRRSFVPPAPVRELRDLTRHRKVLIQERSRAANRLHKLLQDAGIKLASVATDILGVSGRAMLEALVQGTTDPQVLADLARGKLRRKLPALRQALAGRFRPHHAFLASQLLAHVDYLDEAITVVSEELQRRLAPFAAQVTKLDAIPGIDTRSAEAIIAELGVDMSFFPSDRHLASWAGICPGNHESAGKHKSGKARHGNRWLRTTLIEAAGAAIRTKDSALGARYRRVMRHRGHKKAVVAVAHAMLRSIYHLLADGTMYRDPGSDYYDRRHAHRITRRAIQLLERQGYRVTLEPAA

SEQ ID NO: 460339 - protein, 335 aa, unidentified
MNYKQFIGIDVSKLWLDFAVVVQNDVIFHMRSENSLIGIQSFVKEFKKQFALDYKSIVFCLEHTGIYNNHLLDYLRKKKANICLESGIQIKQSSGLQRGKNDKVDAKRIAQYAYKNREELKLWEPKREIVEQLKHLTTLRNRLVGVLKQLKTPLNESGEFVKSKIKKTSISLCEKTIESIVKDIEAVEKSILDVIKSDSELNRLFNIITSIKGVGAVTASEIIITTNEFKDINCAKKFACYAGVAPFEHSSGSSIKGRTRVSKMGNKSVKKLLHLAALVAVTYNEELKNYYQRKVEEGKNKMLVLNAVRNKLVHRIFACVKENRLFINNYQNALA

SEQ ID NO: 460340 - protein, 346 aa, unidentified
MKESINEQYAGLDVSLKSVSICISGTEGKIIWRGEVANEPSKVAQTLNLRAPNLSRAVVETGSCSIHLYRGLKALGIPVVCICARQAKAALRCRINKSDANDAEGLVHLARTGWYREVYVKSADAHEMRAILLARKQVAKARRDFENQIRAMLRTFGLKVGEVAKGRFEERVQRLLIQVPALQLPIDQLLASRRALLVSQAMLEKEAKLLASSDERCELLQSMPGVGPLTALAFVSAMDGAERFSKSSSVGAYLGLTPRSYQSGEVAWTGRISKTGDGIARALLYEAANALMVRVKADSPLKTWAMKMADRVGGKKARVALARKMAVIMHRMLADNVPFHPTYRPV

SEQ ID NO: 460341 - protein, 408 aa, unidentified
MTVVGIDVSKGKSMVAAMKPGGELVTTPYEVKHSGIELSRFALDVLCMEPDTRVVMEATGRYHEPVAALLHSEGIFVSVLNPLLIKQSGAGSLRKVKSDPKDALKIAKYGLDNWSTLREYTPMEAIRQQLKLCARQCDLYNKNIVMLTNNLISLSDKTFPGVNELFSSPEKENGHLKWVDLYRTFWHCDCINRMSPDAFEERYKKWCKRKGYHFSADAADALYAASCGLYTTLPRDNNAKLLVTVATDKLIALRENQSKLETEMLNLCKQLPEYETVMDMYGVGKSTGPHLMAELGDIRRFPHRSSIVAFAGVDPGVVGSGKMQLSSVATSKRGSPQLRKALFQVVSAYVKRKPENEAVYQFYAKKRDEGKPYYVCTTAAANKFLRIYYARVKECLNAAESATQAEEG

SEQ ID NO: 460342 - protein, 359 aa, unidentified
MLYVGCDAHKRYSVFAVMDDRGPVGVPVKVDHDLGLFRHYLSCLPEGTGIAIETNGPWYWMVDEIEQAGHNPVLAHAGKAKLMMGQINKTDKLDARGLALMLRNGTLPKVWIPPGELRDQRELPRLRMALVGIRTGLKNRIQATLAKYGIRIEESSDLFGKAGREALARRLGELPPQTRVSVEAELRLLDQVEEQIGLSEKRIKEVVAETPAIKLLMSLPGVGVILGIVIAMEIGDVERFGGAEQLASYAGTVPRVRSSGGKTYYGKSRPDVNRYLKWAFMEAANVIASHPRWWAGRHVGRLYLRLRERKGHGKAVGAVARHLAEAAYWMLKNKEAYREPRAQTPTSSTREETRLPHES

SEQ ID NO: 460343 - protein, 392 aa, unidentified
MKTTAKGVLQTGGEQVAVGVDPSRNALQLAILAPHGTTTKRFPLIPASLASIDAVLGQGQGVRIGIEGAATCGAMVLLHWLRQGYDIREVNPQISKRLRECLTESHTDISDAQGLAWSVRFHPHLPKVRLTVTTAAWKRLSRLRARLVKARTGLYNRLHSLLAESYGAVYKRLFPNLKSKRALEFFQAFPTLDDALDDLPQVRSLLGEERARLLEEAGRWGEGLYLETLRLEICLTIQLIFAHRTAIEGVEAKMAELSQADPQVGRLRAVPGMGTTLALTILGHSGDFSRFESHDAYAAYCGLAPAVWQSGQSRVYAKRRRRYSRPLKQAFLQLALTQLRLNPESRAYYERKRREGKPHWVALIALARQLCKKVYKLMAEKAPPNPPLDIDG

SEQ ID NO: 460344 - protein, 354 aa, unidentified
MLIIGCDYHPSFQQIAFVDTDTGEFQERRLVHPEEAEKFYRELAVQAKKMRVGMEASGLARWFERLLAELNIELWIGDATEIARKRERKQKTDRQDAQHILKLMLKDDFPQIWVPSGDNRDLRQLLWHRHRMVQARTRIMNQLQAVALNEGVRSKKKLWREKGRAQLESFRLAPWASRRRHDLLELLDRLNPTIAALSQAIEQEVEKCPEAQRLQTHPGVGPLTALAFVLIIGNPDRFQCGKQIASYLGLVPLEDSSGNRRRLGHITKQGNSLLRFLLVEAAQVTARSLPEWRSKYVHLTMRRGRKIAKVAMARTLAVRLYWMMRKEWDYAQLKKFGSHAGQPGNRDGVKQNIE

SEQ ID NO: 460345 - protein, 384 aa, unidentified
MKKNNTAKKSPKPKALSNFKKNQIREVAAKQRLTIGLDLGDRTSRYCILGEAGEVVSESQLPTTKAGLSSLFEKMPSSRIALEVGTHSPWVSRQLAGMGHEVIVANAHKVKLITQSVHKNDRIDAEQLARLARVDPKLLSPIRHRGPEAQADLAVIRARAELMEARTRLINCARGLVKPMGERLKKCDADQVKETLGEGLSEAAQRVIGPLLKSVEAISKQIAEYDQRIEEIAKRYPEQKLLTQVYGVGTLIALAYILTLEDAERFEHSRDVGPFLGLKPKERDSGDSHPQLGITKTGDGLLRSLLVQGAHCMLRKGAPDSDLGAWGLAKMKSGGKNAKKRAIVAVARKLAVLLHALWSTGEVYDPLYNRKAAQAAKSKGQIAA

SEQ ID NO: 460346 - protein, 382 aa, unidentified
MQPIDTVNPTILLAIELSASTWLVAARVPGLEKPHLHRMDGGDTAALLALISSLQARAARGLDATIGVVCCFEAGRDGFWLHRLLTAHGVVCHVLEPTSILVNRRARRAKTDRLDAEGMLRVLAAYLRGDHQACSMVRVPTPEEEDAKRTHREREKLVQERLRIENRIEALLFTQGIRKRPSLRSWERDLAVLRTGDGREIPRHLRAELDRLRRRLVMTLELIREVEAERDQAAKAKPQDQACHKIAALSRIRGIGENFAAVLTREVFYRSFDNRRQIASYVGITPIPYQSGGMDRDRRISRAGNPRARTTMIQLAWLWLRYQPGSELAEWFRERVGTLAGRTRRIAIVAMARKLLIALWRYAETGVIPAGAEIRAETTVAA

SEQ ID NO: 460347 - protein, 371 aa, unidentified
MKKTIRSFVGMDVHKASISISVAEDGRSGPVRFIGAIPNTPEAVGKMAKQLARHGELDFCYEASGCGYGIHRQITGLGHKCTVAAPSMIPRKPGERIKTDRRDSEKLAILHRSGDLTPVWVPDTTHEALRDLVRARVDASMHLMRARQQLLAFLLRHGRSYMTGNHWTQRHRCWLAGQTFQEQAHGIVFQDYLETVWTAQDRRDALVQRISAMVATWSLGPLVEALRGLRGIDLVSAATFIASTGDLSRFESPRLLMGYLGLVPSEHSSGGTIRRGGITKTGNREARRMLIEAAWSYQYPARIAKEKAEILVRLPKIIRDIAWKAQTRLCTRYRSLIAKGKKPTVVVAAIARELAGFIWAIGQEMRVPMTA

SEQ ID NO: 460348 - protein, 402 aa, unidentified
MYVGWDWASQRHDVTVIDDTGQLADRWTLAHTEAGIHQAMTRLANHGRPDDLPVAIETTSGIVVDRLLAAGHPVVPIHPNSFNAARPRWGASKAKSDPGDSFKLADYLRTDGHRLRRLQPTDAATRHLQAISRLRADHLEAKTTATSQLSALLEAHWPGAKAIFARLDSDIALDFLERYPTPQAAQRLGEARLAVFLRRHGYSGRRTPAQLLHRLRTAPVAVDQLDPEVLADCIRTQLRLLRTLLGSIAELDRALAAALGEHPKAAVLQPLPRIGQINLAQVLAEVGPILDRASDLSQAAAEVGASPVTKQSGKAAVVQFRWAANTRARNALGIFADNSRHASPWAAHLYRQARRRGKRHPQAIRILMRAWLRVIWACWHTGRPYAINHHRAEQRLTQAPAA

SEQ ID NO: 460349 - protein, 354 aa, unidentified
MRDEQKPVSEAVVWVGVDVSKSTFDAALAEGGQGGCQPLGKLPARCFSRSPEGVAELLAWLRASGVAPESARVVMEATGRYSVELAAWVAQACPPLSSAIESPRQTVAFIKSLGLRNKTDRMDARALALYGVERRPRAYQPPPASEGELRELVRYRDFLVQQKVAAGNRAEEMRDSKFIQREMRRQIRQLERDIAKTEKEMARVKQATPELENDIALMTSIYGVAFLTAATIRAELGDLRRFEKARQLTAFAGLNPSLRQSGSSVRGRTHISKAGNPRVRRALYLSAMVAVRGDNDFRHDYERLRAQGLSKMAALCAIMRKILVLMRALLISGKPYVPLWKNRPQLQEKMFLEA

SEQ ID NO: 460350 - protein, 320 aa, unidentified
MMTQNDLVVVGIDVAKDKVDACIRSQSPTRTFPNTLEGRRRLTSWLRSCKVGKAVMEASGGYERDWAYALRKAGIEVRIVDPKRVRNFARSAGRLAKNDAIDAQMIAWFAETFTDAPGQACDAEREKLVQIVYARLRLIDLQTSLQNSSEHSSPDIVHKMQARLLKKIALEIAKLEAAAGAMIKTTPRFAELAEIIESVPGLASTSSAGLIATMPELGQVSGKIASALLGAAPYDDDSGKRRGERHIKGGRRRIRNLFYMACLGAATQHNPVLKAFYQRLIAKGKEPKVALIACMRKLIVILNTMIARGEKWDPSRYALR

SEQ ID NO: 460351 - protein, 400 aa, unidentified
MIDIDETSVFLGLDVGKSHHHGHGLTPVGKKVFDKALPNGEPQLRAVFDKLRAKFGTVLVVVDQPASIGALPLTVARDAGCQVAYLPGLAMRRIADLYPGEAKTDARDAAVIADAARTMPHTLRSLDLADEITAELTMLVGFDQDLAGEANRTSNRIRGLLTQFHPSLERVLGPRLDHPAITWLLERYGSPAALRKAGRRKLIEAIRPRAPRMATRLVDDIFTALDEQTVVVPGTNTLDLIVPSLAKSLAAVHEQRRALEAQIEALLEAHPLSQVLTSMPGIGVRTAAVLLTTVGDGSSFPTAAHLASYAGLAPATKSSGTSIHGEHAPRGGNRQLKHAMFLSAFAALHDPASRTYYDKCRARGKTHTQALLRLARQRINVLFAMLRDGTFYEPWPASAG

SEQ ID NO: 460352 - protein, 440 aa, unidentified
MNRVIPTGAAVTNGKESQNMKAWNEVTHFAGFDWAKDHHDVLVLDGTGKIVTEFRFDHSAEGWACCRQKLTAFPLLAVAIESGHNAGIERLVTLGYRVYPVHPRSSKSYRTRKQPSGTKTDHIDCWALADALRLEGESWHVQTTPEPLVQQLRLLCRDEVTLIEQRTALVNQLQQALYEYYPAALEAFDDWCAPSAWAFVEIFPTPQALAQAGRRRWETFLHTHKLFHPQMNQKRLVIFAKADQFCGHEAVTTAKSALAVALAKMLHTLERQLARYRTLIEERFQQHPDHAVFASLPGAGPKMAPRLLSELLALRSLPEHPQALQCLAGMAPVSYQSGKVSVVYLRRQCNRPLRHTVHLWVDLSRHYCDWAQIYYTTHRQKGQSHACALRCLGMRWLKILAAMIRNQTPYDAALHGRNQLHHGSWVLQLQPNKPTVGDAP

SEQ ID NO: 460353 - protein, 310 aa, unidentified
MERHFVGLDIAKDKIDVHVRPAAATDLVRNDEAGIGALVARLQALRPTLIVLEATGRYEMPVTAALASAGLPVVVVNPRQVRDFARATGQLAKTDTLDAAIIARFAEAVQPPVRPLASEATQGLAELVARRRQLVEMVGAERNRAAQARDRRLRREIGTHVRWLEKRLDKVDRELGTTIRATPVWRERDELLTSVPGVGDVTSHTLIAQVPELGALTRRQIAALIGLAPINRDSGTLRGARTIAGGRGPVRCVLYMAALVAVRHNPVLQTFYTRLVAAGRPRKVALIAAARKLLTILNAMLRDGRPWQPA

SEQ ID NO: 460354 - protein, 356 aa, unidentified
MSRDRKYIGMDVHKEAVVIAVLNGTGKQVMESIVETQASSILQFIHGLQGELHVPWEEGTWAAWLYDLLKPQVQQVLVCDPRRNALLKEGNKSDKIDARKLADLLRTGMLRPVYHGENGLRTLRELGRSYQTISKDLNRVMNRIKALYRGWSIPCAGTQVYAPRYRQEWLGKIEHAGVRRRAELLYQQLDGLQTLRRTLRPELLAESRKHKAAKLLRQIPCIGPIRAARLLALIQTPHRFRSKRQLWTYSGLGIETRDSAQYRFVRGQLQRTKKPQQIRGLNRNHNHEMKEIFKGAATRASCGVGPLRDFYVALVDKGMKPDMARLTLARKIAAIALTLWKKEERFDAEQLKTQAA

SEQ ID NO: 460355 - protein, 483 aa, unidentified
MKPKRVESNKKASCRPTPNNWHKMNRKQRREMTRKIQSEDLSLEVVHPDAAGIDIGNESHYVAVPPTRDSQPVRRFGCTTSELKGVAVWLKQCAIRTIALQSTGVYWIAVYDILEEAGFEVYLVNARETKNLPGRKSDVQESQWLMKLHTYGLLRNSFRPSQEIRTMRTYWRQRNDLVRSAGRHIQRMQKALTQMNIQLANVLSDVSGMTGQAIVKAILAGERDPYELAALRNWRVKASEEEIARSLEGNWQEDLLFVLQQEQDGYEFCQKPMAECDQRLQQYLQRLEDRSHGAGLPEEKRKERLRKKKKGNAPQFDLRAELFRMTGTDLTQIDGIDVTTTMTILSEAGWDMSKWKTEHHFVSWLRLCPDNRISGDKIIGKGRSPTNNRLTNALRMAASTLRLSNTYLGAQFRRLRTKLGAPVAIKAMAAKLARLVYRMLRYGMPFIDRGAEFYDAQHRKLQINYLKRKAANLGFQIIEAPAA

SEQ ID NO: 460356 - protein, 343 aa, unidentified
MVHHVGLDVSLKQTSICVVNQVGSVVREGVVDSEPEAIAAFVRSKAPGAVRVGLETGPTATWLWSELKQLGLPVICIDARHARAVLKMQINKSDRNDAAGIARIMQTGWFKEVRVKDLGSHSVRALLASRALLVKIKRDLENQIRGLLKNVGLVIGRAKFNVFAVRAEELIEDRPELIAVVGPLLKARQAIEQQTDDLDRKVLKLARHDVQVRRFMTVPGIGPITALCFKATVDDPTRFKRSRSVGAYVGLTTRRHASGEIDWTGRISKCGDAMLRSYLFEAAGVLLTRVPKWSALKAWGMRLAKRNGLRKATVAVARKLAVILHRMWMDRTEFNWSKKEVAA

SEQ ID NO: 460357 - protein, 406 aa, unidentified
MIFVGIDWSERRHDVCVLDADGVVLGKAKVSDDVSGVGRLHAMLAEHVDDPSDVVVGIETDRGLLVGWLVQAGYHVFAINPMAASRYRDRHVVSRAKSDPRDAKVLANLVRTDRQNHREVAGDSELAEAVRVLARAHQNLIWSRQRQVNALRNTLREFYPGALRAFSPSQLASVEACSVLAMAPTPTWAREKLTMPRLRRSLAASGRKRNLERRAGQILEALQAEELSAAPLVEQAYGDVVGSLVMVIDGLTHQIAKLETELAERFEGHPDAEIITSLPGLSSVLGARVLAEFGDDPTRYADGRARRRYAGTAPITRASGTRLVVLARVARNRRLFDACYLWAFSSLTSSSGARRYYDAHRARGKTHHQALRALANRWVGIFHGCLIHHELYREDVAWVVHADAAA

SEQ ID NO: 460358 - protein, 405 aa, unidentified
MRYYIGVDWADAEHAVWVEAEHATLVTKRTVAQTAAGLSEWGRWLDERRAEGIDLWAAIEKPEGRIVDFLLDHGVLVFAVNPKAVDRARDRFRMCRAKSDPFDARGLATFLRTDHTHLAPLRPSSEAAQELNGLTRDYVRHVPHQTRRLNQLTVTLKAYSPRGLELGGELTSQWRRAFLHDFSTPAALATLTERQWHRWGRAHRLSAARMAELWPVLQAPQIPGPPHVVRVHARRLGTLLPLLAAASSAVEAYPTAVTDFFGSMPTAEWATSRPGASGTTVPRLYAELGDADGRWQTFRHWPAPGGTVPVTERSGHSCLVKFRFAGHLHLRDAVQQFAFQSLQHRTWARAYYDRCRQRDLSHHHALRSLAAKWLKIIFVLSTRHIASDETYHLATIGRQHLQQPA

SEQ ID NO: 460359 - protein, 380 aa, unidentified
MRTVSGLDVHKDSIFMCILDEQGKKTEEKFGVTTREIKRMAVVMHSRFVSDVCMESTGIYWIPLWRLLETDFKLHLVNPQFLKQLPGRKSDVKDAQWIATALLKELVRDSFVPDGNIQRLRQYGRRINEINKDTVRCEQRIDMLLQRCNVRLSNYVSRTRNRSYRKVVDSLIRGETSVDELIRLIHGRTVNRHGKSAVHDALEGCIVESDRDLLGQYTQMLDMYQSQKQQCHEAMVQMCMNLYREAFLFLLGIPGVKELSAAIIISEIGDNMELFATAAALVSWAGLRPRNDESAGKIKSRQITHGNKYLRKALIECAWSAARTRGSVFYCRFWHLKGMKKHHNAIIVAVAREMLTVIWTLLSRHENFDETYHLKKKTAS

SEQ ID NO: 460360 - protein, 431 aa, unidentified
MGRFLSELAGQRNETSHGAPEPVRRFGCFTADVREMGRWLVEKGVRSVAMQSTGVYWMPVFEALEQQGLEAYLVNAQHTKNVPGRKSDVQECQWLLKLHAFGLLNNSFQPTDEIRIARTLWRQRSNLVAEASSVIQRMQKVLTEMNVQLSNVLSDVSGMSGMKIIGAILEGERDPWKLASFVEPEVKAKPEDIAKSLEGNWREELLFVLRQHVELYRIYQEKITDCDLQLRKHLESLGSKVDLRTQPIGNRPKGKKNSKNAPGFNLRTELYRITGIDWTQINGIDVLTAQTVIAEAGADLSAFPSEKQFASWLGLCPTNEQSGGKILNRRTRKVVNRATVAFRNAALTLLRSQSYLGAQYRRLRTRLGAPKAITAMARKLACLFYRLIKHGQPYVDKGTEYYEAKYREQQIRSLAKRAQKLGLQLVIPKTA

SEQ ID NO: 460361 - protein, 350 aa, unidentified
MVVVGADVHKRTHTFVAVDDVGRKLGEKVVAATTAGHAEAVMWARERFGTEVVWAIEDCRHLSARLERDLMGFGQSVVRVPPKLMAQTRASARTRGKSDPIDALAVARGFLREPGLPVASHDEVSRELKLLVDRREVLVAQRTATINRLLWRVHELDPDHAPKAGSLDLAKHRRILGDWLVTVPGLVAELARDELADITRLTETINALAKRIGERVRVVAPVLLSLPGCAELTAAKLVGEAAGVTRFKSEAAFARHAGVAPIPVWSGNTAGRVRMTRSGNRQLNAALHRIAVTQIRLDGLGQTYYRHRIAVSGSKTEALRCLKRRLARVVFHHLHTDHQNRIQPCQPAAA

SEQ ID NO: 460362 - protein, 432 aa, unidentified
MISTGYRCPWYDGGADDTSESLPGTTNQKIIPSRSTNVTAPGELLAKRRISDDAAGYRILLELLAEHGDSPESPIPVAIETSRGLLVAALRTGRRRVFAINPLAASRYRDRHGVSRKKSDLGDALVLANILRTDMAVHRPLPADSDQAQAIAVLARAQQDAVWNRQQIGNQIRSLLREYYPAALDAFLAKQGGLAREEARIILAKAPTPTEASRLSLSQLRSVLKRAGRVRGIEEEADRLRGVLRAEYAHQPAAVEDAFGKQLLALLKQLEAACQASEDLAEAVDACFREHPDAEILLSFPGLGVQFAARVLAETGDDRDRFADARGLKAYAGSAPITRASGKKHYVGRRMVKNNRLHHASYLWAFSSLRSSPGAQAHYRHRRDLGDWHAQAQRHLFNRLLGQLFHCLQKRVLFDEQRAFNSPVSSSTAAAA

SEQ ID NO: 460363 - protein, 358 aa, unidentified
MVDKVTEAAVVGGVDTHKDLHVAAVVDQNNKVLGTQYFSTTRQGYRQMLAWMTSFGTLKRIGVECTGTYGSGLLRYFQNAGLEVLEVTAPDRMERRKRGKSDTIDAECATHAAFSGIRTVTPKTRDGMIESLRVLKTCRKTAISARRVALQIIHSNIISAPDELREQLRNMTRMQLIRTLGSWRPDASEYRNVTNVYRISLKSLARRYLELHDEIADLDVMIAAIVDELAPELIKRNAIGYESASQLLITAGDNPQRLRSESGFAALCGVSPVPVSSGKTNRYRLNRGGDRAANSALHIIAIGRLRTDAKTKEYVARRVAEGHTKMEAIRCLKRYISREVYTLLRNQNRRINSIPITA

SEQ ID NO: 460364 - protein, 326 aa, unidentified
MTLSHLTDNTFVGIDVGGVGLDVAWHRGDSAHYANRPDAIATLVERLRTGPEVTRIVLEPTGGYEKPLVKALRQAPLPVEVIHTTRFNAYRALVGVKAKSDTSDARLLASYAAAPDEVRGRKAGHVELPEDATREALSELAGRRDQLKHMIHAETCRLGMVRLTELRQAITAHLEALRAEDKQVHRMMLERVRQRPDLRRDQRLLKTIKGIGVKSALGLLASVPELGRIDNKAAAALIGVAPFVRKSGTMSAPARIHGGRAAVRSILYMAAVTASRHNPVLRPFYERLIANGKPPKLALIAVLRRLVVFANAVLRSGQPWRGANAT

SEQ ID NO: 460365 - protein, 372 aa, unidentified
MNYNTVYVGMDVHKESFTLCSCKYEDEKASHYQRTPASYKNVLRYLAFLRTIYGEDTRFVCGYEAGCLGYSLYHQLENFNVECVILAPTTMLEQRSKRRIKTDKRDAEIIARSLAQHNYSPVHIPTETDNQTKEFIRMRDDHKAELKKIKQQILSFCLRQGYQYDGSGNWTAKHVKWLRSLKTEGLYKEILDEYLLTYTILTDKLNRLDQRIEELASKEEYKESVSKLTCFLGIKIHTALSVIVEVGDFQRFVSARKFAGYLGLVPGQHSSGDDRNGLGITKAGNTHVRRLLVESAQSYTRGKIGYKSRVLRSRQAGNSPQIINYADRANERLRRRYYQMVLKDGKKYNIAKTAIARELACFIWGMMTDNIY

SEQ ID NO: 460366 - protein, 354 aa, unidentified
MIIIGMDYHPSFQQLAFVDTETGEYQESRLQHREEAEKFYRDLAARGVKVRVGMEASGQARWFERLLAELNMELWIGDAAEIRAKRVRKKKTNREDARHILRLLLEDRFPRIWVPSWENRDLRQLLWHRHRMVQMRTRIMNQLQAVALNEGLCCKKRLWRESGRKQLEGFPLAPWGSRRRRDLLELLDRLNPTIAELTQTIEQEVEKYPAAQRLMTHPGVGALTALAFVLIIGEAERFRCGKQIASYIGLVPTEESTGERQRLGHISKQGSALLRFFLVEAAQVTVRSDMEWRSKYFHLAMRRGRKIAKVAMARRLAVRLYWMWREKRDYEHLKKFGSYVGGPGTGVGARQNIA

SEQ ID NO: 460367 - protein, 373 aa, unidentified
MPRYSTAFGMDVHLRSTTVCALDAETGEAVTRRFRGNPWGEVAEWMSGFPGPSLAAYESGYLGFAPQRELSGLGVDCVVAAVSKVPRSAADLSSKNDRNDAARMAKAILSHDVTPVWVPSPEIEGLRDLAAAHDAATARLAAAKQRLLAFLARRGYVYGGTTPAGNPRKYWTYGFLRWLDGIHPADDGGIRALAALRNEVEAADETREALLAEYRAAVAAGPLSAEVEALQSIKGCGFALAAAFASEVGDFSRFRSGRQVTAYFGLAPKQRSSADSVRLGGISGAGNALVRKLAVEGSWCYAAARHQPKLMPRDTGVPLEIRMHGRKGSERLLRRREEMLARGMPQAKANAATAAELVRWLWALGTMCREGAE

SEQ ID NO: 460368 - protein, 352 aa, unidentified
MRNSIIDPTLTQTVGLDVGDRHSSFCLIDSGGEILEESRIATSAEALTGLFARLEPSRVVLEACGHVHWIAKLAGEHGHEVIPANPRELHLISQGGRKSDRNDARTLARLGRVAPDLLRPIKLRSEGCRASRSLLSARDELVETRTRLVTFVRGQVKSFGGRIPGCSAGCFHRRAGAHVPEILCEVVTPILDVLAQLETRIRAYDRQIERVAEERHPETKVLRQVDGVGPILSLAFAATIEDPNRFSSSRTVGSYVGLAPRLYESGTKSPQLSISKCGDRYLRRLLVNAAAYILGPLARESDLRRYGERIAGSGSQRDKARARIAVARKLACLLHHLWRTGSVWDRNYQLAR

SEQ ID NO: 460369 - protein, 426 aa, unidentified
MSRNDYNRQAARRQRIRKTTLIVGVDVGNAFNAVGFMNKEGNVLGSCSKLYNNREGFEQFVNIIEGLKTKHHLRDVLIGMEPTGHYWRKLAYFGKEHGYEVRFVRTTALKHHRELDESSSAKSDQRDALTIANITREGKYIDTVIEDGLLRQLRTLSKARERLLRYSVSARNSLHAALDEYFPELHEIFWSMGSRSLWAILAQSPFPQDVMLMGVATLQGLIARSSRKKAGSALKAEKLIEAAQKSIGVKQIGNADRYRVQMCLEEVKRTVLSLKNIDKQLKSLLKETPSATYLMSIPGIGPLSAAVFLGELGDPAHFHNARQIVKYAGYDPQESDSGSRIGRKFISKKGRWLLRKYLFFMSMRVVVLSNYFQEYYQRKLETKNRVGQQPRRKEMLCAVAIKLIKVIFALLRDKREFEDLAPAAVA

SEQ ID NO: 460370 - protein, 351 aa, unidentified
MLIIGCDYHPSVQQIAFVNSETGETGERQLLHKDGEAERFYRDLKLRGISVRVGIEATGHARWFERLLAELGFELWIGDPAQIKAARVRKQKTDRQDAQLLLKLLVEERFPRIWIPSPENRDVRQLLWHRHRLVQMRTRVMNQLQAVAMNEGVRRKKALWSKSGRAQLESFVLSPWASRRRQDLLEVLDRLNPTIDELSTAVEQEAKKRPEVLRLMTHPGVGALTGLAFVLIIGSAERFACGKQIGSYLGLIPCEDSSANRQRLGHISKQGNTLLRFLLVEAAQAAVRGDAEWRRKFVHLAMRRDPRIAKVAMARKLAVSLFWMWRKEWNYEQVVKFGSHAGQLGTGHGVK

SEQ ID NO: 460371 - protein, 410 aa, unidentified
MPVVYTRCCGLDVHQASVTACVLVFTGERNEVRIKQFSTFTGELIRLRCWLKSSKVTHVAMESTGVYWKPVWHELQGHFELLLVNPLLVKQRRGHKTDQADSEWIAEQLQVGGLSSSFVPPQPVQELRDLTRYRTGLLQDRGRVVNRIHRLLEDMGIKLSTVATDIMGVTGRLILDAIVRGQQDPGWLADYAKTSLRAKKKELTQALRGYVSEHHKRILQFLLRDYDNLSAGVAELEEELKQRYSGHQELINRLCQIPGVDQTACWTILAEAGFDLQPFPSSGQFASWAGVCPGNHESAGKRRNVGVLKGNRYLRRMLVQVAWAASRKKDSFLRAFFLRLSTRRGPLKALVALAHRIAVILYRVIRNQEIYRELGGNFYDRRNPVRTAKRLMQRIQALGYQVEVSVTPSQ

SEQ ID NO: 460372 - protein, 348 aa, unidentified
MAHFVGLDVSVKETSVCVVDDAGKVVCERKVPTEPDDIAVLLTSIGGDYLRVGIEAGPLSQWLVNGLSEAGFPVICVETRHMKALLQAQQINKSDRNDARGIAQMMRVGLFKPVHVKTLAAQEQRMLLTSRKLVQRKLIDIESDMRGTLRNFGLKVGVVSTIGYETRIRHLVEGFPRLAAIIEPLLTVRRVMRQQLATLHKMLLDTVRHDPVCRRLMTAPGVGPVVALTYRASIDQPQRFVHSRAVGAHVGLTPRRHQSGEIDYDGGISKSGDTMLRTMLYEAAQILMTQSRHWSWLKAWGMKVAQRRGMRRAIVAVARRLAVVLHRMWTDGTDFRWGSEPATAVAAA

SEQ ID NO: 460373 - protein, 370 aa, unidentified
MLDTTTFIGLDVHARSIKAVSLDVMTGEVRAATFGYDAGAVAEWVRSVDPRARCVYESGVTGFDLQKRLSGLGVDCVVGAVSKMIKPSADRRRKNDRNDAEFLARMLSVGNVVEVWVPDDECEAARDLTRALEDARDDLSRAKQRLSKFLLRHGLAFDERTPTGRRKGNWTRAHWSWIESIRFAEGADNDVLAYYVDAVRRAAEEKARLEGLVEAEARKPRWRRRVDSLRCLKGVDTASAADLVFEAGEFSRFRNARSFAAWVGLTPSEHSSGESDRRGAITKAGNKHLRKALVEAAWHYLTCSGRPKGLARGQAPDRVARRHAAKGVRRLAERREALLARGVHGNKANVATARELACWVWAVGLMAEEA

SEQ ID NO: 460374 - protein, 348 aa, unidentified
MDHYAGIDVSLECSSVCVVDASGKIVREGKVASEPEAVIAYFGSLRLPVVRIGLEAGPLSQWLYAAMKQAGLAVELLETRHVHDAFKAMLVKSDRNDARGIAQLMRLGWFRPVHCKSLAAQELRAMLTARKLVQSKLRDIENSLRGILRGFGLKVGHTTARSFAVRIRELVEGQANLETIAQALLAVHAVLLREFNGFEKRVRIMAREHVKARLLMTTPAVGPIVALTYACAIDDPARFKSSKQTGAHFGLTPKKYQSGNTDITGRISKIGDAAVREALYQAAHVMLTKPVKGCPQLKSWAMRIARRAGMRKAKVALARKLAVVMHRMLADHKPFNPTARTTPIAAPA

SEQ ID NO: 460375 - protein, 345 aa, unidentified
MEHYAGIDVSLESASVCVVDASGRIVREAKVASEPEVLIGWFGMLGLAVTRIGLEAGPLSQWLYAGMREAGLPVELLETRHVRDAFKVMPVKTDRKDARGIAQLMRLGWFRAVHCKSLPAQEVRALLTARKLLQTKNHDVEMSLRGVLRGFGLKVGPTTPRTFAARIRELVAGHPTLSTVAEALLAARSTLFEQWQKLEKRLRSLARQDRRVRLLMTAPGVGPIVGLTYASAIDDPSRFRSSKAVGAHFGLTPKRYQSGETDVSGRISKIGDGGVRTALYEAANVILTRPVKGSTLKNWGMRLAARAGVRKAKVALARKLAVVLHRMLANGTTFLAEKAAPAAAH

SEQ ID NO: 460376 - protein, 351 aa, unidentified
MSLVMLGVDPHKQSHTATALVTGSHQQLATLRVPASPAGYRQLLAWARQFPQRRWAVENARGLGRHLTQWLLARGEIVQDVRTTATARVRELSRGRGRKTDALDAAAAAAVAALQGDAAQLQPEDATVVLAVLEERRSNLVGQRTRSVNQLHAVLRELIPGGAPRKLRADRAAALLRAVRPLTAADRARKQVARDLVAEIRGLDRRLAMIGKRIQDTVTALGSRLPETVGIGPVIAGRLLGRTGRASRFPTAAHFASYTGAAPVEVASGEHARHRLSRAGDRQLNHALHIIALVQVGIPGCAGYHYFRRKLAEGKTTREAMRCLKRRIADHVWRVMLSDEQARNHHQPQAA

SEQ ID NO: 460377 - protein, 407 aa, unidentified
MDVMHAKCAGLDVHQQTVVACARLAIGRSVTYDVRTFATTTPELLALTDWLTAHGCTHVAMESTGVYWKPVWQVLDGSFELVLANAMHVRNIPGRKTDVNDATWIADLLAHGLIRGSFVPPAPVQELRDLTRTRKQLVREIAQHTLRIQKTLEQANIKLTGVLADILGVSGRAILHAIVTGEADPERLAGLANERVKAPRADLVAALHGRITAHHRFMLKLHLTQLEALHIAVRDVEARLGEALAPFRAAVDRLITMPGISETVARVIVAEIGFDMSRFPTAAHLVSWAGLCPRLHESAGKRLSNRTRPSNPWLKTTLVQAAWSAARHKDSYFRAQFLRIKSRRGPKKAVLAVAASMLTAAYHMLKTDSDYRDLGVDHFDRRDKAKLAKRLIARLHDLGLAVEIRAA

SEQ ID NO: 460378 - protein, 358 aa, unidentified
MKIVGCDLHAKQQSIAMLDTETGEFTEKVIRHEGNAVREFYAALEGPTVVGIEATGSMQWFLELLEELGIQYRVGHPAKIRAAETRKQKHDRRDARLILDLLVMEDRFPEIWMPSMEQRDLRTLLRDRHQWVKMRARLQHTMQSMALNHGLRRGAGLWSTAGQSTLKALPLARYTSQRRNALLSLYGQLQKRIQELDKVVEGEAQSRPQACRLLTHPGVGPVTALATEVFLGDPRRFRTGKQVASYIGMIPGEHSSGQRQRLGKLSKEGNSLLRYLWCEATLHAVVKDPELKRFYRRKLIQKGMGKARVAAARKLGIRLWIMLRDQIDYQQFCRRGKLRQEGEAHVGMPGFNSGPASQ

SEQ ID NO: 460379 - protein, 355 aa, unidentified
MKSVKYIGLDVHLSTISVAVLDAEGKLVMQSVVATHAAAILDFIHGLRGALHVTFEEGTHSSWLYDLLVREVARVVVSNPRKNALLKAGNKSDTIDARKLAELLRAGLLSPVYHGETGTATVKQLARSYAALTEDTTRVMSRLKALYRGQAIASAGKKAYGRRHRAAGLAQLKGGGLHRRVQRLYEELDALQALRREARRELIAESRKHLAVKVLRTVPFLGPIRAAVLIGRVQTPHRFRGKRQFWAYSGLALETRSSADYQFVNGELERKKRPIWIRGLNLNHNHDLKNVFKSAATTASAREGPLRTFYEGLLAKGRVPAMARLTLARKIAAITLSVWKKGEPFDAEQLKPQAA

SEQ ID NO: 460380 - protein, 425 aa, unidentified
MEEISKRTVLNTLYVGIDVDSKKNVIYMMDFNQICLASFSILNDINGVGVLKDKALEVLKKRDDLQFITFVLESTSVYAFHTATYLSNNEELLVYSPKVYCINPKVSSNYRKSFSDMNKDDAIDARLLADIARVGRCDKLNPWRGSQLVALQRLTRHRKHLSDMLAAEKNYVLNNIFLKFSGLLTANSQDAPFSNVFGTTSSFILTDFMSTEEIVDTPLEDLVSILNEKSNKHFSNTEETAKLLKQAAANSYRLDKVSSEPINLAIASSLNCIRSFEAEIKSVDKSIMQQIKGLNDTEYMSLTSIKGIGKVFAAGIIAEIGSIDQFRNDDALAKYAGITWRKTQSGSFEAEDTYMTKTGNSYLRYYIIEAAQHVVWHVQEYNNFYTKKLNEVSKHKEARARVLTARKLIKLIYALMSNRSLYKER

SEQ ID NO: 460381 - protein, 386 aa, unidentified
MQKLNDLSRCLTTLKPDGTLIAVIEMSLSSWLVAGIVPGVERQPLKKLAVDESALLKLLHRWREEAEKAGRRIERVAVAFEAGRDGFWLARWLKARSIEAHVIHAASVAVSREHRRAKTDRLDTELLKRAFLGWLRGERDHCKMVDIPTIKNEDAKRPNRERENLVSEQSRIINRMKAALIRLGIRGFNPKLKRAARRLEDLRTPEDEPIPPNTLAELRRDIERRRLVRDQIRQIEEARLQRLDHAPGDGPHAMVRLLARVIGVGIETADMLVHEVLSRSLRDRRAVARYAGLTGSPDESGRKRREKGLARSGNGRVRRGMIQLAWRFLLHQKDSALAQWFRARTENARGTRKPMIVALARKLLIALWQLVRQGVVPDGVVLRSAQ

SEQ ID NO: 460382 - protein, 343 aa, unidentified
MKLIRVGVDLAKNVFQVHGVDRKEKGVWRRRLTRENWVKVLLETVEPGCEIGMESCGGAHHWARKLQEKGFTVKLIAPQFVKPYVKSNKNDANDAEAICEAMSRPGMRFVAVKGVEQQDIQAVHRIRSGLIEQRTAKANQIRGLVAEYGLIAPKQLSHLRVALPVWLDDTHNGLTDRFRRLLNGLWGDLLGLDARVKELDREIVLIAQNNPLAKRLEQLRGVGPISATALAAAVGDGTQFANGRQMSAALGLTPKQHSSGGKERLLGISKRGDAYLRTLLIHGARSVVRTAQGKTDRLSLWITRLAERRHPNVAAVALANKTARMAWAMLKNGTDYKPDRIAA

SEQ ID NO: 460383 - protein, 424 aa, unidentified
MHNRKAKPMNNWKDITHYAGFDWAKDHHAVVIVNAEGHIVADFEFAHSLEGWKSFAEKTSPWPSLAVAIETSQGAAVDQLLQRQCLVYPVHPVAAQSYRERKAPSGTKTDHLDAWGLADALRVDGHGWKQLQPMDPITQQLRLLCRDEVSLIEQRTALVNQLQQALAEYYPAALEAFDDWTDGFTWEFVLAFPTPQLLVSAGKRRWEKFLHSHKLWRPPTAEKRLKLFAQADQFKASEPIVRAKSQLAVSLCKLLCTLRQQLKLYRKQIEALFREHPDHELFGSLPGAKKVLAPRLLGAVGNDPDRYGSQEVLPCIAGTAPVSYQSGKLNKVRIRWSCDKFMRHTVHLWADCFRKASAWGQTYYQKKRDEGMSHACALRCLGQRLLKILFRILKERTPYDAELHARNQQKHGSWVIKLVNEPAA

SEQ ID NO: 460384 - protein, 298 aa, unidentified
MKHFAGLDVSLDETTVCVVDEAGGIVREARVPSEPEALVAFFRGLGLAMERIGLEACSLAAWLHEGLTAAGLPAVCLETRRAKAAMGAMPNKTDRNDARGIAQIVRTGWYRAVHVKSPACRSWRALLAARRLVLNKMRDVENGLRALLREAGLKRGRPARRELAARVRELTAGDPVLSAVAEPLLAVVEVMSRELAGLTKQVLAVVRDEPVCRRLMGVPGVGPLTALAFRATIDRPDRFRRSRDVGAHLGLTPKRYQSGETDVQGGISRCGDELARTALYDAAHSLMVRRRKWSTVRA

SEQ ID NO: 460385 - protein, 506 aa, unidentified
MTTPTTRTTRRKPAASATSGPQAQAHAHRQAYNRRKTRAKAKSETLRQKEAAQVEALPLLHPHAAGIDIGSRSHWVCVGFTTEAPSGLIQEFPAHTDGLKAIAAFLHEHQVTTVALESTGIYWIALYELLESEGFEVLLVDPSYTHQLRGRPKTDRRDCQWIYRLHSVGLLAAAFRPDEKTCQLRAYLRQRANLIRQASQHVQHMQKALEQMNLKLTEILSDITGVTGRAILRAILRGTRTPEKLAQYRDKACKASETEIAQALTGTYREEHLFALKLAYEAWQFTLRQVEKVDTQIALQLGRMKCDRALPPLTQKRRPSRKINVPRFDVRMTLYYVVGLDLTEIEGISEVTALTIISEIGPEVSKFPTVKKFCSWLGLCPNWKKTGGRVKSSRTRPGVNRAATAFRLAAHGLHRSQGALGAFLRRMKGRLGTASALTATAHKLARIVYLALKHGLPYVRKSQQEYEAQMKEKQLKTLKRKARQLGLELIEKPSAGSGTGEASVQG

SEQ ID NO: 460386 - protein, 394 aa, unidentified
MFFIGIDVAKRSHQAAVTDISGNVIVKPFNFKNSSDGFTKFLSIVESNAIEKNDCTIGLESTGHYWYPLYFFLIENGFDVKVFNPIQTAAFREITIRKVKNDNLDSLLIADFTRFGRYSETYIPDENMLALKNLTRFRLSISDICGSLKKKVIAILDQVFPEYTGVFSDVFGKTSKQLLEQFSTPDEFMDISTTKLTNLLLKVSRGRNGREKAELIKTAAQSSIGISYALDAFSFELKQLLAQIEFMENQLSDVDAEMEKLLSQSEYAVITTISGIGPMLGSVIVSEIGDINRFENSSKLVAYAGLDASVKQSGEFNSSKNKISKRGSPYLRRALWMAAFMSLQCDPALYEYYSKLRARGKTHRCATTAVARKLCIIVWAIMKSKKPYSPVLKN

SEQ ID NO: 460387 - protein, 334 aa, unidentified
MQSMYYIGLDVHKRTISYCVKDGSGKIHADGTIPATRFDLDPWMRTLPQPWTAAMEATVFTGWIYDYLLPHAAARKVAHPLMLRAIAAAKKKNDRIDASKICDCLRCDFLPECYMASTAIRDRRRTLRYRNLLVRQMVQMKNKISGLLMEAGVNYNKQRLHKAGYFRELLATNPDIDEGLCALLRLCRETVIRLQKTESALVRSLERDALLLERVERLMSIPAVGPITALTWALEIGDVQCFSSIKKAVSYCGLCGAEKSSGNTVQRTPLSKQRNKHLQTTLIEAAKMAPRNSPDLAMLYDREKQKGNANRATLEWRVSWYRIWLQWIAGKKSF

SEQ ID NO: 460388 - protein, 349 aa, unidentified
MIIGCDFHTRYQQIAMMDTETGELVERRLEHENGEARAFYASLPKPVVVGMEATGYAQWFERMLAEFGHELWIGHASEIRAGVVRKQKTDARDALHLLHLLLEKRFPRIWIPSPAERDTRQLLRHRHKLVCFRVSVKNQLHALAMSQGVCRKKKLFTAQGREVLEKLSLGPWARRRCQELLEMLDQLNTVIEELDRAVQQQAESHAEAARLMRHPGVGPVTALAFVLTLGPVTRFRRSKHVVSYLGLNPKERSSGGKQRTSTISKQGNTMMRWLLVEAAQTAARYDPELLRLYQRLKFRRGANVAKVAIARKLAVKLYWMLRATATCVQRAPMQGSSRGTLVPQAGSSF

SEQ ID NO: 460389 - protein, 410 aa, unidentified
MEKKGKRYIGLDVHKHYLVALGVDDNLEVVLPVRRVEFSYLESWMKKNLTKQDEVVLEMTTNTWQLYDELIQHVGKVTVVHPPHVALITRSQVMNDKIAASILARLLAKGLLVGIWVPPQEIRELRGLVAQRRKMTRLATQAKNRLHAVIQRHHLKPPEGNPFSKANNAWWEKLSLGKLEKMNLQSDLETLQFAEQQEVRIEKEMTGIAAEDAEIGRLLHMSGFGVVTAVTVYAAIGDIRRFLEPKKLVGYAGLGARVHDSGMTTRTGKITKAGRRDLRVAMVEAAHVVANSHPHWKAELARLEPRLGRNKAIVAIARKLLISVWYIMSEQTADRFADPGRVAQKLLKFAYQVGKENRPEGQSAAQFVRQRLDALQLGSDLTSIAWGSKKPIPLPPSTLLEKKKSDVPNR

SEQ ID NO: 460390 - protein, 411 aa, unidentified
MTKEDFIYVGIDLHKETHTAVMIDCYNNKLGEITFPNRPADFPKLVTKVKKCNTDAKEVVYGLENAYGYGRALAVWLIDKGYFVKDVNTAISHRQAKHRGAMYRKSDSDDAEAIALATLNMLDKLPDACPNDAYWSLGQLVHRRDNIMKQRTRLVNQLHEQLHISYPSYKSFFNDISRPTALYFWENYPSRKYLKGKSVEDLGEELVPVSHNKCSTKTCQAILDAVAGDKVKNIDYQDARDMVTLSIVSDLQHYDSQLTEVDKMLEQMYKMLGCTLTTIPGVNVITAVKILAEIGDIKRFSNANKLAQFAGIAPLHLSSSGKGKDVATKQGNRRLQATIYFLAIQMVQLSSKGTPRNPVVRAYYEKRKAEGKTSQQALICISRRLISIIYGMLKNGTEYRMPVVENAGENR

SEQ ID NO: 460391 - protein, 360 aa, unidentified
MQTKVNEKLFDGQSIYVGIDCHKKNWTVTILGEQYEHKTMSQNPDPDILASYLKRNFPGADYNAVYEAGFNGFYSCRRLRELGINCNVIHAADVPTRQKEKIQKMDPVDSRKLARSLRSKEFEAIHVPEPSLEADRALVRQRFRIMKDVTRTKARVRSLLFQFNINVPDRFTLGQARSWSKVYINWLKELQVEHESLKQTLDNYIRIGELQRKELLSVNRQVRTLSQNDIYRNNYNLLISIPGIGFLTAMTFLAQIGDIRRFERLDDLCDYIGLVPMMHGSGDKMYTGKLINRGRKELKIMIIEAAWEAVRLDPALMVKFNELARRMNKNKAIIRIARKLVSRMRFVLMAQEPYTLGITE

SEQ ID NO: 460392 - protein, 351 aa, unidentified
MLYTGLDLHRSFSYITTMNDKGEIVGQKKVPSNGEVVEFLKEFDDTMEVAIEATPNWYWLYDCLEDEGFKVKLSHPLKTKAIAYAKVKTDKVDSATLAHLLRSDLLPLSYVPEKPVRLNRELLRYRARLVRVQTRIKNNIHTILAKNNVSHSYSDLFGKEGMAFLYSLSLPENYKIALEGYLSVLETLRYEIRLASKRVQALAEENQDAVLLMTIPGVGYYSALMIESEIGDVKRFPSAKQLCSYAGLVPSTYASGNTCYHGHITKQGSRWLRWILIEAAIHAVKRPGPLRSFYFKVERKKGGKVAKVATARKLLEWIYHMMRDNKSFKEAERLAELQGRGEPVKKPGLVL

SEQ ID NO: 460393 - protein, 359 aa, unidentified
MNSVKYVGMDVDQATLVVVIEDSKGKFLMEAFVPCSSGDIREFFKTIKGTIHVAFEEGAQAAWLYDLIQPLVAKVVVCDPRQNKLIQSGKKSDRIDAGKLAKLLRLGELHEVYHGERTTRGLKELVRAYECLVEDTARTKNRLKGAFRGRGIRCRGKNVYHQAERKEWMGKVDIAAMGLRVMGLYEQLDFLSKLREEAKKAMLAEARKHSANKLLITVAGLGPVRSAQIIATVGTPHRFRTKRQFWPYCGLGVVSEASGEYEIVENKPRRRKKPAQTRGLNKNFNRRLKAVFKGAAKSAIVGEPFKQYHQRLVDNKMREELALLTVARKIAAITLAVWKKGEKFDSDRVNQAAQGTGNE

SEQ ID NO: 460394 - protein, 375 aa, unidentified
MKEKLRFLGLDVHAETVAVAVAEPEGEVRSLGTIPNRTESIRKLIKKLGPAEKLRACYEAGPTGYVVYWQLAELGVHCEVVAPTLVPVKAGGRVKTDRRDAEKLARCYRSGDLTAVWVPDEGSEALRDLVRAREAGKQDQMRARHRLSKFLLRSGQRPPSGVRPWTRPYLIWVAQLRFTQIAQEATRQDYLHEVEHMRERVARLEQAITEAVKLASPALKQVINDLQALRGIADISAVTIAAELGQVSRFDSARQLMGYCGAVPSEDSSGRRTRRGGITKTGNAHLRRIVVEAAWSYRRPPCIWYGLRRRQESISEEAKEIAWKAQHRLHKRYMKLGAAGKNQGKIVTAVARELLGFIWAIGTKAEMVARQRVAA

SEQ ID NO: 460395 - protein, 390 aa, unidentified
MIYVGIDVAKDKHDCCILGSEADKLYPVFTIPNNKTGFDELYEKIFSVTDDRTEIKVGLEATGHYSLNLLGSLIDKGLPTCVINPLHTNLYRKGLSLRKTKTDKVDASAIAMMLMTDRTLKPYSETSYHNEELKSLTRYRFDKVHERSKLKASLARLVNILFPELEELVPSLHLNSVYTLLEELPGATYIADCHLTHLKKLLEASSKGRYSRDKAIEIRNAATVSISAPMAAKSMELVHTIRLIRMLSEEIEEIEGSIKSIMDELNSPIMTIPGISYRMGAMIIAEVGDFKRFDNADRILAYAGLSPSTYQSGQLDSSYSHMEKRGSRYLRYALFNATKFVCKWDESFGIYLGRKISEGKHYNVAVSHATKKLTRTIYRMELTGEAYSPR

SEQ ID NO: 460396 - protein, 375 aa, unidentified
MEHHSEAFIGIDTAKLRNAVAIAESGRKGEVRYLGEVDTSEAATRKLVAGVAAKYRRLTFCYEAGPTGYGLQRLIESLGHTCLVVAPSLIPKKAGDRVKTNRRDAEGLARLLRAGELTAVWIPDPRHEAMRELTRARDAARQDLTRKRQQVSSMLLRLGKIYSGIKTWNARHRSWLANLKLEHHEQRFALEEMLQAERQAGERIGRLEQAIREAVPNWSLSAIVPALMAMRGIDLVAAVTILAEIGDLTRFESPRQLMAYLGLVPSERSTGDSVKRGGITKAGNGRARRVLVEAAWAYRHPPRVGVEKQVLVAAAPRAAREIAWKAQVRLCKRFRTLTRNGKKSTVVATAIARELAAFIWAISREVSGARPAHAA

SEQ ID NO: 460397 - protein, 352 aa, unidentified
MTVTIVETRLQARAITGGVDTHAGAHVAAALDPIGGLLGVQEFPATPAGYAQLLSWLGGFGTVCLVGVEGTGSYGAGLARHIAAAGVRVVEVDRADRQDRRRAGKSDPLDAVSAARAAQSGRAAGAPKGRDGQVEAIRALMVAKRSARSERTQTINQARALIVTGPDDLRARFARHSPADLVADLAALRPRPGSMVRYHTLLSLRELGRRAQFLDGQLQRLDEFIVPLVTARAPGLLALYGVGPDTAAMLLVAAGDHPGRLRSEAAWAHLCATAPLSASSGKVTRYRLNPGGDRQANHALYRIVITRLSSHPPTRAYASRRGKEGLSEKEIIRCLKRYVAREVYPHLRQPAR

SEQ ID NO: 460398 - protein, 422 aa, unidentified
MKKRAYRRTAIKDFDASTVSKRTESTQLVLAVDVAKVDMVAALTTGTGEVLTTLAWKHPAETPLLLEKLWELRGQRYNIVGVMESSGSYGDVLRHQLQGVGLLVYQVSGKRVHDAKVVYDGVASLHDAKCSAIIAKLHVDGRSSVWESKTDSERALKAAVSTMDLYQVAYLRLVHQLEGWLARHWPEVTQLVGLTSATLLAVLARVGGPADIAASPEATRQLMNGMSHRLMKPEKIERVLQSAMTTAGLRLLEEERRALMTLADEAHRALRAHKEAKTKVEKLAAGTVSDAMAPAVGKTTAAVLVTEIGNPLLFPSARSYLKAFGLNLKEKSSGKHQGRLRITKFGSGRARQYLWLAVYRWRKKDPIAQAWYDAKAKRDGGSKARAAVALMRKLVKALYHIARGVPFDSRKLFDVAKLKFTA

SEQ ID NO: 460399 - protein, 314 aa, unidentified
MQAVFIGVDVSRDTLVIAGSPGRQRLTIANEQSQIEQWLKDLPEGTSVAMESTGRYHQLLATLARDRGLRVYVLNPKRVWYAARGDGRRSKTDRIDAQVIVKFLRDHVDDLHEWNPGTPLLSKIAMLERRRQCIERHCTAMRLSLQGLEGLDQQLGQFLGSLKAMRQAIDDRIQALVKADQQLARKQALLTTVPAVGATGAASMAALFARVPFKRSDSVVAFVGLDVRASDSGTYRGRRKLTKLGPAHLRRQVWLMGFAACHTKIYKPFYEAMKMRGLKSTEAIMILGRRILRIAWAVWRTDKPFEPQLVGKRA

SEQ ID NO: 460400 - protein, 393 aa, unidentified
MGKSKQPHKPLNDLSRSPTPFDPNHTLIAVVELSQKNWLVAGVIPGVERQPLKKLEADADELLKLLERWRTEADKAGHKINRITVAFETGRDGFWLARWLENRGIKAHVIHAASVAVSREHRRAKTDRLDTEQLKRAFLGWLRGEREHCKMAVIPTLAEEDAKRPHRERETLVGEQTTIINRIKAALTRLGIRNFNPKLKKAPERLEHLCTPEGEPMPPNTLAELRRDMERRRLVAEQIRQIEKTRLERLKQAPNTGPNLMVCLLARVIGIGIETADMLVQEILSRNLRDRRAVARYGGLTGSPDESGKKRREKGLARSGNARVRRGMIQLAWRFLEFQKDSALAKWFRARTENARGSRKKMVVALARKLLIALWHFPHDGAVPEGMVLRPAH

SEQ ID NO: 460401 - protein, 427 aa, unidentified
MKNNLTSTLFVGIDVSSKTNVVCALDFEGNKLLKLSADNNLPGADLIAKGIISCANDHKLLHIVVALESTSFYSLHITNFLSSHEELLFFSIMVYCLNPKSIANYRKSFVDIDKTDPLDAFIIADFARVGRIQSKPWRGSQHLALQRLSRHRLHLIEAMTREKAYMVSNIYLKFSELAVLDKSERPFSNTFGVTSAAVLMEYMSLEEITYASIEELVEFISLKGKNRFSDPLATAKVLKKAAQDSYRLDKVLYEPLSTSIASSFNVIDAYSKEIKVIDKAIVKAIKGLNTNEYQSLVSIPGIGPVLASGILAEIGSIAIFSSQDALAKYAGLTWRQKQSGDFKSEITRMTKTGNKYLRYYLIEAANSVRNHVPEYAAFYQKKYSEVTTHNHKRALALTSRKLVRLIFGLLTKNQLYSNNIVGIHKTE

SEQ ID NO: 460402 - protein, 364 aa, unidentified
MKKISKKQRAFAAESKPEKIVGLDLGDRYSHYCMLTASGELMEEGRIRSTIAALEKQFANEPRMRIALETGTHSPWVSRLLECHGHQVIVANARKIPVITASESKNDRNDAEQLARMAAFDPKLLHPVEHRSLERQQDLNLVHTRSVLVRARTMLINSVRGLVKSGGGRLPACSSAAFPGKAREVIPEVLKMACEPLLEQIAQMNRGIGEMDRQVEGLDKKYPEISILRTAPGVGPVVAACYVLTLDCAEAMETNRQAGAYLGLRPRQQQSGDSNPQRGIAKTGNNYLRSLLVQSAQYILGRFGPDSELRRWGLKLAASGGKRGKKRAIVAVARKLAVLLLSMWRNRRKFEPFPQAAAGLTVAA

SEQ ID NO: 460403 - protein, 489 aa, unidentified
MAKTKRKQSTFERLRSGELNRKQRRNLARRLAGNDPGLTIIHANAGGVDVGNESHFVAVPPDRDANPVQEFGCWTADLKRMAEWLNSCRIDTVAMQATGVYSIPLYDILTGHGIEVVLVNAQHSKNVPGRKSDVQECQWLMKLHTYGLLRDSFHLEERMEGVRTVWRLRDRHVKDASRAVQHMQKALTKMNVQLANVLSDITGVSGQAIIAAILQGERDPWKLADLKHEMVKASREEVARSLEGNWRDDLLFELQQAVNSYHFVHQQMRACDRQIESFLTSLPTKILERPPLPDSAPATTVKKAKKPRKLRKARHNQPTVDLTTALKRICGVDLTSIDGIDVITAQTIVSEIGTDISKFKTEDHFASWLGLTPAKDITGGKIIGHGRRKVQNRVAMALRMAATTLLESKSYLGARYRHLRQRLPSHAAAVKAMARYLAVLVYRVLTHGEAWVDRGAAKFEQSRSERELRSLTSKALAKGFKLVPITAAS

SEQ ID NO: 460404 - protein, 482 aa, unidentified
MQPKPQEKTTKDTCRTEPGHWHEMNRKQRRETMRKIQSDDLSLEVVHPDAAGIDIGNESHYVAVPPMRDSQPVRRFGCTTAELKAMAQWLKQCGIRTVAMQSTGVYWIAVYDILEAADLEVYLVNARERKNLPGRKSDVQESQWLMKLHTYGLLRNSFRPSQQIRMMRTYWRQRNDLVQAAGRHILRMQKALTQMNIQLANVLSDVSGMTGQAIINAILVGERDPHKLAEFRDPRVKASKHEIALSLEGNWQEDLLFVLKQEQDGYEFCQKQMLECDRQVEQYLQQREDRSKGTPLPEEKRKGRLKKKKGNAPQFDLRGELFRMSGVDLTQIDSIDVMTATTILSEVGWDMGKWETEDHFVSWLRLCPDNRISGDKIIGKGRLPTKNRVSISLKMAASTLRRSNTYLGAQFRRFRTKLGSPIAIKAMAAKLARLVYRMLRHGMKYVDQGAKFYETQHRNLQIKQLKWKAAKLGFQVVQAPAA

SEQ ID NO: 460405 - protein, 317 aa, unidentified
MERMDFSRKIAGVDVGKHHLDVAVHGLEDLARVSNTAAGHDELKDWLKARGVGRVGLEATGGYERAARLALEAAGFEVVVHQPLEVRRFAQLKRRRAKNDRLDAQLIAAATAQVEAVRAAQDPRLAELAERMTAYEQITDQIVELKTFLEHVTLKDIGSALRTQVRALEALKLRLASQILTAIKAHPDLLARYRLLVSLPGVGPIVAATLLIRMPELGGMRRGQAASLLGVAPFDRDSGQWKGMRFISGGRARPRRMLYLAALVAKRFDPGLRAFGETLKARGKPPKVVTVAVMRKLIEAANLVLQRGQPWVKVMTA

SEQ ID NO: 460406 - protein, 466 aa, unidentified
MGLRNAIGIDPDSKGFVCATVKLPGAQVTTKGYMTTDSDLKAFVRWVKGQGETIVAIEGSNGLSRPLEKALREAEVIFYSFKPADTDKFRKAVLGQNKDNRKDAESVARYAMALEAQGKLERYRRVWFADAELQLLTRGYERKSQGMTAEINRLWKLLRLACPDLYLALGGGHPEVELSEKILKSQGILTLLSQKPDLGQWKHLSEEQLLEAMGGGKYKGREKLIQQLRKLAGSFAPVSPAMALLIRSSAQQIERFKSEQAEITKMLDVFTQDNAAVHALKQMRGIGTLTAATMIAEIIDIRRFAKEDSLACYSGLGMKEHSTGNSLRMVPTQLFNHRLKDAFMTAARNFVQYNPESHLAGYHRNLVKRGMSSMEATKRVARALVRVIYRELSAVVAAQDTHTPVATQKKEGEGDMASGLTRSDQSHTSNISPSSLRTSKATESKRVKGLSARTLRRRKEVSKKTA

SEQ ID NO: 460407 - protein, 520 aa, unidentified
MARTRSRKQRRSRRPQVLQKPRGTFHPRVQRVGPEHFGIVSVDPAKARSKWMLCDFYGKVLVPPTFVPHHRGELQAALATLRDAVQTHGLKDLLVAVERTGRYHHPIKHAFAAAGFEVRIVHPFATKQFRQASDPGQKTDDTDLAAIHRAASSGFALAEAPLDRPWRELQLLVRHRRDLVHKSSALCCQIREHLDAALPGYAACFAELWESPLALHLPRQLGSSQAIGQAGLEGLRARLRQDRVGFQERSLHRLLVWASQAPPPDVAAERHLAIALLLDDDRRQKRHEIQALEQQIAAHLTRPPYVLLLSFPGIHVVSAADFAGEMGPISHYANSRAITGRAGLYPSRYQSDQVDHPHGPLVRCANRKLRATILAIADNLLACNRHFAALAAHWKAAGKDPRKTHVKVAARFCRIAYQIVAGRQVFRHPSLPGRSYILQKLLDFQSQHQTPTAECLAQLQAATDQLPRREHAAEAAPLVRALRHTRQARRRGPQPLGQILPIVLARLGVTPVQSPGSGDS

SEQ ID NO: 460408 - protein, 347 aa, unidentified
MRFYTQQHKHYCGIDLHARKMYVCIIDQKGKTKVHQNIKTDPERFFELVFPFLEDVIVGVECVFCWYWLADLCADHKIPFTLGHALYMKAIHGGKTKNDKIDSYKIALLLKGGNFPTAYPYPAKWRATRDLLRRRMYISHRCSELVAHIQNTNTQYNLPAFRKKLSRKYNHDGVAERFEDPEVRKSIEVDLEMIESLDQILKKLEWHIEKIARQHDYHTLYLLRSIPGVGQILALVILYEIHDIRRFPRVQDLSSYARLIRPKKESAGKWAGHSNKKIGNHHLKWAIKEAAILMLRDSNQAKYFVGKLERKYNKGKALGIFTHKLGRAIYFMLKNKEAFDMKRFFAQ

SEQ ID NO: 460409 - protein, 358 aa, unidentified
MRIIGCDLHARQQTLAMLDTTTGEIVNLTLTHEGNNVREFYCKLPRPVRVGIEASGSMQWFLNLMDELGIECQVGHPASVRAAEPRKQKHDRRDADLILKLMVENRFPSIWLPSKELLDLRALLLHRHQWVRMRTRVQNALQAIVLANGLRRGPSLWNQAGQDQLASLPLAPHTAHRRSELQALYAKFAMEIEKLNQRVEKQAGERPTAVRLMTHPGVGPITALATDVFLGDATRFADGKALASYVGIIPREYSSGGRQRLGGLTKQGNPLLRFLWCEAAIHAVRKDPELKRFYCRKLFQKGLGKARVAAARKLGIRLWILLRDQIDYNEFCRRGQRRQKYGGACAGMPERVMAQNSR

SEQ ID NO: 460410 - protein, 345 aa, unidentified
MSMVRMIVGGVDTHADQHVAAVIDSNGGVLGIESFPADHAGFEALLGWFMAYGEIDLGGAEGTGSWGVGLARFLHDHEILVVEVDRPNRQNRRRVGKSDSTDAVAAARAALSGSASVIPKTRNGPVEQIRILMVARRSARSQRIETLNQLRHLVFTGPEEVRARFKDRYKTGLVTEVAKLRPRKGSDPVLYTTMVTMRGLARRIQSLNTETKALDVMLTELVKDTAPSLVGLYGVGTDTAATLLVTAGDNPQRLRSEGSWAHLCGVSPIPAGSGKTSGRHRLNRGGDRQANAALYRIVLTRMSRDERTRTYVARRRGEGKNTAEIMRCLKRYVARETFKHLPRTA

SEQ ID NO: 460411 - protein, 313 aa, unidentified
MEHELHYIGIDTAKEKLDVDVLRPDGRHRTKKFANTTKGHDELVSWLKGHKIDHAHICIEATGTYMEPVAECLYDAGYIVSVINPALGKAFAQSEGLRNKTDTVDARMLAGFCRQKCSAAWEVRHQALTDMHTQELNRTETAREVQRPSIDAHLLWLEAELKRLEKQIKDLTDDDPDMKHRRKLLESIPGIGEKTSAVLLAYIGLKDRFAHARQFAAFAGLTPRRYESGSSVRGESRMSKAGHVSLRRALYMPAMVATSKTEWGRAFRDRLAANGKKGKVILGAMMRKLAQVAYGVLKSGVPFDASRHNPVAA

SEQ ID NO: 460412 - protein, 437 aa, unidentified
MTRPTGPRWVGIDVSKATLDVAILPDEVTFQLTNDATGWEQLVTRGELATVQGIVLEATGSYHLGVTLALAGADHPPAVINPQRTHAFMVSEGMRSKTDRGDARLLARFGQQKQPAPTPVLSENARILRDLVGCRDDLTKHLVMEKNRRGIASAHVRDVHDTMIAFLIQQIAEVDQRIAALIAADAELTARAAVLRSAPGLGPVLSAVLLARLAELGQRDPKTLASLAGVAPHARDSGTRRGARTIGGGRPAVCKALFQMAQTAVRSNAVMRALPAPAAADAPQTRRDRLCPADAGHPQCDGPQGIDLAGDRGRARPVSARFGLTPNTVTTNTGRRGGGRALFDATRPRPVSSRGSKATRDRPVPQDRSLWRHTPRGFVGCTYEAPKAATRRGSWDDMGRKWRLGSAACRVDRSQSIRPIRGPPARRGSPPRMHRCG

SEQ ID NO: 460413 - protein, 360 aa, unidentified
MRKQSNTLNFEGQNIYVGIDVHLKSWTVSILSDHLHHKTFVQPPSPEALFSYLHAHFPNGNYLSAYEAGFSGFWAHYKLVEMGIQNIVVNPADVSTSQKERLQKTDAVDSRKIARSLRNNELTAIHVPCRETLEIRTLLRSRDALVRDLARMKQRVKAFLYYYGIDYPKEFQHSGTHWSRAFMNWLRNGIRMDTEEGGAGLSLLLDSVESQRRLLLEATRKLRALSRSDGYATDYELLRSVPGIGMITALSLLAELEDIRRFANSDRLAGYIGLVPTSHSTGEKDNKGEMTFRGQMQLRSKLIECAWFAARIDPALSMAFSKLTRRMEPNKAIVRIARKLLNRIFYVLKYKRRYKNETVE

SEQ ID NO: 460414 - protein, 391 aa, unidentified
MSMYFVGIDISKYKHDCCIISAADQQIVSKFTVKNDKDGFEHLLTTLNSLSNPEDIKIGFESTAHYALNLELFLENAHHSFMEVNPVLIKEYKKSTTLRRTKTDSVDCESIARWLMTVEYKPHSKGFYHSYSLKSLTRLRDRLIRQRSFYLVKITNVLDHTFPEFKPFFNERLSKTAIYLLENYGSAEKMAHMNSASYDKLRCASRGKFSIQQFLRLKELAANTVGVNNSIFDIELNSLLTLYNSLCKEIKTLEAEITKLIEEVHPHYMSIPGIGPISAAVIYAEYGDISNFSNPGQMLAFAGIEPGINDSGTESHGGRMVKQGSSQLRYVLLNACLPLIRFDITFATYYAKKRAEGKKHRVAITHVAKKLIRVIYALERQDVDFNVQKLR

SEQ ID NO: 460415 - protein, 339 aa, unidentified
MELYAGLDLHSRNTYIGIMDKTFNRVFKKRVPNHLELILQTLDPFRDQIKGFVVESTYNWYWLVDGLMDAGYSSAHLANPSAIKQYEGLKHSDDQHDAFFLAQLLILGILPQGYIYPKKGRPVRDLARKRMFLVQHKTAHILSLQSFLQRCCAIKVRANDMRHLTVEELEMWLEEEHLVLSAQANLDSINFLKQKIKQLEKAIIQKVKLDKAFEYLLTVPGIGNILAMTIMLEVGNINRFPKVGNFTSYCRCVPSRRLSDGKSKGQGNRKNGNRYLSWAFTEAAQLGRRHNERFRKYYNRKVAQANTSLATKALGNKLARICYYIMRDQVPFREELFCH

SEQ ID NO: 460416 - protein, 385 aa, unidentified
MKGKTFKPTDYEVFGGLDVDKRSISVTFTNHQGFIRSLRMPYSVEHLVNHVRKHFGDQKVAFAYEAGPTGYGLYDGLVAKAYPCLIAAPSMIPKAPGQRVKTNRLDSRGLSENLRGGQLKSIHVPSALYRELRHLTQLRDTFVSEMVGMKQRIKSLLLFEGIEFPPAPAGRQWSFRVKDKLRKLECSKTVRFKLDQLLDSLEFSEKQVLKATREIRRFCRNDAELSQCIEYLMTIPGIGWIVASQLVAHIGDWRELKNIRQLGGFLGLVPTENSTGERTDRGSITHTGDGRLRSKLIQASWSAIRQDGELREFFRSVCRTHARHLASRVAIVAVARKLSVRISVVLMKQRPYEVRQKVRSTPLTQEETSPQGTTRRQAEPGEKNS

SEQ ID NO: 460417 - protein, 348 aa, unidentified
MDHIGIDVHKRESQIYILAESGEVIERRIRTEPERFAAVLGGRPRARILIEASTDSEWVARCLEALGHEVIVADPNFAPMYATRSRKVKTDRRDARALAEACVLGAYRPAHRLSDPQRHVRGRLLVRDAVVRTRTRYISLIRALLRQHGFRVPSGSAESFVPRVQGLPLPGRVRSVVAPLLALMRPLNRQLAYSDATIEHLAVQDPRVPRLRSVPCVGPVTAAAFLAAIDDVGRFPHAHQLEAYLGLVPREYSSGETQRRGPITKAGHSRTRWLLIQAAVSILRRRPPQAEALRTWALRIAARRGKQVAVVALARRLAGILYALLRDGSVFEQRVRPPRPTAAALVNV

SEQ ID NO: 460418 - protein, 365 aa, unidentified
MPSVTSPAGLIHLGMDTSKDTIVVGVLLPGEQIPAVDRISNDEEQVRRLVGRFGDRALLRACYEAGPGGYDLHRLLASMGVACEVVAPSLIPKGGSDRVKTDKRDAVRLARLHRAGELTPIRVPSPAEEAVRDLVRVRSAVLADRKRAQQRLTAMLMRHGRIWRSTYWTGPHRAWIAAQSIGEPALATALAHYRATLDTRESELACIESELAPWARRDPLAAAVTRLCCYRGIAELTALTLAAEIVDWRRFPSARAFMGYTGLVPAEYSSGARTWRGHITKAGSGPVRTALIEAAWAYRFQPAIGVTLRRRQEGAAPDTIARSWKAQRRLHGKYRRMVNGGKAAPEAATAIARELAGFVWAEMTS

SEQ ID NO: 460419 - protein, 243 aa, unidentified
MTILTSPTVVGIDVAKAEIVAYREDLNATQAIANDRDALGRWLNTLPANSSIALEATSTYHLDTAELAHEIGHRVYVVDAYRLSHYRESIGQRAKTDPCDARLLARYLSSEQKRLRLWSPPPQAYKLLKSLLHRRAELINLRVSLTLSWSGEPLLKDELAQQLKSFKQAEQVIQKLLHKVSKEAGITENIKRCKAIEGVGDLTATGLATAFMRGQFANGDAFIAFLGMDLRPKDSGKRPALGT

SEQ ID NO: 460420 - protein, 354 aa, unidentified
MSQKLNAAIAVIGIDIGKNSFHIVGHDHRGAIVLRQKWSRGQVETRLANLPPCLIGMEACVGAHHLSRKLQMLGHDARLMPAKYVRPYSKGQKNDFRDAEAIAEAVQRPTMKFVATKTADQLDLQALHRVRDRLVGQRTGVINQIRAFLLERGIAVRQGLRSLRSELPGILATRTDVLSPRMLRIIEDLAGDWRRLDERIEGLSSEIETLARQDKACERLMTVPGIGPIISSAMVAAIGTGDVFSKGRDFGAWLGLVPKQISTGDRTILGKISRRGNRYLRALFVQAAWVVLVRVKCWERYGLKSWIEAAKKRLHHNVLAIALANKLARIAWAVLNKGRAFECVKTEETASLPA

SEQ ID NO: 460421 - protein, 320 aa, unidentified
MSQNTSAIMNDKQTAVYAGLDIAKVSLQLHLQGKAYDLPNTIDGHAQLIKRLAAIPGVHVVCEATGGYERAVVGSLHAAILPVSVLNPARVRQFARASGELAKTDPIDAAMLTAFGQAFAPTPTPPRSATELKLTALVTRRMQLLELRVAEAQRADTCIDLALRKLFTLWLAQMEKQIAKVEALIEALLQEQAPLANQVQRLDNIMGVGRLTAVMVLATMPELGTLNRRQAAALAGLCPYNRDSGQWAGKRCISGGRAEVRRALYMAALSASRTNHLLKPFYNRLVAAGKPAKVALTAVMRKLIVLMNHLLKNPNFSLAH

SEQ ID NO: 460422 - protein, 349 aa, unidentified
MIWIGVDAHKQVHQAIALGTEGPVSERTIANTPQAWAALLEWAQQWPERIWAIEGAWYLGRGLAQYLAAQGERVHEVNGRWTANRRRGMRTAGKSDRLDARSVATLLREEAGTLPRVYADEDELAAVQLWSRMQAELTKDLTRLINRLHDLLLQCDPQYKDRLPDLTTKAAIAALRTYTAPGKGALAAEREAMIRATAEQLALLDEQDRQLRKKLERVSKTRFPPLRQIEGIGPLIACAIVAEVGRPRAGFGESQLAALGGLCPLEASSAGAVRHRLNRRGNRRLNMLFHQIVLTQGRIYAPARTYLLRRQGEGRTAREARRALKRLIVRRVYRAWRECFDINIERVAA

SEQ ID NO: 460423 - protein, 350 aa, unidentified
MLTIGVDAHKELLVAVGVDQDGTELEGWTGTNGATDWEALAAWARSLSAERVWGIEGSGNYGRGLAQYLVQHQELVYEINPRLTAAVRKRNRQPGKSDRRDALAIARAVRQEGNRLPRVYPDDVTAVVALLTAEREDALAEATRLRNQLHQVLGQLDPDYQQSWPSLRDLASLDELVSDPPAAETELAKAQVAMVCRVASRLALLEGQIAELAGEIEAQATTHYAGLTTLCGAGLLTAGMLAGLLGPAERFASDAHLAAYAGVAPLEASSAGVLRHRLNRTGNRQLNMLVHRIALTQARCSSDAQTYLARRQTEGKSWREAIRALKRFIIRRIWKRWHEIGVAAASGASV

SEQ ID NO: 460424 - protein, 428 aa, unidentified
MNQPSNNDDTQNDYAAFIGIDWADRQHVFSLQVAGQTSKETGTLEQKPEVIGPWVAKLRERFGGRPVAIAVEQSRGALIHALLSYDFIVIYPLHPSTVAKFREAFKSSGAKSDPLDTDQILQILTKHRERLKALNPDTEETRLLARLVEDRRKAVDLRTSHVQALTAALKEYFPQALELVNGNLTSRLACDFLIKWPTFPAFQQAKPSTIKRFYYRHNIRSPQVIEKVLGLATTAQALTTDTAIGESGSRLSQMYAQLIQTLNPVIEHYDSRIQKVFHDHPEANLFNKLPGAGPALAPRLLSFFGTDRSRYEAAGNVHSFTGIAPVTKSSGKTRVVYFRHACPKFDRQTFHEFARLSVAKCQWARNYVDYYTAKGKKFHTIIRALAFKWIRILFRCWKNRTPYEETKYMDSLQKRGSIFATLHLEQKS

SEQ ID NO: 460425 - protein, 348 aa, unidentified
MALTIVEDRRAITGGVDTHADTHVAAALDPIGGLLGVQEFPVTPAGYARLLGWLGGFGTVALVGIEGTGSYGAGLARHVTAAGIRVVEVDRSDRQDRRRQGKSDPLDAISAARAAQSGRARGAPKGRDGAVEAIRALMVAKRSARAERTQTINQARSLVLTGPDDLRARFAGHTVTALVSELASLRPRPGSTVGYATRIALRELGRRAEFPGRQLERLDELIVPLVTARAPALLALHGVGPDTAALLLIAAGDHPERLRSEAAWAHLCAAAPIPASSGKVTRHRLNPGGNREANHALWRIVITRMSNHPATRAYVERRTTEGLSKTEIIRCLKRYVAREVYRHLRTAG

SEQ ID NO: 460426 - protein, 381 aa, unidentified
MGYRAGGWFALVAAPAIDGVLKGFGEGRAKHHRGMTMTYYAGIDVSLESSSVCVVDATGKLVGEAKVASEPEALVAWFAARPERMTGIGLEAGPLSQWLFGALEAAALPAVLLETRHVRAAFRTMPVKTDRKDAHGIAQLMRLGWFRPVHCKSLAAQETRALLTARKLLQAKRHDVEMSLRGVLRGFGLKVGPTTPKTFAARVRALVKGHPTLETVAAALLTARAALLDQFKALERRLMAVGRADPRVRLLNTVPGVGALVALTFTAAIDDPGRFRSSRGVGAHFGLTPKRYQSGETDVTGRISKIGDHTVRVALYEAANAMLTRPVKGSALKDWALALARRAGPKKAKVALARKLAVVMHRMLSDGTCFETRPGAAATPA

SEQ ID NO: 460427 - protein, 333 aa, unidentified
MDTATGDCGERRLEHREEAEKFYRELAARGMKVRVGMEASGQARWFERLLAELNFELWIGDATVIHAKRVRKQKTDRQDAQLILRLMLKDDFPQIWLPSWENRDLRQLLWHRHRMVQARTRIMNQLQAVAINEGLRCKKRLWRESAREQLEAFRLAPWASRRREDLLKLLDGLNPTIAELTQAIEQEVEKYPAAQRLRTHPGVGPLTALAFVLIIGRADRFQCGKQIASYLGLVPLEDSSGNRRRLGHITKQGNALLRFLLVEAAQVTARNLPEWRSHYLHLTMRRGRKIAKVAMARKLAVRLYWMMRKEWDFGKLTKFGSHAGKPGTGDGVK

SEQ ID NO: 460428 - protein, 342 aa, unidentified
MQITTIGLDIAKNVFQVHGIDAAEKVVVRRQLRRGQVMRFFEALAPCLIGLEACASAHHWARELMKLGHEVRLMPAKDVRAYVKRNKNDAADAEAICEAVRRPTIRFVQVKSAAQQGQLMQHRTRDLLMRQRTQIINALRAHLAELGIIAAQGREGVKELLAIIADKRDEALPLDAQASLLVLAAQLQALQTLIGSIEKRIVAQHRANADSKRLETIPGIGVVGATAIAATVTDPKVFRCGRDFAAWIGLVPRERSTGGKRKLGPISKQGDRYLRRILVVGAHSVLRRAKLHPEKYPWLTRLLARRPFRVVAIALANKMARIAWALLAKGGTYQAPRLAAAS

SEQ ID NO: 460429 - protein, 325 aa, unidentified
MKTMFGSSVMVGIDVSSAHVDVACVGAALPAELAHVSNDAEGHSALADALAKLQPGLVLMEATGGYEAALACALQAAGLRVAVVNPRMARDFARAMQRLAKTDRIDAATLAEFAAVLAQRPDCERFVRPLSEPEQQDLAALVTRRRQLVAMQLSERQRLRLARPVARPSIDAMLEAIARQIDDVDAKMVSHVKQHHAVMARLLQSVAGIGRIAAATLIAELPELGRLNRRQICALVGVAPYANDSGSSQGRRRIIGGRFEVRRALYMATLTATRFNPSIRTFYERLVAAGKLKKVALIACMRKLITHLNAITRDHLNAQNPPLTT

SEQ ID NO: 460430 - protein, 408 aa, unidentified
MRSLGKPSHPEDRQCCLSLCVDWLPALFADTVEYPRLRACIHKDGRRLCRVGEPVNILPQPNRKSDSMTLKMTVPPFAGIDVGAETLVLVIRRNAIAMKAQTFANTAADRKRLVKKLAAFPGITVCLEATGVYHLDVAIVLHDAGLRVMVLNPKAAHHFAKILLRHSKTDAVDADTLAQYAERMPYRPWVRPTHEALALRALARRIHALTRAKASAKNQRHALTFGGDTPKAVLRDVRLAIAQLEKRIDVLTREALAFIEAEASLKAPFALLLDVKGIGKTSAIALLGELLLLPAGLTHKQWVKFAGLDPRHVESGKSIHKQPRLSKAGNRYIRSALYMPALSAKAHDPYVKGYFEHLIALGKKPMQAVCAVMRKLLHALHGMLTRNQPFDNTRFYALGAGSTALNNC

SEQ ID NO: 460431 - protein, 459 aa, unidentified
MTQEHQVSSPALASASLPKWNQHAAGLDIGDSEIYACVPVDRDAQPVRSFLTFTADLHALADWLQQCGIETVAMESTGVYWIPIYEILEARGFQVYLVNARQLKNVPGRKSDVADCQWIQQLHTYGLLRGSFRPPEEIAALRALVRHRDTLIQYRAAHIQHMQKALQLMNLKLTNVLSDITGVTGMKIIRAIMAGQHDPHVLAQYREPGCHKSEAEIAKSLQGHYKAEHLFVLRQAVELYDMYDQQIRACDGEIEAMYQAATPSNPDGHPPTQPPLPKRQKRRKNQAHFDLARSLYRIVGVDLTRIAGIDALTAQTIISEIGLDMDKWPSVKHFASWLGLAPLNKQSGGKVLNSHLPKTQNRANTALRIAAQSVARSNTAIGAYYRRVKAQHGAAVAIVATAHKLARIVYHMLKYRQDYHEAGAQAYEQQYQERAIRNLKRRAEQFGFRLDPIAQPSVS

SEQ ID NO: 460432 - protein, 417 aa, unidentified
MINDVRWFVGIDWATQSHCVCLLDAEGRRVGQHEFAHGGAGLAELCDWLLAKTQAAPGQIAVAIETPHGPVVEMLLEHGFVVFAINPKQLDRFRDRFTVAGAKDDRRDAYVLGGSLRTDRAAFRQLAADNPVMIELREWSRMADELKQERTRLANRLRQQLWRYYPQAAKLTDDVADDWFLALWQKVPTPDSAAKASEKTIARVLMAHRIRRLDAATVLKTLRETPLFVAPGTTQAACAHIRSLAARLHLVNQQIKEAQQNLDRLCAQIEGEENASGQSFEQCDVTILRSWPGIGRINLATLLAEAAEPLRRRDYHALRALAGVAPVTRQSGKQRFVVRRLACNRRLQSAVHHWSRVAIQHDAAARQRYDALRRRGHGHARALRSVGDRLLCGLCAALKRQIPYDADHNSAKTSAKA

SEQ ID NO: 460433 - protein, 421 aa, unidentified
MPNIEIGVDSMVKENFIYVGIDLHKATHTAVMIDCYNQKLGEITFPNRPADFPKLVTKVKKCNTDAKEVVYGLENAYGYGRPLAVWLIDKGDFVKDVNTAISHRQAKHRGAMYRKSDSDDAEAIALATLNMLDKLPDACPNDAYWSLGQLVHRRDNIMKQRTRLVNQLHEQLCIAYPSYKQFFNDISRPTALYFWEHYPSRKYLKGKSVEDLRAELVPVSHNKCSTKTCEKILDAVASDKVKNNAYQDARDMVTLSIVSDLQHYDSQLAEVDKMLEQMYKMLGCTLTTIPGVNVITAVKILAEIGDIKRFSNANKLAQFAGIAPLHLSSSGKGKDVATKQGNRRLQATIYFLAIQMVQVSSKGTPRNPVVRAYYEKRKAEGKTSQQALICISRRLISIIYGMLKHGTEYRMPVVESAGENR

SEQ ID NO: 460434 - protein, 387 aa, unidentified
MPASGPRPDQVAVQTSLAAIFVSLELSRSSWLITSLVPGGADKMSKHTVRSGDVAELMVHLAKLRDKAHARAGASFPIIAIQEAGLDGFWVHRVLERAGIESFVVDAVSILTSRRRRRAKTDRIDGEALLRTLLAHKRGEPRVCAMVRAPSPEEEDRRRLCRERRTLVAERVAHVNRIKGLLFAQGICDYEPLRSDRRQRLEALRTCDGRPLPPYLKAQIGRELDRLELLLEQLKTVEAERNALLEPANDVAPVAVKALAALRGIGPELTAMLWSECLFRSFRNRRQIAAYAGLAPTPWQSGSVQHEQGVSKSGNPRLRSTMIQLAWLWLRHQPTSELSLWFRERVKRNGGRGKKTAIVALARKLLVALWKFSSSGVVIKGAMMKAA

SEQ ID NO: 460435 - protein, 400 aa, unidentified
MKGRAGSGGPGRACAGRAAGSRPSAPNCKVRGRADCTRAAGQFETEVPTVSNPTRWVGVDLHRRRSQIAIIDEHGELTLSRRIVNDPETFKELLGDPDATHVALEATYGWEWLADLLEEVGYDVHLAHPLRTRAIAAARVKTDAVDAKTLAHLLRTGLLPEAYIAPPELRDLRELLRHRAVLTRMRTAVKNRVHALLARHGIRHEHTDLFGKAGREFLAGLELPEGSRRRLDSLMSLIADFDREITATTREIDARAKTDDRVPVLCQIRGVGRYTAMLVIAEVGEVKRFPTARHLCAWAGLTPTVRSSDGKARLGHISHQGSPALRWALSEAAQKIPTGGGPLRAMFERIAKRRGRNIAKVAVARQILTLCYYGLRDGEIRCLTNQPDSNDHDDELAEAA

SEQ ID NO: 460436 - protein, 368 aa, unidentified
MEITTIGIDLAKHVFALSCADEHGKVVLRKQLRRAQLGQFLCQQQPCLVGMEACGGAHYWARVIARLGHRVRLMSPALVAPYRKGSKHDRNDADAICEAVTRGSMRFVTVKTVAQQDLLARHAIRQRLLRDRIALTNQIRALLQERGVILPKGAKGLRTGVAAALADEHHPELSGAMRAMLTELMTELGELETRLECCSGALARAAEDDERCARLLEVPGVGPLTASALVATVGDAREFDSGRQLSAYLGLTPRQHSSGGKTVLLGISKHGNRYLRTLLIHGARAVLYGQRCQQHPRASWMARIRAARGPNVAAVALANHNARVLWALLRRGERYSRVRAALRPGPPAAAAPKGARAQAEKLLVVKST

SEQ ID NO: 460437 - protein, 398 aa, unidentified
MLSIGIDVSKGKSTVCGMKPGGEIVYTPFEVQHTREGMSELVSLLHNSGEEVRAVLESTGSYHCPVVAALLENGIFVSVVNSLRMKRFCSQSIRKVKTDRIDAMQIALYGLAYWQELQPTRLPEDTYRELQRLARQYYQMTSMLIKAKVDFNALCDQVLPGMQELMNDHAGRHKLSDFVLRYHHTTHILEMGETRFRKDYCKWAEKKGYRNHERMAALIFATAQNGIPVLPNAPSTQIVITEAIRVLHTVEASRDAILTQMQALAKTLPEYSLVREMPCIGDTLAPRLIAEIGDVRRFHSKRALIAYAGIDAPPYQSGKFCANNRHISKRGNRYLRKTGYEVMQSYVMHKPANDPIFTFIEKKRSEGKSGKLAMVAGLNKFLRVYYGKVTELYRSLPQ

SEQ ID NO: 460438 - protein, 337 aa, unidentified
MINFFIGIDFAKTKFDVVILSRDDLVSKGEHKQFCNTKDGVKQLEKWLHLVCGRDVIVESVICGENTGVYSVLAAKMLTREGYTVCLESALRIKRSMGISRGKNDKKDARDIAEYAARHYDKLVVYREPSQTSEALKTLFTQRRLLIKQRGDLQRRNKELTGLYKENPLLKKMLASDTRIINAIDAEIEKIEAHMKSIIDDNPEVRKVYDILTSMKGIALVNAVALIVYTDNFKRFDYDARRICSYWGIAPFANQSGSSINGKPHVSHFADHYLKSLLTQAAICAIRYCPEISNYAQRLIARKKHISIVHNNCKNKMIHILVAMVKNGTYYGEFQKK

SEQ ID NO: 460439 - protein, 328 aa, unidentified
MADQYIGIDLHKAFFQACAVSPTGERRWEGRFPRTPAGLAALAARCTPSTALAVEASTPTWHFADHLCPAVGSLCIVDPLKTKLRAGYAAKTDRLDAQRLADALRRDSIVSIYYPPLAIRELREVCRTRHALVQVRTALINRLRALLLRQGLSEARRLAKTADDRWLTALALPPRAAASVTALRTVLAVVRTETERAEQEVRRLSDADPITIALQELRGVGPILAQTIRAEIGDIRRFPTGAQLASYAGLVPRVDMSAGHYRYGRITKRGSPWLRWALIEAAMHGPKRTDRIGRWGRGLAVRKGALKARVALARVLCEEVHRRWSRIP

SEQ ID NO: 460440 - protein, 359 aa, unidentified
MLETMTYVGLDVHARSTHAAAIDVASGELRRARFGGGSDEVIAWLRELPRPLSGCYEAGPTGFALYRAAEAAGLRIDVIAPSKTPRAAGDRIKSDRKDAELLARLLLAGQLKAVAVPPPPFEAARHLARAREQVRGDLMRCRHRVSKLLLLHGRVYEGSAWTKTHRRWLAQQCFDEPATELAYLDCLAAVDGLVARKQALDERLSRLAFDGDWSQTVARLRCFRGIDTLTAFVLCLEIGDFARFPKPAKLTSWLGLVPSLDQSGESRRQGAITKTGSGYARRLLVEAAWHYLPRPSEGPTIAARRAGQPDHVIQIAHRAERRLHRLYQRLRERGKPGNITTVAVARELACFLWAAAVSE

SEQ ID NO: 460441 - protein, 390 aa, unidentified
MERPMQKSNDLSRSLTALEQHGTLIAVIEMSLSSWLVGGIVPGVERHPVKKLAVDESSLLKLLHRWREEAEKAGHRITRIAVAFEAGRDGFWLARWLKASGIEAHVIHAASVAVSREHRRAKTDRLDTELLKRAFLGWLRGERDHCKMVAIPTIKDEDAKRPNREHESLVGEQSRIVNRMKAALIRLGIRGFNPKLKQAAARLEELRTPENEPIPPNTLAELRRDMERRRLVRDQIRQIEEARVERLDHAPCDGPHAMVRLLARVIGVGLETADMLVHEVLSRNMRDRRGIARYAGLTGSPDESGRKRREKGLARSGNGRVRRGMVQLAWRFLMYQKDSALAQWYRARTEKARGTRKPMIVALARKLLIALWRLVRQGVVPDGVVLRPAQ

SEQ ID NO: 460442 - protein, 347 aa, unidentified
MNKGNLIGIDLSKHSFQGCLLDQHSDEVFNRKFTRKSLTNWLSKQKPLVVAMEACGSAHHWARLVKRLGHQPLILPTRSVTGFRLGHKTDATDARATAVAARQPKLKTVAPKTIEQQGMQGVERIRQHFCDHLTATGNLIRGLLNEFGIILPVGISKFKQGVIEVLEDAENDLPMPLRLQLIESWRYYLDLEDRLKIAIQARDQLIEQHEACRRLMQLASVGPVNALGLYMSLGDRGDSFANGREASACIGLTPKQYSTGGEVTILGISKKCANKRLRSSLIQGARSVIQVVQKRDPRNSKEAWLKSLIARRGEGRAAVALANKTIRVAWAMLHYGDDFRSHQTMVV

SEQ ID NO: 460443 - protein, 345 aa, unidentified
MRPMYYIGLDVHKQKISYCVKDVGGKIYAEGWIPATRFDLDRWMKRLPQPWSAALEATMFSGWIYDHLKPHAAELKVAHPLMLRAIAAAKKKNDRIDANKICDCLRCDFLPECYMAPTAIRERRRTLRYRNLLVRQMVQMKIKISTLLMEAGISYNKQKLHKAGYFRELLATNPDIDESLRSLLRQCREMVVRLGKTENALIHSLQQDRLLAERVERLMSIPAIGPITALTWALEIGEVQRVSSIKKAISYCGLCGDEQRSANSAQRTPISKQRNKHLQTTLIEAAKMAPRYSPTLALLYDREKQKGNANRATLAVARKLVAYLMAVDRGQTHFLVVDREACVAA

SEQ ID NO: 460444 - protein, 359 aa, unidentified
MKDPKSPSPVIIGGVDTHKELHVAAVVDATDTVLATESFSTTRAGYRAMLRWMRSYGDIARVGVECTGSYGAGLMRHLDTAGLDVLEVTAGDKTDRRKRGKDDTIDAEQAAHAAFARVRTVTPRAHNGMVESLRALKIVRKTAIAGRRTALQMIQALIISAPEELRDQLRNMTRMQLIRILAAWRPDLSDYRDPVTATKIALKSLARRYLELHDEIADLEVHMHALVDELAPDLLARTGIGYESATQLLITAGDNPDRLGSEGSFAMLCGTAPLPASSGKTTRHRLNRGGDRAANSALHMIAVSRWRLDPDTKVYISRKRAEGHSNPEILRLLKRYIAREVYYLLRNQHHTINQTTTAA

SEQ ID NO: 460445 - protein, 412 aa, unidentified
MQLLHSRVAALDIGKRSLVACVCTPAKQCEAERRQELRTFATTTPGLLELRDWLVAEGVTCVAMESTSGYWRGAFYLLEDAVGDVMLVNPAHARNVPGRRTDALDAAWLCELAEHGLRRASFVPPRPVRELRDLTRYRASLIAERTREAQRLEKELEDARIKISAVVSDLLGVSGRRILHALVDGQCDPRELAQLAEGRMRARIPELAEALDGDFRDHHAFLVRMHLRRIDEITAAIDELSQRIEEAMGAFVRERELLETIPGVGQHTAEMIIAEIGADMGRFPSSGNLASWAGTTPGHYTSAGISTSYRTRPGSRWLAAALGLAAICAGRSENTYLGARYRRLLPRLGNDRAIVALQHDILVAAWHMLSRDEPYRDLGADHHERLDPERTRRNAVAQLQRLGYRISLVPAA

SEQ ID NO: 460446 - protein, 414 aa, unidentified
MSDVNTTQHTAVALVAIDIAKRNHDVAILWPNGKTATMKIANSKDGFQRLMEVVQRYGDPVHVAFEPTADYHRNLAYWLQNAGATCFLVSSLMSARARELLFKTWDKNDRKDAQVILYLMRQNMMKPFYDPLVEGTMDIQELSNTYHQISLARTRCQHSLINHYLTLYFPEMERFYHASRSEWFCRFLCKFPTPQSITRYKIATFVKRAWVIVGRKVAKQRFLEEVHETACRSIGLPVELQGQAVKTFRIQLQRIIDLNQLRHQLEKTSENILNAREDYQQLRSVPGVGPICAMMIIAESGDLNRFGHYRQYLNFCGFNLCSSQSGQRQSKHKISKRGNSRLRYAYWLAATIAIRQRENSFREKYERHIKSSPNNPDLKRKAVVAIACKLARVCHSLVKQNTPYRGYYEFNHGT

SEQ ID NO: 460447 - protein, 405 aa, unidentified
MLYLGIDLHLKQMTVSLRNEDGDVVLRRQVSTRWPKLAEFREQLHQASTADEKYVAVVEVCGFHDWLVRWLQQDERCHQTLVIQPLGRSAHKTDRRDANALSELLWVNRDRLLRGDRVQGVRTVLLPSEEQQADRHLTQLRERLVRKRTQSINQIHKILRRHNLEWERPTKSIQTRKVTEWLKTLPLGAMDRLTLDQLLVQWRLWEEQLATTDDRIAERFLTNRDAQLLATMPGVSMYIALAIACRIAPIGRFPHGRSLANFLGLTPGSNSSGETERLGSITKAGSRMVRVLLAQVILHLLRRDATVRAWYQRIKRRRGANLARVAVIRRMATILWRMLSKGERWRPGAASSETPAAAGDPRPARLWRPRRTMLSALAAREAEAAGSSTGSSSLLAGGEVTRCPA

SEQ ID NO: 460448 - protein, 356 aa, unidentified
MAEVTRWVGIDWAYRRAAWCALGAGGEIVEEGAVPADEDGLARLVLCLGTDVRACVEMMSGAIWVRDRLAAAGWQVQVAHARKVRDIAPLACKTDKVDARVLAELCRRDLVPELWIASLADRELRERLRRRLHLVRLRSSAKNRIFGLLTQWGLRISLERLRAADAIELFEARGVPAVWRDSIAEALAVIDLLDRRIAPIERELRPFAAADPRVLLLDTIPGIGELLGLTIASEIGDVARFGSARKLVGYAGLAPRVNQSGDRSRTGALSKAGSRTLRWAAIEAAQHGWRESNPWHRLYVDVAKRQGKNPAKSAVARKVLIAAWHVLSRDQPFKPAARTTGDQAPVSASSSSFLAA

SEQ ID NO: 460449 - protein, 351 aa, unidentified
MNATTVAVDLAKDVFELAFAESDGRIAARKRLNRQRFADTLVHQPPCTVVMEACGSAHHWGRFAQRHGHRVLLLPPRDVRPYVRRDKTDRADAAGLLEAARCADIHPVPVKSVLQQEIHALHAVRRQWIGTRTARCNVVRGLLREFGLVIRKGAATVRREVPGLLADADNGLPYRLRAVLSALLQEISELDARLAQIDAQLREFARQQPLLQRIDGICGVGVLTATALWAALGDVERFRRGRQLAAWFGLPPKEHSSGSRRRLGAMSKRGDPALRTLLIHGGRSCLAAAERRARAGEPLTPLQRWMVACSERCGRNKAAVAVANKIARILWAVWRHDRTYDPNFTATTANT

SEQ ID NO: 460450 - protein, 345 aa, unidentified
MPVAEVDTFVGIDVSAHELSVALRRGQSHDKAAMAKFPNHPSGHKALVAYLLRGGGRVRVCLEASGNYSLDLALTLQAHRQVEISVINPRRARRFAESLGERSKTDPVDARVLCEYAARMPWVRWQPPSPVALHLRALTRAIADLGVIHTQQNNRAYAAAASQALPVLVVKEMQRHKKYLEQRMTRLRREAVRLIACDPELERRFRLMLTTIGIAETSALQILGELAVLPDMLDARQWVAFSGLDPRLFKSGKSVVKRPRISRSGSRHLRRALYMPALVALRRDPYLRVFYQNLLARGKARLQAVVAVMRKLLHALFAMFRSNQPYDGSKLCAVELAVHAIAACA

SEQ ID NO: 460451 - protein, 390 aa, unidentified
MEARTVNNLPPAASHDDDAVRCVLAIELSKKSWIVAVNTPLSDKINRLTLKPCEGKELLDLCERIRTRVARETKQRVEIVSCYEAGYDGFWLHRLLEAHGIRNYVIDPASLQVDRRARRAKTDRVDAERLLRSLMAYLRGEPKVWSVVRVPSVAEEDDRRLHRERGRLINERIQHVNRIKGLLAIHGIYDYQPLRRDRMQPLDRLRTADSRTLPPRLKAEILRELQRLELVIGMIKAIEAERDAIALAKAQTEHTSAKKIQDLAKIKCIGPEFANTLAGEVFYRSFDNRKQLASYVGLTPAHFQSGATCHDQGISKAGNAKARTVMIELAWLWLRHQPDSPLSVWFRGRVGKLKGRIRRITIVAVARKLLIALWRYLETGLVPDGAALKL

SEQ ID NO: 460452 - protein, 317 aa, unidentified
MSNSELFVGIDVSKSELQVAVRPEGKAMTFANTEDGIALLIDFLKPLCPSLVVLEATGGLEISLVNSLAVKEIPVVVVNARQVRDFAKAIGRLAKTDRIDAEVIAQFAQALRPPVRPLKDEETQRLHALNSRRRQLVGMIRSEQNRLSSAPKWTQKEIQTHLKWLRKALDKMDRDISDLIKGSPMWREKEAILRSFKGVGPVTSATLLAALPELGTIGSKPLSALIGVAPLNRDSGQFRGKRAVWGGRDNVRSVLYMATMSAIRFNPVISSFYNRLKGAGKPHKVAMTACMRKTIVTLNSMIKNKTYWHPLVAERCL

SEQ ID NO: 460453 - protein, 342 aa, unidentified
MTEYVGFDVSKEETSFCVMDGAGTLLHQGKARSDPDALFEQLKAHTLCPERIVLETGTLSNWLARGLRQRGMPMDIIDARQAHAVMKLQHNKTDANDAVLLAEIARTGFCRPVAVSSEAAQKHRILIKARKHLVSQRCATRNTIRGFPSSLGLRFPKGSSKLEERVRAALAARPDLSPLIEPLLSSVEALAQEIARFDREIKARANEMATCRLLMTVPGVAQNTALAFVATIDDPSRFTDSRAVGAYLGLTSRRHQSGEMDYTGRISKNGDGLLRHLLYEAANVLLTVVRKSHPVKDWARRIRKRSSHKKACVALARKLAVILHRMLITGEAFRWPEKEATA

SEQ ID NO: 460454 - protein, 375 aa, unidentified
MIKDSEVFVAFDTSKLRNAVAIAEAGRAGEVRFLGEIENTAGATTKLVRKLEAKYERITFCYEAGPTGYELQRHIRGLGHECIVAAPSLIPKKPGDRVKTNRRDAVSLVKLSRAGELTAVWVPDRRHEAMRDLTRAREAAVIDLRAKRQRVSALLLRQGRSYPADKKTWTKVHMNWLASQRFEQPELGVVFAEMMFATRQAQERVERLEQAIRTAVPDWSLAEMVTAFMAFRGIDLVSATCLLAELGDLTRFPTAPEVMGYVGLGCSEGSTGDKIKRGGITKSGNRRARRTLVECAWSYQHPPRVGIAKQAKVAAAPTKVREIAWKAQCRLNRRYRVLLRRGKLKTVAITAVARELAGFLWAAARELSSPERVAK

SEQ ID NO: 460455 - protein, 415 aa, unidentified
MLKIVYPICCGLDVHRDFVYACIATTENGITTYKSHRFSTFTKGLRELLSWLLQNNCCDVCMESTGKYWIPIYNILESDCKIVLAHPKYVKAIRGKKTDKKDAKWIADIFKHDLVSGSFIPPADIRQLRDLVRYNVKLTNYTTGEKNRAQNCLTVSNLKLDSVFSDVFGKASSNIIGHILANPSEKISDVSVFRTKGMKATDEEVLAAVDGEMCAEQAEKLRIIRSHMDGLELCKANLMSLILSTAEKYIPEVDLVSTVPGLTAYSAIAVIGELGVDMSVFPTSKHLCSWAGLAPQNDQSAGKKKTTRISRAGVYIKPLLVQCALAAIKSKNKHPEIVNRYNALRKRRGHKKAVIAIARILLTAIYNILKKREPYNPELYRNSDTPPEHRNVTIEEAVFILQRQGYIISSPTSVG

SEQ ID NO: 460456 - protein, 421 aa, unidentified
MTQSAPHTFAAFVGIDWADAKHDVCLQAAGSAKRACCQLDHTPEAIDAWVTTLRTRFNGQSVAVCLELNKGPLVFALRKYDFLILFPLNPLTLARYREAFTPSRAKDDPTDAELQLELLLTHRDKLRPLNPQSPTMRALAQLVEHRRRVVGDKVRITHRLTSTLKNYFPHALQWFQDKDTLLFCDFLSRWPTLKAAQLARRSTLETFFRDHHVRSSDVIDKRIHAIHAASPLTIDEGVIAPHALLVQALVSQRRVTLQAIETFDNAIAQRAQSHPDFPLFQALPGAGPVFASRLLVAFGEQRDRYASAAELQRYAGIAPVTERSGKKSWVHWRLQCPKFLRQTFVEWAAESTRHSFWAQVYYQQQRDKGKAHQAAVRALAFKWIRMLFRCWQDRTPYNESAYLQALNSRGSSLLHNLAKEA

SEQ ID NO: 460457 - protein, 390 aa, unidentified
MNLKYAVGLDVSSKKIDACMSIIDEKQRVVVKSSTQITNTRKGFENLAQWIIKHKKEDIPVVICMEATGIYHENCAYYLFEKGFDTSIILPNKAKKYLEAIGLKSKNDSIDAKGLSRMGAEQFLERWQPMGTFFYELRLLTRQYQNITELKTVIKNQLDALSFAMHKLDSVTDQLKQTIQLFESQLKELDKAILQHIKSNQEVAERVKNICTMKGLGVLSVATVLAETNGFNLFKNYKQVVSYAGYDVVEAQSGTRVGKTKISKKGNSRIRRMLHMPSLVVIQCEVKQFKDLFDRTYKKHGIKMKSYVAVQKKLLTMIYYLWNKNEPYDDNYKINIQEEEQKLSSRACGFVEDKIEKNSPKQVEATQGKHPVNNRKKLPLGVTKLKKITT

SEQ ID NO: 460458 - protein, 418 aa, unidentified
MGKRKNRVCGADVHKDIIVATIQDSDDTEFQEKFGTTSIELGRFRDWLIAHNCEQVAFEATGVYWFPVYDALSPSIDTIVANPWMIKGIPRNKSDTLDSKWIAGNCLDGKIKRSRVLPKDGRDLRTLTRARSAYTKTRTQLRNRIHKYLALCGIKLSSYISDIFGKSGRHILDGLIESKDIDTIMDGIPSGKVKKKREPIKASLGNGLDDVSRMLIKDTLELLDHLDEKVSDTSLEILGRLQERARDLAIVMSVPGIGFVSASIILAEIGDYHDFQKSEQLVKWCGLAPGLNESAGKKSPCGITKQGSKHLRTILVEIAQVVAKMSKNNLSSFFHRLRARKNYNVAITALARKLISIIFHLLINQELYQEDNCATVKTKPIKKDLLCLSKEEQFKDSVAAIVDAFYYFKKKSSLEGGG

SEQ ID NO: 460459 - protein, 392 aa, unidentified
MDITDVLENQSFVHVGVDLAKNVFQVAYMEPLTNTLVNQQMNRTKFEKFLKDSKIKFKVVMEACSTCHYWGRECRKYGHLPMIIPAEITNSINIGSKDDKNDAHAIWQASFLPGIKTINVRSEENQAEGYLLKTRDFVLKIDTETNNNLKALLSEYGCECNTTGYEKTKAVAQAFLDKAFQENKPWASTLKASVDALNKVREAIQESEKKLHEKIEETAKNNDLAQRLMTIPYVGPITSLAFANVMADPALFKNGRQFADYCGETPYHTGSGGKVTILGIARKGNHVLKRSLYEGASGLYNRVKTGIESKTCHYYQSDWILNLVRRKPRKVAICAIANKMCRIAWAVAATENGRYDRTKTSLVSVLMKSPEQIEQQKAAEAQAKAQAAAKAA

SEQ ID NO: 460460 - protein, 292 aa, unidentified
MEHELHYIGIDTAKEKLDVDVLRPDGRHRTKKFANTTKGHDELVSWLKGHKIDHAHICIEATGTYMEPVAECLYDAGYIVSVINPALGKAFAQSEGLRNKTDTVDARMLAEFCRQKRPAAWEAPHPLERALRALVVRHQALTDMHTQELNRTETAREVQRPSIDAHLLWLEAELKRLEKQIKDLTDDDPDMKHRRKLLESIPGIGEKTSAVLLAYIGLKDRFAHARQFAAFAGLTPRRYESGSSVRGASRMSKAGHVSLRRALYMPAMVATSKTEWGRAFRDRLAANGKKGR

SEQ ID NO: 460461 - protein, 414 aa, unidentified
MGVDTVVAWIGLDWADQRHAGQLQTADGTVEAFVLEQTPAALHEWVAQLCQRVGEGKVALAVEQRKGAVIHALLMYDCFVLYPINPKALARYREAFRMSGAKDDPGDAALLCRLVVHHRDQLRAWVPDTVESRTLQALCEQRRKWVNHRVALTNRLTSLLKQYFPQALDWVGGLASPQGCDFLTQWPTLAAVQRARPRTVRQFYRAHNCRTAAVIDARLTAIAAARPLTTDAAVVEPLSLAVQGYATQLRTLLATIQTFDDRIAAVFATHADQPLFDSFPGAGAVCAPRLAAAFGTDRERWTSAADLQSHAGIAPVTERSGKSIWVHHRLACPKFLKQTFHEFADQSIRFSRWARVYYDQQRGRGNEHHAALRALAYKWIRILFRCWKERRPYDEEAYIAALRRRGSPLAKHLA

SEQ ID NO: 460462 - protein, 398 aa, unidentified
MTESSDYESVQVFIGVDVGKDTHHAVAINRSGKRLFDKALPNDENKLRSLISDLKQHGQILLVVDPPATIGALPVAVARSEGVLVGYLPGLAMRRIADLHAGEAKTDARDAAIIAEAARTLPHALRTLKLADEQIAELSMLCGFDDDLAAQTTQASNRIRGLLTQIHPALERVLGPRLEHPAVLDLLQRYPSPEKLASLGEKKLAAQLCKLAPRLGKRLAADIAQALAEQTVVVPGTNAAAVVLPRLALQLITLRKQRDEVALEVEQRVLAHPLYPVLTSMPGVGVRTAARLLTEVACRAFASAAHLAAYAGLAPVTRRSGSSIRGEHPSRRGNKALKRALFLSAFAALRDPLSRAYYTRKMSQGKRHNQALIALARRRCDVLFAMMRDGTFYTPQGS

SEQ ID NO: 460463 - protein, 316 aa, unidentified
MQTFLNVGVDVAKDAVVVACAAQSFPAHSITNQRAPLLAWLKSLPAGSRIGLESTGGYHELLADLAHAQSHTVFLLNPLDTKHYARAMGNRAKTDRVDAELIARLIAQEHTRLRPYTPPTASQRKLDQLIRRRAKIVRIKSSLKLTMGNLSGFTTELKAVLLKLDVLITRIDAAMSAIAACSPQHVEAQQHLQTIVGVGPVVGMALTNTLERVPFRNADAFVAFTGFDPRANDSGHKIGRRRLSKRGPGELRRLLYNAAMSAAKTKVWRPIYERYRSQGWSTTAALVIIARKIARAAWSIHHYHTTFNPNRITKNA

SEQ ID NO: 460464 - protein, 365 aa, unidentified
MMRFYTQQHRFYVGIDLHARTLHLCVLDSAGSVVADRKLPCHFDSVLQAIEPYRQDLVVGVECMFGWYWLADRCAEHSIPFVLGHALYMKLIHGAKAKNDRLDAHKIARLLKGGNFPMAYVYPRGMRETRDLLRRRMHLVHKRAELITHLEILNAQNNLPPFGKKLGYAANRAELHIPERFADPSVRMSAALDLALCDKLDELIGTVELYLTRSAKVDDVQTYHRLRTVPGVGPILALVLLYEMHNVARFEQVGQFLSYARLVRCEHESAGKKLGSGGKKIGNAHLRWAFAEAACLFLRASERARQWKQKQEKKHGPAKVLGILAARLARSVYHMLRKEEAFDEERFWHGQAAAVQPAGSRTKGS

SEQ ID NO: 460465 - protein, 310 aa, unidentified
MDVIIDKGCGLDVHKETVVACVMGTGIKKEIRTFDTMTGSLLRLKSWLIDLGITHVAMESTGPYWKPVFNILEDSFEVILANARHIKNVPGRKTDVKDSEWICKLLRSGLLTASFVPPQAIRDLRDLTRYRRKLIQAISAEKNRIQKVLEDANVKLSSVASDTFGVSAGKMVRAIISGNADPVSLADLAVGRLKNKKDLLRDALQGHFRDHHGFMIQASLDHIEYMEKTIAKLDQQINEMLKDYHRERELLESIPAVKEQGSASILAEIGADMSVFPSADHISAWAGMSPGNNESAGKKKVAKQPTAIKI

SEQ ID NO: 460466 - protein, 346 aa, unidentified
MKQISTVGLDLAKRVFQVHGADAAGLPLFNRKLRRSEVLRFFEKLPPCLVGMEACGSAHHWAREIAALGHEVRLIPPAYVKPFVKRGKTDAADAEAISEAVTRKTMRFVPIKTAEHQASAMVLKTRSLLVRQRTQSINALRAHLAELGIISGAGLTKIAALIAIVRNEADTCLPAAARFALTAITDQIESLVDQIDRLDRAIVTEARRDKDMCRLSTIPGVGAITAATIKALVPDPGGFKSARHFAAWLGLTPRPHSSGGKERLGSISKMGNAELRSLLVLGATAVLRVARNDVGVQPWIKALLVRRPFKVAAVALANKMARVVWALLNKGGIYRRSEPLTAIAIQ

SEQ ID NO: 460467 - protein, 413 aa, unidentified
MEVMHRRCAGMDISKRDAKVCVRVAGAGRRKTVETVRTWASTTNAILALRDHLVAEQVSLVVMEATSDYWKPFYYLLEDAGFEVLLVNARQVKNLPGRKSDVSDATWLAQLGAHGLVRGSFVPPPPIRELRDLTRARAMMTRERGREIQRLEKLLEDAGIKLSSVASDITGVSGRLMLEALIKGQRDPAVLADLAKRRLRAKIPALTEALTGRFGEHHAFLARMHLDVIDQRTRQIAELSARIEVVMEPFRSFADLIRTIPGIGPRVVEVIVAEIGADMSVFPTAAHLVSWAGTCPGSNESAGRVKSTATRPGNPYLKAALGAAALSVANTTGTYLSAKYRRIAAHRGPKKALVAVEHAILTAIWNMAHTGALYDDPGADYYTRINPERNRRRAINQLRQLGYDVTLTQIASA

SEQ ID NO: 460468 - protein, 333 aa, unidentified
MKDLSKVQHFVGCDVSKETLDFAIHERGKNYRQFKHIRVENSIDGFRKMRKWLRESGIKVTDVVIAMEHTGIYSAALTEWCFGKKIAFVMLHPRDVKNACSRGRDKTDKVDSQFIADYVYTMREKLSPSNPEPAIIRKLRQLCNERKIAIRTRTAYLNIIKTLTDKASIKRTEDFIKTLNKQIKTIEKAMVSTVESDPEVSKNYNLVCSVPGIGMINAVATIVATSNFTRFQNARQYAKFSCISPMSFTSGTSVKGGDHVSRVGHGELKALLTEAAKSTIVHDSGIKAYYNRKREQGKSFGCVLNAVKFKLICRMFAVVKRQTPYVNTEKFRN

SEQ ID NO: 460469 - protein, 447 aa, unidentified
MGQRTVGIDLAIRGDHVARIFDDGRPHAKPIRFRLTSDSLHSLVARLQNGLPADSTITAVMEPTGMSWFPVARWLEQAGIKAIRVKGQRVRALRRYLSEHTKTDAADAYVLGAIPLFGGVPADPVYVPTADRHALQRLTRQRERLEEEASTIKRRLIDLVRWACPAIEAVLPDFRTNLALAILHDLFDPAIVTKTRRTTLLGFIAKNASGNHPHSGPFAEKLVDGLKAAAVETHRLHGAAVNFQHLQLEVVIEIDRMRLLESQLGILGREIQALYSALHPSDALRSIPGIGDALAPLILGVLHEAKRFAGLHQLRGFCGLFPRTNSSGGADRPGQAITQSGNNRIKRALYLAADAARRIDPGLAEVYWRLMVRKGHHHKQALCAVATRLVNRIGKVLRTGEPYELRDCAGKPITVIEGKAIIAEQFVIPAEIRNARRRRRVESLLLT

SEQ ID NO: 460470 - protein, 356 aa, unidentified
MNPVVGLDVSKGESQVQAFLDKGKPYRRSFSITHNFEGLGNLLEFLNEVKKAALGHQPSVVLESTGHYNTPVIQFLEEHKYVYIIVNPLISHRAKSSSLRKVKTDAADAYHLCELFYKEELEPYKKRGIQLLDLRNLTRQQESLAEITAKTKIQLHTLLDQVFPEYRGVFGSLYSKVSLLTLLEYPTSEAVLSASENDITENINLICKSRSRLWATEKAQKLREAALRNPFQRNLYQSHIFNMEILIRIVLQYEEHLSKLSAEIDALAKEIEEYKLLQSIPGIGEKIAATIISEIGEIDRFDNAKKLVAFAGVDPSVYSSGKFTASVNRITKRGSSRLRHALYMAVQSGIRDARKK

SEQ ID NO: 460471 - protein, 482 aa, unidentified
MKKRNVFQNQSQEILSLFEMAKDRSKVMCIPIDYAKKDHLAMLCDGNGRIIRKPFSVKNSPEGKNYLVDQVKKSCLHHGISLQHIVFGGEDCGSYTDNFISTLRSENWLVAGVNAYDAKIQRENVQASTDRLDLLGICKMIISCRGNCSPAQSGDYLNLRTLVRQRRKMVNMTTGVKNRIHTFVDQIFPGFLNEKNSGILPFSQCSLLLMEDRFSAHQILRRRRSTLTKLLTRGVIHQPDNCAKKLQQYAAQVLKPPENHLVTLQISLKQQVKLLNCLQESTEQLEREVAESLAQTQGAFLTSIRGIGIILAAGVCAEIGNPHKQKPLTNLISYSGIIPKVKQTGGIQGKLQTKKVGKRCNRILKDYVVQSASHIGLHGPEDLMLDYKRRDTQGQHADFGMGRRYLRMAMGLMRTSQTYLPKNLRGKKSSMKGRGQYYLMTWPKLRGKWRDVNALDIAFDKDMPLGQWRNMIQELYGIELKL

SEQ ID NO: 460472 - protein, 343 aa, unidentified
MEYYVGIDVSLNESSVCVVDGKGKIVREAKAASEPEALRDLIAGVGLPVVRIGMEAGPLSQWLREGLIDAGFEVVLLETRHVKAALSAMTVKTDRKDARGIAQLLRMGWYRPVHAKSAGSQEVRALLVGRKLLQGKLLDVELSIRGILRGFGLKVGEISRGRFEARVRELADGHAMLEAVIGALLQARAALWSEFTRLHREMLKIVRADHVCQRLMSVPRVGALVAITYRSAIDDPGRFSKSQTVGAYFGLTPKKYQSGETDIDGGVSRVGDAMVRTALFEAAHIMLTRATRFSALKRWAMGVAKRRGMKRAKVALARKLAVVLRRMWVDATEFRWTKDAAMA

SEQ ID NO: 460473 - protein, 344 aa, unidentified
MTNIQPKETAQEAKPDLFAGIDVGAEELILVIRKNGKPFDPQKFANTPADRTRLVKKLVKLPGIIVCLEATGVYHFDLSLALHDAGVLLMVVNPKASHNFAKVLMKNSKTDAVDANTLAEYAARMDFIAWTRPSDETIALRSFARRVNALTSQKAAAKNHLHALTATSETPKAVLKDAKLAINQLEKRIDRLTAEARVLIGKHPELERILALLIGIKGIGETSAIALMGELLLLPPDLTHREWVKFAGLDPRAFDSGKSVHKKTRISKAGNRHIRAALYFPALSAKQHDKHVKAYFQHLMDNGKTPLQGVCAVMRKLLHAIHGMLKNNEPFDNTRFYAIPECNG

SEQ ID NO: 460474 - protein, 387 aa, unidentified
MCASAPASAQAAIHINLAAIFVSLELSRSAWLVTSLSPGGGEKMSKHSVRGGDIAGLLDQLARLRTTVQARTGKIFPIIVIQEAGLDGFWIHRVLERERIESHVVDAASILTSRRRRRAKTDRIDGEALLRTLLAYKRGEPRVCSMVRAPSAEEEDRRRLCRERKTLVAEQVEHVSRIKGLLFAQGIHDYEPLHRDRRQRLKELTTGDGRPLPVHLEAQIGRELDRLELLLQQIKAVEAERDDLLAPVSSAAPAAVAALARLKGIGPEFAAVLWLECFFRSFGNRRQVAAYAGLAPTPWQSGSVQHEQGLSKAGNPRLRTMMVQLAWLWLRNQPTSELSVWFRERVKRAGGRGKKTAIVALARKLLVALWKLVSDGVIIKGAVMKAA

SEQ ID NO: 460475 - protein, 341 aa, unidentified
MGVKKYWVGIDLHRNQFTYCVRYSDGKEVVGKESMTNLERFARRLGKHSEVAVEATGNTWMFCQVLKKHAGRLVVVNPNQFKVISHSVKKTDKNDAKVLAEFLEKDLLPEVRMKDELQAKVASLTQTREKLVQLRTVLKNKINNLFASRFILLKREELSSEKGLLKVLSYHFDSISDVELRVMVDQIRSLNKSIEELDKAIEDNGSKMDGFDNLKSVKGIGAKGAATLLSVIGDINDFRSAKQLAAYIGIVPRVSDSNETVHHGRITKLGSKIARTTLVQCALIAKRYNAYLFNFHEEVKVRRGGAKANIALARKFLEIIYRILKNKWIFEDFTQFKLKTA

SEQ ID NO: 460476 - protein, 372 aa, unidentified
MDPLARVTGFLKSHCYIIIITSEQTNEESVMNINLLAIDLAKNIFQLHGNDINGHCIYKKRVTRAKLPEIIANLSACTIVMESCGASNYWHRKFTTLGHTVKLIAPQYVKPFVKTNKNDMNDAEAIAEAASRPSMIFVPPKNIHQQDIQSIHRIRLRLVRTKTKLSNQMRGLLMEYGIFINQSYASLKEAIPGTLEDPNNELTTLTREFIQDVYDEFLLIEAKVKQYDLRIKSLAETDESSQKLLKIEGVGPIIATALTATMGDPLNFKNGRHFAAYLGLVPRQNSSGGKNVLLGISKRGDKYLRSMLIHGARSVVANAKNKQDPKSIWVMNKLARSNHNKTVIALANKIAKIAWAILAHDTEYDINHKLTT

SEQ ID NO: 460477 - protein, 380 aa, unidentified
MLDNPSEKGKVMDKITRIGVDLAKNVIQLHGVDSMERVVIRKAIARQKFPEWFANLQPCLIAMEACSAAHYWARKLRALGHEVRLIAPQFVAPYRKGGKHVKNDRLDAEAICEAAGRPHMRFVPVKTADQQNLLVVHRMRSGFVGQRTALVNRLRGELVEFGVFLPQGIDAFRAHFVGALENGATELNGVARTALLQGWDHIQALDRQIAWCDAQIAAHVKHDSNAQRAMTVIGIGALTASAAVATVGDARLFRNGRQFAAWLGNVPRQASSGGKTRLGRITKQGNTYLRTLLFQGARSAVMSAHRRNDRLSRWIVQLQARVGRYRTLVAVANKHSRILWAILARGERFDPAYVPTRPGTTGPSHLNRVAAPMIDPGVQT

SEQ ID NO: 460478 - protein, 392 aa, unidentified
MKTNAIKEGTVEGAEQGSKTHQLIKLGVDVHWHEYVVVRQIDGSSPQSAQRFTPEGFVAWAARQTQLAEQVWCCYEAGPFGFVLHKQLERLGVRNVVVRPRNWDEYGAKVKTDRRDALALCSSLDRYLAGNTQALAVVRVPTDEQEHSRSQTRQREQLVSERKRLGAQGLCAARYYGYDLPDQWWRPRRFAALQSQTPDFLLELLARWQRLLLAIDEQLDSLGGLIESAQQQMLPTGLGALTAQILDREIGEWNRFKNRRQIASYTGLVPSEHSSGQTQVRGSITKHGNPRVRHILIEAGWRLRQFQPEYRAVKQRQAAFDSAKQKGNSPARKRLGVALSRQFIVDWWRIKTGRTTPAQLGLQMSWPTCPHLPSKPKPSSETSAQPNTQPID

SEQ ID NO: 460479 - protein, 482 aa, unidentified
MKSKPQKRTKKATDHPTQRHWHEMNRKQRREAMRKIQSEEISLEVVHPNAAGIDIGNESHYVAIPPSRDSQPVQRFGCTTAELKAMAAWLKQCGIRTVAMQSTGVYWIAVYDILEQAGLEVYLVNARDTKNLPGRKSDVQESQWLMKLHTYGLLRNSFRPAQQIRTMRTYWRQRNDLVQSTGRHIQRMQKALTQMNLQLANVLSDVSGVTGQAIIKAILGGERDPHKLAEFRDPRVKASEEQIAQSLEGNWQEDLLFVLKQEQDGYEFCRKQMAECDRQLAQYLQQREDRSQGAPLPEEKRKTRLKKKKGNAPQFDLREGLFRLIGTDLTQIDCIDVMTAMTVISEAGWDMSKWKTEDHFVSWLRLCPDNRISGDKIIGKGRLPTNNRVSIALKMAASSLRLNNTYLGAQFRRLRTRLGAPIAIKAMAAKLARLVYRMLRYGMKYVDRGAAFYEVQNRQLQIKRLKSKAAKLGLQIVQAPAA

SEQ ID NO: 460480 - protein, 468 aa, unidentified
MGRKGKRTKGMEEAHPFAGMSRVNPNAAGVDIGAVEIVVCVAGDGETQIVRAFGNYTVDLQAIGRWLKEHGVKTVAMESTGVYWIPLFEELERQGFECLLTLAPHASAGVSSRSMRRVSGRKSDITDAQWIQTLHTYGLLESSFRPQAELIALRTLLRHRSQLVEHRSPHIQHMQKALLQMNVQLSQAVTDVTGVTGQAIMWAILAGERDPQKLAALREPGCKKSEAEIGRALTGTWRAEHLFVLKQSMEMFGFYTQQIQACDDEIERVYTLTRPDWAAGELKSLSIRKRSSHSKNKPQNSESIRKHLKRISDVDLSAVDGFGASLAQTVIMEVGTDMGKFPSEKHFCSWLGLAPKHEISGGKVLKNKTLKTKNRAGQAFRMAAQSVKQADCVFGVMYRRLKARLGPAQATVATAHAIARVVYRMLKYKVEYETISVEEYEKKYRDQQLKYMKKKAAKLGFQLVPIPG

SEQ ID NO: 460481 - protein, 419 aa, unidentified
MDLTDLTSTDTEPASPAPPPGLVAGVDTHQDTHTLAVLTAQGAVIATSSFPADQQGYDDLTAHLDRLGPLMAVGVEGTSSYGAGLTRTLRQAGYDTVEVLRPSRRVRRHHGKSDPIDAIAAARTVLSGDGVSQAKDTTGPAEQLRLLLAARTRLISAATAITNSIHSLLTTAPEPLRERYRRLDTPALITRLARTRPTRTITTPQQAATSALHHMARTHQDLHHRAERLNQQMHHILTTHYPGLLAVYGAGTTVAAQLAVTAGGNPGRIHNEAAFAHLCATAPIPASSGKTTRHRLNPGGDRRANAALHRIALVRLRHDPTTKNYANRRTQEGKTTKEIIRCLIRAIAREVYRALTQPPPTDTTSTLAAHRKRHHLTQTDVAHALHTYPARISDIENHRRPLPQLTHRYHQYLTTLDTQ

SEQ ID NO: 460482 - protein, 353 aa, unidentified
MRIVCALDVHRRQITYAIVDVGSGELSRGRITPATRESVREWLARFDSLHDVHFALEGTTGWRFVAEEVARAGHRAHLADPAETAVKRGRKRRAKTDRADCDLLLRLLSARELPESWIPPAQILELRTRVRLRKTLVDERTAWQQRLQAQLFHQGVPPGLRPRTRAGREALASVELSPAGLELVALALRMIETIDDELAPLDRALSLYARRQPGCRALIARLYGVGPVTATAIVAELGDARRFGCSDDAVRHCGLDVTVHQSDRKRAPGHLSHEGPELLRWALFEAAQQACRSASPDYEYYRQVARRIDHNRACLSVARKLCRRAYHILRQLGDEALAPIETPDREEVIAAAA

SEQ ID NO: 460483 - protein, 376 aa, unidentified
MKRIVYIGMDVHSTNFTFCSLEPKLGGEDKVFGCMQSEADVKNVLKYIEGLKKELGGDVEFLCGYEAGCLGFSLYHQLKKQGVECVILAPSTMMASKGKRIKTDARDAKRIAQCLAYGTYSSVHIPSSDDDAVKEYIRMRDDHKIALKKLKQQINALCLRNGRQYTRTKWTLAHLRWLREMDWQEAVLKETLQEYLMTFEQMTNKLESLDRRIEELAQGEKYREKVKKLVCLLGVKTRTALASIVEVGDFCRFEKGSTYAAYLGLTPGESSSGDTVRRGGLSKAGNAHLRTLYIEAAQGICKGRIGHKSKELKARQAGSSQEVIAYADQANERLRRKYYRLTHREKKRNVAVAAIARELACFIWGLMTNHTERRVA

SEQ ID NO: 460484 - protein, 371 aa, unidentified
MKSILSVGMDVHKNSFSLCAYDGYTGEIVSESTFASDVKLVIKFIEALKSRYENDVEIKCGYEAGCLGYSLYKLLTARGVDCVILAPTTMQVSAKNKMVKNDRMDALNIAKNLASGSYKTVYIPDEEDVEIKEYIRMIHDFKKELQRVKQEICAFVLRHGYQYDGKSKWTIRYMNWIRELEMSEIQRETLNEYIAEMENLNDKIDRFMNRINEIYQSERYHEKVSKLRCFKGIETFAAMTIQVETADFERFPNAKAYASYTGLTTGEHSSGDKNNRIGITKQGNTVIRKTLVECAQALVKGNVYAKKSQRLKSRQKGMNVNIIVYADKATERLKKKYQKLIERNVPRNKAIVAIARELACFIWGMETGNIH

SEQ ID NO: 460485 - protein, 455 aa, unidentified
MVKQKTHKPVTIETVNVGAAAVDIGSREHMAAVNPEVTDAPVRAFGTFTHDLHDLADWFKSHGVTSVAMESTGVYWIPAYEILEQHGFEVILVNARYAKNVPGRKTDVSDASWLRQLHSYGLLRGSFRPTAEIATLRAYLRQRERLVEYAAAHIQHMQKALMEMNLQLHHVVSDITGVTGMKIIRAIVAGERDLDVLASYRDARCKASTETIKAALNGNDRAEHIFALTQSLELYDFYQSKMLECDRHLEATLATLGADTEHDPSQLPRARTKTKQVSTPSFDVRAALFGVLGVDLTEIHGMGPSLSLKLVGECGTDLRAWPSAKHFTSWLCLAPGNKISGGKVLSSRTRRSSSRAAALLRLAAVTIGRSDTALGAFYRRLAARAGKAKAVTATARKIAVLFYNTLRHGMTYQDPGASHYEERYRNRVLGNLKRRAKSFGYDLQELPPEADMVVS

SEQ ID NO: 460486 - protein, 415 aa, unidentified
MERIVERPGALDVHKESVMACVRVWDGRELAEQMAEFRTTVQGLLALRDWLEALGVKHVAMEATGVYWRPVWAILEDRFELMLVNARHVKAVPGRKTDIKDAQWLCQLLEAGLLKASFVPPKPIRTLRNLTRYRKAQINDRSREAARLHKILEDTGIKLHCVAADILGASSRAMLDALISGTTDPEVLADLAKGKLRKKIPELREALIGRFDAEHALIVSQILSHIDFLDEAIDRLSAEIEERIAPFARQRDLLMTIPGVKQRAAEVLIAEIGVDMSVFPTPKHLASWAKLCPGNDESAGKRRSGKTGKGNKWLRATLTEAANAAARTKGSYLAAQYQRLRGRRGHSKAVTAVGHSILTAAWHMLHNGELYNDLGSDYFTRQNPDRATKRLIRQLEALGHQVTLTPKEHPQEVAA

SEQ ID NO: 460487 - protein, 369 aa, unidentified
MNKTVKYVGMDVHKKTIDIAIADNGRDAEVRHYGTINNDIDAINKMVRKLISTGCELRFVYEAGPCGYHLYRYLRGNSLDCSVVAPSLIPRKSGDKIKTDRKDSISLARLHRAGELTAVYVPSADDEAMRDLTRAREDAKIAERKAKQHLGAFLLRSGNIYSGKSAWSKAHFNWIADIKMAHPAQQITLQEYVRAVTESSEQVDRLMGQIHILLDQWNMAPVVKALQALRGVSTVVAVTTIAELGDLGRFDYPTQLMAYLGLVPSEHSSGDNKKRGGLTKTGNGHVRRALIEAAQAYRLPARVSRIILGRQKELSSEIRKIAWDAQLRLCARYQRLMARGKSANIVIAAIARELAGFIWAIAKQVSQPA

SEQ ID NO: 460488 - protein, 317 aa, unidentified
MTQTSITTAGIDTSKARLDIAVHGRIERWQVANALPGWRALAANLTRAGVTRIGIEATGGYERGVVRHLQAAGFTVLVLQPIQVRAFARVHLRRAKNDALDAVLIAACAATMNEPRIAPDRRLTELADLLTFIEQIEEDIARLKIRLEHIGEPRLRRMVLTDVARLKVRRLAQLRFIAKRLRAHHDLAARLELVLSVPGIGERTALALIIRMPELGQVSREEAAALAGLAPFDDDSGKHKGQRHICGGRGRLRRSLYAAALPAAFRWNKSLISLYGRLIARGKAHNAALIACARKLLIYANTVVARGTPWVENAAQL

SEQ ID NO: 460489 - protein, 319 aa, unidentified
MSKIICGVDVCSVDLQARIGCDGQECCFPNTTEGIAGLADFCRQHGVELVAMEATGGYEKQAFSQLWALGLAVAILNPRSVRRFAEGMGLLEKTDRIDAGVIAWFAQVKRSRPCTPASAQQEHLQALVTRLRQLTEVQTMQRNQRLLVTDPTVLASFTQLLALLASQIRALATAISELIAADPLWQHLDQAFRSIKGVADRTVACLMAEMPEIGTLSNKAISKLAGLAPLARDSGSIHGKRPVRGGRAEVRAILFVVASVVRRHDPDFAAFDRRLSAAGKPKKVIRVALAHKLLVRLNAKARHIRGHLRETASDVLVHS

SEQ ID NO: 460490 - protein, 392 aa, unidentified
MVVSVGVDVSKDKHDCFILSSEGEVLADVFTIPNNLDGFRFLLQRIRDCTHAQDKIKVGLEATGHYSYNLLAFLLDNGLPTYVLNPLRTNIYRKSLSLRKTKTDRVDARTIASMLLSDAGLKPYTNTAYHNEELKSLTRYRFDKVKERAKLKSSIARLVCVLFPELEKLVPSLHIASVYALLEEFPGAKQIAAAHLTRLKTLLETAFKGHYKRDMALEIRDAARNSIGSWMPAKSLELQHTIRLIRELDDEIAEIEKQIQAIMDELNSPITTIPGIGFRMAAMIFAEVGDFTRFDSPDKLLAYAGMSPSTYQSGQLKNCYPHMEKRGSRYLRYALYNATKYVCHWDPTFAAYLAKKRAEGKHYNVALSHAAKKLVRLIFAMEKSRQPYCLVA

SEQ ID NO: 460491 - protein, 408 aa, unidentified
MVYVGVDVAKADHCLGAIDAQGQVVQKPVRFTQDAEGFARLAGLLRRLGPPEEVVVGMEATGHYWVLLAEELQRLGYPPQVFNPILSGDAIRMSVRGRKTDADDCLAIARVVRDGGFQPVRLPDAAMGELKRLCRYRQAAVERSANLKKRLLGLLDLVFPEFAHLFSECSGAAARAALMAGPSARLMAAVPINDLVAQVHAASRGRLGRERAQAVILAAKTSIAAARTDTATEMAIRMTLQEIALLDDQITTYDAAITPLAPAGKDLLTTIPGIGPILAAVILAEIGTIERFIPAKGDPRPSDGIHRLLAFAGLDPRITESGQTRGKPRMSKRGSRTLRTALWRAAFLAHRHDAFRDLYQRHRVTMKQPQKIALSHVARKLTQAIYGVLRYQTPFNLEAFRGKPRIAA

SEQ ID NO: 460492 - protein, 470 aa, unidentified
MVQVDRRNPNIHDISMDRKVYESLHVLTRGFLRAQQKHKKLLEWIPDDALIVAIDLGKKQHSVWMSDIEKKPLYYMKVKNSFEGMTRLCQIAQQIQQENGFGHLVFAMEPTAHFWYHVTNYLERYGFRYVLVHTTSVSRERESTYFRPLKSDYRDAQIIAHLCADRKVTFTQLPSDSLWADLKSAAKEYILLTQLLTAEKLRLQAFVERLYPNYKDVFSDLTGVTAMSCFSAMAEALEFSYQDFEMTLCSRHQHRRLHKSLIWEFYQMVRYSDSDWGAPVFQQALCMPIAHTIERHQLLQAQIEKCEQRLLHLYEKTGYATYLNTIPHLRPVIHAVVLGLIGDPVFYDRSRCLTRFAGMDIKENQSGRYQGETPISHRGNPLLRYMAYVAGFVLKTHDPVFAQRYHDLTHRRKRPLKKNQAIVALGCKYLRIVWTLCYEKTVYDKEKALYGTQVKTRTKPKADSVVEVEA

SEQ ID NO: 460493 - protein, 451 aa, unidentified
MKDLSMQIINARSAGIDVGSRFHVVAVDQRSENVRQFGVYSEDQQAMIEWLKLHQIQSIAMESTGNYWQTLFDALQRAGFEVHLVNGNQTKNVKGKKTDVLDCLWIQKLHSLGLLNGSFLPAAEIQSLRTYHRHRIHLIEQCSRYINKMQKAMRLMNIRLDVVLNDVMGQSGRLIIEAILAGERDSEKLASLANYRVKKSRDEIAKALIGNWRDDLLFELRRCLTLHDVYCQEIKECDNQLEIAIKSLLHPDNGEAEFKYAKATKQRNKYMPGFDMERYSWNYYGVNLMEIQGVGNGTILSILTQVGDRIDHFPSSKHFCSWLRLAPNNKITGGKIISSRTPKGKNQLSLALRQAANAIGNQKEGELVNFFKRVAYRKDRASAITATARKLAVIIYNMITKREGYKPSNPVALSNKVKNKIIKNIRTRVEALELTKEQLNFLFQGVSFSTA

SEQ ID NO: 460494 - protein, 222 aa, unidentified
MTFRPHALHLKAELFVKSSRAHVRDDGFTRCNFHLKFFIMVYRGIDISKSSFVAAYPSTNGNPTKTFPNTTAGMRELIGTLAVAEHHCVMEATSNYGCCCTCYIRTVLPSVLPPPKKKQIKHFSRMMMPVTKTDEKDAYMIAMYGEKMNPPIYKMPSQATIRILTTEGFTYFDNAKQLSRFIGICPTYQQSRTSVNIREHINRNDDERLRSLLYIAFWTGYS

SEQ ID NO: 460495 - protein, 306 aa, unidentified
MIIASDFIGIDVGKYTLEIFAGREFSIANTEAALADWLAGLSRPELVLFEATGRYDGKLRRALEQAGIAFCRVNPAQARAFARATGQLAKTDKVDAQMLARMAQALRPHPQAAADERRRLLGELARRRDQLVDMRRGELTRQQEMAEPEILTDICAHIELLTSRIAVFDSRIAALIAATDELAQAQRLLRSIPGIGLVTATTLLAFLPEAGHRSPKTIAALAGLAPFNNDSGLFRGKRSIRGGRPRVRVALYMAALTACRSTGLLGQFFRTLTAAGKPKKLALVAIARKILVIANAVLRDQTPFKT

SEQ ID NO: 460496 - protein, 359 aa, unidentified
MDDATTKQTTLTVGLDVGDRYVQVCVLDGAGEIVEESRLPNKRAALERRFTSSDPMRIVLEAGTHSPWLSRLLAELGHDVLVANPRRLRLIYMNESKSDRVDAEYLARVGRLDPSLLAPLRHRSARAQEDLALLRSRNSLVRARTRLITHVRGTVKSFGSRIPSGGADAFAKKAEPHLPEELRSALSPLLGVIAHLTTQIKALEDKIEETARERYPETRLLTQVPGVGILTAQCFMLTIEDPARFPQARAVASYVGLRPRQADSGSLSPQLRITKAGDEHLRWLLVAAAHHILGPFGPDSDLRRWGLALAEKGGKNGKKRAVVAVARKLAVLLLTLWQTGEAYEPLRNAKRRERALVCA

SEQ ID NO: 460497 - protein, 350 aa, unidentified
MDTTTPPLASIGIDIGKEVFHIVGFSTDGKIVLRRKIKRLALTETFKKFSPCVVGMEACLSAHFVSRALRQLGHEPRIIPAIYVKPFVKGQKNDYNDAEAIAEAALRPNLRVVREKTQDQLDLQALHRVRSRLVSRRTATINQIRAFLIEQGIAVRAGARALRNSLPAILKSRQDEISPRMRGLIAGLYEDWIYLDERIETIASEIERIGETEANCRRLMSVPGIGPLISTAVVAAIGTGEAFERGRDFGAWLGLVPRQYSTGGRSILGRISKRGSKYLRTLFIQAANVILMRPHNWERFSFGAWLLNAAPRLHRNKLATALANKLARIAWSILRNEKVFDAPRHEAMAI

SEQ ID NO: 460498 - protein, 463 aa, unidentified
MRTIGIDLAITGTHKAVMVDGQGNAIGGLIRFLTDPADLEALLRRAREGTDEDEELRVVMEPTGLAWLPVASYFIQRGVTVYLVNTQQVSDLRKFYSKHAGSDRISARVLARLPWVNPEALHPLRLADADHLSGQRWCKQQEELAQRMTAIKNRVQAWERAFWPGLEEVVGDLFAPWVRRWREKWYDPWPLQSLETGQLAAFLAEAGADPEKAEGLAAGLQAVARQAVALFGTPQGGPSLYVDYATLQDQVLRELYLLACYEAEHWMVRRQVRQLYRQVHPDRQLETLYGVGENGAAVYVFFIGQVERFTSQKKFRGWSGLVPKSSQSGSGEKKGLRITHAGPDLIKKYAYIDAEVARQWDPQMAAVYYDQMVHKGKHHTQAVCCCATHLMDRVRAVLRDGRPYELRDVDGTPVTWQEARAIIAERYQVPEEVRKRSSKRARQARHDEQAERKRKKRRSRPDR

SEQ ID NO: 460499 - protein, 345 aa, unidentified
MSKASIKSKVSVSSQAFCGIDVSKATLVVAVQREGIAGFERREFAHSSAGHKQLIGWLLQRGSGARVSLEATGLYSLDVALALEGAGGIEVAMLNPKIAKLFARSLGRSKTDATDAQALSEYSRRMEFVAWQRPSAALLALRTVGRHIASLVEDHTRGKNRLHAAEGSATAPRCVCQDQKRALKGLEKRILRQRREAVALIRQDAELKRKFEQLISIPGIAETSAVQLLSELAGLDPEMTARQWVAYSGLDPAHRVSGSSVNLPSRISRHGNRHLRKGLYMPALVGVRCDPYFRAFYLELKGRGKAPLQALMAVARKLLHAIFGIFKTGTPYDGAKLFPQLIPTS

SEQ ID NO: 460500 - protein, 345 aa, unidentified
MGPQITGGVDTHLDVHVAAALDDRGGLLGTASFTTTPDGYRELADWLMSFGEVVLVGVEGTGSYGAGLTRHLHGRGVHVVEVDRPNRQRRRRAGKSDTSDAVSAARAAFAGDALGAPKTRDGNVEAIRVLRLARTSARRDRTRALNQMRSLVTTAPDDLRSQLRALTIPKLVRAAASFRPGTRTDVASATRLALRTLARRVLELDHEVDMLDAVLAPLVAETAPEMIERLGVGTDTAGALLVAAGENSNRIHNERSFARLCGAAPLDASSGKQQRHRLNRSGDRQANSALWRIVITRLSYDPATRHYLQRRCAEGKTKTEAIRCLKRYVARELYAYLPQTLLDGT

SEQ ID NO: 460501 - protein, 312 aa, unidentified
MSERIVVGIDVSKDHLDLGCWPEGPSEQYENSDAGIEKMIADIQPLAPELIVLEATGGYQNLAASTLDAHGLPVVVVNPRHARDFAKSTGQLAKTDKLDARGLAHFGYATKPEIRPLPDADHQRLQGLVAHRLQLVEMRVAELNRQQQTTCELVSQSIAALLRYLNEEIDRFEQEIKSMIEHSDIWRAQIRLLRTAKGVGPVLAFSLVANLPELGRLNEKEIAKLVGVAPLNCDSGKSRGKRKTWGGRATVRCALYLPTVSAMSWNPPIREMHDRLVAKGKPGMVVVVACMRKLLIELNAMMRDQGPWQPNC

SEQ ID NO: 460502 - protein, 320 aa, unidentified
MTNVSKVFVGVDVAKDHLDIHLHPLNKAFRVVNSAFGRRDLVKKLSPYNIQQVVCESSGGYGFRMITKLKKANFNVWQVDQKRIKAFIASEGVKAKTDPIDAKMIALFASQKKRSYVQYDLSEDELDISSLVRRKADVTAIISNEKKRYKAPKQTTFCKKNINIHIRLLQREIQKIEKRIKSIVKSSSLLQKKVQIITSVPGVGDATAAALIAEMPEMGKNITHKRAAALLGVAPYTQQSGNHFGHARISEGRALPRNLVYMSALTGVRCNPVLKEFYGRLREAGKPAKVALVAAMNKLITILNAMLRDESLWREPKKYC

SEQ ID NO: 460503 - protein, 426 aa, unidentified
MRVLYDRVAAIDVHKDMVKVAIRVPGAKRGTRKTDVLEFRTFYGVFQAMARELRGRGVTHVVMEASGVYTDPVYYALRELDFEEVMVINPAHAKALKGHKTDAKDAIRLLDLYECGLLSGSYIPDPDLREVRDLARYRMKTVQARTSEIQRLQKALETAGIKLSSVVSDVTGGSATAMIEALISGERRGAVMAGLAQTRLRTAGKMADLSMALTGRFTDHHALMCRLHRDRIKVFDDAVKDLDAKIAPLVARYAREAELLNTLPGFGDVIVAGWLGAIGPAPHQHFATASRLASWATLCPGNYMSARKSKGGRTGDGGAYIKPLLIQAAWAAVRVPGRLQARFGRLVRKFGGPRNKGAQKRAITAIAHTLLKIAYSVLKTGKPYADLGADFYTCRESPDARQDYLMRQLRKLNPGYVITITPAETA

SEQ ID NO: 460504 - protein, 345 aa, unidentified
MNLSRVGVDLAKNVYQLHGVDRHGKTVWKRRLRRAQWLQALLDKTDPSCEIGMEACTGAHHWARELQSRGYTVRLIAPQFVKPYVKSNKNDANDAEAICEAMSRPHMRFVTVKGVEQQDIQATHRVRTELKNHRNAKANQIRGLVAEYGLVAKPSLLALRRAIPEWLEDAENGLTDNFRCLLHGLWDDLLTLEDRFKELDKEIEKLARSNEVTKRLQQLRGVGPIVATALVATVGTGEQFKNGRQMAASLGLTPRQSSSGDKRRLLGISKRGDVYMRTQLIHGARAVVSQAKNRDDPLSRWATDIAKRRHPNVAAVALANKTARMAWAMLQNETDYDPSLAVGQA

SEQ ID NO: 460505 - protein, 376 aa, unidentified
MKKIVISGADVHDNSITARIAINKEEPETRIFSYTREGRKSMFDYLKFIARKQGAERIVLAYEASSLGFGLCDEAQAGGIECYVLAPTKMPRSEEQRKNKTDKRDAQKILEQLRGYILAGNDLAKVWIPDIQSRDDREVVRMRLEVADKLTAARVQVRTLLKRNKAEKPQWVGNAWTVSDCQWLRGLTEGGNDLAQGARIALASLLRQITSLEEEIKKLDGAIQTLATSERYHAATAALIEEFDGVATLTAMVFLTEMGDLRRFRNRKKVGAYLGIVPSSSESGEDNDHKGHITCQGPARVRKVLCQAAWARIASNKEEKKVYARLVAKNPKKKKIATVACMRRLSIRMWHRALEAQLQAGVYLDKELPQTKQVAV

SEQ ID NO: 460506 - protein, 394 aa, unidentified
MKLVGIDIGKNSHHFCVMDKETGEFNVTPSSFSNNKEGFDFLINSLKPYSKKSILLGMEDTGHYHVALLKFLLSNGYTVALINPKTTDLTRKMEGGITKNDKLDTITICDVLDTPERKKQYRITKVDRFDLYEQRQLTRHHHNLKEELNIYCNRLQKSIDLVFPEFNTLFGSKYGVVYMNLLKTFGSAEAIASTDIRTIRKCFEIKGRGGRISLTPEKLKECAKNSIGISSEVETIQIKHLVSQITLIKEQIAEIDKKIEEFSITNNSPILSIPGISHFSGTSILAELGDIGNYSKPSQIIKFAGVAPYHYESSQYNAQHTGITKKGSKYLRKTLYQIILPVINNNPVFKKYYRLKISQGKGHRCAQGHCIRKLLRIIYHLLETGQSFDPALLR

SEQ ID NO: 460507 - protein, 316 aa, unidentified
MSENITEVFVGIDVSKSTLDVGLEPSGEAFQINYESAEVDKLITRLQQALPTLIVMEATGGLEVQAATAMAAKGLPVAVVNPRQVRDFAKATGRLAKTDKIDAAVLAAFAKAIRPQVRPLKDEETQALDDLVDRRRQLIGMRVQEVLRLGTAVTKPMQQSLKKHIKWLDRQIDDVDGDLKRRLRESDVWRAKEDLLKSIPGIGSVTTMTLLSKCPELGQLNRREIAALVGVAPMANDSGKHRGKRSIWGGRAEIRAVLYMAALTAMRCNAPIKAFAERLKKAGKLPKVVIVACMRKLLTIMNAMLKNNSPWMPEMG

SEQ ID NO: 460508 - protein, 411 aa, unidentified
MEVIHARCAGLDISKKDAKVCVRVAGAGRRKTVETVTTWGSMTSQILALRDQLIAARITCAVMEATGDYWKPFYYLLEGAGFEVLLVNARHVKNLPGRKTDVADATWLAQLGAHGLVRGSLVPPEPIRQLRDLTRARTAITRERSREVQRLEKLLEDAGIKLSAVASDILGVSGRAMLESLIAGNRDPAALADLAKRRLRSKIPALTEALTGRFTDHHAFLARVHLDLIDQHTAAVADITARIEATIKPFHWFRDLICTIPGISTLTADVTIAETGADMTRFPTAGHLASWAGTTPGNNESAGKVKSSRTRPGNPYLQGALGAAAMACAQNPVTYLGARYRRIAARRGPQKANVAIQHSMLIATWHMATNGCLYHDPGADYFNQLHPERAAKRAISQLEAMGYHVTLTRAS

SEQ ID NO: 460509 - protein, 344 aa, unidentified
MKYYAGLDVSLQETAICVVDEDGIIVIEGKATSEPDDLVRWLAATGLTIARVGLEAGPLSPWLHAGMREAGLPAICIETRRMKGATAAMAVKTDRNDARAIAHAMRVGWFTAVHVKTVESQELRLLLNNRRTLLEKRVAIDNESRGTLKAFGLKLGAVTVAAFEARVLELLAKRSRLLAMVRPMLTARAALRQQGEVLHRMVLKAVRASAVCRRLLSVPGVGPIVALTYATGVDDPSRFIHSRDLGPHFGLTPRKYASGEIDRSGSITKAGDGAVREVLVQAALTLLTRVHRWSALKAWGVAVAKRRGLRRAIIAVARKLAIIMHRMWADTTTFNWTRETVTLA

SEQ ID NO: 460510 - protein, 369 aa, unidentified
MQKTLYVGLDVHKASISVSAAEDGRDGLVRYIGPIPNTPTDIAKIAKRLAKDGQRLEFCYEAGCCGYGVYRQLTGLGHGCMVIAPSKIPSSPGDRIKTDRRDSEKLAVMHRNGDLTRVWVPDEHHEAMRDLVRARMDAKMQLTRAHQQLLSFLLRHGRTYTTGDNWTAKHRAWLAGQTFEQPAHQVVFQDYMEAVLTANDRMDQLAAQITTLVPNWTMAPVVDALRGLRGINLISAVTFVAAVGDFSRFETARQLMAYLGLVPSEHSSGTSIRRGGITKTGNFEARRMLVEAAWSYRYPARVAKDKMQILVKLPKPVRDIAWKAQSRLCGRYRKLSAKGKKPTVVVTAIARELSGFIWAIGQEVRPTMP

SEQ ID NO: 460511 - protein, 426 aa, unidentified
MSGVETGGQEPQFAAFVGIDWADQKHMWCLQARDSTKRETGELEHKPEAVEAWVGQLCQRFGNRPIAVAVEQSRGALVFMLTKYEPLHLFPVPSTTSARMRKALYPSGSKDDPRDADVLLDLLLQHRDKLRRLSPDTDATRRVQNLVEERRKLVDEKTEQSNRLTSHLKIYFPQMLDWFEHLDTELVCALLERWPTLEELQKVPPAKLRAFFSKHHCRDQELIEWRILAIRQSIPAIGDRAVIEAKSTVVKVIVQLIRTLREGLADLDEKIEEAAAAHPDFFIFESLPGAGSVLAPRLLVAFGSQRERYHNASEVQTYSGIAPVMEKSGRKQWIHFRWACPKFLRQSFHEWASHSIGYSVWARNYYQQQRNKGQDHHAAVRALAFKWIRITFRCWKDRVAYDESKYLTSLARRGSPLAAAATAKTL

SEQ ID NO: 460512 - protein, 323 aa, unidentified
MKLYLGLDMAKHDFASAIESSNGSIKRSSKKLGNNKRGWNEIKSWTVREKSRCKADTVHMGVESTGGYETEMVEWIRTHTDFEISVLNPIQVKRFIQSQLIRTKNDSVDARMIARYMATHKPSPTPVLDEGIRELRALTRHLDHLIRKRADEMTYLESAKTPVIKSSVKQMIKSFDKQIEKVKKQITDHLDNHPDLKKNKELLTSIPGIGDLTAGILLSEINGSLEPKKQVAHAGLAPMERQSGMSKGKSRLCKTGNRRLRTALFMPTLSAIRYNPVISRFYMKLISNGKPKMVAVAACMRRLLHIVIGVLKNQIFFDPNYEP

SEQ ID NO: 460513 - protein, 407 aa, unidentified
MRITCGIDWAEAHHDVALADDTGQIVARERINTSARGFNELLALIAENGGTPEHTPIAIETDKNLLVVALAEAGFTIHPINPRAVARYRERHGQAGGKSDPGDAAVLANILRTDPEVHRVLPAVSEHGRAVKALARQHQEAIWALHQTISRLRSVLLEFYPAALQAFPNLKHRAALTVLTAAPTPSAGRKLTRRRLESLLHRSGRRNDPGLVEQILAELQAPALRQPPQVEAALGRAVTGLLGIVASMHRAVDDLEKELGRVFDTHPQAQILRSAPGLGPILAARVLAEIGDDPLRFGSPAGLRAFAGTAPITRASGRSHYVKARKVRNKRLGDACHWWAFSMLTKSAGARAHYDKRRAAGDHHNAALRNLANKLLGRLWWCLQHGKPWDDQAAWPQPHDGPKPAAA

SEQ ID NO: 460514 - protein, 432 aa, unidentified
MKNTKDNQERYDTQFVALIGLDWGDQSHAVALEPAGGPIETSTLVHSSESLHQWLDQLQARFAGRPVAVAIETDRGAVVYALLERPWISIYPIHPATSTRHRTMFRPSGAADDLPDALVLLSLLQHHRDRLRPLQPDDELTRTLAGLVQARRKAVDRRTLLGNQLLSTLKDYFPQATALLGENLTSAMALDFLDKWPRLTDVKAAKSSTVKNFYHRHNVRRAELIESRLEQIRSARLLTADAAVIEVAVRVVRLLVAELRVLGEHIAEFDAVIAQTFAQHPEKAFYKELPGAGAALAPRLLAAFGTARDQYPEPASMQRYFGVAPVTEKSGSRAWVHWRWNAPKFLRQTLVEWAGQTVIYCPWAKAYYEKQKARRATHHAILRALAFKWLRILWCCWQKHEAYNQEQYLKQLEKRSSPIAARARQLALEMAA

SEQ ID NO: 460515 - protein, 338 aa, unidentified
MALYCGIDLHSRDCWLAILDDRLKVVREAKVGNDLEAIVEILEPYREDLEGIAVESTFNWYWLVDGLEEAGYQMHLVNTWAVKQWEGLKYSDDRHDARWLAHLLTLGILPEGYIYPKQERSVRDLLRRRAFLVRKRTSFLLAMRGAFECRTGLRTTSREVKQWTVEEVGSYLEDPVEALGITCLLEPMKTLDGQIRIIEKEALTRARLRDEFAPLQTVWGIGKILALTMMYEVGEISRFKKVGNFASYCRLVKTARLSAGKRKGSGNARNGNPYLSWAFSEAAHFAVRYHLPAKKYFQRKRSKTNGIIAIRALAHKLARASYYVMKDQVDFEPKRVFG

SEQ ID NO: 460516 - protein, 370 aa, unidentified
MSDHSEAFVAFDSSKLRNAVAIADGGRAGEVRFVGEIENTGTATAKLVRKLAAKYRRLTFCYEAGPTGYGLYRQITSLGQECSVVAPSLIPKKPGDRVKTNRRDAISLAKLLRAGELTAVWVPDERHEAMRDLSRAREAARKDHKGKRQQVSSFMLRLGRHYPGKKTWGPAHMNWLMLQKLEHREQRIALEELVGAVRQESERVERLEQAIRDAVPEWSLAEVVTALQAMRGIDLVAAVTVLAEIGDLSRFQNPRELMGYLGLVPSESSTGDTVNRGGITKAGNGRARRILVEAAWSYRHPPRVSREKQIKVAAAPRAVREIAWKAQMRLCGRFRSLTRKGKRPTVVATAIARELSAFIWAINREVMASR

SEQ ID NO: 460517 - protein, 320 aa, unidentified
MEHELHYIGIDTAKEKLDVDVLRPDGRHHTTKGHDELVSWLKGHKIDHAHICIEATGTYMEPVAECLYDAGYIVSVINPALGKAFAQSEGLRNKTDTVDARMLAEFCRQKRPAAWEAPHPLERALRALVVRHHALTDMHTQELNRTETAREVQRPSIDAHLLWLEAELKRLEKQIKDLTDDDPDMKHRRKLLESIPGIGEKTSAVLLAYIGLKDRFAHARQFAAFAGLTPRRYESGSSVRGASRMSKAGHVSLRRALYMPAMVATSKTEWGRAFRDRLAANGKKGKVILGAMMRKLAQVAYGVLKSGVPFDASRHNPVAA

SEQ ID NO: 460518 - protein, 337 aa, unidentified
MKFCGIDLHSNNSVVIVSDEEDRIVFNKRLPNDLGQIRAALEAHQEELAGVVIESTYNWYWLVDGLMDAGYRVHLAHPAAIKKYEGLKHSGDFADAAYLAQLLRLGLLAEGYIYPREERGARDLARKRMQLVRYRTAQILSIEGILMRQTGARMKGEAVKRLTAEQVDAFAFAPDVALAVEANRAVSQALGQQIEALERRLKERVSLRPEYRLLKTVPGIGQTLATTIMLETGAIGRFAQVGNFSSYCRCVDSLRESNGKKKGKGNTRNGNKYLAWAFLEAANFALRYCPQAKSFHDRKKSKTNRVLAIKALAHKLARACYHMLRDQKPFDVHLCFG

SEQ ID NO: 460519 - protein, 338 aa, unidentified
MHCTTLGIDLAKQVFQLHGVDERGHVVVQKRVTRAKLRETIAQLPACLIGMEACGSAQYWAREFQQLGHTVKLISPQFVKPYVKGNKNDSRDAEAICEAVARPHMRFVPLKTVESQDIQAIHRMRSRLIKERTALVNQIRGLLAERGIVMAQGITKLRKQLPMIVEDEANELTPVSREVMRELSAELVAVDERVARADALVQRVFTQSAACQKLAQVEGMGPVVATALVAAVGNAKEFANGRHLAAWLGLVPRQHSTGGKECLLGISKRGDRYLRTLLIHGARATVHHARRKTDARSRWILSVEHRRGKNIAAVAIANKNARIAWALLTSDTQYRKAA

SEQ ID NO: 460520 - protein, 398 aa, unidentified
MICVGIDIAKGKSTVCFLKPGGEVLKTPYDMEHTAEEITKLIRDIRSYDEEVRVVLEATGHYHLPIVAQLLEANVFVSVVNALRMKKFCSQDIRKVKTDKIDAAKIAAFGLTYWQDLQAAKPTDEVYRELRLLSRQYFQLTSMLVKAKISLNNLLDNVMPGITDLLYDREPHHKLTDFVLRYLHFDKISAMGERKFTTDYCNRAKKQGYRMYERQAEEIFALVQNSIPALPMTASTTIVVKEAIKVVRELENSRATILAQMQTFAKSLPEYSLIREMACVGDTLTPLVIAEIGDVRNFHSKHALIAYAGIDAPPYQSGGFYGTERHISKRGNGYLRHVGFEIMQCKLRLKPEGDAVYDFIQKKRSEGKCGKEAMVAGINKFLRIYYGKVTELYHEIEA

SEQ ID NO: 460521 - protein, 407 aa, unidentified
MLFVGWDWASETHDVTVIDDTGDIIDRWSLRHDAADLAATLNRLAGHGMPEDLPVAIETTSGLVVDRLLAAGHPVVPIHPNAFNAARPRWNASRAKSDPGDSYKLADYLRTDGHRLRRLEPLDDATAEIQALSRMRDDHVEAKVAATNQLRALLERHWPGATTIFARLDSDIALAFLDDYPTPASAARLGEARMKMFCRRHSYCGRRDPAVLVERLRSAPEPTEALSSEILAELVRAQVRLLRTLLATIADLDRAMGAALLEHTKAQLLAPLPRIGEVNLAQIVGEVGPILARAIDVNHACAEVGASPVTKESGKSRTVNFRWAVNTRARKALFTFADNSRHASPWAAKLYDDARARGKRHPHAIRILMRAWMRVIWACWHTNTTYDPTRHGTEQRLVNTTNKEIAA

SEQ ID NO: 460522 - protein, 343 aa, unidentified
MSILCAGLDVSLELTSICVITAEVSILEEAKVVSDPEIISSMLLELDGSCERIGLEAGPLSQWLFFGLRDAGLPVCRIETRHSKAAIAAMSLNKTDRNDARSIAQSVRSGWFKTVHVKSVESQELRTLLTSREFLINKVRDLENEIRGALRPHGLKVGRVSSSGFASRARDLLMDRPRLALCMEALLASRDVLVAQLAKLDAALRRVVKNDELCVRFMGIPGVGPVTALAFKTTIDRPDRFLHSADVGAHLGLVPRQFQSGEMDRRGRIAKCSDGLTRCALFAAANVMLSRTTQWAALKQWGVTIAKRSSLKKAKVAVAQKLAVIMHRMWRDGTAFRWTAKEA

SEQ ID NO: 460523 - protein, 375 aa, unidentified
MGEHSEAFVGFDTSKLRNAVAIADVGRDGEVRFFGEIENTAEATAKLVRKLAGKYERLTFCYEAGPTGYGLYRQITGLGHACNVVAPSLVPKKPGDRVKTNRRDAVSLAKLLRAGELTAVWVPDEGHEAMRDLTRARETAVNDLRAKRQQVSALLLRLGRHYPHKRKTWTKAHLNWLASQKFEYPQQRFVFEEMMLAVRQAQERLTRLEDAIRGAVPEWSLAEVATALMAMRGIDLISAATLLAEIGDLSRFRTPHELMAYLGLVPSEDSTGDTVRRGSITKAGNGRARRMLVECSWSYQHPPRVGAHKQHKVDAAPPAVREIAWKAQCRLHKRYRALIRRGKLKTVAITAVARELAGFIWAINREITTACGAAR

SEQ ID NO: 460524 - protein, 455 aa, unidentified
MAKQKTRKAQAIETVNVGAAAVDIGSREHMAAVSPEVTDMPVKAFGTFTHDLHDLADWFKTHGVTSVAMESTGVYWIPAYEILEQHGFEVILVNARYAKNVPGRKTDVSDASWLRQLHSYGLLRGSFRPSAEIATLRAYLRQRERLVEYAAAHIQHMQKALMEMNLQLHHVVSDITGVTGMKIIRAIVAGERDLDVLASHRDVRCRASVETIKAALNGNDRPEHIFALTQSLELYDFYQNKMLECDRHLEATLAALAADQDHDPSQLPRPRTKTKQVSTPSFDVRAALFGILGVDLTEIHGMGPSLSLKLVGECGTDLRAWPSAKHFTSWLCLAPGNKISGGKVLSSRTRRSSSRAAALLRLAAVTIGRSDTALGAFYRRLAARAGKAKAVTATARKIAVLFYNTLRHGMTYKDPGASHYEERYRNRVLGNLKRRAKSFGYDLHELPADVDMAVS

SEQ ID NO: 460525 - protein, 379 aa, unidentified
MVKSTTIIGFDQHAATTLAAVLLPGQRTPALHSLTSDAATVLRFTERLRRQGPVQCCYEAGPCGFELQRALTGHEIPCDVIAPALIPRRPGDRIKTDRRDAGQLAILYRAGALTAIHIPTEQEEAARDLLRCREDIRADLLRARHRLSKFLLRHGRRFTGTKKAWTVAYTAWLRAQTWALPALTHTHPAYVRTVDEAIARLRTVEDDLQALLDLEPLRARVRRLRCFRGIDDLTALTIAAELGDARRFPTAPTTMAYVGLVPSGHSSGAKRARGAITKTGNAHLRRVLVEAAWHYRHKPFVGAAIRRRQGGAPATAIAQAWTAQQRLHRRYHRFAARGKPSQHIITAVARELTGFVWAALTSPSDRLSSERRTLERSMR

SEQ ID NO: 460526 - protein, 461 aa, unidentified
MTRYGRKKKGVPQKGGSFPVVNNDAAGIDIGSEEHWVAVPDDRDENPVRPFGCFTSDLHAMARWLKACGVTTVAMESTGVYWIPPFQILEEYGFEVKLVNARHVKNVPGRKTDVSDCQWLQRLHTYGLLSGSFRPDDQICVLRSYWRHRANLVRYAADHVRHMQKALTQMNLHLHKVLSSVTSVTGMNIIRAIIAGERDPQKLALMREPGVKNTSETIAKALEGDYRQEHLFALKQAVELYDFYHRQIDACDKEIERHLRTFEAKVDPAQNPLPKRKRRGKKPIGNQSFVDLRTELYRMSGIDFTQIPGLDALTVQTIISEVGLDPAKFPTEKRFVSWLGLCPNNRITGGEVKSTKTRKTVNRAANAFRMGAQTLANSNVALGGFYRRIRSRLGSPKAITATAHKLARIFYRMWTTGQAYLDLGKDYYENRYRERVLRNITKRARELGFDAVLQPIEQRVA

SEQ ID NO: 460527 - protein, 408 aa, unidentified
MEVVYRCCCGIDVHKKIIVACLDQGGEQSLREFGTTTSEIKSLATWLTESGCEMIAMESTGVFWKPLYNLFELMDLDAMVVNAAHMKALPGRKTDVKDAEWIADLLRHGLLKASYIPSREQRELREITRYRKSLTEERCRETNRLQKILEGANIKLDSVVKDINGKSARKLLEKIIEDDVPTSEEEVSKMVHGRMRSKLGQLVTAIEGITTPLQRKLLAQVIDHIDDLTRRIADLDKLVQDYMDEYEAAIAALCDIPGIARRSAEVILAEIGLDMSRFPSAAHLCSWAGVCPGNCQSAGRRKHGKTTKGNKPLKTILTQCAKSARSVKGSYFSAQYQRIAARRGKNRATLAVAHSMLIAIYHMLKNSAPFRDLGSDYYDSFNRDRKIHSYLKRLKALGWEPDALPGSA

SEQ ID NO: 460528 - protein, 344 aa, unidentified
MTYYAGLDVSLRTVNICVIDNQGELIAETKLASDVQDIVAYLDELSLDIESISLEAGTLAQYLTYGLQAAGFNVICMEARQVKGALSAMRNKTDKHDARGIAQILRSGWYSRVHIKSMHSHHIRMLLSSRKAVLSKCVDLENEVRGLFKIFGIKLPPKLGHGAFDAAVRDIIEFDETLSHALLPLLDARLVLYRTFRVLDNRTRKMAHADPVCVRLMSVPGVGFITALTFKAGVDDPARFKRSRTVGAHFGLTPRRFQSGEINIEGHISKCGDADVRATLYTAANALLTRSARWSPLKAWGMKLAKTRGHRRAVIAVARKLAVILHRVWIDDTQFRWGTEGARS

SEQ ID NO: 460529 - protein, 338 aa, unidentified
MKLYAGIDLHSSNNYIGIINEEDKRLFQKKMPNRLEYILPALEPFKEDLEGVVIESTYNWYWLVDGLQEHGYKVHLANPSAIQQYEGLKHTDDKWDSFWLAHMKRLGILPEGYIYPKEERPVRDLLRKRSFLVRQRTAHILSFQSMVDRVLGKRIRTNEIKKLKVEDVEQIFHEEHLLLSGQASIGSIRFLNLQILEIEKVVKRRMKLNKSYQFLLTVPGIGYILALTIMLEVGEIHRFPTVGDFSSYCRCVNSKRLSNGKKKGKGNSKNGNRYLSWAFVEAVHCARRVNRKFNRYYQKKEAQRNNVVAVKALSNKLARACYYIIRDQVPFREEGLFC

SEQ ID NO: 460530 - protein, 310 aa, unidentified
MIIAPGFVGIDISKHHLDIFDGAAGRPERHANTPEAVAPLAQRFAAAGAFVLFEATGAYDRLLGQALAQRGVAHARVNPERARAFARAAGFLAKTDAIDARMLAAMAQALRPPPHSPDTPERARLTALVRRRDQLVATRAQERTRRSEGRDPEIAEDLDRHIAFLDEAIGACDRRIATLVAAEPPLRQAAQLLRSVPGIGPVAAAIVMALLPELGSRSPKTIAALVGLAPFNHDSGRKRGQRQIRGGRKRVRDALYMAALAAARSRSAFAAVYKALRQAGKPPKLALIALARKILTVLNAIVRDQKPFMP

SEQ ID NO: 460531 - protein, 350 aa, unidentified
MDLRKQAIGIDISKQTFTASLGSVSQNGAVRLSPAQSFANTKSGFNRLLRWSKTLIDTDVDVVFLMESTGVYYEKLAHHLHGIGKTVHVVLPNKSAHYAKSLNVKTKTDAVDARVLARFGLERNHKPWQPASPRLTELRNLTRYYVQLQEQKTVVNNMVQSKQAAHHVQSFIISSNKQLIRQIDRQIERCKQQIEHLIASDQGLSDRVDQLASIKGIGRLTVAVILAETRMFEGIENVRQVASYAGYDVVERESGTSVKGKTRISKKGNRYIRNALYFPAMVACRFNPDIREFYQRVITNKPSKMIGQVAVQRKLLVLMYSLYKKGTRYQEGYNRVAPTKIAEATRDSIA

SEQ ID NO: 460532 - protein, 317 aa, unidentified
MEVSLIFVGIDVCKAQLDVAIRPSGEEESFANDKVGIKALVKRLAKIGPTLIVLEATGGYERQVTRALVSADLPVVVVNPRQVRDFAKATGQLAKTDSIDAAVLAHFAEVIRPELRPLPDVVTLELRALTTRRRQILEMIAAENNRLAMTSKAVRKHIDAHVHWLEQGLERVEKDLDRSIKQSPIWKENDELLRSAKGIGPVTSHTLLAELPELGTLNRKQISALVGVAPFNRDSGSLKGRRSIWGGRAPVRCALYMATLVATRRNPVIRDFYKRLKAKGKPFKVALVACMRRLLTILNSMIKHKTYWSETFSLQTT

SEQ ID NO: 460533 - protein, 329 aa, unidentified
MKAILGIDIAKLSFDVALLLEKKFYCKKFTNNQSGFKKFELWLQSKKISTAHACMEATGNYGVALAEWLDEREFIVSIVNPAIIKGFAQSQLSRNKTDKADAKLIARFTQALKPAAWIPTRTEVRELRALVDRCENLKSMLVQEKNRLDMQRNEEVRQSIKVHITWLEEELHELEEAIQQKIDSDPDLKNDNALLQSIPGVGEKTSATVLAYVAFENFKSAKEISAFIGVNPRQRTSGTSVRGRTRLSKTGNSYLRKSLYMPALSALRFNDTVKNFARQLTHNGKTKMVIIGAVMRKLVHIMYGVIKSGRAFDVAHNIPKKILIKANVA

SEQ ID NO: 460534 - protein, 430 aa, unidentified
MISWLGRMSPCYDGGLVWEAFLPVSITQKGGVSLFKLFVGIDVSKEYSTAQGLDKNKKKLFYLRFPMDRGGFSELLNAIKKYSDSMAGVTAAMESTGCYHINLFSFLFSEGVPCVVINPLLVANFRRLSLRKTKTDKKDALTIAEFLLANEKSLTTRAFSQDTQDLKDLARERESLTVLISGMKNEIKRLLQGTFPELEKLCSPYGETMLHFLRLFPSARLVRAANRKDIAKALISPGEKRKRVEVSVDDIIAAARTSVALASAAKELIISEKAATLLYLLEKSGRITDVLIETCESLRIEELDIIRSIDGVNDITGSTFLAEIGDIKNFSSYKHIIAYAGLDPSIHQSGQYEGRSTISKRGNRHLRRVIFLMTLCAVRSQNAFRQYFLRRKKEGLPPKKAVLATAHKLIRAMFSMLSNKTMFRKGVVVE

SEQ ID NO: 460535 - protein, 352 aa, unidentified
MERYVGLDSHARSCTLGVMSASGQRLKSLVVETNGSALIEAVRGIAGRVHVCLEEGTQSAWLYELLRPHVAEVVVAVAPERKGPKDDQRDAWARANDLRTGSIETRVYKAPEHLAGLRNAVRAYGFAVTDVVRAKNRLKAVFLSRGMSADTSVYDVKKRPEWLKKLSSPHRELAEWLGRQLDQVEPLRDEAERWLLTEAKRHPIIRKLATAPGMGPIRTTQVVAIVATPERFRTRRQFWSYSGLGIVTRSSADWTRDRNQKWVRSQVAQTRGLSRKRHPRLKAVFKGAATTVIAQLPDDPLHGDYERMLQSGIKPPLAKLTLARKIAAMVLSMWKHQEVYDPKRHHPSPDQA

SEQ ID NO: 460536 - protein, 410 aa, unidentified
MRYYLGVDWADQTHAVWVVDESGMKITARAVSHTAEGLSEWGRELDEWRAQGIALWAAIERPDGQMVDRLLDHGVVVYPVNPKALDRARARFRQSGAKSDPFDARGLADFLRTDHAHLRALQPSSEAAQELKRLTEDCQRHIRQQTRLVNQLTATLKAYYPRALEVAELTSALAREFLPAYPTPEALTALTPRQWQRWARAHRLTEARTGELWALRRQPQLPVPAHVVRAKARLMRTWVEQLMPVGAAVAQYRKAIDDFFASMPAAQWARTLPIGKHGITAPTLGARLGDAPGRWESFRHLQAHAGTVPVTKRSGKQQRVVQFRFACDKAWRHVVDQAAYLSLLSSPWARAYYDQQRARGHAHRQALRALGAKWLKIIFAMWQRQVPYDEQYHLATMTRQRSRQRQKEIA

SEQ ID NO: 460537 - protein, 344 aa, unidentified
MEHFAGLDVSVKETSVCIVDDAGRIVREAKVASEPEALLAVLNNPSYRFGRIGLEAGPLSQWLYSALGEANLPVICVETRHMRAVLKAQINKTDRNDARGIAQMMRVGLYRPVHVKTLRSQKLRMLLTHRKLLQSKAIAIENDLRGTLRNFGLKVGVVGAAKFEARIKQLVDNLPDLALLVEPLLVVRRVLREQIAVLHRRLLDIVRDDEVCRRLMTIPGVGPVVALTFRATIDVPARFRNSRAVGAVLGLTPCRHQSGESDRTGAISRCGDEMMRVMLYEAAQILLVRSTRWSWLKVWAMQIARRCGLKKAIVALARRLAVIMHRIWVDGTEFRWARQAAAAA

SEQ ID NO: 460538 - protein, 369 aa, unidentified
MTKNILFIGMDVHKESIEIAIAEGANTEVRRYGKIGGTHDAIRKTLRKLVSLGKTLHFCYEAGPCGYELYRYLVSEGHGCWVVAPSLIPKKAGDKVKTDKRDAIQLARLYRAGELTPVYVPDREDEAIRDLSRAREDAMLIQKSARQRLKSFLLRHDIRYQGKSSWTEAHLRWLADEVRCPSPAQQIVFQEYVNTVTEAQQRLQRLNEQIEIFVKQWRLSPVVDALMSMRGVKMVVAVTVISELGDLSRFDNPKQLMSFLGLTPSEYSSGQRQTRGRITKTGNGHVRRILIEAAWCYRYPAKVSPEIQKRQEKLPLPIRNIAWKAQLRLTQRYQHMQQKGKPHNVTVVALARELAGFMWAIANEVKYPR

SEQ ID NO: 460539 - protein, 316 aa, unidentified
MSQSECTIGIDISKAQVDLAVRPSGERWSGPNDEPGIRATVARVLELRPTLVVLEATGGLEVPLVGALAAEGLPVVVVNPRQVRDFAKATGQLAKTDALDAAILARFGAAVRPTPRPLPDAATQALAALLARRRQLLEMLVAEQNRLGTAPRPIRTEIQTHIRWLERRVAQVDTDLTHTIRTSPVWREKDRLLQSVPGVGPVLSTTLLAALPELGTLTQRQLAALVGVAPLNRDSGTLRGKRTIWGGRAVVRQALYMGALVAARYNPVIRAFYQRLCATGKPKKVALVACMHKLLTILNAMLKHHTPWRIHDVQPS

SEQ ID NO: 460540 - protein, 343 aa, unidentified
MNEISMIGLDLAKNVFQVHGVDASGKVVLRRQLRRGAVEKFFAKLPPCTVGMEACGSAHHWARVIGGYGHQVKLMPPAYVKPYVKRNKNDGRDAEAICEAVGRPNMRFVAVKSVAQQASLAVHGTRALLVRQRTMAANALRAALSEIGIVAKQGLEGLRELMARLEAPSAEIPEMMRGALLLLAKHWQALDADERAIERQIAKAARCDRDSRRLMEVPGVGPIIASTVLAKVPDAKMFRSGRDFAAWIGLTGKDHGTGGKHRLGRISKQGDRVLRALLISGASAHLRQQIARGVSDPWLRDLLARRPYKVAMVAFAAKTARIIWAMLAKGEVYRDRASASAAA

SEQ ID NO: 460541 - protein, 337 aa, unidentified
MGEVSTIGLDIAKSVFQVHGVGVDGAVVIRKRVSRAKVLEFFTALPPCLVGIEACPSAHHWSRKLQALGHTVRLMPPSYVKAYLKRSKNDANDAAAICEAVTRPSMRFVPTKSEQQQSGLMLHRSRQLLVRQRTMLSNAIRGHMAELGRNGTAALLEIIANADDDRIPATARFSLDVLARQYANITAEIGTIEKRIHTWHRSCEESRRLEEIPGIGPIVATALVAEVGDWKAFSSGRNLAAWIGLVLKQLSTGGKDRLGGISKQGNRYLRWLLVTGAMAVIRYARQHGTRLWLARIMERRPIKVAAVALANKIARMAWAMMVRGERFKEPRLLPVAA

SEQ ID NO: 460542 - protein, 405 aa, unidentified
MCYTIAGIDVHKKLLVVVIVDAAEPDVPLQSRRFGTGSAELRHLSAWLSHYDVKEAVMESTAQYWKPVWMELEPHMKLHLAQAQSNKARKGRKSDLVDTKRLLRRFAAGELMLSFIPEPEQRAWRMVTRGRLQLVRERVQLQNQIESLLEEGRIKLSSVITDLLGVSGRRILRAMAAGETSPEALAKWGDQHLRCGLPVLVDALTGAMGAIHCQLLAQHLDRIDLIDQQIDELNKLAAAQLRTYQDAVTRLIEVPGIGAEAAQEIIAEIGPAAAAFPSAEQLASWIGVCPGSNESAGQNHSGRSAKGNRFMRRLLCQAAQAAARTNGSQLQVVFKRLVVRLGYVKAVWAIAHRLCKIVWNILHKNARFVEFSEARNPKAIQRAITHHLKALRRLGYQIPVSPAQV

SEQ ID NO: 460543 - protein, 339 aa, unidentified
MQVTTVGLDLAKNIFQVHGITEIGEVVFNRALRRAQVLPFFERLEPCLVGIEACGTSHHWARELIKLGHTVKLIPPIYVKPYVKRGKSDAADAEAICEAVTRPTMRFVAVKTPEQQAILSLHRTRDLIVRQRTQTINMLRAQLAEFGFVFPQGVGHATQFAKRVIDGVQLDIPEVAGDVIAQLSEQLLYLHGKVGWYSREMACVAKSEKRVALLQTIPGIGPITASAIVATVGTGEQFKNGREFAAWLGLTPLNRSSGGKERLGRISKMGDRYIRRLLVIGMMSRMRQIIQNPDRYDPWFADILARKPGKVAAVAMANKTARIVWAVLISNEPYKVRTA

SEQ ID NO: 460544 - protein, 416 aa, unidentified
MRVVGLDIHRSFAEAAMIDEGRVQQLGRIELVRERVIAFAKRLGKNAEVVVEATGNTMAVVKLMAPYVKRVVIANPLQVRAIAHAKVKTDKIDAAVLAKLHAAGFLPEVWQPDEATERLRRQVARRATIVQSRTRVKNRIQSVLHANLILPYKGDLFSGKGRKWLAAQPLEDDERTTINGWLAELDRLAVDLAQVDTSLAQNGLRDDHVRRLMTITGINLTVAIGLTAAIGDITRFASSDKLVSYFGLNPRVRQSGDGRAHYGRITKQGRSMARGFLVEAAWAAAATPGPLHAFFIRIKARRGQQVAVVATARKIAVLAWHLLTKGEDYAFGRPALHQAKLRQMEIKAGMLSKRGGNTPGRARDYNIKSLRDAERAFVAQAEGAYARFVASWSDRPKTKPPAAKPGARAPQNEERY

SEQ ID NO: 460545 - protein, 377 aa, unidentified
MTKFSAAISNDQSIHAALELSKNSWLLAIQVPGRDNPSLHPIKGGDADGLMAKLDAARQRVAKATGQTPTVTLCYEAGYDGFWLARFLGQRGIGCLVMEPASLRVNRRARRVKTDRIDVENILHTLIAWCRGEHHVCSMVVIPSVEEEDLRRSHRERDRLIRERTAHINRVKGLLFGQGIRGINVKSRYKTLVPAALITADGRPLPERLGREIAREIGRLAQVQAQIVEIEHERDHPATSCQATERKRHDLLRLKGLGPALSSTLTREVYYRRFANRRQVASYIGITPSAYDSGDGQRSQGISKAGNRRARVAMVEAAWLWLRHQPDSALSQWFHDRTQGQKGRIRRVMIVALARKLAIALWRYLETGLIPEGAVVK

SEQ ID NO: 460546 - protein, 400 aa, unidentified
MELFCGIDWAEHHHDVALVNAGGDVLATFRISDDPAGFARLVSRIGRHTMVLGSVGVALETDRGLLVAALREIGVQVFSINPKSVDRYRDRFAVSGAKSDAGDALVLAHLLRTDARQHRQIANDSQQVLALSALSRAHQDAVRTRLRDAGRLRSHLREYYPAALTAFPCLTTRTALGVLWEAPTPMAARQLSADDLRRLGRMAGRVSMPATVVNRLLTVFAEPQLRHPPAVEEAMGAATRTILATLRATEEAVQRAEDELVEAFARHPQAGIVASLPGVGPILGARLISEFGDDKTRYVNAAARRRYAGVAPVTRASGKSRVVLMRRARNDRLFDTCRMWAFNAIGKSAGADAYYRARRAKGEHHEAALRRLGSKLLGQLHHCLEDVIPYSEELAWAPTP

SEQ ID NO: 460547 - protein, 315 aa, unidentified
MEQSIQQNVGVDISKDFLDVALVPAGEDFRFANDANGHRALIKRLAGLPIARIVFEATGAYHRVFERTLAEAGLPMVKINPRQARRFAEASGKLAKTDRCDAAMLARMGLALALEPRPVVSQALEELRELLNARDALIKDRVAALNRQKNAFSPLLKRQLAARLRQIEAQIEAIDQEQKKLRSADSGLKDRFDILTSIPGVGAITANALIAELPELGGLDQGQAASLTGLAPIAKDSGKSSGKRSIRGGRARARQALYMPALCAIKFYPACKAKYEALIKLGKPKKVALVAIMRKLVIIANALLRDRRKWSPAAP

SEQ ID NO: 460548 - protein, 327 aa, unidentified
MLGIDVSKATLATTLLDEHDGQPRWTLVVPNTPAGVARLLAQTPPTSAWVLEPTGRYSGVVARQAQAAGRRVLMAPSRRAKAFLSAVRPRAKADRLDSGGLAQYARAVALRPYPLKAPAMEDLDQLLAARKGLSQSRSRLRQQRASLPAAAEALDGAIADLSARLAALDRRIRSQRQVVLPVATVLETVPGIGPVTAAAVASCLQSKAFAHPDHFVAYLGLDVRVRDSGTRRGRRALSKQGDAELRRLLFLCAQANLRRRDPDNPFQAQYARERAKGLRSTAALNAVARKLARTCWSLHRYRTTYDPTRVNHQPPTPRSDPSLDSQP

SEQ ID NO: 460549 - protein, 389 aa, unidentified
MNNSPQTFERYLALDVHKHYLVAGGVNAQQEIVMPPRRFDFGEWAVWSGKHLRPTDALVLEATTNTWTFYDQIAPRVGRCVVAHPGLVKVIAAARVTPALAGGARETDNRDVLHLARALAANLIPEVWVPPLEVRELRALLSHRRRLVKMRTMTKNRLNSVIHRYNLTPPRGELFTTPKYRAWWLGLKVSPTEKLRIRQDLATLDHLEPEIAEVDDELYRLSMVSPWAEQMPYLMQLPGFGIIVAMTVLAAIGDITRFPSAKKLVGYAGLGASVHASGETYRTGHTLAPAQTAGAVQVSPNKGAKTCAGSRSRRRALRCSITITGSKNTRAWKSDSGRTKPSSRSRANCSSRCGTSCMIVKQIGTRSRKKSRTSFCSGRATWARKNAVV

SEQ ID NO: 460550 - protein, 355 aa, unidentified
MLTNKDIMLTVDYHDENLVIRRLDGATGEERVLQVPTTAPAIEKVIREAQADVPESGRVIWIMESTTGWARVKELVGKAIREGKVSFVLCNVLEMSLPPKARRKKTDKIDTARMQREALNGTLPAAYQPPRWLRRLRRLVSLRENLVSRRTALRNWIGRFLAHETWEDRQGLWTVRGLDRLARLPLSRSDRLVVATKLDEMHHLETLLEPVEKEIVRFYGYWPAAQRLDEMRGIALISAVSILARIGPVGRFAREDQLIGYAGLAPGVRQSDQTKLTGHIGGGGTDKSLRHYLIEASVWARQIPRYRPAYDRVCHKRGKKIARLVVARMMLRSIYKMLKDDVRFNQLPAYAGVRA

SEQ ID NO: 460551 - protein, 409 aa, unidentified
MHVIHECCAGLDVHKKSVYACAIWLGHNKAKEQEIRSFGTMTADLLKLADWLRERQVTHVAMEATGVFWRPVWAVLEGQFELMLVNPHHIKAIPGRKTDAKDSEWIADLLQHGLLRGSFVPPREIQDLRDLTRYRAELVQDQNRVDNRIQKLLEQCNIKLSSVASDTLGASGRLMIEAIIAGEENPEQLADLAQRRLRAKIPELRLALAGKVRDHHRFLLKEFLQEWKALEERIRRIEKEIDLHIAPLKQAVQLWESIPGVDHVSACNLVAEVGVNMAQFPSAQQLASWAAVCPGNNQSAGKRISGTMREGNKWLRRTLCQVAWAVTRKKDCYLSAQFKRLAARRGVKRAVMAVAHTILIIGYAMLKSGRSYHELGGGYLEQINKDQLQRYFVKRLQRLGLTVAVSPAA

SEQ ID NO: 460552 - protein, 407 aa, unidentified
MGKILQNKRNCAFCGIDMHKEQHTAVLIDCWMKKLGEITFENRPQKFDGFIREAKKLSEDKTLIFGLEDTRGFGRNLATYLKAHKYIVKDIYPALGNAMRLSSPTVEKNDAYDAFCVARILRDMVDKLPDTKNEDIFFTIRQIVKRRDSIKKRGIILQSQLHDALMYNYPSYRKFFCDIDSKTALCFWENYPSPGCLSGIKLEDLAETLRKASNNACSTKKAQAILSLIAEDGEVKKAYQQERDFIIQGIVKEIRYLKQELTAIDTELRRLIQETGYKLQTMPGIDVITEAQIISDIGDINRFPNADKLARFAGVAPVLFSSAGKGREQRSRQGNRNLNGVLYFLAIQMIQVSRGGKARHPVFHEYYKRKLAEGKRKPQALVCIQRRVLNIIYAMMKNKTEYQAPNL

SEQ ID NO: 460553 - protein, 358 aa, unidentified
MNRKAGMSAGQVIGTVDGQQVVGLDIAKSVFQLHTVDMNSGEIVNQQIKRAKVLTYFANRAPCMIGIEACGGAHHWARQLSAQGHSVRLIHAKAVRPFVGGNKTDAADARAIWLAIQQPGTKFVGVKTLEQQATLVLHRQRELLMKMKTMQSNALRGLLYEFGATFARGKNALFAEVEAALEALVGDLPQYVADSLREQVQRVKDLVKDIKAVEARLAQRLRDDEDMKRVAQIPGVGLLTATAAIATMGQASAFKSGREFCAWLGLVPRQSGTGGKVKLLAISKRGDTYLRTLLIHGARAVLSHAKEPGPWLEQIKARRPANVVIVAQAAKMARAIWAVTAKQEDYQRGHRSVRPQAA

SEQ ID NO: 460554 - protein, 328 aa, unidentified
MSKHVMYVGVDVGATELWCAAEGLRPKKFAHTATGIRAMHRWAVKQAGDAEAHLCMEATGVYSQSVAMRLVNLPGTEVSIVNPACIKAFANVQLRRSKTDMIDAQVIRCYAESQHPLPWHPARKALRQLYELVVQADAIKASLLQWQNRDHSHSYIPDLPKAVVKSQRGIIRTLQRQLQHIEGAIDQLCAADATLAQQVMLLETIPGIARKSSVQILAYGGQWLTDRSQKELVAHAGLAPHHHQSGTSVRGRSRIDKRGDRRLRKALYMPALVGIVHNPILKPFYQRLLEHQKLKMVALVACMKKLLLISRSMLINKTTFNPKYQSLT

SEQ ID NO: 460555 - protein, 359 aa, unidentified
MEGQDSTIVTGVDIGDRYCHICVLDGDAEVIEETRVKTKPEAIERYFSGKERMRVALEVGTHSPWISSLIADQGHEVLVANARKLRMIYENDQKDDRTDAEMLARVARMDPKLLSPIQHRGEEARASLAVIRSRDILVQGRTKLVNHVRGSVKAFGARMPSCSTGSFGKHVGEIPENLAAALTPVMNTIQELTGRIREYDRRIEQAAKEEIPETAALRQVGGVGALTSLAFVLILENPGRFKNGRVVGSYVGLCPRRDQSGDANPQLRIAKTGNPYLRRLLVGSAHYILGPFGPDSDLRRWGLKLAERGGKNAKKRAAVAVARKLSVLLFRLWQTGEVYEPLRRSGDDDQRLDAASVGA

SEQ ID NO: 460556 - protein, 405 aa, unidentified
MFEIEDVGVFLGLDVGKSAHHGHGLTPAGKKVFDKPLPNSEPRLRAVFDKLREKFGTVLVIVDQPASIGALPLTVARDAGCQVAYLPGLAMRRIADLYPGEAKTDAKDAAVIADAARTMPHTLRSLELTDEITAELTVLVGFDQDLAAEATRTSNRIRGLLTQFHPSLERVLGPRLDHQAVTWLLERYGSPSALRKAGRRRLVELIRPKAPRMAQRLIDDVFDALDEQTVVVPGTGTLDIVIPSLAASLAAVHTQRRAMEAQINALLEAHPLSPVLTSMPGVGVRTAAVLLVTVGDGTSFPTAAHLASYAGLAPTTKSSGTSIHGEHAPRGGNRQLKRAMFLSAFACMNADPASRTYYDRQRARGKTHTQALLRLARQRISVLFAMLRDGTFYESRTPKDVELAA

SEQ ID NO: 460557 - protein, 328 aa, unidentified
MCTLGIDVSKNKIDLCLLTAGPGGKKKHKVLTNEPAVARKVVDWLNAQKCVPESVTVVLEATGIYHENLAYGLHEAGVSVCMANPCRVREFAHGMDILNKNDAVDAFVLACYGELKSPAVWVPPSPEVRKLRALLRQRDALREDVQRTVNRLEKANSTSTPQEVIRSLERTKSWLNEELARIEKLITDHTDNDPGLKADLDLLKSIKGVKEQVGREMLALLKDGMFKSASQVAACLGLTPVEKTSGSSVRGRPHMSKTGPSGVRAKLYVAALTASRWNKQAKAIYERLVAKGKAKKAALGAVMRKLVHLCFGVLKTRLPWDENYVATA

SEQ ID NO: 460558 - protein, 381 aa, unidentified
MKGFLHMKLIGIDIGKNKHFFCIMDQQTGEIISQPVSFSNDKEGFDFLVQKIKSYPKDSILIGMEDTGHYHFALLKYLLDLQYTVALINPKTTDFNRKMQGGITKNDKLDTINICDVLDTPERKKQYRITKVNSFDLYEQKQLTRHHHNLKEEENVYKNRLQKCIDIVFPEFNKLFNSKYGIVYMNILKMFGSAENIANTDIRTIRKCFEIEGRGNRISLTPERLKECARSSIGISSSAEVIQIKHLTAQIELIEEQLTEIDKKIEEFSIQNNSPILSIPGISHFSGTSILAELGDISNYSKPSQIIKFAGVAPLHYESSQFNAQHTAITKKGSKYLRKTLYQIILPVIRHNPVFNKYYQLKISQGKGHRCAQGHLSLIHI

SEQ ID NO: 460559 - protein, 335 aa, unidentified
MLIIGCDFHTRFQQIAMLDTTTGEIIERRLEHETGEARKFYGALPAAARVGIEATIGTRWFEKLLHEHGHELWVGDAAEIRAAMVRKQKTDPRDALHILELLITDRFPRIWIPSWSQQDVRQMLRHRHKLVGFRTSARNQLHALAMGQGVCRRKKLWTAVGRKELEGLELDPWASRRRRELLQLLDQLNGWIEELNQAVEKEATSCPEARVLMQEKGVGPVTALAFVLTLGPVDRFPNSKRVVSYLGLNPSEDSSGGKQRLGRISKQGNSMMRWLLVEAGQVAARFDPELRRDYVRLKFRRGPGVAKVAIARKLAVRLYWRLREQSHPTAGSYAG

SEQ ID NO: 460560 - protein, 309 aa, unidentified
MEITVGIDVSKKRLDVYVHPTGELFSLGNDEAGLADLIERLGGVKPDCIGMEATGGYEKLAAASLTEAGLPVVVINPAQVRHYGKALGARAKTDSLDARLIALFVAATEPELRPLVDTETAALAELMARRRQLVGMLVAEKNRLGRLPPGKVRLSVVRIIAALNEELAKLDSDLGGLIEQSPIWRDKQNLLASVPGIGERIARALLADLPELGQLDRRTIAALAGLAPFTRQSGQWRGRSFIAGGRAAPRAALFIGAMVAARHNGPLRAFYQRLVAAGKPKRLAMVAVARKLLTILNAIIRDRKPWQNA

SEQ ID NO: 460561 - protein, 343 aa, unidentified
MTKNTMIGVDLAKNVFQLHAASMTGQLQYRKKLSRQSFSKFMAEQPPAVLVMEACGSAHYWAREMIRLGHEVKLIAPHYVKPFVKRQKNDAADAEAIVTAAQRPEMRFVEPKTAEQQGRAILFRARERLVHQRTELVNALRACLYEYGHAVPQGIHQIKRIAEILDAHSSDLPDLMREECAELLDQIAEQTTRINARTAKIKTLAGEADTARRLQTIPGVGPLTALAVEAFAPPMEHFRCGRDFAAWLGLVPRQFSSGGKERLGRISKAGQSDIRKLLIIGAMSRLNWLGRKSIPESSWLARMVARKPRMLVAVALANKMARTIWALMTKNEDYRVPAQAVAA

SEQ ID NO: 460562 - protein, 340 aa, unidentified
MEQVVTIGLDIAKSVFQVHGIDAQGAVVVRQRLQRSRVLPFFAKRGPCLVGIEACGSAHHWARELARLGHEVRLIPPSYVKPYVKRQKNDMADAEAICEAVTRPTMRFVPVKSPEQQSVMVLHRTRLILTRQRTQLSNAIRGHMSEFGLIAPVGRNGLKTLMEIVADREDARVPDDARGCLTMLANQLDLISEQILESDRRILANARSTDVGRRLMEIPGVGPVLASALVATVADPAAFKSGRNLAAWVGLVPRQNSSGGKERLGGITKQGDRYLRQLLVIGALAVVRFAVRNGTRRPWLVQLLSRRTPKVAAVALANKNARMMWAIMTSGERYREPLAA

SEQ ID NO: 460563 - protein, 429 aa, unidentified
MNYTQNEKIEQVTDSTMVVGIDIGSQIHYARAFDNRGRELTKRIFSFHNDLEGFNSFNLWAETLKTENKKTAVLVGCEPTGHYWFAFVKYVNDHQKRLVMVNPFSVKKIKELDDNSPKKTDLKDPKTIAKLVVDGRYSIPYMPEGIYAEIRDLVYSRDRIMKQHNISANRIQRWLAIHFPEYLGLYTRFDAISGLAVLEKAPLPKDVIALGVNGIRKIWHDKKMRGRGVTEDRAKTLVEAAHNSVGLDGGIGTKSELYMLLEEHRLWTSQLEAVNKVLEEMILKVPHVEKLLAIKGVGSITIAGFIAEVGDIRRFDSPKQIQKYAGLELVENSSGKHKGRTRISKRGRRKLRKILYQVMVPLLARNKEFRGIYDYYVTRVKNPLKRRQAMVAVSCKLIRVFYAVLTKGVEYDRFKMMSDIHRKSDIIAA

SEQ ID NO: 460564 - protein, 451 aa, unidentified
MQNRNVKMQVINPNAAGIDVGSRSHFAAIGQGKEEIKEFGVYNEDHQQLIKWFLDNEIKTVAMESTGTYWQNLYSALIAAGFQVILCNGKFTKNIKGKKTDVKDAQWIQKLHTIGLLTGSFLPDEATEQLRTYCRHRSNLVSQSADATRKMQKYLRLLNLRLDVVVKDVTGLTGLAIMDAICKGEKSGEKLAALRHGNCKKSEEEIAMALQSNGRKDYLFGLKQEYQLYINFQQKMKECDVEIEKLLNEQINSDHEKKQHYIDKKVYKKINKNTPKNLDINLLSYQYFGGVDLLAIEGVSHATALSLMSEVGNGIHKFESAKQFASWLRLAPNNKISGGKILSNRIPKGSNRLKIALRNAANAIGNLKDTALSNFFNRITYRKGRPAAISATARKLAVIIWNMIVKGVPYKPDNDYEFLDQKRKRKVQEMKKLIHKFDIKTNELGLQINGL

SEQ ID NO: 460565 - protein, 387 aa, unidentified
MNVVTDKSEPLTAIHTQLGAIFVSLELSRSSWLITSLSPGGGEKMSKHSVRGSDFAGLMQRFAQLQEKAKLRTGRSFRIIVVHEAGLDGFWLHRALQNEGIESHVVDAASIATSRRRRRAKTDKIDGETLVRTLLAYKHGEPRVCAMVKAPTPGEEDRRHLCRERKALTAERVRHVNRIKGFLFSQGISGYQPLRRDRRQRLEELQTGDGRALPQHLKALVSRELDRLELLLKQIKTVEAARDELLAEEQTAKLAPAPMLLDIRGIGPEFAAILWSEGLFRPFENRRQIAAYAGLAPTPWQSGTVDREQGVSKAGNPRLRTTSIQLAWLWLRNQPRSALSVWFHERVSRNGGRLRKTTIVALARKLLVALWKYVTAGVVIEGVTMKA

SEQ ID NO: 460566 - protein, 410 aa, unidentified
MELLYRRCCGLDVHKETVVACLRLISDGKVTTEVRTFQTTTADLLRLSEWLAAYDCTHVAMEATGVYWKPVWHILDDGEFELVLANAAHVKNVPGRKTDVNDAMWLAELLAHGLIRASFVPDTQTQEMRNLLRTRKQLVREQSSHVLRVQKTLEDANIKLDSVLTDLMGKSGRAMIEALIAGETNPVKLASLADRRVKASHEEFREALRGRVTKHHRFLLRLHLNQIDALNAAMATVDAQVEENLGPFRTAVDLIISIPGIKSLGAQVIISEIGIDMSRFPSDAHLISWAGICPRNDESAGKRRSNRLRKGAPWLKTTLVQCAWAAVRKKDSYLQAQFYRIKARRGPKKAIMAVAASILAAIYHMLKDGTMYKDLGHDHFDRHSTDQQRKRLIKRLADLGYAVEIKPLAA

SEQ ID NO: 460567 - protein, 436 aa, unidentified
MKMKTLQTKRHLIDGKIIIGIDPSKKKHQAVFLDPKGIPLGNTFSFKSTYEGFNEELWRKLKLILLDPSPDTTVFAVEASVNFWQKLGYFLKYKGFTVLLVNPLTTKYERKRFSRNFSRTDPRDALMVANAARAGYFHFYREFSPESEALHRLAITYDKLKKQLVTAKQRILSQTELLFPEIRDIMDLDTDSARYLLSKALTPQDFKIEIGTAEASRMAIVSRRHYGAETIVELKKAADHSIGIPLPGPSYGAERLTMNIWLQHILVLRLQLDQIQDEMVRLAQQTPWYSILTSVMGISDISASRFIAENRNLSESPHFKKIQAFAGLSLKINDSGEYSGNRHITHIGNPRLRAILYKMTEETKNYVPEVRIRFLKRHMKHGLYTENVVACSSNLLKLIASLIRENRPYQEDPEKIKELRRTERKYQKYLSDKKAA

SEQ ID NO: 460568 - protein, 344 aa, unidentified
MEHFAGLDVSVKDTSVCIVDDTGRIVREVKVASEPEALLAVLENPAYHFKRIGLEAGPLSQWLFSALVEAGLPVICVETRHMRAVLKAQINKTDRNDARGMAQMMRVGLYRPVHVKTLRSQKLRMLLTHRKLLQSKAIAIDNDLRGTLRNFGLKVGMVGKVKFEARIRELVENLPDLAVLVEPLLIVRRTLREQFCILHRRLLAIVRDDEVCQRLMTTPGVGPVVSLTYRATVDVPARFRKSKSVGAVFGLTCAKYQSGEVDWDGRISRCGDEMMRTMLYEAAQAMMRSKKWSWLKAWAMQIARRRGMKKAIVALARRLAVIMHRIWVDGTEFRWTTEQAAAAV

SEQ ID NO: 460569 - protein, 360 aa, unidentified
MTLHPPPTAVIGGIDTHKDTHTAVAIAQDGRMLGVIEVRACSRGYQQLHEWFAAFGPIACVGVEGTGSYGAGVSRFLHRHSVKVLEVNRTNRQHRRRRGKSDPADAEAAARCVLAGQAVGVPKSQDGEVEALRLLRAQRRSAIKARTQAANQLRAVLSTAPDQLRSRLRNKTLLSIVKTAAAFRASAEPGASLVAITRHVLRGLARRWRALDDEVRNLDRTVEVYVRAIAPSLLERPGIGPEVASALLVAAGDNPERLGSESSFAALCGVSPVDASSGRQKRHRLNRAGNRDANRALWVVACSRMKCDARTIAYSDRRRAEGLSRKEILRCLKRYIAREVFGLLRDLAPPAALAPAKLAA

SEQ ID NO: 460570 - protein, 344 aa, unidentified
MELFVGLDVSLNSVSICIVTADGVAQWQGKSLSEPAALITALSPYRNEIKLIGIEACPLSEWLYGALIESGFPTVCIETRHAQRFMSSRPNKTDRSDARGIAEMMRLGHFRPVHVKSKASQLVRTVLIARQKFVDHLVAIELTIRGLLKVHGLKIGAVHRCAFAAKVEALLADAPELRLAIEPLLESRNAMRKQKVLLDRRLSQLAREDEICKRFMTIPGVGPIVSLAFKATIDDPRRFQNSKGVAAHLGLTPRIYQSGEIHRSGNISKCGDKLMRHALYEAANSHLRISKKWSSLRAWGVKLAKRVGAKKACVAVARKLAIVMHHMWMEETDFRFGKTPMASA

SEQ ID NO: 460571 - protein, 385 aa, unidentified
MDVKASSTTKNGDKHMKATDKYVGLDVHQDTTVIAVADGGRVGEVRIYGTIPSDLQALAKVLGKLGGEGVRLHVVYEAGPTGFVVYRRLRQMEIDCIVVAPSKTPQPKGVRQKTDRRDALQLARLHRAGELTGINVPDEVDESIRDLTRARADAVHDLTRAKQRLKALLLRQGYRYPGKANWSEAHQRDLRKLTLPLPALRSVLEEQILAVDQATERVKRLDDLIEAQVPQWRHYPAVQAVMCLRGFRLNAATVIVSELGDVRRFAHPKNVMAFLGLVPKEETTANTRRLGSITKAGNAQARWCLIEAIQKALTPPKVSSHLSLRQEGQPAAYKELAWKIQVRLHKRGWHLLQRGVMKAKVNVALARELAGFIWDLLRQVPAPEA

SEQ ID NO: 460572 - protein, 329 aa, unidentified
MISPVKQKVIGIDVSKDSLAVCFSLTNKLQHLEVSNDKAGFQKLVKQCGVDCLYVMEATGIYYLQLAYYLYEQGAQVFVVNPVIIKRFIQMHLGKGKSDKKDAQWIQRYGEQSQATSWQPEQPVIVECRQLEQVAEQLIKQRTMVINALEALKLQPVVSSLATKSLLQTLKMLDKQVKQIQEKLLETLEKAFAKELNLLTSIPGIGRKTAGMLLLFTGDFQKLDNYRQLIAKAGLSPREYTSGTSIRGKVRITKMGGSLIRSKLYVCSFSAKKSNAACKALYERLVAKGKNGKLALIAVCNKLLKQAFAIVKSGIPYHPNYMHISTPKP

SEQ ID NO: 460573 - protein, 388 aa, unidentified
MPQRNDLSRSDTPLEQQSTLIAVVEMSQSSWLVAGIVPGLERHPLKKLAPDEDALLRLLHRWRDEAAKAGCAITRLAVAFEAGRDGFWLARWLRAREVEAHVIHPTSIAVSREHRRAKTDRLDTGLLKRAFLGWLRGEPGHCSMAAVPTLEEEDARRPNREREGLVGERTRIVNRMRGCLARLGIRGFGPASRGAPDRLEALCTPEGVALPPNTLAELRRDMARLRFVSDQIAEIEAARRERLRQAPAEDRPHAMVRLLARVIGVGVETADMLVHEVLRRDLRDRRAVARYAGLTGSPEESGARRREKGLAKAGSARVRRGMVQLAWRFLRFQEGSGLAGWYRARTADARAGTRKTMIVALARKLLIALWRLVTTGEAPEGVVLPPAA

SEQ ID NO: 460574 - protein, 492 aa, unidentified
MDVLHQRCAALDIGKKDLKACVRTPNPGGRRSRRQEIRTFATMTNALLELRDWLVAEQVTLVVMEATGDYWRPVFYLLEDCLNVILVNAAHAKGLPGRKTDVADSQWLCQLGECGLRKASFVPPEPIRHLRDLTRYRTSLTMERSREVQRLEKELEDAGIKLSSVATDIMGVSGRAMLAALIDGERDVHTLADMAKARMRPKIPALVEALTGNFGEHHAFLCRLHLERIDHLTEAIGGLSARIEEEMLPFARQLELLETIPGVGRATAQALIAETGGDMARFATAGHLASWAGVCPGHHESAGKHKSGRRRHGNRWLNAALGTAAMAASRTKNTTYLGARYHQLMPRLGKKKALVALEHSILIAVWHILTDNVEYADLGGDYYAEYDPERAMRRITRQANALGFTVRFDPSKPHERTPGATSLTWTHPLFSDQSQASAPTGNIRPVATPGTLPHCLKGVGGAPTRRTGHKPRYVQYEGMYPARREHAPDAAP

SEQ ID NO: 460575 - protein, 407 aa, unidentified
MVDTTAIDLFLGLDLGKEFHHAHGRTEDGRTVHDKRLPNTEPKLLELFSKLVAKFGTVLVIVDQVANIGALPLTVARAAGCRVAYLPGLSMRRAADLYPGEAKTDARDAFVIAETARTMPHTLRAIDRDDETLAALTMLTGYDNDLAGEVNRATNRLRGLLSQIHPSLERVLGKRLAYPYVQALLQRHGSPAKIRKLGRARVEALLKANGSRKAHHLTTEIFEALDEQTLVVPGTETSALIIPGLAAQLGAAHAQRRQAEQEIAALLEALPLFHLLTSLPGLGVRTTAAVIVAIGDGTSFPTAGHLASYAGLAPATKSSGTSIRGEHAPHRGNRLLKRALFQAAFAAIGCKADPSSRIYYDRQRARGKTHTQAILRLARQRVNVIHAMIRTGALYEARTPGDVGLAA

SEQ ID NO: 460576 - protein, 342 aa, unidentified
MEIITVGIDLAKSIFQVHAVDAAGHVVVRKALRRAQVVPFFAKLPRCLVGMEACGTAHHWARELMRLGHDVRLMPPAYVKPYVKRGKTDANDAAAICEAVTRPSMRFVPVKSTEQQAALALHRTRDLLVKQRTQLVNMIRGLLAEFGIEMARGLRHALELAARLSAGDAAEVPPLAQRVVNGLADQIGAVQIQLTRLEKELLAWHRDCDLSQRLATIPGVGIVSATALAASVSEPERFRSGRQFAASLGLTPLQNCSGGKERLGRISRMGDRYLRRLLVVGMTSLIRRAKATPTSVDPRLPALLQRKPVRVVTVAAANRTARVAWAIMTRGGTYRAPAAMAA

SEQ ID NO: 460577 - protein, 338 aa, unidentified
MTIETLGVDIAKNVFQLHGVNRNGRVVLKRRVMRDELLKVIAQIDRCTIVLEACTGAFYWARKFEVLGHEVQLISPQYVKPFVRRQKNDGNDAEAICTAARQPHIPFVPKKTIEQQDIQALHRARQRMVNHRTAVVSQIRGLLLDRGFAFAKSITRARRVIPEILADQENELTAMAREAIAELYDLFRDLDRRIASFDKKIDAVFRNNEACQRIAKIKGVGPKTATAVVAAIGDGSEFKNGRHLAAWVGLVPRQFSSGDRKVLMGISKRGSQHLRSLLVHGARSVVRTAPNKTDPTNQWINQLRQRRGFNRATVAVANKNARIIWAVLKTGEPYRAAG

SEQ ID NO: 460578 - protein, 367 aa, unidentified
MLSFCGIDVSKDRLDVMVLPDEYSSSVPNDPAGWAILVEQLRGFSITAIGIEASGGYERGAVRSLQAAGMPVRQVNPFKLRQFAKASGVLAKNDPLDARMIASFVGIMPTRPAQRTTPAAEQLVEMLAVRRQLSAEKTAAENASRLLEDLMLQRLSRRRIARLAADIELLDKRLVEIVATDATLAHRYRLLTSMPGVGPVLACTLIALLPELGGMSRKQVAALVGVAPYAFESGTLKGRRCIWGGRANVRQVLYMAAMSASNWNPVLKLFHDRLKGAGKLPKVVIVAVMRKMITTLNAMVRDDIAWADRLSGCDKVTVAHSITSSASASSLAGMSMPSVLPVSRLITSSNLIGCMTGKSAGFAPLRI

SEQ ID NO: 460579 - protein, 344 aa, unidentified
MVMLGTDAHKRSHTIVAVDPAGADIGSVTVAATTDGHLRAVQWSAQFDERQWAIEDCRALSRRFETDLLSVGERVVRVPPKMMARARATARGAGKSDPIDALAVGRAALREPDLPVAQLDGPSRDVRLLVDYRETLVRQRTGFQNQLRWRLHELDPSFDPSPGSLNRYCTLEAVDAILSRHTSMVAELARRETERIRNLTGEINQLERDIEHRVSTLVPSLLAIPGCGALTAAKLVGEAADITRFRSKDAYAMWAGAAPIPVWSANNTRFRLNRGGNRQTNAALHRIAITQMRIHPDAQAFIKRRLETGSTKREAIRLLKRKLANVVYRNLLADAQPAQLAHAA

SEQ ID NO: 460580 - protein, 325 aa, unidentified
MQGKEASEQETGKSNAGIDVSKSWLDVHVVPAGATLRVANTRDGIRKLKRWLTRFDLALLVIEATGKWHRDVRRSLHAAAIPVAVVDPFRVRMFAKACGILAKTDRLDARVLAQFAAVMAPAVRAPMPQAMEELAELVTARASAVAEETALKNQLSAAISPFLKRQLGRRLERIAKDIAALEAEILRCIRADQGLARRYDILTSITGVGPVVATTLIACLAELGTCSRKQIGMLAGVAPVADESGERQGVRVVWGGRPNVRRVLYLAAISAARFDADMKAFFNRLTASGKPAKLAIIAVARKLVVLANILISENRKWQPHSPNHA

SEQ ID NO: 460581 - protein, 348 aa, unidentified
MLIIGCDYHPGFQQIACVDTETGEADERRLTHREEAEQFYRALKTRRVRIGMEASGHARWFERLLNDLQFELWIGDAAEIRTKRVRKQKIDRQDAQLLLKLLMEDRFPKIWVPDAENRDLRQLLWHRHRLVQMRTRIMNQLHVVALNEGVRRKKALWRPAGRSELESLVLAPWALRRRRDLLDLFDQLTPKIHDLTRALEEEVEKRPIARRLMTHPGVGVLTALAFELVIGTPARFGCGKQIASYVGLVPTEESSGDRRRLGHISKQGNALLRFLLVEAAQVTVRSQPQWRSKFFHLALRRGRKIAKIAMARKLAVHLYWMWRQGMDYGQFEKLGSHAGEPGNRHGAQ

SEQ ID NO: 460582 - protein, 347 aa, unidentified
MAKLIIGIDFSKEKMNYCCMESESMSILQEGEVENSRKGCTQMTGRLRSLYKGLKAADFLFCGENTGMYSMEVVECFTQRKYLFWLENPLQIKLSSGIQRSKTDRLDARMIAEYACRHRDKAKGCTLPDKGLKKLRELHLTRRMLKECEVKLRNFSGSTSKASSEASKALRKVMKAIMESVKSLEKEIRETLMEEDEFKENTELALSVPGISWVTASAIILDTRNFTRFDSARQYANHTGCVPHEHSSGTSINKKPRVSKASNRYVNSLLTQGALSLLTHNPRTKEYAQRKKAEGKPFGFIVNNIRNKTIHRLFAVIRNKTPFCWDYVKGSPTSCVNLLQKDVVTFA

SEQ ID NO: 460583 - protein, 408 aa, unidentified
MAIIGMDIHRAFAEVVALEGKSRRRLGRIAMRCDRLAAFAAGLTKDDIVVVEATGNATAVAEVLAPHVGRVVIANPKQVRVIAHAKIKTDKIDAAVLAELYASGFLPEVWIPDKDTLALRRQVTRRNQIVRQRTRLKNIVQSILHAHLIPAYPAGNMFGRKGRAWLAAQKLPEDERMAIERHVREIDRLGEDLKVIQRDLAQYGLADLRVKRLMTVPGLDMIVATALVAAIGDVGRFGSPQKLVSYLGLNPSVRQSGSGPAYHGRISKQGPGRARGLLVEAAWAAARSPGPLRAFFLRIRGRRGQHVAAVATARKLTVLVWHLLTKEQDYLWVRPALHATKLRRLELTAGHAPARGQRGRAYDYNIKATRDQERRCVQQAEKIYERFVAGWNRSGPRVRTSAAKEERQ

SEQ ID NO: 460584 - protein, 405 aa, unidentified
MVTKLFAGIDISANDAVLCCLDQDGNQLGPSRKFANDLNGANELFDTIAAFSPNEAHIGIESTSVYGVHLRDFLAAACKTSPNWFVYEINPSLVAGFKKSFPKRPKTDHQDAWFIAERVRFGRIEPFSLRKITTEPLLQLTRHRLHLIELVTIEQNRACNMIFLKFSNYRKDTPFSNTFGKASMAILKDLSPDELANMDMKQLVSFIVQNGNNRLKDVEQLAAVLKNMAKRAYRLNPKIQDSINVTLTMTLHNIEFFKSQIKRLDKVIAQELQAIPQTLTSIPGIGPVWAAGIVAEIGDISRFRNEAALAQYAGLTWSRYQSGNFDAEERRLTKNGNRYLRYYLVEAANSLRVHNEEYKAYYQAKYKEVTKHQHKRALVLTARKFVRLVFALLSKGQIYRPEVRN

SEQ ID NO: 460585 - protein, 370 aa, unidentified
MHDANTLYVGLDVHKDTIAVAYIDSAPGAEAVSLGTIGTRRGDLDQLIRRLQSKGSALVFVYEAGPCGYWLYRYLRHKKLPCFVVAPSLIPKKPGDRVKTDRRDAITLARLMRSGDLTCVYVPEVADEAIRDLARAREDAMQDLKAAKYRLKAFLLRQDIRYTGRANWGPAHLRWLGEVVCPTPAQQIVFQEYVQAINDHHDRLGRIEVELKEHAQAWRLYPVVEAIQAMRGVAFTVALTVIAELGDLTRFEHPRQLMSYLGLTPSESSSGPRRRQGAITKAGNAHARRALIEGAWAYRFPARVSGPLQRRLETLPKGVQAIGWKAQVRLCKRYRRLTARGKHPNQAVVAVAREMAAYIWAIAQEVPIPT

SEQ ID NO: 460586 - protein, 407 aa, unidentified
MEVVYRCCCGIDVHKKLIVACLNKGGRQELREFGTATSEIKAMANWLIESECEMIAMESTGVYWKPLYNLFELMDLNAIVVNASHMKALPGRKTDVKDAEWIADLLRHGLLKASFIPSREQRELRELARYRKSLIEEHSRELNRLQKILEGANIKLASIVKDINGVSARKLLDRIIADDLPDADETSRLIHGRLRSKLPEIMSSIEGIVTTLQRKLLSQVLDHIDDLDKRVSTLDAMVKDYMTEYEAAISAIDEIPGIGRRSAEVILAEIGADMNRFPSAAHLSSWAGICPGNHQSAGKRKHGKTTKGNKTLKSILVECAKSARNVKGSYFSAQYQRIAARRGKNRAAVAVAHSMLIAIYHVLKYGVPFRDLGEDYYNSFNREHKIRGYLRRLQSLGWTPDSSLASA

SEQ ID NO: 460587 - protein, 341 aa, unidentified
MDYFAAMDVSLEQSSVCVVDGTGKIIREAKVASEPEALVAWFAESGLKFTRIGLEAGPLSRWLHAGLTAAGLAAILIETRHLRAALGAMKVKTDRNDARGMAQLIRMGWFRPVHVKTVPAQEIRALLTGRKLLQIKLRDIELGIRGLLRGFGLKVGKVSEGKYDARIRELATGHPMLEPVAAAMLQARASLRAEYAKLHRMLLRIVRADAVCRRFMTAPGIGAVVAVSYRTAVDDPTRFHKSRDLGPYFGLTPSKYQSGEVDRTGRITKVGDVMVRTALFEAAHVILTRVTRFSTLKAWALRIAKQRGFKRAKVALARKLAVVLHRMWVDGTDFRWRKAAA

SEQ ID NO: 460588 - protein, 482 aa, unidentified
MKKRTIYTNQSQELLRLFEQVGNSAKVMCVPIDYAKKDHVVMFCNGYGDIVRKPFSVKNSPEGLKYLIDQVTRSCRHRRIRKEHVFFGGEDANSYAENFANTLRSKGWLVAHVNAHDAKKQRQNLQASTDRLDLMGIATMLLNRRANCSPAQTGIYRNLRTLVRHRKKLVVMKTEVRNRVHAVVDRLFPGFLSEKKTSITPFSNSSLYLMENSFSAQQIRRRKHSTLVNILKRYGTAAPEGAAAKLRTYAAQVLTTQNQYAATLQLSLAHHIKLYRCLLDNTEQLEKEIALPLAQSQGAFLTSIKGIGIVLAAGVTAEIGSPFEQRPLNNLTSYSGIIPRVKQSGGPNAQAHTGRVSKRSNHLLKDSVVQSAFHIGHFGPKELSLDYKRRKAAGQHADFGMGRRFLRMAMSLMKTSQIYLPPSLRNDQLRAQERAGYYLAVWPQLRDKWNKADALKVAFAKHNPLGQWRHIVQELYGIKLKL

SEQ ID NO: 460589 - protein, 452 aa, unidentified
MEQELISMEIVNPHAAGIDVGSRSHWVAVGQQEQDVREFGVFNEDLFTMAEWLKEKQVKTIAMESTGTYWQNLYAVLIAKGFHVILCNGKFTKNIQGKKTDVKDCQWIQKLHSLGLLTSSFLPDEQTDQLRTYCRHRANLLHMTASTSKKMQKYLMLLNLRLDVVVNDICGLTGLSIVRAICHGETNPEALSSLRHGNCRTSKEEIAKALQSNGRKDFLFGLKQELETYDHLQRKIEQCDKEIAIKLNEIIENDENKNQHFIEPKSYKKINKNTPKDIDINLKSYQMFEGTDLLAIEGMSYSSVLSLMSEIGLKGIHKFPTAKHFTSWLRLAPNNKVSGGKILSSKVPKGSNRLKIALRNAANAIGNLKDSTPLRDFFQRINFRKGRISAISATARKLAVIIWNMVVKKVPYLNPEGYLFLDQKRKLGLVKRIKKQIAKFALTNEDLGIVTA

SEQ ID NO: 460590 - protein, 350 aa, unidentified
MIAINKDIIATIGVDLGKNTFHICAMNDKGTILLRERLTRAALPKRLANIPPCRIGMEACAGSHHIGRQLTALGHDVRLMPAKYVKPFLKSHKNDYRDAEAIAEAVQRPTMRFVPFKSDEQLDLQALHRVRSRLVGQRTAVINQIRAFLLEHGVAVRQGPGALRLALPSILAQRTDVLSPRIIHLIEGLTGDWRRFDERIADVTREIEQLAKQDQYCKGLMGVPGVGPMTASAMVAAIGDGAAFSRGRDFAAWLGLVPKQISTGDRTILGGISRRGNRYLRTLFIQGARSVLQRSDGWEKKSFGRWLIAASKRLHKNVLAAALANKLARIAWAVLYNAREYDTALAPKAP

SEQ ID NO: 460591 - protein, 423 aa, unidentified
MSYRIAGIDVHKKMLAVVVADVEVQGEYQFERIRYGSNPEHLRLLAAWLIEHKVEEVVMESTAQYWKPVWGALERHWKPSCQKREGAGPMSGTLHLAQARSNRGRKGRKKDFPDAERLVKRLVADELILSFVPDAEQRLWRTVTRRKYQLTRNKVRLQNQLEALLEETHIKLSSLVSDLLGVSARRMLKAIADGGTDPAALAALADKKLRATPAQLCDALDACAELKPIYRRLLKMFLEELQLIEQQIGQLDQEMAALLSQHPEAVQRLAEIPGLGVDSAQQIIAEVGATARTFPSGKHLSSWVGACPGDEESAEVSRSHRSPKGNRHMRRILNQCANAAVKAKGTIFEIVYRRLVSRLGHNQTIGAIAHRLCHRIWIILHRGVRYEERGPSVTTKSRRQRTTRMIRELRNLGYRVEPLGTPA

SEQ ID NO: 460592 - protein, 346 aa, unidentified
MCPDLSRANITRPGLFQEHIFLSGGAAISKQVYVGIDVSSTELVVATNPVSEVTQYSNDADGIAALVEQVTLAEPSGVVLEATGGYETLVAIELQLAGLPVSLVNPRQVRNFARATGRSAKTDSIDAFVLARFSEAIKPPVRPFPDEETRELRGLVDRRRQLSHMVTAERNRLRTAPKRIRPQIQNHIRWLKKQMEDLDKDIKKMIRQSPMWRARDDLVQSVPGVGPVLSSMLLTHLPELGNLNRGQVAALVGVAPLNRDSGACRGKRTIWGGRPAGRAVLYMATLAASIHNPIIKTLYRRLLAAGKLKTVALTACMRRLLLILNTMVRRNAHWGPPNMQATALLV

SEQ ID NO: 460593 - protein, 408 aa, unidentified
MNTLYVGIDVSSKSNVVYLMLPNGDKHSNFSVANSREGSTQLVKRIHSALISHSLDTVLIGLEATSVYGDSLVYFLREDATLASFNRRIHVLNPKQVKKFHDTYNDLPKNDYVDSFVIADCLRFGRINKEVYLGDYRYKALQNLTRARFFAVQNLVKEKQRFMNVLFRKYSTMTQEKVFSDTFSTTALAVYDEFESAEALANMDLHELTDFIMEKGKNRFPNPDAVAKAIQKAARSSYRLPKTVNDSVNQVLSISITSMKALESQIKEFDKAIKAQMELLPNVLISIPGIGPVYSAGIMAEIGDINRFNSQAALAKYAGLAWKQHQSGSFESEVTRLIPSGNRFLKYYLCEAAFSLVRCDKEYNDFYHLKYKEVNRCQHKRALALTARKFVRLVFRLLKDNRLYRPAK

SEQ ID NO: 460594 - protein, 433 aa, unidentified
MEPNETVNAKETAHTRETPFQERFKLFVGWDWASDHHDVIGVDAGGGIVLEERLDDDAKGWADLRRKFIALAGPDLARLAVSVETCNGPTVERLLEIGVVVYPLNPKAAQRYRERKSPMGPKSDRLDAWSFADALRTDGQGWKALLPDDPITQELRILCRDEVQLIQQRTAMVSQFRAALHEYYPAALEAFEDWTVPGAWAFVETFPTPAILVKAGKRRWEKFLHVHKLYRPETYPRRLEIFARADQFAGTPAVTRAKSRLALTLVAQLRVLQKQLDQYRQAIEELFARHPDNDIFGSLPGAGGKLAPRLLSELGDRRERFDDPQALQCYVGSAPVTEQSGKKRWVHFRQGCNKHLRQATHLWANLSREKSTWAAVYYQHKRNQGMSHACALRCLSQRWLKILWRMWQNHTTYDEAFHTQNQIKHGSWIIQPA

SEQ ID NO: 460595 - protein, 429 aa, unidentified
MDGVDTTRLESFRQLRKEIRGSHEHLIVGIDVAKDNHHAFFGTATGKTLLKRLVFHNNLNGYEKLFTYVEAAKIKNNLNKVVFGLEPTANYHKPLGEHLIKCGFDVVLVAGTAVKKNRELLDGRWDKHDTKDAANVADLVSQGKCLFYEYPIMPIRELRNLLSFKRRLKKQEHGTRVRIRNHLLAQYFPELDPYFSRMSGCSLSVVKWCLEPSLIAGLEYEEFLRLVAPGKRTIKQREHVKLIWEKAFESIGCNAGETVQFEAKMMVEALQHVRESILEVEEKIEEICLDFPEYKYLLTIPGFGKDISSKVLGAIGNPFRFDNAKQVIKLSGWDLNANRSGKSSGSATAVISKKGKADLRYALYQAALVASSRNQHFVAYFTEKLRQRSLEKGIKTKMRVKLAAKLLVIAWTLMKKQEPFDPEYLKVTL

SEQ ID NO: 460596 - protein, 401 aa, unidentified
MHAVIGIDVSKATSQVAVAVDGKVVQNFKITHDVFGFNQLNSVIMQFNTFPDIVFEATGVYSRRLKTFLEAHNYPYTYLNPLTAKKQLDQLRPNKNDLNDAKHLAETQFILKRAKSYVQNPIYIELQDMSCFYQQLNHDIVSAKNRLHRLLQLTFPEIETLFSTTDSQQYWEIVSLIPHATMAKHSRQTLSDTIQSSVSRQIGVARLTRLVDKLVALGSLSAPAVAVASYNVTEVRYYAQRLIALSQIKANVLATMVDQTKDLPEYDIYQSIPGFSDKTVVSLIAELGDLHRFATSNKLNAFVGIDLRFNDSGDYKSSGFITKRGNTIAREVLFKAISNIAGTATYGHQNHINDWYQKKKQSSMSKGTKKIAIGAMSRLLRTMHYLVLNNQLYDYDTASKR

SEQ ID NO: 460597 - protein, 391 aa, unidentified
MIFVGIDVAKDKHDCFILNSEGTVLADVFTIANNRIGFETLLSRIQSCSQGESKIKVGLEATGHYSYNLLGFLLDSGLATYVINPLHTNLYRKSLSLRRTKTDRIDARTIAMMLMSDVDLKSYSNTAYHNEELKSLTRYRFDKVKERAKLKSSVARLVNILFPELEKLVSSLHIAVVYALLSNYPGASYIANANTEELAETLCTASKGRYTKSKTAEIQVAAGVSIGSKMPAKSIELKHTIALIRELDKEISEVESAIDKITSQMDSPIFTIPGIGRHMGAMILAEVGDFSNFASADKLLAYAGLSPSTYQSGQLQNCYAHMEKRGSRYLRYALFNAAKYVCLWCPTFSAYLEKKRSEGKHYNVAISHAAKKLVRLIFAMQRSGKAFLTDY

SEQ ID NO: 460598 - protein, 389 aa, unidentified
MFYIGIDVGKFNHCACVVSSEGEVLIEPFFFPNNLEGFQSFIKTVKKYKSPRHIVGLEATGHYGDNLVSFLVSHDYEVALINPLTTDAKRKSKIRKTKNDKKDTFLICSVLFDRDYTKVTQRKLDMKQARELTRYHASIAEDINQKKNQLQKCIEFVIHEFNTWFKTKYSKAYMAVLKEFGSSHNLASANLTHLKKVLKPKSSGSQVDIDASSLRASAKKSIGENNEVIALEIKMLIENIELLTSQLKTVDKKIEELVAKLDSPIFSIPGIGIYTGMSILSEIDDIHNFSSAVKVMGFAGVDPGTYQSGEYSAPRTALSKRGSRYLRKSLYQCILPVCTNNLTFNKYYKLKRLQGKSHRCAQGHSVRKLIRVIYKLLSENISFDEKHLI

SEQ ID NO: 460599 - protein, 333 aa, unidentified
MSNYSLFIGSDISKSVIDVSFHYEGLACYLGQFANNENGYSAFVKALSKKVSIPKNEWFVCFENTGVYSKPILNWLIAKNIACREENALNISKSLGIRRGKDDKVDSLDICQFAYEKRDSIRPTILPEQHITRLKKLLSRRDFLVRQRQSLKVSLKEQDGFISAEILEDLQQGNDNLISTYDAEINNLDTKIERLIQSNEDLSKNDKLARSVKGIGPVTSAYIIATTHNFTIFDNPKKYACYCGVAPFPNSSGTRTGRKKVSHIANKKMKSLLSNCAMTAKNHDPELSKYYKRKIEDGKQKGIVINALKNKLINRVFAVIKRGTPYVQLMNYA

SEQ ID NO: 460600 - protein, 347 aa, unidentified
MNISIVGIDLAKNVFQVCALSIDGAIAWNRKVPRTKLSSVLEELPKSTLIAMEACSSSNFWGRYLLERGFRVAVIPAQHVKPFARHQKNDSNDALAICEAAMRPGIHRVAVKTLDQQDIKTLRTVRRRLVQQRTATGNQIRAIAGEYGVIFPIGLRRLIVALPDALEEAQNGLSHVARATLAQSLERLREMDRVIDELTKQITQICKKTPRYADLQSIPGMGLLVSAALISEIGDGRQFSNGRQMAAWLGLVPRQHSSGGKQVLGSITKHGNNDLRVLLVHGARAVVRFAQRRLDPLGEWIRALIARRGRHRAIVALANKLARIAWSVLVKDQRFDAALAFAPSRTA

SEQ ID NO: 460601 - protein, 343 aa, unidentified
MQIRSVGIDLGKTTFHLVALGDNGKVLLRKKFTQKQLIAFTANMQTCLIGMEACSGSHFLGRALREQGHDVKLIPAQFVKPFVKSNKNDFIDAEAIAEAVDRENMRFVPIKTDDQLDLQALHRVRDRLMARRTALINQIRAFLLERGIVFAKSPIRLREALPEVLENVNENLTPRMRNLVAMLWSEWKDLELQIVQMNDEVERIASSDAACRRLRQIPGIGPLVATAIVASIGNGAAFRKGREFAAWMGLLPKQHSTGGKARLYGISKRGNSYLRKILIHGARAVVLRSKRDRIAMGAWMTSLETRAPRNVLIVATAHKLARIAWAVLSSGQDYRAVPEALTV

SEQ ID NO: 460602 - protein, 343 aa, unidentified
MSEYDGKQFVGIDLHRQRSVIVRQSDTGEQLSTVRIINDPASLVAQLGKAGEHPEVVLEATYGWYWAVDALRAAGARVHLAHPLGVRGFRYRRVKNDVRDASDLADLLRMNRLPEAWIAPPPVRELRELVRYRAKLVAIRSGLKAQVHAVLAKEGLLIPVSDVFGIDGRRRLAKIPLGAAYAQRVISLLKLIDTLDTHEARFTTAIADQLRGHVGYRVIQQLPDVGPVLGAVFVAEIGDAQRFSGPDRLCSWAGLTPRHHESDTVVRRGHITKQGSKLVRWAAVEAIQHQPTGTKISADRARIEARRGKNIAKVAAARKLLTLVYYGLRDENIRALAHQRTAA

SEQ ID NO: 460603 - protein, 341 aa, unidentified
MDKELYFGVDVSKKTLDLAYYDGETIDWKNAHIQVSNDDAGFKKIGSWVAKVGKDFDTFLFCMEYTGLYNQNFRLWLESKEYIYGMVEPRKMHRFEPDLDDDQRSLDRIKTDELDAFRIAIYCEQNHKKILRNPSKLPSPVYFKLKRLLAERKQNTKQSVLYKQQFHDICAYDTDLSVERKKLLLKNMQENQKAIDKEIDSYMNEDTSIRKNYNLLTSIPGIGRIIALETIVLTENFTAISNPRKYACYIGIAPFKKESGTSVRKKTGVSKKGFSEAKADLSIAVLSAIRNNPSIRDYWIRKRKEKCGGIVLNAVKFKLVLRMFAVIKRGTPYVETDAYKN

SEQ ID NO: 460604 - protein, 337 aa, unidentified
MIAVGVDTHKHEHAVCVLDDLGQLVGERTIGASSSDYALLVAWLGAFGSELVVGIEGAGSYGAGLCEYLLAHGIRVVEVARPRRRDRRRGKSDRIDARLAARHVLAGDRLSTPRAGGTRLALQALLGTYRATVRERTRVLNELQALDAIAPLALHERIGAGSGKQLATRVLRLRARPGAAQTERLILELMRDLARRAGDLTRLAERYRRQLDELVRTLDEALLSEPGIGPISAAKLLVCDPRRLKSEAAFARCNGTAPLPASSGQTIRHRLSRGGDRQANNAIHTIALSRAKHDPATRAYLERRISEGKTRREAMRSLKRHLSHSLYHRLITIDLTS

SEQ ID NO: 460605 - protein, 408 aa, unidentified
MLFVGDDWAEDHHDVELMDAGGHRLAKARLPEGVAGIARLHAMIGAQLGDDAEDDAAQVKIGIETDRGPWVQALIAAGYTVFAVNPLQAARYRERLAVSGAKSDAADAHMLADMVRTDSHQLRPVAGDTAEAEAVKVVTRMHKTLIWERTRAGQRLRHALREYFPAALEAFEDLDAADTLELLAKAPDPASAARLSTSQISAALKRARRRDIAAKTATIQAVLRGEYLGQPAIVTAAYAASVRALVAVLGTLSEQVKILQGEVEAHFGKHPDAEIVLSQPGLGPILGARVLAEFGDEHKRYSSAKARKNYAGTSPITRASGKKKVVAARFVHNDRLIDALMTQAFTSLRNSPGARAYYDQQRARGASYNAALRQLANRLVGILHGCLKTGTTYNETTAWSHHFREAAA

SEQ ID NO: 460606 - protein, 356 aa, unidentified
MAISCDYDKEVDMVTTIGIDPHKATHTAVAIDETETVLGELTVPADRDQTKTLLDWAQNLDGDGRVWAVEAAGGLGYLLSQQLIADGEQVVDVPPVLASRVRLLGSGRSEKNDPNDARSVAIAALRQPGLAVVRPEDHTQALRMLAKRHLELTALRTQAACRLHAVILQLRPGGIARRLSAKQASRMLQGMRNLDVIGEQRRMMARAHLADIRRYDREIKANKVLISKAVVASRTTLTDVYGVGPVVAALLIGYTNNIGRFATADHYAAYNGTAPVEYSSGGKKRHRLSMRGNRVLNHAIHMAAVTQISHDTPGRVYYDKKQAEGKTRKEALRALKRRISDVVYRKLVADQRTKTR

SEQ ID NO: 460607 - protein, 345 aa, unidentified
MELHTIGIDLGKTVFHLVGLNVHGEIVVRKKCSRKQLLNFTANLQVELIGMEACGGAHFLGRALQEQGHEVRLMPAQYVKPYVKTNKSDYIDAEAIAEAVARPRMRFVPIKSDDQLDLQSLHRVRERWVMRRTAVINQIRGLLLERGITLRKGRCHVDAALPGILEDTTTKLSGALRLLLAQLKLELDHLALRIDEADAVIKKTAGENEACQRLDAIPGIGPITATAIIAAIGNGAAFRNGRGFAAWLGVVPTEYSTGGKQKLLGISKRGNSYLRRLFVQGARAVMLQRTKQSPGLSTWLAQLTARMHPNIVIVALANKLARMAWAVLAKEEVYRPPALAHGTTA

SEQ ID NO: 460608 - protein, 323 aa, unidentified
MPSVIGIDIAKHTFDLATLQPNGKYRTKAKLANDKAGFAVLRDWLNKHSEPGAWVVMEATGIHHEALAEWLLEQGYRVCVLNPAQIAHYARSQLQRVKTDKVDAKLIAEYGERHQDELRPWQPEPLAVKRLKALVRRLGDLREIEQMERNSLEVADASVQASIQSVLEHVGQEIEETLKAIDDHIDNDPDLRGKRDLLTSIDGVADKTAALLLAELGDPLRFANSRAITAFAGLNPRLQESGSYRGQTRISKMGSSRLRAGLYMPAISALTYNEAIRAMGERLRERGKTGKQIVCAAMRKLLNIAYGVLKSGQPFDAKLALAH

SEQ ID NO: 460609 - protein, 371 aa, unidentified
MKEFSKYVGMDVHKMTIAVAVAEAQGGEVRYLGEIANSAEAIQKLVKQLRKGDAQLSFCYEAGPCGYGIHRQLTELGWDCQVVAPSLIPKKAGDRVKTDRRDSLSLARLHRAGELTAVWVPDGAQEALRDLTRAREDMKHLQRQAKQRLLAFLLRHGKSYAGKSNWTQAHYRWLEGMKFSQPVQQIVFQEYVDTVKLLSQRVAALDQQIAGAAAESAFWPVIEALMALRGVNLLTATTIIAEIGDLQRFATAPQLMAYLGLVPSEHSSGGTKSRGGITKTGNGHVRRVLVEAAWTYRHPARKTACLQRRAERTPKAVQAIAWDAQKRLCARYKRMEGRGKLKVQACTAVARELAGFIWAVGQALPRPAAKA

SEQ ID NO: 460610 - protein, 321 aa, unidentified
MSKKVLGVDVAKKKLDVLLMFDGRELRRKFDNTLRGFQLLQGWLGSLHIEQVHACLEATGTYGEAIAEFLYEKGHRVSVVNPFRIKAYANTDLQRNKTDTADARTIADFCMVKDPEDWHPLPTEMKHLQELTRRIESLERILASEQNRLEIASVKIRPSIERMIHKLEEEIEEVTRLIKEHIDNNPDLKQKKKLLESIPGIGRKTAQVLLGEIEFRQYTSARAVAAQAGLTPRKDQSGTSLNRTRLSKLGNGRIRKALYFPAIVATKHNKIVREFASRLSQNGKTPMQVICAAMRKLLHIAFGVIKNNRPFDPNLASTLDC

SEQ ID NO: 460611 - protein, 321 aa, unidentified
MSKFIGIDISKQTFDVCFFDGEHQKFDNNLKGFKKLLRNLVADNKIVMEASGPYYVKLASFLHQEKISVFVVNPLKVKRFGQMNFNRAKTDKKDAQVIRDFAIKMNDELREWKPESKHTTELKQLNTSVELLNKQIHQIKLQMESFEDSGHIAEKIKKGYKKIIKNLQREKENLEEEMERTAKCEYAQTVASLTSIPGIGIKTATMLIAVTDDFQKFDHYKKLIAYVGFSPRIYQSGTSIKGKGHICKMGKSQIRKLLYMCSWTAKRYNKACKVMYDRLRQRGKPERVIKIAIANKLLKTCFAIAKSKGKYQENYIPEVCF

SEQ ID NO: 460612 - protein, 334 aa, unidentified
MQNITLIGIDLGKHSFHIHCQDKSSKALLRKKFTRTKLMQFLATCPPSVVVMEACAGAHFMARCISDFGHETKLISPQFVRPFVKSNKNDFVDAEAICEAASRPSMRFVQPRTETQQAMRALHRVRESLIRDKVKTTNQIHGFLLEFGISLPIGDAVIKRLSLVLAEHEIPEYLSRLLVRLHTHYFYLVEQIAELESELSQSINADDTAQRIMTIPGVGPITASLLSSQLGDGKQFSCSRDFAASTGLVPRQYSTGGKSTLLGISKRGDKNLRRLLVQCARSFIMRLERKHGKLAEWVREQLNKKHSNVVTCALANKLARIAWAITTQKKEYQA

SEQ ID NO: 460613 - protein, 340 aa, unidentified
MQITTIGLDLAKSVFQVHGVDAAGHNVIKKKLRRAEVLKFFEALPPCVVGIEACATAHHWARKLSVLGHEVRLMPPAYVKAYVRRQKNDAADAEAICEAVTRPTMRFVPVKSADRQGVLVLHRSRELLVRQRTMLINAIRGHCAEFGLIVPQGARRAVDLVELVRQAEPVVLPDIARSALLMLADHLEALAAQIHALERRLLAWHRQDQDSQRLATIPGVGLISATAFAASVPNPSLFRSGREFAAFLGLVPRQNSSGGKDRLGRISKMGDGYLRKLLVVGATSVIRRARTGALASAPWIRSLLERRPSRVVTVAMANKTTRIIWAVLARGDVYRAPAMA

SEQ ID NO: 460614 - protein, 364 aa, unidentified
MDTHKKEHKIALHYPGQQEIVNLIMKNSSSEISKTVKRILKKSPGEVRFCYEAGVCGFNLKRRIESLGCKCAVIAPSLTPTKPGERIKTDRRDAVRLLEMFKAGLLTEVHAPDPQQEAARELTRLRQTARQNLMRIRHQLLKFLTRHGYIYTEGNHWTGRHLRWLRGLEFEEPLLQEVFDSYLTEMQHCMQRLDSMDKQVGHLADSQAYKEMVGLLKCFHGIDTLTAISIITEVFDFGRFSSPRDLMSYLGLTPSESSSGEKQKKGPITKTGNKRVRRLLIEVSWHYRHPYHISKVLKQRRKDQPQWAIDIADRAGQRLRKRYWYLIHRGKMQCKATTAVARELAGFIWSVFREYQVRNMHKAA

SEQ ID NO: 460615 - protein, 342 aa, unidentified
MKDMMIGVDLAKNVFQVHGALRTGDVQFRKKLTRKQFPVFMARQEPCLVLFEACGSAHHWAREMEAFGHEVKLIAPQYVRPFVKRQKNDAADAEAIVIAGRQPEMRFVAPKTVEQQSRAAVFRGRERMIHQRTADVNALRALLHEHGHVFPIGIRHLDRITALVEDETSDLPALIREECQDLLAQIGEKTARIAERTTKLKTLATRSDRARRLQTMPGVGPLTAVAVEAFGPDMAQFETGRDFAAWLGLVPRQHSSGGKERLGRMTKAGQVDIRRLLIIGAMSRLGWLGQRTIPEGSWLARMLARKPRMLVAIALANKMARQIWAMLTKDENYRDPALAGAA

SEQ ID NO: 460616 - protein, 355 aa, unidentified
MTITKYIGMDVHKESISIAVMNSAGKLVMECVIETKGSMLLQFIDGLRGDVHVTFEEGTWAAWLYDLLKPHVSEVVVCNPRKNALLKDGSKSDRIDARKLAELLRGNHLKPVYHGEQGLRTLKELARSYLNISKDVTRVMNRLKALYRSWGIACAGTKVYAPRHRSEWLGKISEAGVQRRAEHCYQQLDALRLLHQQVRRDLLLESKKHQAWRLLGLIPGIGPIRAALLIALIQTPHRFRTKRQLWTYSGLGLETHDSAQYRVVEGQLQRSKKPVTLRGLNQAHNHDLKDIFKGAATRVSSSSGPLHDFYEHLLAQGRKPTMAHLTLARKIAAITLIVWKKEVRFDASYLKSQAA

SEQ ID NO: 460617 - protein, 393 aa, unidentified
MICVGIDVAKDKHDCVILNSKGKILAGVFTIPNNADGFDTLLQKIRSCTSSDDKIKVGLEATGHYSYNILGFLINQGLPTYVINPLHTNLYRKSMSLRKTKTDRVDAKTIATMLMSNVDLKSYTDTAYHNEELKSLTRYRFDKVRERAQLKQSVSRLVTILFPELEKLVPTLHMSSIYALLIEFPGAKQITEAHLTHLKSLLKDASKGRYGRDMATEIRDAAKHSIGSVMPAKSLELRHTIRLIRELDSEIEDIEAAIEAIMEELQSPITTIPGMGFRMGAMILAEIGDFARFDSPDKILAYAGMSPSTYQSGQLSLAGTYSHMEKRGSRYLRYALYNATKYVCHWDPGFAAYLAKKRAEGKHYNVALSHAAKKLVRLIYAMEKSRQPYKRAA

SEQ ID NO: 460618 - protein, 318 aa, unidentified
MDAFKAFVGIDVSKQQLDVAENPNSPTWSCPYDPRGIAHLIKRLRPLHPCLIVVEATGGYERRLIADLLDAGFHVARVNPRQVRDFARGLGQLAKTDRLDAQILARFAQHVQPAPLQKSPEKQAVLDQLVSRRRQLLELRTAETARLELTQASLARRSIQQLLRLLDKQIDQLDTEIARLIDSHDDWRNKAQLLTSTPGVGPVLAATLLAKLPELGSLSRQKISALAGVAPFNHDSGKFRGQRSIWGGRRDVRAVLYMAALTARRCNPAIRAFAQRLQAAGKPLKVVLTACMRKLLLILNAMLKKQTPWHPLLKETTL

SEQ ID NO: 460619 - protein, 498 aa, unidentified
MVTDIFQRRSQTAETVLGGTDLRRVLIVPIDFAKETHVAQIARGTGEYLRKHPLNVRNSMEGSRYLIEAVERCCAKYRIAKCRVLFGGEDPPEYVRNFVDSIQTAGYAFVRVNAKEAKKHRTNTRATSDALALDGIAQVMLLHRAYDLILWDEIYGAMKLAERTRRRLKKQETALKNRIHRDVDVLLPGLLKESLSGLLPFGVSCLNLMESGCSVMRVKRMRTDTLAKRLKAGHTQNPGKVAIQIKDLAQSALPPAPAIVPYKDKTLAAKARHMVTLRESLRVEENEMARCLVQTPGFLMTSIPGLGVVLTGGFVAEYGDTGNWRIPDQMASYAGIVCRQHQTGGPDSEPVRGRLPIDSNHHLKDQLLQAAYHTGHNTHPAWKKLGLPGEHPLFEHYRSVELREGKSRLSTAKKLIRVASAMVRDGRVYLPPSALDPGAPDAMPMEQFTAYLEIVGEMLKRKWKGYDLSGIPDENNRLVRWLEDTGELVEHWQKDNNI

SEQ ID NO: 460620 - protein, 356 aa, unidentified
MSRDIKYIGMDVHKEAVVIAVLNSSGKLVMESIVETKASSILQFIHGLRGELHVTWEEGTWAAWLYDLLQPHVQQVLVCDPRRNALLKEGNKSDKVDARKLADLLRTGMLRPVYHGEHGLRTLRELARSYQTISKDLNRVMNRIKALYRGWSIPCAGTQVYAPRYRQEWLHKIEHAGVRRRAELLYQQLDGLQRLRRTLRPELLAESRKHKAAKLLRQIPCIGPIRAARLLALMQTPHRFRSKRQLWTYSGLGIETRDSAQYRFVCGQLQRSKKPQQLRGLNRNHNHEMKEIFKGAATRASCGVGPLREFYVALLDKGMKPEMARLTLARKIAAITLTLWKKEEGFDAELLKTQAA

SEQ ID NO: 460621 - protein, 348 aa, unidentified
MKYIGLDCHKQYDHATMIDTETGEVKARKLAHIKEEFREFIGDKTGTRVVIESCRDWSRTYELSKDLVEDIILAHPLKVKAIASAKVKTDAVDSRTLAQLLMADLIPEAHLRKAENRVKQRVIRHRTFMVVMRTRVKSRIHNLVDSQLLSPEALKAKPKNLFSKKGIKWLASLEWAKEEDNRLVESHLRVMEAINQEISITNDMVKEIYEKDRDAQLLITIPGIGITLGMLISTEIDGIERFHSPSKLCSYAGLVPSTHSSGGKTYHGKITSEGNRWLRWALVEAAVPASYADAEIKERLDTLRKKKGANVAKTAMSRWLLKVVYHVLKERRPYITDYNVMAKAGAAF

SEQ ID NO: 460622 - protein, 316 aa, unidentified
MGERSVFVGIDVAKAQLDLAQRPEGPGLSAANTESGIATVVAHLRIVKPTLIVLEATGGLERPLVRALVDATLPVVVVNPRQVRDFAKATGQLAKTDALDAQVLARFAQAVRPALRPVPDAPTQELAALIARRRQVVEMLTAERNRLGGAPKRVQRRIQVHLNWLTTELARAGDDLDQAIRNSPIWREQEDLLQSVPGVGPVVTRTLLAELPELGTLNRKQIAALVGVAPLNRDSGMLRGRRMVWGGRAQVRAVLYMGAIVAARFNPVLRAFYQRLRAAGKAKKVALTACMRKLLIMLNAIMKHRTPWRTEIAQCA

SEQ ID NO: 460623 - protein, 453 aa, unidentified
MPQKQKIRGRAAGALSTIHPHAAGLDVGATFHVVAVAADRDEQPVRTFRSFSGDLHRLAGWLQTMGITTVAMESTGVYWIPVFEILEARGFEVLLVNARDVKHVPGRKSDVNDAQWLQQLHQFGLLRGSFRPRDGVARLRAYLRHRERLVEYAASHIQHMQKALMQMNVQLHHVVTDITGVTGMRIIRAIVSGIQEPEALAEFRDARCAASPETIRAALTGNYRPEHVFALRHAVELYDVHQTKIAECDTEIETVLHTLNTERATPETPLPAVRHAKARNEPKFDARPALYTLLGADLTQIHGFGPYTVLRLVAECGDDMSKWPTAKHFTSWLSLAPGNKVSGGRLLSSKTRRSTNRAAALLRIAAVNIGRTHTALGAFYRRLAARIGKAKAVTATARKLAILFYNALRFGLAYADPGASYYEQRYRQRVLDNLRRRAQQMGFTLVADAASHE

SEQ ID NO: 460624 - protein, 319 aa, unidentified
MENNAIKFKIIGVDVAKLKLDIAFDDKHIITIDNQKDSFKQLLKLIADATQVCFVMEATGGYEKPLSNFLLAQGIAVCIVNAKRVRDYAKAIGRHAKNDRIDAQVIRLYAEMAQPKQLEQRSTEAHQLEALMKRRDQLIKQRTMEKQHLEAANDADSIRSIKKFIKAFDKEIERIEVNIKKLIETNKALQDLRKQLTQVDGIGEVTISILMAQLPELGQLSNKQISALVGVAPFCKDSGTMKGRRVVWGGRASIRSVLYMATLSAIRYNKPIRTFYQRLVANGKLKKVALVACMRKLLVILNAMVKKGSEWDPDYVKLI

SEQ ID NO: 460625 - protein, 349 aa, unidentified
MTLYIGVDFHPHQQTNAWCDTRTGETQTTDLINDPEVVRKFYSSLREPAIVGIEASARATWFEELLFETGHKLFVGNPVLIRKRATSRHKNDRRDAELILGLLLRGEFPAIWRRPPASEQILEILRLRQSLVRQRTKLYNQLQALAHSVGLPKGRIRTSGFQRLVKTAAMNEVSSIRRTHLFSLVEKLNSQIVELDQWLKVKADEDRSVRLLQTQKGVGHLTALATVHTIGDVSRFPRLSKQIASFAGLDPVEKSSAGRVRFGSISKAGSRLLRYQLGLAAQIAARSDAKLKSFYKRLAKKKPKSVAKTAAARKLLVKLSIMLRDQITAEEFDRRGRTVGNARGTTDPK

SEQ ID NO: 460626 - protein, 353 aa, unidentified
MEYIAFDAHKHYTLASVVQPDGRILREQRIAHERGAFQQFLDRCEPGSPVAVETVGNWYWIVDEIEAAGCVPKLVHARKAKLMMGEINKTDKLDVRGLNQLQRTGTLPTVWIPPGELRDQRDLPRTRMVLVRQRTRLKNRIHATLAKYGLHDLEVSDLFGARGRTLLRQRLDLLPPCTAYATGQLLEQVESLDRAVRGFEHQIQTVFKPTPAIQLLLTLPGVGLTLAVVIALEVGTSARFATAEKLAAYAGATPRVHASGGKTRFGPPRPDVNHYLKWAFVEAANAICLNRSRRPRRHVSRLYERLARRKGHQKAIGAVARHLAEATYWILTTQQPYREPNVATVSSTGDKRV

SEQ ID NO: 460627 - protein, 341 aa, unidentified
MEHFAGLDVSVKDTSVCIVDGAGKIVREVKVASEPDDLLQVLRNPAYCFKRIGLEAGPLSQWLFSALAEADLPVICVETRHMRAVLKAQINKTDRNDARGIAQMMRVGLYRPVHVKTLRSQKLRMLLTHRKLLQSKAIAVDNDLRATLRNFGLKVGIAGRTRFEARIVELLEYLPDLAVLVEPLLVVRRVLREQIAVLHRRLLTIVRDDEVCRRLMTMPGVGPVVALTYRATVDVPARFRKSKSVGAVFGLTCSRDQSGERDHPGAISRCGDEMMRTMLYEAAQSMLRSTQWSWLKAWAMQIARRRGMKRAIVALARRLAVIMHRIWVDGTEFRWTREVTA

SEQ ID NO: 460628 - protein, 331 aa, unidentified
MNFNLFIGIDVSKSTLDVHLKPIGCYKAFSNDPHGFITMVEWIMDQAGKFCHKELVFGLEHTGLYSENLILFLDQNDFAFTVIPGLELKRSLGIRRGKSDKADARNIAEYIYEKREKIKLYKLPSQTLDKLKKLASIRERMVKERAAYQVRMDEYLEQFPDSTFETYLQTQQELIHCFNSQIERVEKDIERLIKEDSSLSDQYKLINSIKGVGPQTAIMMIILTNGFSSFDNWRKFASYAGIAPFPNQSGTFNGRTKTNKLANKRIKSLLTMCASTAIQFNPEMRKYYENRVQMGKNKMSTLNIIRNKLTARIFAVISRNTPYVEIHKYAA

SEQ ID NO: 460629 - protein, 345 aa, unidentified
MDYFAGLDISVKETSVCIVDDTGRLVREVKVASEPEALLPVVTNPLWRFKRIGLEAGPLSQWLFSALAEAGLPVICVETRHMRAVLQAQINKTDRNDARGIAQMMRAGLYRPVHVKTLRSQKLRMLLTHRKLLQSKAIAIDNDLRGTLRNFGLKVGVVGALKFEARIRELVEDLPDLAELVEPMLVVRRTLREQIGILHGRLLAIVHNDDVCRRLMTVPGVGPVVALTYRATVDVPARFRNSKAVGAVFGLTPSRYQSGETNRTGAISRCGDEMMRAMLYEAAHIMLVRLAKWCWLKAWAMKIARQRGIKKAIVALARRLAVIMHRIWVDGTEFRWTREQVVAAA

SEQ ID NO: 460630 - protein, 386 aa, unidentified
MTAIIGMDPHKRSATIEIIDSAGTVLATGRYGTDNAGYSEMLAAAQRYKDRVWAIEGCNGIGRHIAHRLVHDGEAVIDVPAKLSAQVRVFATGNGRKTDPVDAHSVALAALRSPDLRQVHADPELIALGMLADRRDELGRARTDTVNRLHRLLLELLPGGAKKFLSAMQARKLVATVKPRDPAGKVRRRLVVELIGELETIDRKIKAADKELRELVAERGSTLIDLNGIGPAGAARLLADVGDLHRFRDRNRFASWNGTAPLDASSGQQQRHRLSRAGNRKINRVLHTMAIVQLRNPSVGRTYFDRRKAEGKTSMESMRALKRRLSNVVYTCRSSCCALPRANFSDRVAAADAVVAEGVSLVLGAGRPALRSACVVSRVGDMTPQR

SEQ ID NO: 460631 - protein, 322 aa, unidentified
MTEALAQPGPTTPCSVGIDVAKAWLDVAVRPSGAQWRAANGEAEVPTLVEQVRAVQPQLVVLEATGGYERAVVAALAAAGLPVVVVNPRQVRHFAKATGKLAKTDILDAHMLAHFAEAVHPVPRPLTDAATQRLAALLERRSQLVAMLTAEKNRRQQALDSVRPLSAAPIAWLEQDVDQLTQELDQTLHASPVWREREDLLRSVPGVGPILALTLLAELPELGTLAHKQLAALVGVAPLNRDSGSSRGTRVIWGGRARVRAALYMSTLSAVRYNPVLRAFWTRLREQGKPPKVALVACMHKLLTILNAMLKRQAPWQPALAA

SEQ ID NO: 460632 - protein, 369 aa, unidentified
MAFFIGVDLHKTQFTVHVRTEEKVESLDQIRQYPTTTAGYAEFLSRIETYKATGAAVKIGVESTGNTRFFKNQVEKAGAEVTVINTLKFKVINESTKKTDKHDASTISEFLSKDMLPESYLCGKETENIRRLLKSRERLVRSTVGQKNEIHALLVSLGLSDELRSLQSKKGRQKILDTLESNNDYVLEAQSVKLMFEIIERIEESVKIIEKQISELTKDDEMVNRLMTIRGCGKITAWTVRAYTEDISRFATAKKYAAFCGLVPWVQDSNETIHHGKITKRGPQELRTCFVQLVMGIRRCKDTSEWRMMQRYEYMKKNKGSGKSIVAAARKMAEIVWAMLNDKQDFDSAKMIGRYKPIILADEALTAMN

SEQ ID NO: 460633 - protein, 430 aa, unidentified
MEHLDGIRLQEFRQVRKEIRGSDKYLIVGIDVAKERHNAFFGTATGRTLHKGLVFDNTIEGFRKLLTLTEALKVQHDLTNVVFGLEPTANYHKPLGEHLIKCGHLVILVSTAAVKNNRQLLDGRWDKHDTKDSANVADLISQGKCLYYEYPDQKVRDLRSLLSLKRRLKKEEHGLRVRIRNQLLAQYFPEMDRYFGPEVSLAVVRCCLDPSAIAGMEYDEFCRNVAPGKLNMSQQKRLQAIWQTAPESIGCRVGDAVPFEAQVMVSGLRQVRETIKAVEKKIEDICIQFPEYSCLLSIPGFGPDVSSKVLGAIGYPFRFASGKQVLKMAGFDLCAHRSGKTSNSATPVISKQGKADLRYALYQAALIASLSNKAFMTYYTNKLRGRQREKGIGTKMRVKLAAKLLVIAWTLMKKKESFDPKYLNQGDTQI

SEQ ID NO: 460634 - protein, 366 aa, unidentified
MKKHTSKKQTTRKGTAKETFAFYIGIDLGDKKSDICVLDEQGELHDEFRLRMNAQELQTYFGSLARSRVAMEAGAQSRWVAEVIERCGHQVYVSNTRQVPYIHQSDAKNDPGDAYKLAELVRFQPRLLHPIQHRSQEAQADLSWIRAREVLVGSRTQIINAIRGMSKAFGERLQKCSTTSFTGKRGDQIPAPIRSAVAPLLETIDHLNEQISYYDQMIEQVARTRYPRHRLLDQVQGVGVHTALAYMLTIGDPERFDKSRAVGSFLGLRPKQKDSGERKPQMGITKAGDEYLRKTLVNCGHYILGPHGADSDLRRFGLRICERGGKNAKKRAVVAVARKLAVLLHRLWISGEVYEPLRNRQVAAAA

SEQ ID NO: 460635 - protein, 356 aa, unidentified
MNGKKVVGIDLAKRTFESVRMQDGEKDKWYRGKTGQGDRMKFYEYLDADDIVILEAGSMAFLMAKEIKKYAGCEVYVLNPSELHIIFKSLKKNDKEDAKKLARLGLRNPIDELPLVPVPSDSEEKMRRLVARQAYLKRDLTQQKNRLHGLFVKAGIVNIKKSELAGKANREKTVEQLPGDLRDEAYMLMEVMNMLERQLKKAEQDIKKQLKANPGYTNLVLSMPGIGPIMAASLLAYVGDGKRFTKPNQISYYAGLVPKLKSSGEMMHHGHILQKGCKALRRNAVQSANGLLTSRYQGPLRDFYDRISKRRGKKIAKVALARKMLETIYVMLSTGEMFRDSWENMLPQKLKYYGLT

SEQ ID NO: 460636 - protein, 328 aa, unidentified
MEAVSVGIDVSKRELVIAVHPTGEQWTTATTPAAIGTVVTRLRALAPQIIVVEATGGYERTVVAAMAVAELPVAVVNPRQVRAFAQAIGRTAKTDVVDAKILAAFGARLEPAPRPVADTATQELADFLARRRQLLEMIGMERGRLEHAAPTGPLTRELRRHIRWLERRVDDVDDEIGTCIAAHPTWRVQEELLRSVPGVGPTTARTLLGELPELGRLDRRAIAALVGVAPFNCDSGQHRGQRHIWGGRTSVRTTMYMAALSASQHNPVLRAFYRRLRDAGKPAKVALVATMRKLLTILNAMIKHQSHWTTQVASTSASLSGPARAATV

SEQ ID NO: 460637 - protein, 376 aa, unidentified
MEDDNTLYVGMDVHKDSITVAYAPGSGDVELFGKIGTTKSDIDRLCKRLQSKARHICVVYEAGPCGYGLYRQLIQKGFECMVCAPSLIPKKPGERVKTDRRDAVKLVRLLRTGDLSAVYVPSVEDEAFRDLARAWVSAKDDLKRARQRLKAFLLSHGVRYTGRGDWGAAHRRWLSAYAFDSAWQQLAFEEHRRTIEDRLAQCERLEAALREAVVDWHFYPAALGLQTMRGVQFTTAVGMLAELGDLSRFEHPRQLMAWLGVTPSEHSSGDKRRQGSITKTGNSYARKLLVEAAWSYRHPARVSPEIQRRHEGIPKPIVDRAWDAQVRLCRRYRKLTARGKEKNIAVVAVSRELSGFIWDISRLAMSLAVPAEAHAV

SEQ ID NO: 460638 - protein, 340 aa, unidentified
MPLYGGIDLHANNSVVVLLNEQDQVVYEKRLPNHLPTVLDLLDPYRAEIMGFVVASTYNWYWLVDGLMEAGYRVHLAHPAAMQQYSGLKDTDDHSDARWLAHLLRLGVLPEGYIYPKAERAVRDLLRKRAHLVRQHTANVLSVQNILVRNTGTRLSIKRIRELTKQELEGLLPEVAQVLAVTSSLAVLACLSHQIKTLEQTVHKRLKHTPSYEQLLTVDGIGTILAPTIALETGTIGRFPTVGHSASYCRCVDRSKIRNGKRKGQGNVKNGNPYLGWAYMEAAQFALRFNPSAQRFYQRKLAKSNNNTTLARKAVAHKLSRACYYIMRDLVPFDALKAFG

SEQ ID NO: 460639 - protein, 451 aa, unidentified
MTKRAEKRERRSMVLQPDAAGIDIGAEEIFVAVPPDRDEESTRRFSSFTCDLHALADWLGRCRIQTVAMESTGVYWIPLFQILEERGFEVYLVNAHYLKSVPGRKSDVSDCQWIQYLHSVGLLRASFRPPDAICAIRTLWRHRGSLLEMAAEHILHMQKALSQMNLQLHHVLSDITGTSGQAILDAILSGKRDPVELAQLCHSRVKSPRDKVAQALVGDYRPEHLFTLKQSLAGYRYYQKLILELDQETARLMQALPSATEHPMPPRTKATAYHRQGNDPQFDLRSELYRIAGVDLTDIPGVSAATAQVILTEIGTDVSRFRHASAFASWLGLCPEKRVSGGKMLSCKTRKVKHRAATALRMGANSLCRAKGYFGEFFRRMRAKLGTAQAITATAHKIARILYHVLLTKEPYAETVFHRCDEQAQRRAEMRLRKQAAHLGFQLLPITTTGQ

SEQ ID NO: 460640 - protein, 405 aa, unidentified
MGIYVGIDWAEAHHDICVLDETGTILAKRRIAEGLEGVGQLHMLLADRAAEPNQVVIGIETDRGQLVGALLAAGYQVFAINPLAARRYRERHVTSGAKSDPGDAKVLADLVRTDRHNHRPVAGDSELAALLQVLARAHQNLIWTRQRLANQLRSNLREYYPAALGAFGTDLAHPMALGVLDAAPTPAMGRRLSRAKLAAILRRAGRERGLEPKAAAIQAQFRAPQLAAPALVGEAYGKSVASTVRILRELNAQLASLEAELAPSFEKHPDAEIYRSLPGLGIILGVRVLSEFGDDRTRFAHPKARKNYAGSSPITKASGTRRVVLARMARNRRLADACYLWAFCALTNSAGARDHYHVLRRRGKTHHQALRALANRLVGILHGCLHHHQAYREDIAWPRSITVAA

SEQ ID NO: 460641 - protein, 316 aa, unidentified
MEAPAIFIGIDISKARLDIAMRPSGECEWVAHEEGALQSLVKRWSQMRPTLIVLEATGGLERSISRALASAQLPFVVVNPRQVRDFAKATGQLAKTDRIDALVLARFGEAVRPAVRPLADEASQELKALSARRRQIIEMMVAERNRASRAPKSVGKRIDAHIRWLEAELDRADKDLDQSIRQSPIWQENEDLLRSVPGIGPIVSRTLLAELPELGQLNRKQIAALVGVAPLNRDSGQFKGRRTIWGGRAAARACLYMAALVASRHNSVIGAFYTRLRSAGKKPKVVLVACMRKLLTIINAMIKHRTHWSEFNSQTT

SEQ ID NO: 460642 - protein, 494 aa, unidentified
MNCNSVYPIPMKRPSNKARRSAPSIATRGEGPIRPATSLPVVHPHAAGIDVGASELYVCVPEDAVSPGDSPVRRFGVFTGELDKLVEWLQSCGVKTVAMESTGVYWIPLYQKLEAGGLEVVLANARHLRQVPGRKTDVKDCQWLQRLHSYGMLQGSFRPSEEYCRLRSLMRHRENLVDGCVKQVQYMQKALDQMNVRLHQVVSDLNGETGLRILDAILAGERDPKNLTSLRDERIKRSTPPEMEAALQGDWREEQLFILQQARETYRFVERQLAQCDAQIEKVLQQIVVVAAREPSLEPPPNPTAAPTPRKKKERRSRKTGHGLKRDLRAELQRICGVDLTQVIGLNVLSVLIIISEIGVNMSRWRSAKAFCSWLGLNPGNKISGGRVLSSRTPHVVNRVSLLLRTLATAVGRSETWLGIFHRRMKARLGPAGANTATARKLACLIYHLLKYQEQYIDVDTLMYAEKIQRIRLNKLRKTAQELGFELLPIKEAA

SEQ ID NO: 460643 - protein, 424 aa, unidentified
MNTPVIAQTLPPDHTPFAAWIGLDWGQDEHAFALADHSGQIQEGKLTHSAETLHAWLQQLAGRFGGRPVALAIEASRGPVVSALLAYPWLTVYPINPLTSARYRQAFTPSGAKDDQPDARVLLELVRDHAAKLRPLELQDADTQKLDGLVQARRDMVDRRTQVLNQLTALLKTYYPQALELVGNLNTELAADFLERWPDLLTLKAARPGTIKRFYHTHNLRRPELLEQRLAFIRQAVALTTSEATLLVAVLQLRFLLDQWRVFQRHIPRLDDQIKEVFRQHPEAHLYRNLPGAGPALGPRLCAAFGTVRTLHPNPASLQKRVGVAPVREKSGHQLWTHWRWQAPRFLRQTFVEWAGQTVVYCPWARAYYQHMIAKGKTHQVILRALAFKWIRVLWKCWQTRTPYDDSRYFQQLLKRKSPHALTT

SEQ ID NO: 460644 - protein, 431 aa, unidentified
MAIVGGLDIHRRQITYDYLDTDSGETRRGQLSPATRLELRAWLARFTGQQADFALEATTGWRFVAEELTRAGCAAHLAEPADTRALRGPKRRAKTDRTDAHHLRELLRAGTLPESWMPPVHIADARTQVRLRRALVGERTGWYQRIHAILFHHGLPERSQLLTADGRAWLARAELPVVARQAVELALRMIDHLEVELDTLDTQLAGIARAQPGCQALMGRYGIGWLTAVAIWAEFGDVRRFANSRQAVRFCGLDITITESDGKRARGHLARQGSPVLRWALHEAAMCAARPSSPDHPYYLQVKQRLGGKRAALSVARKLAREAYHTLRALGDQALVPAELPPPPDQVGDRARLGAPGSLMWCGQLPDAPVATRRGLTHALWAASIERAAAPASCGNPITHHVAGHRSEHRDKAGRPRVTLPAVHFRPRGMR

SEQ ID NO: 460645 - protein, 411 aa, unidentified
MLFVGDDWAEDHHDVEFVSETGDRLARRRLPEGVAGIATFHALVADCAGDDVDPAEVIIGIETDRGPWVQALLAAGYTVYAINPLAAAHYRGRHSMSGAKSDPGDAHVLAELVRLDRAHHRPVAGDSGIAQEVKVLARAHQSLVWSRQRQTNALRSVLREFYLGALAAFGEDLAGKDALAVLAIAPTPERGAALSQARIETALRRGGRQRNITTKAAAIMASLRAEQLAAHPAVVNAYGSNVAALVGVITEMSRQIDTLQKDLKTSFDQHPDAHIYLSQPGLGPVLAARVLAEFGDDPERYVDVRARKNYSGMSPITRASGTKRVVLARYARNRRLGDALYWQAMSAMSASAGARGHYDRHRAKGDTHHQALRALSNRLVGILHGCLRNNTIYDENTAWPTNIKQAAAAAA

SEQ ID NO: 460646 - protein, 457 aa, unidentified
MIQSKPKAIAHRVRLENMPCVFPNAAGLDIGSTEIVAALPPDRDGETVRTFTTFTVELKQLVVWLQGHRVDTVAMESTGIYWIPIFEMLEDVGIRVYLVNARHFRIVPGRKSDYNDAQWLQKLHSLGLLEGSFRPDDEICVLRSLLRHRAQLIEHRAPHILHMQKALKLMNIQLPEVLSDVTGVTGMAILRAIIAGERRGEVLAKLRRKECKKSEHDIVEALSGTWREEHLFVLQQSLELFDYYTTKITECDSRIDLHFSAMRPRFLVETDAPGHATGRTKKSKSKNKPAYDARAHLLRVLGIDLTEVTGISDSIAQTIICEVGTDMSRFPTDRHFCSWLGLAPHNDISGGKILRSRTIKAHNRAAQAFRHAAQACARSYSAFGAFFRHIRARRGAQQAIVATAHKIARVFYHLLKYQEAFRPESMHEFDWKRRQRELKSLERRAKALGYSLQSVVG

SEQ ID NO: 460647 - protein, 353 aa, unidentified
MNNSRNKAEVILGVDTHLDTHVGVLLNAQGHLLGCLMVTTNISGYERLVTWANSFGCLKRAGIEGTGTYGAGLACVLRKHGVEVFEVNRPDRSKRRLQGKSDPTDAENAARSVFSGSATAIAKTQSGAAEMMRVVSVARRSAVKAKTQAMNQLRALLVSAPQDVRERLWKSKPADCAKGCARVRSLGSTEFLHTLTTTLCLLAKRWLLLADEVEKLDAMLDALTHQHARRLREQFGVDPQTAAVLLSTAGDNPERLRNEASLAALCGVNLLPASSGKTVRHRLNRGGNRAANNALWTITIVRIRGDPQTQSYVARRSAQGLSSKEIQRCLKRYIVRELYPLLLADLADSARAC

SEQ ID NO: 460648 - protein, 353 aa, unidentified
MIVAEHFRFVVGIDTHAKTHTLAIIDTSSGGEIANETFPATTAGGSRALTWIVRRTGASAEQVLISMEGTGSYGAKLRQQATDATFQVTEAPVPDQRLGRYQGKSDSIDATRAARAVLSIPMDRLREPRSGQNHMALRILSNARRTMARERTAAINALTALLRVVDLGMDARKPLTITQIQTIAAWRERDEEFGVQICRREAVRLARQILTLQEQMTQNHAELEKLVQKVQPALLNIYGIGPVLAAIILTAWSHTGRVRSEAAFAALAGTCPVPASSGGTTRFRLNRGGDRQLNKAIYTIALIRMNRDQATKDYVARRTSQGRTKKEIIRSLKRYITRQIYRILNQALPGTVC

SEQ ID NO: 460649 - protein, 310 aa, unidentified
MKQLIVYIGIDVAKAHLDVAWAEQSRRFNNDKVGRATLVKWIKQKQSGPVQVICEASGGYEQELLDALAEAALAVSLVQATRVRQYARAAGILAKTDKVDARMLARFGAAMRPEPTSPRSAAQKLLRELESQRRHLSDLLVAEQNRIEQLHDEKLRGLARTLLGTIKKQIARIDARIATVITQDQGLCQKAQKLTGVKGVGERTAALLLAQMPELGTLNRREAAALAGLAPFNRDSGTMRGKRTIFAGRRAVRRGLYMAALVASRRNPILADFYRRLRTKDKPHKVALTAVMRKLLLALNQALASTQSFA

SEQ ID NO: 460650 - protein, 331 aa, unidentified
MEPKFFVGIDISKLTLDIAVLHNNVVLTTLQIENSEMGFRQLLVKLKADFKCTRNNTLYCAEDMGVFASFLLAVCDKKKLRICMESPLRIKRSLGIQRGKTDTKDATRIAWYARRHYSQLRLWQAPRDCIVMLKDLFALRKKLTKIKVMLTNRDRMDAHFRSRRDIKFLKAHYQLTMDAARTNIRKVEQEMQALVSNDENLAELFRIITTIPQIGPVIATEIIIATNEFTTITTPKRFASYCGIAPFEWSSGSSLKGKPRVSHFANRELKTMLHMAAMGYVRRKESKLGKYYLRKVAEGKNKMSVLNAVRNKLVHRIFACVHNRKTFDETI

SEQ ID NO: 460651 - protein, 412 aa, unidentified
MRRVIGIDIHRTFGELVFWEDGRLRHGGRVDMTRTALEGLAKTLSATDEVVIEATGNCMAVSRVLSPFVGRVVIANPLQVKAIAQAHVKTDKIDAGTLANLYAAGYLPEIWTPDAATERMRRLVARRYQVVRHRTRIKNEVHSILHAHLIPKCPHADLFNGRGRDWLKRQPVPEDEQIAIERHVRELDRLGEDLAVLDRQIAEDTMDDAAVRRLLTITGVNLTVASGLMAAIGDISRFKSPQKLVSYFGLNPRVRQSGLGAAHHGRISKIGRSHARAMLVEAAWAAAKAPGPLHAFFVRVRARRGHQVAAVAVARKLTVLVWHMLTKETDYLWVRPSLVAHKTRAMELQAGKPQKKGNTPGPAYAYNVKKLRDQEMRLAEQAQKSYERFVEIWRPRPPNQKARGRLNPARLE

SEQ ID NO: 460652 - protein, 401 aa, unidentified
MNAVGIDVSKGKSMVCVMRPFGEVVLEPFEVLHTAQSLNDLAGKLKALDGETRVVMEATGNYHKPVAFVLHDAGLFVSVVNPVLIHDYDNNSLRRVKTDRKDAVKIANYTLDKWTRLRQYLPEDDTRLALKNCYRQYQQAVAVRTMLKNNLISSLDLTFPDANKLFPSPAKSNGCEKWVDFIGDFWHSECVSSLSEEVFAKKYLKWCQKHGYIFTRSKSDTIYACAVNAASLPKSPTSKLLIQQQVAQLKAVSQSVAAFQQEMLRLSQQLPEFDTVMEMYGVGPSLGPQLMAEIGDVRRFSSKKSLIAFAGIEPQPNDSGKIVGNDSGISKVGSAVLRRTLFLIMTVILKTQPQDEPVFQFMNKKRSEGKPYKVYMMASANKFLRIYYARVKAVMDSKHPK

SEQ ID NO: 460653 - protein, 366 aa, unidentified
MAASQDDGGTRSERVGLKHQRNTAVEHFIGIDVSLEQSSVCVLNANGHIVREVKIASEPEALVAFCRELKLPVTRIGLEAGPLRQWLHTGLTSAGFDTVLLETRQVKAALSAMVVKTDRKDARGIAHLLRMGWYRPVHCKSVPAQEVRALLAGRKLLLCKLRDVELSMRGLLRGFGLKIGQISKGRLEARIRELIAGHSMLEQVIQPLLQAREVLNRQFHALHRAMLALVRHDAVCRRLMTVPGVGALVAITFTSAVDDPARFPRARALGAHFGLTPKRYQSGETDVVGGISKVGDEAARTALYQAAHTILTRPGRYSSLKRWGMEVAKRRGLRRATVALARKLSVVLLRIWTRETVFRFGRPAAA

SEQ ID NO: 460654 - protein, 355 aa, unidentified
MDSKKYIGLDVHQATISVAVRDTAGKLVMESIIETKAATILELIQGIHGSLWVTFEEGTSAAWLYDLLKPHVAEVIVCDPRRNALLKAGNKNDRVDARKLSDLLRAGLLAPVYHGQSGVRTLRELARSYLTITKDATRVMNRLKGLYRSWAIPCAGEKVYSARHRKVWLEKLSQAGVRRRAEWLYQQLDILLQLRREARRELLTESQKHPAHQLLRQIPRLGPIRVALIIALLQTPHRFRTKRQLWAYCGLALQTRSSGEYRVVEGQLQYTKRKPAVRGLNFNHNHDLKNVFKSAATQVSASGDPLGDFYQDLLAHGMRPPMARLTLARKIAAIALRIWKKGGYFDPGQLKRKCA

SEQ ID NO: 460655 - protein, 432 aa, unidentified
MDIMHERVAGLDIHKKTVVACRMRVTAERQREWETRTFGTMTGDLLQLHDWLSAWEVEQVVLESTADYWKPVFNLLEGSFAVVLVNAQHVKKVPGRKTDVSDAEWLAELELHGLLRASFIPPQPQRVLRELTRYRATVIRERARVVNRVEKLLEGTNIKLSSVVSDVMGVSAKAMLTALAAGASDPQALAELAKGRLRNKLDELQAALTGVVAPHQQFILSHQLQHIDFLDEQVSTVSAQITQHLAGMPPLPPAEPPATAAMDSSLSWEAAVDLLDTIPGVDQRTAEVLLAEIGLDMRQFPTADDLASWAGFAPGNHQSGGKRYSGRTPKGSRAIGVTLNQAAWAASRTKDTWLKARYHRLAARRGKKRALVAIGRSILVSIWHMLSRRVPYQDLGADYYDQRRKETKVEYLTKQLARLGFTVQLNPVPATA

SEQ ID NO: 460656 - protein, 343 aa, unidentified
MQTVTTIGLDIAKSVFQVHGVDAAGQVVIRRQLKRRYVLAFFQKLSPCLVGIEACASSHYWSRELQALGHSVRLMPPAYVKPYVKRQKNDMADAEAICEAVTRANMRFVPTKTPEQQSGLMLHRTRHLFIRQQTAVINVIRAHLAEFGVIAPVGRKGVEELLRVVADPNDKRVPEVVRGCLAVLGSQLLSLKKQILDFDRMIMAWHRSNQTSKRLNCIPGVGPLLATALVASVADPKTFRSGRNFSAWIGLVPKQHSSGGRDRLGSISKQGDRYLRSLFVTGALAVIRYAKIRGAKHRPWVAALLARRPTKVAAIALANKLARIAWALMAKGERYKIPAALTA

SEQ ID NO: 460657 - protein, 359 aa, unidentified
MEYVALDVHKNYTWARVENSQGARLYESRLAHGHGTIKNFVNRWSGGSPVAVETVGNWYWVVDEIEAGGGTPQLVNARLAKLMMGNVNKSDKLDCQGMNRLQRTGTLPTVWIPSSSVRDGRELARTRMVLSRQRTQLKNRIHATLGKYGYTVKGASDAFGKKGREIIEELLLKLPPHTQQALRLILDELDHVTDHLKAIEGHMIEIFSPCPQTQWLKSLPGVADIVAVVIWTEIGTIERFNRAEQLASYCGLVSRENSSGGKIRLGPVRRDVNVYLKWAFVEAANSACSMRGAVGMVISAGFMSGLNPAGVMAKPKSPSHVTSLRPTSGCLRKESPIGNRCRPRNAKRVRLMSPTRPAF

SEQ ID NO: 460658 - protein, 343 aa, unidentified
MQTVTTIGFDIAKSVFQVHGVDAGGQVVIRRQLKRRFVLAFFQKLPPCLVGIEACASSHHWSRELQALGHAVRLMPPAYVKPYVKRQKNDAADAEAICEAVSGANMRFVPTKTPEQQSCLMLHRTRHLFIRQRTAVINSIRAHLAEFGIVTPVGRKGVTELLHVVADPRDKRVPEVARACLAALGTQLLALKEQILEFDRMILAWHRSNQTSKRLHYIPGVGPMLATALVASVADPRTFRSGRNFSAWIGLVPKQHSSGGKDRLGSISKQGDRYLRSLFVAGALAVIRYAKIHGTEHRPWLAALLGRRPTKVAAIALANKIARMAWAMMARGERYKQPVALAR

SEQ ID NO: 460659 - protein, 384 aa, unidentified
MTHLKTSTIGLLGRQVLKQNTTTKTAAKARHIKLGIDVHKRRYVVVRIIDGGTPQPPQSFTPEDFLAWAQKQQALAEQVFTCYEAGPFGYGLHRRLEKLGITNYVVRPRDWDEYGQHVKTDNRDAQQLAMHLDQYVAGNRKAFCVVRVPTEAQEHARSRSRQRESLQQERQRLAAQGRSHALYYGHSLGASEWWRPAAWAERSPTLPAILVELLEPLRRLIAALELELKARTKELEAQAPPQLPFGLGKLTFQVLEREVGDWSRFKNRRQVASYTGLCPREDSTGQRRFQGSINKHGNRRLRPVLVECLWRLCRFQPEYRGVKKWLPVLVDPKTSKPRRKKIIVAMSRSFAVDWWRVRTGRCQAEALGLRLTNPSTPPTAPPEA

SEQ ID NO: 460660 - protein, 348 aa, unidentified
MVLIGSDFHPSWQQVSWLNQETGETGDQKLVHEPGAVEKFYRQFPAGSRIGMEATGNCQWFVELVTSLGHEMRIGDAAKIRASDSRQQKHDKRDARLLVQLLAEDRFPRIWVPSREQKDLRQLLIHRYKLVRIRAQVKNGLQHLAMNQGVLKKSKLWSVAGQKALRELPLASWASRRREDLLKMMSELDAKIDLLDRAVVEAAEKDERTRLVMTQPGVGPITSLAFVLTMGDVSRFRRGKQVASYLGLIPREYSSGGHQRLGSISKQGNTFLRMLLVEAAQGAVRCDPEFRNKYLHRCHSKPKGVAKVAAARKLAIRLYWMLRTNTGYPEIVRIESSSRVPLVVRYGG

SEQ ID NO: 460661 - protein, 386 aa, unidentified
MIYVGIDIAKLNHFASAVSSDGEVMLQPFKFTNDYDGFHKLKSSLDSLDPGQLIIGLESTAHYGNNLVEFLVLSGYKVCVINPIQTSTLRKNNIRKTKTDKVDTLVIAKALMMNPTRLFTKYDISLLHLKELGRFRMKLIKKRTQAKIQLTSYVDQAFPEIQYFFNGIHHKSCYALLKEAPTAGMVASMHMTHLAHLLEVASHGHFKKDTAQEIRVLAQKSVGINDSSVALQITQTIELIELLDKQVTTVESDMESLVKSLDSVIMTIPGIGAINGGMILGEIGDISRFSNPSKVLAFAGLDPAVYQSGNFEARHTKMSKRGSRPLRFALVNAAHNVVKNNKTFNDYYAQKRSEGKSHYNALGHCAGKLVRVIYKMLTNNVAFDLK

SEQ ID NO: 460662 - protein, 365 aa, unidentified
MQKVSTMRTSGKRIFKGQLTIGLDLGDRSSSYCILDEAGKILLEQKLPTTPEAMKQTFAKMPRSRIAMETGTHSPWISRLLKALGHEVIVAHAQNVHLIVKSRRKDDRIDARTLARLARIDPELLSPVQHRSAQAQLHLTEIRARAGLVSARTALVNAARGLVKSHGERLRKCGTFQVSREITSDLSTELREALQPLLREVESLNERIQEYDRRIEKMAKEKYPETALLKQVKGVGDLIATTYVLTLEDAKRFRKSRDAGCFVGLQPGRRNSGESEPQMHISKEGDEYLRTLLVQGAHYILGPFGEDSDLRRWGGKLAARGGKNAKKRAVVAVARKLAVLLHRLWVSGEPYEPLRNSQKAISAAA

SEQ ID NO: 460663 - protein, 367 aa, unidentified
MVPETVVGLDVHAQSITAAILRGMSDQPEVITLSSDLMKVRRLFRRLADQGPVRSCYEASGAGFVLQRVLSDDGFHCEVIAPSLIPRRPGDRRKTDRLDAIMLAKLYRSGHLTPVHIPSSDHEALRRLLRLRYTYHTYCTATMHRISGILRNHGLVFCTGKSTWTKKHRAWLASLRTSLEGPLQTALATELEHLEYLEIQHRALDAELERYAQLPLFRQQTEALCCLRGVKTLTALTIVCEIDDIRRFASPRKLMSYFGLVPSERSSGDKEYRGSITKAGNIHVRRLLVEAAWNNRHRSGANLVLNRRRQGQAPDIVAIALKAQHRLYKKFWHLDERKHRHVAITAVARELCGFVWAILKTLPQPQY

SEQ ID NO: 460664 - protein, 426 aa, unidentified
MGISKPAGLKSPCGEVKIVNPLFVGIDVSSKNNVAYLMKPDGSKYSSFSVQNNLGGAKLLSERIVSALGSMQLSDVVIGLEATSIYGDSLVYALREDGRLGQFQRKIHVLNPKQVRKFKEAYPDLPKNDWVDAFVIADHLRFGRIAREVYMDDYRYKALQTLTRARFEVIQNLTREKQRFANYLFLKCSGMAQDKDIANSSSTTIALMERFETVDDLANSDLEELTAFVTETGRGRFADPAATAKAVRAAAKGSYRLPKTVNDTVNQAMSVSIASMRALKEQVKVLDKAIEQQFEIIPNTLTSIPGIGKVYSAGIIAEIGDIHRFDSQASVAKFAGLVWHKNQSGEFEAEHSRMIKSGNRYLRYYLLEAANSVRRCDSEFRRYYDLKFKEVNKYQHKRALALTARKLVRLVFRLLKDNRLYIPPEG

SEQ ID NO: 460665 - protein, 335 aa, unidentified
MDKADRTRRHAKERRVDDILGIDIAKAKCQVALLRPNAPLRQKSCANTVSGFEQLADWLRRHGVTRVHACLEATGTYGDALATWLHDAGHVVSVVNPAIIHAYARTQLARSKTDRLDAALIARFAATHQPPAWTPPALEIRQLQALVRRLDALQGMRTQEVNRLAAGVVIADVRASIDAVVANLDAQIAHVRQLIRQHLDQQPGLRAQRDLLTTIPGIGEATAATLIAELFDKPYRSARQAAAFAGLVPRLVESGTFRGRSRLSKIGPGRIRKALFLPAVAALRWNPTIRTMRTRLRAAGKEPMVIVGAAMRKLIHLAFGVLKTRRAYDATYAHP

SEQ ID NO: 460666 - protein, 375 aa, unidentified
MTYIGMDVHKNSCYTTAIDAEGKTIEEKEMNTKDIKNWIKTLNFDCKIAIEASTASKPIYHMMKEQGLNVLMAHPAGLRVIAQSSQKTDRNDSFHLANLLRMNYLPCSYVPTEKYEQMRNICRYRVSLGWKTTRIKNEVHALLTRNNIRMKQSDIFGTDGLETLKSLQLSKIDSLLLKSYLEELNYLADKAEYIEDIMAEQGKHIPEVELLIAIPGIGYYSAMTIIGEIGDITRFPSPKKLVSYAGLAPRLRESGNLSLKGRISKQGPRALRWILVSAAHSVLRCRKGNKKLRKFYTHLKRRGKSKQVAAVALAKKLLIIIYAMLTNGTEYDDGDELLTKSKITKMNLRATELPTSNYVDEIDELERKIKLIGGA

SEQ ID NO: 460667 - protein, 326 aa, unidentified
MNVSELIFPGIDVAKETLEVALDDQSKTQCIANSGTEIGALVNRLKPLAERIGVILLEATGGFERPVAAALCAAGLPVMVVNPRQARDFAKSMGYLSKTDAIDARVLSHFGRTLHQSAQRERLLMKLPDANQEALEALLVRHNQLVAMRVAEGNRLATSHPSQHKSIKLVLKMLDRQIAVIDKNTDGMLKEHFADKLALFKDFKGVGPCMQAALMGALPELGQLTHAQIGKLVGVAPLNADSGRHKGKRITWGGRATVRTTLYMAALSAVRYNPVIKTFYERLLANGKLKKVALVACMHKMLTIMNAIVKSGIPWNPEHQNVPKNA

SEQ ID NO: 460668 - protein, 416 aa, unidentified
MNDEPISIPIERYIAIDAHKYYVMVGGLNARQETVLPTRRVEMENYPKWAKANLRPGDAVVIEATTNTWTLYDVTLPYVSKVVVAHPLEVKQIANARVKTDKHDVNCLARLLVADLVPEVWVPPMEVRELRTLIAHRRRLVKMRTMTHNRLHSVVHRNNLVPPEGGFFADKNRSWWENLTLSPVEKLQTRQNLAMLDHLEPQIAEVDQELARLSTTPPWSKHAPYLLQLPGFGLINAMTVLSAIGDITRFPTSKKLVGYAGLGGSVHDSGQSHYTGPITKQGRKELRWALVEAAWVAVEHHPFWKQEFQKLNHRMKSTKAIVAIARRLLVAIWNVMSERVADRKADPEMVAFKLMKWSWQLNDWQRGGLTTRQFVRYQLMQLKLGENLTCIKRAHQMSIASVEEILALKPELRPIE

SEQ ID NO: 460669 - protein, 313 aa, unidentified
MNEIFAGIDVSKYAFDLNVNGNNKVEHFNNDVKGVKKCSKALVKLAPALVLIEATGGYEMNLAMGLQQAGLVVSVINPARIRNFAKAAGILAKTDDIDAKAISFFASALKPPTTAMITESTRKVKSLVARRGQLIRMRTAELNRQGHDVDKFVGKSLKATIKLLEKQIESIDEKIKGCINNDPEMNSKAKIVESMTGIGEVTSSMLVTELPELGSLTRRQIASLAGLAPIARDSGTFKGKRMTGGGRGSVRAKLYMPTLVAIQHNPAIREFYQRLLKAGKTKMTAVTACMRKMLTILNVMVAKKEYWKSEFNA

SEQ ID NO: 460670 - protein, 456 aa, unidentified
MAKVRSWVGLDVHAAKVVACVVDAESGEMSLHRLSGATAEVVAFCTDLPGPTRAAYEAGPTGYGLARALVAARVGCVVAAPGKIERPTQDKVKTDARDAERLVRLLMIDALHAVRVPTPEQEALRDLVRAREDVRVDLMRARQRLSKLLLRHDVRYDDTTSRWGERHRRWLAQVDFGQSGAQATLSDYVGAVEALELRRGTLETAIAALVPDTPCAEAVARLRCLRGIDMLSAVGLAVEIGDFERFQRPGQLMAYVGLVPSEHSTGLTRRQGHITKSGSQHARRLLVEASWHYRRPPRLGTTLQRRQQDQSQAVVAIAWKAQQRLHHLWRRLDSQRHMRRTIVAVAVARHLAGFCWAIVNYHDQELAHQLPRRSEPSRARGRQRVADAGLLSSASRSACGRPTGDSGAGHPLCGSEVGPDGPTTGKAVAKSDARHAGSRPARTRRSPSTKPGTAAR

SEQ ID NO: 460671 - protein, 423 aa, unidentified
MENTAARKRKQVPEGYLIIGIDPHKKRHAAVAITQEFSIRDKFKFDNTREGLETMLRRTRTEMVKSDCRGVMFAIETGGHYWRNIAYFLDEQGIPFRFINQYTLKRRREGKDLNHKKNDYRDSEVAAQLLCTGEFTESVIPQGVYAELRTAHNAYRRLVKERTRITNLVKGLLDGLFPEFTLVFKDPCGLTSLSVLSTCAIPGVIAGMTEEEFVAIIEAKHQGHLMRKKLRELHYKAKASIGIAAGARSASSEISFLVEKHELIRRHICIIERTLVGLVDEAEEGKYLLSIRGLNYIAVAGLLAELGCFKSYRSAKQMIKMAGSNPTESESAGKRGSHTPMSKQGRPVLRYCAWTSVIPMLRFNSDFRAWAKQRRERPAYANPLNGREVVGAALNRLFRLAFAMVKNQTYYQASKPELTLVAV

SEQ ID NO: 460672 - protein, 431 aa, unidentified
MTKTYILKTPTQTVPAERSAVETYLAPPPPSKGKIIGLDCHPDTFTAALFVGQTPHDARKIGSQENLSLEALLKWAAAELTPQDIILMEAGSNSFEVCKRLCALGLKACVLESCHVGKHAKTYADNDKMAAARIALVYLAGNAPCVWVPDEQSRERRELLHAYRKAVGDHTAATNSIKSYLNGRGIRLGKHSFDDKTTSQWILDQADWSVLQKNILAEHLANITESKERRKRLYRLIAAEIAVDPTMMRCMKVLGVGIVSAFALLAVIGDIGRFHSPEKLVAYIGLNPGQRQSGKGKDIRLGVGRRGRGDIRHLLIQGAHAIMRSGRNTPLGQWGWKLFARKGNRNVAVADIARKLLVQVWHLLHGNPPLALESDTSFRVKLQKLAVALGTTLRTGIGLGKSLEDSIKTLLARCQTHPEPSASPCETPQPA

SEQ ID NO: 460673 - protein, 352 aa, unidentified
MTKITTIGLDLAKNVFQVHGVDAEGRVGVARQLRRKQVLAFFAKLPPCLVGIEACGSAHYWAREITKLGHTVKLMPAKYVKAYVKRGKTDAGDAAAICEAVGRPSMTFVPVKGVEQQGLSMLHSVRSQLVSQRTQLVNAVRGHLSELGIVAERGLLGLAKLAAIARDKEDERLPPMARSALLVVINQIETISAEITRLDTAMRKENNASNIGRRLETIPSVGPVIASAFRARVTKPDLFENGRHLAAWIGIVPENDSTGGKPKQKGLSKKGDRYLRSLLVNGAMSIVRQARMRPDKHPWVARLLARMSAKQAAIAIANKTARIAWVLMVRGGVYEAGHRAPAYRGTPLPAVS

SEQ ID NO: 460674 - protein, 297 aa, unidentified
MRHARTLDVGLDVHKESIAVAYAREERDAEVVFLGTIGTRPCDIATRVRQLTSKATPLVCVYAAGPWGYWRARDLTKQHRRCWVVAPSRVPKQAGDRVKTDRRDATPLARLMRSGALTPVYVPTVEDEAIRDLTRAREDAIRDRKAAKPRLKAVLLRQDLRDAGRATWGPAHLRWLAAVVCPTPAQPSVFQAYVRAVAEQDARLPRLETALRAQVQGWRLAPVVQALQAMRGVPFTVAVPRIAALGDLTRFENPRQLMSSLGLTPSEYSSGARRRQGTLPQAGHPFARRALSEGTWA

SEQ ID NO: 460675 - protein, 455 aa, unidentified
MAKQKTHKPATIETVNVGAAAVDIGSREHMAAVNPDVTDAPVRAFGTFTHDLHDLADWFKSHGVTSVAMESTGVYWIPAYQILEQHGFEVILVNARYAKNVPGRKTDVSDASWLRQLHSYGLLRGSFRPSAEIATLRAYLRQRERLVEYAAAHIQHMQKALMEMNLQLHHVVSDITGVTGMKIIRAIVAGERDLDVLASHRDVRCRASTETIKAALNGNDRAEHIFALTQSLELYDFYRNKMLECDRHLEATLAALGADTEHDPNQLPRPRTKTKQVSTPSFDVRAALFGVLGVDLTLIHGMGPSLSLKLVGECGTDLRAWPSAKHFTSWLCLAPGNKISGGKVLSSRTRRSSSRAAALLRLAAVTIGRSDSALGAFYRRLAARAGKAKAVTATARKIAVLFYNTLRHGMTYQDPGASHYEERYRNRVLGNLKRRAKSFGYDLQELPPEADMAVS

SEQ ID NO: 460676 - protein, 457 aa, unidentified
MTQPKRSRSRTGLSAVHPAAAAIDIGATMHVAAVGPDRDTEPVRTFQTFTDDLHRLADWFARCGVKTVAMESTGVYWIPVFEILEQRGFEVMVVNARDAKHVPGRKTDVSDAEWLQRLHEYGLLRPSFRPQAEIAGLRAYLRQRERLLDYAAAHIQHMQKALMQMNLQLHHVVSDITGVTGMNIIRAIVAGERDPNVLASHRERGCHASVETICQALVGNYREEHVFALSQAIELYDVYQTKVAACDKQIEVILKRLKKSATPPASKLLPPKHRSRQPNAPSFDARAALHAILGVDLTQIHGLGPYLALKLVGECGTNLTAWPTAKHFTSWLGLAPHNKISGGKVLSSKTRRTSNRAASLLRLAAVSVGRTDTALGAFYRRLAARAGKAKAITATARKIAVLFYNTLRHGMSYADPGATYYEERYRQRVLGNLQRRAKSLGYVLHQAERDPVQMVVS

SEQ ID NO: 460677 - protein, 303 aa, unidentified
MENYAGIDVSLELSSVCVVDAQGKILKEAKVASEPDALVEFFETLGFAVKRIGLEAGPLSQWLHAALKTAGFETVLLETRHVKAALSAMTVKTDRKDARVIARLIRMGWFRAVHAKSIGAQEVRALLVARKQLLGRLIDVELSIRGILRGSGLKVGPVTRVLATVRDDAVCRRLMTVPGVGPLVAITYKSAIDDPHRIVKSKAAGALFGLTPKKYQSGEKDVTGGITLAGDEIVRTVLYEAANVLLSRITRFSKLKRWGMDVAKRRGSKRANVALARKLAVILHRIWVDGTTYRWTDAGPIAA

SEQ ID NO: 460678 - protein, 403 aa, unidentified
MNAVGIDVSKGKSMVTILRPFGEIVSSPFEIKHTSSDIHSLIKLIHSIEGESRVVMEHTGRYYEALAHQLSAADLFVSAVNPKLVKDFNNDSLRKIKSDKADSVKIARYALDKWQSLEPYSITDELRSQLKVMNRQFHFYVKQKTAMKNNLIGLIDQTYPNANTYFNSPTRSDGSQKWVDFVSTYWHVDCIRKMSLNAFVEHYQNWCKRKKYAFNKSKAEEIYTKTKELVPVFPKNEITKHIIRQAIDQLNSTSVTVETIRTLMNETASKLPEYSIVMQFKGIGPSLGPQLMAEIGDVTRFTHKGALTAFAGVDPGVNESGSYAQKSVPTSKRGSSNLRKTLFQVMDVLIKTMPQDDPVYQFMDRKRTQGKPYYVYMTAGANKFLRIYYGRVKEYLSVLPDPS

SEQ ID NO: 460679 - protein, 339 aa, unidentified
MELYAGLDLHSRNTYIGIMDNEFNRVFKKRVPNHLELILQTLEPFRDQMKGFVVESTFNWYWLVDGLMDAGYSSAHLANPSAIKQYEGLKHSDDQHDAFFLAQLLILGILPQGYIYPKKDRPVRDLVRKRMFLVRHKTAHILSLQSLLQRCCAMKVRANDMRHLTVEELEMWLEEEHLVLSAQANLDSVNFLKQKIKQLEKAIIQKVKLNKAFKYLLTVPGIGNILAMTIMLEVGDINRFSKVGNFTSYCRCVPSQRLSDGKSKGYGNRKNGNRYLSWAFTEAAQLGRRHNERFRRYYNRKVAQANTSLATKALGNKLARICYYIMRDQVPFREELFCQ

SEQ ID NO: 460680 - protein, 351 aa, unidentified
MTVMIGVDPHKASHTAVALDADEGFLGELRVRSVANQVERLTAWAATFEERTWAVEGAGGLGYLLAQQLVAAGERVVDVQPKLAARVRLLATGDTNKNDPNDARSVAVAALRSPNVREVRGEDHAAVMKVWAKRHRDLSRQHNRVACRLHSVLCDLVPGGITGEISPAQATRLLDGIEPHGAVAAARHQLAVELVDDLVRLNTQRREARRRIAAAVAASKTTVTEIFGVGPIVAATVIGDVSDIGRFPSRDHFAAYNGTAPIEVSSGGRRKVFRLSRRGNRRLNHAIHMAAVTQIRFRHTEGRAYFDRKIAEGHSGKEAIRALKRRISDAIYTRLRDDAARATAATSSGAT

SEQ ID NO: 460681 - protein, 427 aa, unidentified
MKAGEVVEEVVENEEIIERVAALDIGKAELVCCVRIPGPGGRRQQEVARYSTMTRSLLALADRLAELQVTRVVMEATSDYWKSPFFILEAAGFETWLVNARDVKHLPGRPKTDRLDAVWLCKVAERQMLRPSFVPPAEIRDLRALTRYRRSLITARTAEKQRVEKLLEDAGIKLSVVASDIFGVSGRAMMAALVAGERDPEVLAGMARGQLRKKNTDLTEAFFTTRFRDHHGWLLAKMLARVDQFSADIAEVDERIGDQIAPFAQAVARLSEIPGVSDTTARIIIAEIGVDMTRFPTPGHLASWAKFAPGIKSSAGRQKGNGASGHGNRYLAAALGDAAVATRQTDTFLGQRYRRLVKRRGKKRAVVAVGRSILNIVWHLLSDPDAHFIDLGPDYYDTRINAARARRNHVRHLERLGYKVTLEPEAA

SEQ ID NO: 460682 - protein, 354 aa, unidentified
MKILAIDLGKVKSVACDYESQTAVHRFETVRTEPAILEDLFRRRGPDRVVIEVGPAAGWITDLAARMKIELQVANPSHQGWRWRGVKNKTDRVDAVKLAQLSSVNQLPQVKLPSKEVREWRSLIHYRQSLVTRRTMIKNTIHAILNRQAIGMPSGKRAWTNAGRKWLENQARVGDDPAKFWTELDPTQWWRGQLAEELRQLREVECSIGSVEKQLDTYAAEKRHVKRLRSAPGVGPRLSEAVVAIIDDPHRFKNGRQVAAYAGLVPRVFQSGKMDRKGGITGAGNRYLRAILVEVSWLGLRTNPWMRRVFDRVCRGCPSRRKIAIVAVARRVLIWCWAMMRDDQDWDPRALEAA

SEQ ID NO: 460683 - protein, 389 aa, unidentified
MNGQGDFTVKAESEDFKNTLFLAMELSRATWLVATFAPRLGDKISVHAIPGGDTKRLLELIGRLQAKIRDKGVSRVRTVCCYEAGYDGFWLHRVLLNHGVENYVLDAASVPIDRRAKHIKTDNIDAKRLLRAIVGFVQGDPQSCRVVRAPTPEEEDARRLHRERQRLVRERTGHLNRIKALLITHGIRALRITDAKWCERLDKMQTGDGRPIPARLKIEIEREWKRLKVVAEQIREVEAERDRLVKGTEPSGDACTEKMRRLVKLHGIGAEFSTVLTREVFYRPFKNRRQVASYVGLTPAPYDSGDTKHDQGINKAGNTRARVIAVQMAWLWLRYQSKSDLSLWYYKRVGDQKGRVRRIMIIALARKLVIALWRYVETGQVPTGAIVTA

SEQ ID NO: 460684 - protein, 421 aa, unidentified
MNSLSTAKYTAFVGLDWADAKHDICLQAAGSEQREFDCFAHRTEHIEAWAQALHQRFGGRIAVALELSKGPIVYALQKYDFLVLFPINPSTLAKYRQAFTPSRAKDDPTDAELALDLLIRHPERFKPLTPQSVPMRKLCLLVEQRRRLVGDKNRFVNRLCDSLKQYYPQVLEWFKRHDTVLFCDFLARWPTLTGVKRARQTTLRTFFKAHNARSEKLIEARLCAIQAAQPLTHDAAVISAHRLLAEILVEQLRVTLKAIDRFDEEIAATAAQLPDYALLFRPLPGAGPVMAPRLLAAFGEDRQRYRGADELQMYLGVAPVTERSGNKTWVHWRWQCPTFLRQTMVEWAGQTVNYSFWAGAYYRQQRAKGSSHQAAVRSLAFKWLRILYRCWQTRTPYDESKYLNALRRRGSPLLEHLGETM

SEQ ID NO: 460685 - protein, 340 aa, unidentified
MRVLYAGCDLHGNSNLIGIVDGEGKRVFKKKLSNDLGVVRDALKPFQEELVGIAVESTYNWYWMVDGLMETGYKVHLANPPAIQQYLGLKHSDDKHDAFWLAEMLRLGILPEGYIYPKQERPLKDLLRKRGHLVRLRTSLIISLQNILSRNLGRKVNVNDVKALKEDRISLLLEMNEDLALAGRVSKEAIDHLTRQIRKIEGVVEKKIKLKEEYRYLLTLHGVGKILSLTIMLETGPISRFETVGDYVSYCRKVPSQWTSNGKRKGSGNSKNGNRYLAWAYSEASEFARQLHPEPRAYYNRKMQKTNAAVAHSALANKLSRAGYYVMRDQVPFEPEKLFG

SEQ ID NO: 460686 - protein, 307 aa, unidentified
MDRYIGLDAHASSCTVAVLGPSGRKLQTQVLETNAKALIGFLRTIPKNRRLIFEEGTHAAWLYEVLSPHVQETVVVGVQRSAGPKSDERDALGLAQSLRIGNVEPRVYKKRGEFALLGHMTRAYGTLVTDTVRTQNRIKSLMRSRGLTVVGKQVYSAVGRQQWLSLLPTQANSQAELLYCQYDALEELRKRAEKEMLQEARKHSAYRLLQSCPGLGKIRAAQLMSIVVTPYRFANKRQFWSYCGLGIVMRSSADWARTQGGEWIKVPIQRTRGLNPNFNRTLKHIFKGAAMAVIRHADKTDPLYHHY

SEQ ID NO: 460687 - protein, 448 aa, unidentified
MKMTTIGLDLAKNIFQVHGVDEQGQVVLKKSLKRAKVLPFFANLEPCRIGMEACGGAHYWARQFERFGHTVKLMAPQFVKPYVKTNKNDAADAEAICEAVTRPSMRFVPIKPPEQQAVLALHRARQGFVKARTAQANQIRGLLTEYGLVIPQGIGQIAKRLPVILEDGENALPEVFRALPQRLGEHLKTLDRQVEELDEQIQRWHREQAASRKLAAIPGIGPLTASALVATLGDARQFENGRQLAAWLGLVPKQHSSGGKPTLLGIGKRGDTYLRTLLIHGARAVIHVAKRPSNHAGNWLAQLLHRRNPNVAAVALANKNARRVWALLAHDRKFQPDYAPAAIGVWPNPPLNPRTQQNRAFASPIAWAIMTGWQDRSDRGGQNPMGSTCFQHDLLMVESASTFHQGPRPSLMKSPDVWPQSSSSRRHRLVACSKQGRPCMSQLPCLGV

SEQ ID NO: 460688 - protein, 421 aa, unidentified
MPYCCKIGNKPCTSEVQGFFDDTIMSKLFIGIDVSKSSFSATGINPEGNVCFSLSATMDKGGFSELMKAITSYCKDFSAVLTGMETTGCYHINLFSFLSDRVANTVIINPLLISNFAKMSLRKTKTDKKDSLTIARFLLVHQSSIKQFSISQNIKDFRDVAREKESISNIIASTKNEIKRILQTTFPELESIYNIFKVTMLLFLKEFPSARFIRASKAKVIAEALERCGRGRRVSINADEIIKAVKNSIASDSLSKELILPQKISTLLHLMEQLDKITDIFCNLSESIAIQEMEIITSIDGISSSTGAAFLAEIGDISNFSSHKSLIAFAGLDPTVYQSGKFQGTSRISKRGNRHLRRLVYLMTIGVIRCNAFFKAYFLKRRKDGLPFRKAVMATAHKLLRTIFAMLSHNLKFHVKEVNSL

SEQ ID NO: 460689 - protein, 429 aa, unidentified
MIMGFTKPIEHSNPTTKEGDFMNPLYVGIDVSSKSNVVYFMLADGSKYSNFSVANSHDGSTQLVKRILSVTESKSLDTVLIGLEATSVYGDNLVYFLREDASLASFNRKIHVLNPKQVKKFKDAYNDLPKNDYVDSFVIADCLRFGRINKEVYIGDYRYKALQNLTRARYFSVCNLIKEKQRFMNVLFKKYSTMTQEKVFSDTFSTTALAVYDEFESAEALAYMDLQELTAFIIEKGKNRFPDPDAVAKAIQKAARSSYRLPKTVNDSVNQVLSISITSIKALEAQIKEFEKAISAEMELLPNVLISIPGIGPVYSAGIMAEIGDINRFDNQAQLAKYAGLAWTQYQSGNFEAENTRLIKSGNRFLKYYLCEAAFSLVRCDKEYKAFYHQKYKEVNRYQHKRALALTARKFVRLVFTLLKDNRLYRPAE

SEQ ID NO: 460690 - protein, 410 aa, unidentified
MDVLYERVAGLDIGKASLTACVRTPAARRSRRSETRTFKTTTGSLRVMRDWLLENGVTIAAMESTSTYWKPPFYCLEEVMEVWLLNAAHMKAVPGRKTDVRDAEWIAQLLEHGLLTPSFVPPPEIRRLRMMTRYWVQLQGDRTRETVRLEMMLEDASIKLSSVASSLTTVSARAMLTAMIGGETDARVLAEMAKGRMRSKIPDLAQALEGNFDPHHAVLARSILDRLDRVQEAMAELDRSITEACEPWRHQLDLLQTIPGVGPRVAQVILAETGGDMARFPTAGHLASWAGLAPAIHESAGKRSPAGRRRGNKWLAAILVEAAGSVGRMHGKNYLAVHHARLTRRRGMSRAQVAVAHTILTTAYYVLKRDEPYRDLGPEWLAKRNEEAHTRRLVAQLEKLGHTVVIDPAA

SEQ ID NO: 460691 - protein, 406 aa, unidentified
MIDTGDIDVFLGLDVGKGEHHATAVTPAGKKAFDKRLPNTEPKLRELFAKLQAKHGTVLVVVDQPASIGALPLAVARDMGCPVAYLPGLTMRRIADLYPGEAKTDAKDAFIIADAARAMPHTLRAIDGEDETIAELEMIVGFDDDLAGEATRVANRLHGLLTQIHPSLERVLGPRLQHPAVLALLERFGSPAQIRKAGRRRLVTLLRPKAPRMAERLVEEIFAALDEQTVTVPGTEATALIVPSLAASLTAVLDQRKLLAGRIEELLEAHPLSKVLTSMPGVGVRTGARILIEVGDGSTFPTASHLAAYAGLAPATRSSGSSIRGEQPSRRGNKQLKRAFFLSAFAALADPASRAYYDKKITQGKHHTQALLCLARRRADVLFAMLRDGTFYEPQQSGSAARPTAP

SEQ ID NO: 460692 - protein, 343 aa, unidentified
MNVFIGLDVSLASTAICVLGPQGKVVEELEAASEPEALVRAMASLPYAVDAIGLEAGPLSQWLSKGIEEAGFDVVLMETRLVKAALKAMPIKTDRRDAQGIARLLQMGWYRPVHRKSVSSQEIRALLTARKSVQQGIINLELSMRGVLRNFGLKLGHVTRIRYEARVRELVEQNEILSASTEALLRARAQLRAELAELDATIADLAKQDDVCRLMMTMPGVGRIVALTVKSAIDDPTRFARSKDVGPWVGLTPKRTQSGEMDIVGQITRAGDRALRTALYQAAMILMHRGSPNWLQAWALRVAHRRGSKRALIALARRIGVVLHRMWRDGTPFRHTQSSPVTV

SEQ ID NO: 460693 - protein, 350 aa, unidentified
MLHVGLDLSRQRVDVHVLDYDGARVLVTRAPADADGLCRLAGRDVFAGQPVRAAIESMTGARYVRDVLAGCGWDVLVADAQKVKGLAPLACKTDKIDARVLAELSLRDLVPAIWLPPIDVREDRERARFRLHLVKHRGMLKRRVHATLMTFGIPVSESDLFGLAGRERLAGLLAGLELPEPWAGNVAASLRLIDTLDADIAASERVLRALGASHPYQPRLMSMPGISWVLGYTIGAEIGDISRFASPGKLVGYTGLCPRVYQSGGTDHRGPLTKAGPKYLRWALVEAATHASQHPAYRARYQRTCKRLGRDRGPKVARIEVARDLATAIWYMLTRAEDFAPAGAGSVLAA

SEQ ID NO: 460694 - protein, 471 aa, unidentified
MPRRKSTLSRPDPAAAALLQTLHLHAAGIDIGATELWVCVPPSAVVAPSAPSAPTVLPLHGRRFGACTAALHAIAAWLRQCQVTTVAMESTGGYWSPLYDLLEAEGFEGLLVDPRQVQRAPNRPKTDVHDCQWIQRLHSLGLLTAAFRPEEPIRVWRSSQRHRASLIEDAGRHLQRIAKALEQMNVKLPEVVSDITGVTGMGIIRAIVQGERAPQALAKLRDHRCKESTATIARALQGTWRPEHRFALQQSLALYDYYHAQIRDCDRVLEEHLKGMALPEVPPLEPTRRVRRRKDNEVTCDARQRLHHMAGVDLTAIAGIEESTALVVLSEIGTDMSRWPSEKPFGSWLGLAPNPKKSGGQVKSSATRPGVNRAAQALRLAAKNLQRSQSALGAFFRRIAARRGLAKAITVTAYKLARIIYAMLKHGTAYVTQGLAVYEMAYRERMVRQMKRKAAELGLVVVERETIALPA

SEQ ID NO: 460695 - protein, 362 aa, unidentified
MKQFIGCDVHKKYSVFVAMDESGKASRAVRVAHGEGELEGYLNSLPDGTPVAVETTGHWYWILDAIEKAGLEPHLAHALAAKRMMVNPNKTDKLDAKGLATLLRNGTLPEVWVPGGSLRDLRGLMRSRLALRRMGTGLKNRISSALARYGLPKEFAGDLFGSGEAATQCREASVAALPEHSRYATGQELDLLESVEACIAAVTEQIGGSIGKLGWVRRLRTLPGVGEILGPTIYLEIGQVDRFPTPAHLAAYAGLVPRVSSSGGHTKIGRTRKECNRFLKWAFVEAAEVVVAHQEAWSGRHVVRLYRRVKNNKPDRHGKAAVAVARHLAESAWHILKGNQDYREPQPTPGMIQRFHTVGRPL

SEQ ID NO: 460696 - protein, 351 aa, unidentified
MRTSQNTAESINTIGIDVGKNTFHLVGLDKRGAIVLQQKVTRHQLGRRLSNISRCLIGMETCSGTHFIARQLAALGHDVRLIPAQYVKPFLKGHKNDYRDAEAIAEAVQRPTMHFVSIKTPEQMDLLALHRVRSRLVRQRTGVANQIRGFLLERGITVRQGFMPLRKALPEILSSKSDALSPRMINLIGELIQDWRRLDDRIASVSTEIEATAKRDESCQRLMSVPGVGPIVSSAVVAAIGNGTGFKQGRDFAAWLGLIPKQESTGDRTILGKISKRGNKYVRTLFVQAAHVVLERRPRTARQGLWPWIEQASKRLHRNMLAIALANKLARIAWAVLARGHAYQPRIIANA

SEQ ID NO: 460697 - protein, 370 aa, unidentified
MSHSSTLFIGMDVHKESIAVAYVAQDHGAEVTYLGTIGTRQCDIDQLIRKMQSKAKHLIFIYEAGPCGYWLYRYFTKKGYDCWVVAPSLIPKKAGDRVKTDRRDAVQLARLARSGDLTAVYVPKVEDEAIRDLTRAREDTLSDLKDAKFRLKAFLLRHDIRYTGRANWNPPHLRWLSEVVCQTPAQQIVFQEYVRAVSEHTERLQRLEQELQEQVKSWRLHPVVEALQALRGVQFTVAVTMVAELGDLSRFDTPRELMKFLGLTPSEYSSGERRHQGSITKAGNTHARQALVEGAWAYRYPAKVSRHLQLRLENQPKRIQDISWKAQVRLCTRYRRLVAKGKHANVVTVAIARELAGFMWAIAKEVPVTT

SEQ ID NO: 460698 - protein, 355 aa, unidentified
MLYSGVDLHRRLVAICTLDESGTIVARAKMKTSSELITDYFQRWPTEHQAVVECTTGWYWFCDLLRSLGITVVLAHAKYLKAISYAKVKTDAVDALTLAQLLRMGYIPEAHQLPPEYRAMRDVLRQRMVMEHKRTNMIQRIRSILAQFNIIDLLVRPYVPAFADFLTACPIPEQYRMTLQMYHQQCVQTTEHRKQLEKYFKARLRPTSAVQLLMSVPGIGDITGAIIAMETGEIHRFADAKHYCSYCRLVPGAQDSAGKHRHRSGSKDGNQYLKFAFTEAAIKAIMFYPEIKHFAARLKQRANTTIARTVVAKELAKISYYVLHRQEEFKTFKGVEVNKLRDWPRARKPVRLTEA

SEQ ID NO: 460699 - protein, 350 aa, unidentified
MLYTGIDYHRSFSYLTTMNEKGDIISQKKLPSNGEIVDFLKSFGESMEIAIEATPSWYWLYDHLEDEGFQVKLSHPLKTKTIAYAKVKTDKVDSTTLAHLLRSNLLPLSYVPERPVRLNRELLRYRASLVRIQSGVKNKIHTVLAKNNVSHGYSDLFGKEGMAFLHSLALPENYKIALEGYLVVLDAVRQEIRAASKKVQQLAEQDHDSLLLMTIPGMGYYSALLTVSEIGDVRRFRSAKQLCAYAGLVPSTYSSGNLRFHGHITKQGSRWLRWILVEAAIHAVKRPGVLRRFYFKVERKKGGQIAKVATARKLLEWIYYILRDGRTYQEMEKIADLLGRGEPGKNSGSA

SEQ ID NO: 460700 - protein, 351 aa, unidentified
MTDASTITANLTIGIDVGDRTSHVCVLDAAGEVIESGTVATKPASLRQRFERCEPTRIAIEAGGQSAWIAELLTELGHDVIVANARRLRIIYENESKSDEVDAEQLARVARLDPKLLYPIQHRERRTRGDLAKLRSREALVSTRTGLINHVRGTMKSFGGRLGSHSAPYFHGWVREQIPGDVLHALEPVIDLLESVEVQIDRLDKEIERMAREDYPETNALRQGDRVGLHSSLRFVLTVEDPWRIKRSRDVGAYFGLRPRRRQSGLRDPEMRITKAGDEGMRRLLVQCSQQMLGPFGKDSDLRRWGLELAARGGKATKKKAVIAVARKLAVPLHVPLRNSDSAAPLTEATA

SEQ ID NO: 460701 - protein, 394 aa, unidentified
MRFAGIDIASETHVLAIVDADGAVEVTATPFGEDAAGYAKALALLGEPRELLIAMEATGHYWKNLFAVLAAAGHLVALINPLRTHHFAGEDLARTKTDALDALGIARFAAQKRPPPIRLPDAVADELRELVRLRERLVQDFGDRVRQLHRLVDLGFPEFTRYVRTLESELAGAILRDYPTAAAFRGVSVRRLAALRYDGHHRVGLELARALIAAARRSVGQHHSAPYRIQVRYACDDLDVLRRRLRDLDRDIEGKLREHEVGRLLTTIDGIGPNTAARIIAAVGDPASFHSAAALAAYVGTIPRLRQSGKRQPARAPLTPIGNAPLRAALWMPTLTAVRNNPWLRAHYQRLRARGKLPKVALVACMHKLLFAVYSVAKHRRAFVPQLAAPATVQ

SEQ ID NO: 460702 - protein, 340 aa, unidentified
MNATTYGLDVAKRVFQMYWVDAQTGEIVNRRFGRDELIKFLAQRPAGRVALEACGSGHWWARKIKALGHEVVLLHAKFIRPFVQTNKTDAADARAIWTAVQQPAMRTVAAKTEDQQAMLGLHRMRALLVKFRTMQVNQLRGLLYEFGVTFRAGRLAGLAEIRARMAELEDALPGAMICSLQDQLQRIDGLEQDIDQLEQRMGTWQKQEAACRAISEVPGIGKLTATALVATMGDAKTFKSGREFAAFLGLVPRQNGTGGRIRLGSISKRGDPYLRTLLIHGARSVMCHAKVPTTWQREIRARRPANVAAVALANKMARTAWAILAHGQAYQKDYVSVKPA

SEQ ID NO: 460703 - protein, 414 aa, unidentified
MLKIVYRVCCGMDVHKSFVVACIASTNEYGVTTYKSKRFSTFTRDLRRCADWLSENNCKDVCMESTGKYWIPIYNILEPTCNVVLAHPKYVKAIRGKKTDKRDAKWIADIFKHDLVAGSFIPPADIRQLRDLVRYRWKLTNFTTGEKNRAQNCLTVSNFKLDDVFSDVFGKAASAITTRILEDPTEKITDVSGFRTKGMKATNEQVLAAVDGEMCEEQAEKLRIIRSHMDSLELCKLNLESLILSTAEQYLPQLNLVMTVPGIQSFAAIGIISEIGVDMSVFPTSKHLCSWAGLTPQNNESAGKKKTTRISRAGAYIKPLLVQFALCAIRAKQFPELRNRYLALKKRRGHKKAIIAIARMLLTAIYNMLKKNETYNPEIYRKGDRPPAHREVSVEEAIFILQRQGYLVTAPPTS

SEQ ID NO: 460704 - protein, 313 aa, unidentified
MTKTTKTNPIDYIAIDVSKATLQIQDDQLAFAVDNDSEGHSKLLKHIKTRKNPLVVFEATGGYERGLCEFLREETIPLTMVNPARVRDFARSEGVRAKTDPIDTKMILAFAKSKALCAMETPSETCTKLAALLDRRGHLVEQLAREKNRLQNSEKLILRSIQRMIKILEKEISALDKAIDELVSSEPGLQSRSKLIQSIQGVGKITAWTLLAYLTEIEHLNRNRLVALAGIAPFNRDSGKFSGKRSIIGGRAKVRRCLYMATQSAANCNPIISAYVKRLREPGKPYKCAIVAAMRKLLIHIQSLIKNSKLSPC

SEQ ID NO: 460705 - protein, 404 aa, unidentified
MGGCFEEGAPAFAGVDTHKGSHTLALLDALGRRLGAREFPADAAGIAALVAAAGGAGVPAGVEGARSYGAGVADALEAAGHEVFEVVRPGRARPRGGKSDAVDAYLAAEAVAAGRGLARKRLDGAAGDLRPLSSLRDLLVRRCADQANWARSALVLAPERLRRRWEGEPTEALMEGLRSLPGRGALERSLRECARSWHETRRRADALEAEIAAAVREGWPSLLAAPGVGPVTAAWIICAAGSNPGRCGSEAAFSMLCGTSPVPASSGMTERHRLNRGGDRRANRAIHEIARCRMARDERTRAYVDRRVSEGKTRREAVRCLCRYIAREVYRLLTGPQEPLPGPGAARAAREAAGLSRAAAERGSGVPARRIALLESGALVDRRALDALDALYAETIAGLIECDA

SEQ ID NO: 460706 - protein, 411 aa, unidentified
MQVVHERCAGLDVHKRTVVACVLVTAPDGSVTRTVRTFTAMTAGLLALSDWLHEWEVLQVAMESTGVFWRPVFNILEDGRAVTLVNAQHLQRVPGRKTDVRDAEWLADLLRHGLLKASFIPPAPVRQLRDLTRYRTTLVHERVAEVNRLQKVLETANLKLAAVATDVLGVSGRRMLAAVLAGEQDPATLAELAKGRLRSKMPELRQALDGRVLPHHRVLLERSLAHIDFLDQSLAALQREIDHRQAAFTDAVELLDTIPGVGVDAAAAIVAEVGDDMRRFVSAKHLASWAGLCPGNRQSGGKRLATKATKGNRWLRGVLGEVAWAVSRTKGTYLHAQFHRLARRRGKYKAILAVAHSVLVIVYHVLRDRRPYTDLGADYFDRLDVRRVERYHVSRLRQLGYEVTLTPSRAA

SEQ ID NO: 460707 - protein, 461 aa, unidentified
MKKKRFSFGRKHPGKGRVIEVAKKITDLERINHHAAGVDIGSESHFVAVPPGSSATPVKQFGVFTRDLYAIADWLQECGVRTVAMESTGVYWVSLYEVLEERGFEVKLVDPGKAKNVSGRKSDVLDCQWLQQLHSYGLLAGAFRPADEIVVLRGYTRQREMLVKSAATHIQHMQKALQQMNLRLDNVVSDITGETGMRIIKAILGGEREVKKLGEMRDRRCHSSAEEIAESLVGNYRQEHLFSLKQAVELFEFYQAKILECEAEMEKYLKSLPHKREDEPPPLPEGEKRNRLSFNVRDHAWKLMGVDLFRIKGLNSETVLRITSEVGVDVASRFPTEKHFSSWLCLSPNNKESGGKVLSSKTKTSSNRAAAAFRQAAVSLERSDSELGAFYRRKKAHLGPAKAVTATAHKIARIYYHLMKTGEEYVDEGAQAYDKKHQERVLSNLRKRARGLGFKLVEVEQ

SEQ ID NO: 460708 - protein, 326 aa, unidentified
MQGKEASEQETRNKSSVGIDVSKCWLDAYITPSGGGLRVANNGVGIRRLKRWLSAFDIALVVVEATGKWHRHVQRSLAASAIAVAAVDPYRVRMFAKAQGVLAKTDRLDARVLAAFAAVMQPAVRAPAAPLMAELAELVAARANAVAMQTAVKNQLAAAQTKFLKRQLKQRIERAAEDVAALNGEILKRIEADEVLARRYAILTSIPSFGFTVAATLIACLAEIGSLNAKQAGMLAGLAPVADQSGEREGVRVIWGGRAAVRRILYLAAVSAVRANADMKAFYARLRASGKAPKQALIAVARKLVVLANTLLNENRFWQSSAPKHA

SEQ ID NO: 460709 - protein, 318 aa, unidentified
MKITAIGIDIAKDHLDIAVRPTGENWRVAHTPDQFPALIARLQALAPERILLEATGGLEILLATQLVAASLPVVVINPRQVRDFAKATGQLAKTDQVDARVLAHFGEALQPPVRPLPDEQTRALDALLTRRRQLLDMLVAEKNRHAALSRQPKLQKGVAEHITWLNQRITDLDDELKSQLEQSPVFCRHDQILKSVPSVGDVTSRTLLACLPELGKLTHKQIGALVGVVPFARQSGQWKGETHIRGGRSEVRSVLYMATLSAIRYNPTIKTFYQHLLTKGKKKKVALTACMHKLLTILNAMIRHQEEWNPPQTSAATS

SEQ ID NO: 460710 - protein, 401 aa, unidentified
MKEFNAKEVRIETASALETVKPARADRKYPAYIGLDVHKETIAVAVAQAGREAPESRGEIANKPKTVAKLVERLNREFGGEVLLFCYEAGPCGYGLYRQLLELGHDCQVVAPSLIPKKPGERIKTDRRDACKLARTLRNGDLTAVWVPDEEQEAMRDLTRARDDMKGQERKARQQLNAYVLRHGHAWPSNKTRWTQTHYNWLESLKFPHDWQQVVLQEYIDAVKATSQRVADITAQMERVLPQWSLSPIVDSLVALRGIDKLAAMVLLAELGDISRFDSPKQLMAFLGLVPSEHTSGGRRRQGAITKTGNRHARRMLVESAWSYRFPARQTAHLKRKAANASDEAKVIAWRAQKRLCGRYRTLLQAGKNTKQTTVAIARELVGFIWDIACHEMPKVQQAVR

SEQ ID NO: 460711 - protein, 416 aa, unidentified
MKKHSNSGKKSEPKTNRAKSRGPVQRDTKEVLAELVGKLKEKLDPKKMAATSAGEQHQRGGLRPNLDRLTVGVDLGDQWSNYCILGLEGETLAEGQLRTTQEDIAEFFQALNAARVVFEVGTHSAWVQEVISGCGHEVLVANPRLMDGSKRRKRKNDRIDANKLARLGRVDPESLYPIQHRSREVRQDLVMLRARDALVAVRTEIINTTRGLVKSMGTRLPKCSSRSFAHKGEEAVAVEMREALLPLVRLAATLSADIKEYDKKIEELGREKYGHTALLRQVKGVGPITALAYVLTLANPQRFVKSRDVGPYLGLVPKQEDSGESQPQLGISKAGDTMVRKLLVGSAHYILGPFGPDTDLRRYGLGLCERGGKNAKKRAAVAVARKLAVLLHRLWVSGEVYEPLHNAMSAPIAAAA

SEQ ID NO: 460712 - protein, 370 aa, unidentified
MKKYATLFIGLDVHKESISVAHVPDDRRAEVTYVGRIGTRPADIDRLVRRLQEKADRLVVAYEAGPCGYVLYRHLTRRGITCLVVAPSLIPKKPGDRVKTDRRDAVQLARLLRSGDLESVYVPSVEDEALRDLCRAREAAVVTLKAAKFRLKSFLLRLDLHYTGRADWNDAHLRYLAKVVCPTPAQQIVFQESLRAVDEQVQRLKRLEAELADLVPAWRLAPVVRALQALRGVQDTVAVTLLAEIGDLTRFDNPRQLAAFLGLVPSEDSTGDSRRQGPITKAGNGHARRVLVEGAWAYQYPAKVSPAIRQRLEGLPQPVQDIAWKAQVRLCKRFRRLVARGKHPNVVVTAIARELAAFMWAIAREVPITA

SEQ ID NO: 460713 - protein, 359 aa, unidentified
MSKLTKIETFFNTANLTADDQLFVGIDVHKKSYHVALYLNDAPSIDFVMPAKKQQLSQKLVTTAPALRQVAYETGPSGYGLARHLYHHGLPVAVAATSRIPRPAGGDDKTDKLDSKKLAEYAAKGLLKPVQVPTLKQEADRQLYRMRHRQARNLSKVKVQIKSFLLMHDLDEPAGLSNWKRNAVEELRTLPLRKTLRLSLDELLGDMDYYASRIKDLDKSLAKQLDKGRLGQRMALLKTHPGVGTVVSCQFATELFHYRDFNSTREVFKYLGLSPRLHQSGDRSTRGSINRVSNARLRSNLVQAAWRWVAVDVQAKKTYCHLLNNCGGIKQKAIIAMARKLSGHLWTMLVKDQPYDPKK

SEQ ID NO: 460714 - protein, 318 aa, unidentified
MLIHYIDIAKRNFVIAVSSLSKTKTETNNPKGIAHTIEYLKKHKVALVVTESTGGLEIPAAKAIRRAGIAVIIANPRQTHQFAQSQPLTKTDAKDAKMPAFFAQMTAQKEDSQTMPYQPPTEAEEVLEALVNRRNQPADMRTAEKNRLHQVHETQVGSVKQLIAHFDRLIDELDKQIDDHTHTHFDGKDQVAEQIKGIGSITTATLMAMLPELGRLSHKRIASLAGIAPHPRESEETKFKSRCFGGRSAVRKALYMATVAATRFEPLIRDFYQRLLSKGKPYKVAVTACMRKLLTISNARMRDYFAENDTAENGIRTA

SEQ ID NO: 460715 - protein, 358 aa, unidentified
MEYGAIDLHKKESQIRILTEDGEIVDRRVVTTRERLTSVFWGRPRMRILLEAATESEWVAQHLETLGHEVIVADPNFTAMYGHRSRRIKTDRRDGAALAEACQRGCYRVAHRRSALRRTVQAQLNIRRELTEARTRAISLTRALVRGGGFRIRSGSTDSFLTRVAALDLPLGMTDTLAPMRRVIELLNTELTTADETFATHVAEDCVVRRLTTLPGIGPITASAYVAALDDAGRFGGAAQVASYLGLVPREYSSGEQQRRGHVMRSAHPYVQALLVQAAWRIVRVKDPRTVALRTWADAIAHRRGKKIAIVALARRLARVLFAMWRDEVAYDPARIRSSPRPFVVASDDGVTESAVNG

SEQ ID NO: 460716 - protein, 458 aa, unidentified
MGRNKSRNKDRGTISVVHPNAAAIDVGATMHTAAVNADRAPEPVRSFGTFTTDLHRLIDWFAECGVDTVVMESTSVYWIPIFELLDARGFAVFLVNARDAKHVPGRKTDVSDAQWLQRLHSFGLLRASFRPKGQIAELRAYLRQRERLLEYGASHIQHMQKALTEMNVQLHHVVTDITGVTGLRIIRAILAGERDPAVLAGMRDRRCHATVETIEKALAGNYRVEHLFALEQALALYDTYQQKAFACDARIEAVLKELIVRRGREEGQLPAARQNRSSQQNSLLFDVRAALFALLGKDLTQINGLGPYLALKLIAECGDDLSAWPSAKHFTSWLCLAPSNKISGGKVLSARTRRSGSRAAALLRLAARTVGRTDTALGAFYRRLAARIGKAKAVTATARKIAVLFYNAVQHGMNYVDPGASSYETRYRARVIANLHRRTKAFGFVLQPVDPPPGVAVS

SEQ ID NO: 460717 - protein, 412 aa, unidentified
MTATNQFAAHVGLDWADKKHDVCVQFKNGERVFHVIEHTAEALDVWLTELHQKVKGRIAIAVELKKGPVVYALQKYPFITVFPVHALSLARYRQAFSPSGAKDDPQDAELALELMLRYPQKIKAIEPDNADIRLLQQLVEQRRQLVEDKRRFVNRIINTLKQYYPQPLEWFSHRGSLLLCELIIRWPSLQQLKRARRDTIRNFLNAKGGRAIALTEQRVASIDNAIPLTTDPSVIEANALMATALATQIKVVSEIIKTYDERIEALFDTLPDAGLFKSLPGMGPCMGPRMLAALGDNRDRFNSAEEIQNYAGIAPVTERSGQKSWVHWRWQCAKFVRQTFVEWAAKTVISSYWAKLYYQGLREKGKSHQSAIRALAFKWIRIIYRCWKTRTPYDEAKYLLALEARHSPLLKP

SEQ ID NO: 460718 - protein, 429 aa, unidentified
MNLRPIAGIDVGKYFSEMAILSPSNEIVARMKINHDSYSDMERAIELLNKTEKDFASKPFVVMESTGHYHKILFHSLCKHGFEVSIINPIQSDSIKNIGIRKVKNDKVDARRIALLYRFQELKTSNIPDEDIECLRSLCRQYYKLNDELTAYKNRLTGTIDQLMLNFKDVFPDVCSKTAIAVLEEYPTPAHIIKADKSKLVSIIQINSHKSLEWATAKYELLVLKAREFEPLSINNSANVTMLDIYISMVKNLQENLNKVLKAIHQLIADNLSTDMPMMSLALELLQSIPGIGLLTAATIIAEIGDFNAFTKPGKLVAYFGIDPSVMQSGEFKGTRNKMSKRGSKLLRRVLFTIALANIRTKRNGEACNPVLLEFYKHKCQNKPKKVALGAVMRKLVCIIFAVLRDRKPYELRTPEEHSRILAARHHVA

SEQ ID NO: 460719 - protein, 410 aa, unidentified
MNPLYVGIDVASHSNVAYLMKPDGSKHSVFPITNSKAGCQQLVKRIVSAMTGNGLSEMKIGMEATSIYGSHLVYTLKEDFSLSVYTKEIHVLNPKQVAKFKESYDDLPKNDYVDAYVIADCLRFGRINNEVYLGDYRYEALKKLTRARYTAVVNLSREKQRFLNTLFLKYSTFAQEKVFSDTFSTTALAVYEEFESADQLALMDLHELTEFIKEKGKNRFPDPDAVAKAIQKAARSSYRLPKTVNDSVNQVLSISISSMRALEASIKQYDKAIAEQMNAISNPLISVKGIGSVYSAGIIAEIGDIHRFKNQASLAKYAGLAWKQHQSGGFEAENTPLIHTGNRYLKYYLCEAVMSLVRCDTEYNSYYHLKYKEVNRAQHKRALVLTARKFVRLVYCLLSENRMYIAPEER

SEQ ID NO: 460720 - protein, 348 aa, unidentified
MNVNHYVGFDVHKKSVSYCVKTGDGRIVEEGKLSATRQALRRWAQQRTEPWHGAMEATLFSGWIYDALKPYAAELQMGHPAMMKAIGASKKKNDRLDARKTADLVRCNLLPACYVAPVEIRELRRLLRYRNVVVAQAVRMKNKMSGLLMEVGAPYNKQRLHGKQYFSELLDQLEEVPESVKDLLRLSRTTLEAFEAIQQQLLARLRQDPLLTARVKLLTGIRGVGTVTALTWALEVGEPQRFSSIGHAVSYCGLTAALVSSADKQQRGPISKQRNAHLQTVLIEAAKLAPRWNPQLAAVHTRELARGHRNRATLAVARKLVAYLLAVDKSAQPFEVRAPAAQETERVA

SEQ ID NO: 460721 - protein, 448 aa, unidentified
MTIIEGSAAVAVGIDAAVVANHHIVVRRPEAGRAGTMVDDFVVPPTLAGMERLTKRLVSWPGAVAVAEPTSLTWLALSIALRNAGVELSLVGNRHSARLRSALAGKNKSDPIDATLLSRAGEFFELRPARIPTTIELALRRAAQRRGKTIVDANRCLRRVVSQARWAFPDVWNAFAGSRPTALAVLDRWPHLEALARARVSSITEVVAAHTRGVANVEGRAQQIRSAARDWVEFWHGHLDLDALAWETAELLADLRAADARVDRATETTRRYWEQLWGDDPVLLSVPGMGLLTAPTVRAFLADGTHLDDAKAAQSFVGLNPSNWSSGQMESPSRAITKEGPPVLRLAFYQAANVARAHDPQLADFYRRLMIERGHCHTKANCAVARKLVARTWATIVSGALYELRDLNGTPVTRREATKLAAALAVPDDIRRRTRAHSAATHRARLTR

SEQ ID NO: 460722 - protein, 413 aa, unidentified
MDKVYDICCGIDVHKKLIVACLRKGNKHEVREFGATTRELLEMADWLKDNGCEMAAMESTASYWKPLYNILESSDLKAIVVNARHMKAVPGRKTDVKDAEWIADLLQHGLLTASYIPDKDQRELRELVRYRKSLVAERTRELNRLQKMLEGANIKLSGTVHDINGMSARNILEYILTGEPIDEAKYDEMYEKKLIAHHLKASKEQIIDDLNGVMTPLQRRMMKELLSHLDELNVHIKNLDNEIDDFMKPEEKQASKMIQDIPGIGNTSAQAVISVIGTDMSRFATDAHISSWAGLCPGNNESAGKRKSGRTCKGNDLLRTTLITCAHSAVKNKQSYFHAQFARISAHRGKKRAYVAVAHSMLVAIYHILKDGVVFKDLGADYYNQFNKERKINAYLKKLKMLGWEAPVVVASA

SEQ ID NO: 460723 - protein, 511 aa, unidentified
MSKKTKAAPAQTPLTPSPASPRPASAPKRPSRGRRGSKKPSRGPQPSADWEVKHPDAAGIDIGTREHWVAVGGGRAKPSTRKFGTCTPDLEEMVAWLQACGIRDVAMESTGMYWLPVYERLEEAGFVVILADARQTKHIHGRKSDQLDCEWIGQLHTYGLLGAAFRPTDAVCRLRTIQRHRKTLVESAARCVQHLQKAFDGMNLHVHHALSDLTGVSGMAMIEAILRGERDPQKLAALADRRVKKSPAQLAAALTGNYRDEELFVLGQALASYRHYQQQIAACEEKILVQLEALRAACPEKSAAAAAAPATDEAATTDEAAATEEATATAKAPRRRRRSEKEESLAAALQRIFGVDLTALPGLGVMAVLTLLSEIGADMSRWRHAKAFASWLGLCPNHRISGGRLLSVTSRKVVNRAATAFRLAAMVAGQTETPLGRFYRRKAAQFGAPKAITATARKMACLVYEMIRTGQAYRPMEASAYQKRYDEQRFKSFRKRAKELGYELVELKKAA

SEQ ID NO: 460724 - protein, 402 aa, unidentified
MAQAKPQVIDDEEHERVYERVAAVDVAKDSGMVCTRTPHRSRPGARQSTVWTVKARMTAIRALGRQLTKDGIEMVTLESTSDYWRIWLYVLEACGLAVQLVNAAQARNLPGRPKTDKLDAMWLARLTEMGLLRPSFVPPAAIRALRDYTRARTRLVQERTRCFQRLEKLLEGALVKLSSVASKLTTESAKDMIKAMIAGERDPHTLAALARTRMKAKHDQLVEALAGMFDDHHGELAQILLDQAAFCDARIAQLTARITAAVAAMPAAWGVDADGTTGPDAGTGPDAAALPAVQRLAEIPGVSPDLARSIIAEVGLDMSRFPTAAHLVSWAGLCPRARQSGPRTRAGKKNQGDSWLRNSLGQAAIGAASATGGSPAAAARPRPRSPSPALTGNFPPPGGSNQ

SEQ ID NO: 460725 - protein, 343 aa, unidentified
MSAYYYIGLDIHKRTISYCMKAIDGALIGQGKIEADRKSLDEWAKGLPGPWVGAMEATIFTGWVYDFLKPYAVKLKVAHPEMLKAITAAKKKNDRADAEKIADLLRVNLLPECHMLSEEIRELRRILRYRNHIVRMAVNMQNKVSGLLMEVGASYSKKRLHGKKYFRELLERVEDIPPSVKELLKLSRSSYEMFRSFQKRLVETLHTNNLIHDRVERLMTIPGVGELTALTWVLEIGDSERFTSIRKAVSYCGLCSAQRESAGKEQRGPISKKRNKHLQTMLIEAAKLAPRWNEQLAILHERELKRGDRNRATLAVARKLVAYMLAVDKKQADFKLPAEMQAA

SEQ ID NO: 460726 - protein, 382 aa, unidentified
MTTQQECIAAAVSLEGEILIAPFQFSNDYDGFYLLLSKLAPLDQHSIIIGLESTAHYGDNLVRFLICKDFKVCVLNPIMTSSMRKNNVRKMKTDKVDTLVIAKTLMMQDSLRFSTLEDLDYIELKELGRFRQKTMKQRTRLKIQLTSYMDQVFPELQYFFKSGLHQKAVYALLKEAPMPKDIASLHLTHLSNLLVKSSHGHFTKDMARELRVLAQRSVGLNDSSLSIQITQTIAQIELLDSQLFETELELANLVTCLHSVLMTIPGIGTVNGGMILGEIGDIHRFSTLGKLLAFAGLDPTVYQSGNFQAKRTHMSKRGSRVLRYALMNAAHNVVKNNATFKAYYDTKRAEGRTHYNALGHCAGKLVRVIWKMLTDEVEFNLE

SEQ ID NO: 460727 - protein, 430 aa, unidentified
MKSNTQNTKIEAVTEKTLVVGIDVGSEFHYARAFDWRGIEYSRKPLKFSNTEPGFTEFKAWILHIQTEHDKDAVVPGMEPTGHYWFNLGKFLQDNGMKPVLVNPHHVKKSKELDDNNPTKNDRKDPKVIAGLIKDGRYSYPYLPDGVYADLRTASNLRFQTQSELTRIQNRISRWFSIYFPEYKDVYGNPDAKSGMMILKVAPLPEDIVTLGVEGVNRIWREAKLKGVGLKRAKTLYEAAEHSIGSREGATAARLEIRMLLEDYESRATRLQEIMTMIESLVKQVPMAEKLMEIKGVGIKTVSGFLAEVGDISRFDNPRQLQKLAGLAIKENSSGKHKGETTITKRGRKRLRYLLFEVAMSLVSKNTEFSQLHQYYTTRRINPLKKMQSLMAVACKLIRIFYVMLTKQVDYDPQKMIGDIRRSEIYVQAA

SEQ ID NO: 460728 - protein, 431 aa, unidentified
MIYLDKDKLQSTLFVGIDVSSTTNYAFAMDFFGTKFLSFSFSNNQPGSNVFVSNVSNCLRQNNFKYVVFNMESTSFFSFHLCCVLASSFELAEFKPLVYCLNPKVIAAYRESFVCLDKSDPLDAKVICDFARVGKITSSPFNSSTFLALQRLTRQRLHVVECLTREKQFILNNIFLKFSELAVLEKSKHPFSDKFSATAVSLITDFYSPDEIANMPLSDLIEYLNIKGKNRFTDTENTAKLLQKAAHDSYRLDKALYEPINLAIATSFNSIHLYEKQLKDLDKAILKTVKGLHSNEYDCLLSIKGIGPVYAAGIISEIGFISRFNREEYLASFAGLTWKRKQSGKHTSDITNLTKSGNKYLRYYLLEAVNSVINHGNQEYSDFYHKKYSEVTKFQRKRALALTARKFVRLIFSMLQKNQLYINKKEMIKLT

SEQ ID NO: 460729 - protein, 311 aa, unidentified
MSKPHLDLCLRDTQRRVPNDASGWNELTAELQAAQVDLVVVEATGGYERGLVCALQSAGVCVARVNPRQARDFAKSMGVLAKTDQVDARVLRDFGDVLARHRDRSKFITPMLDQARQVLAELMTRRRQLVEMRVAENNRLEHAGQRAARSITSVLKLLDKQIDSIDAHIDDHMGQHFKAQRELLDSVKGVGPVTILTLTAALPELGQLGRRQIAKLVGVAPLADDSGGRNGKRRTWGGRSEVRSVVYMAAIVAMRHNQVIREFYERLLSAGKPKKVAIVACMRKLLTILNAMLRDQALWNATRHCKTVEIA

SEQ ID NO: 460730 - protein, 347 aa, unidentified
MLHVGLDLSRTRLDVHVMDQTGTSVAVTTAAPDVGGLASLAHRLGELGQPVTAVIESMNGARFIHDQLELRGWTVEIADAVKVKGFAPLASKTDKIDAWVLAELSRRDLVPAIWLPSPDVRANRERARWRLHLVRHRTALKNRIHATLLAFGHPCPVSDLFGAAGRRLLDGLALPEPWAGDVVAALRLIDVLDGEIDDCEAALRREGADHRYVPTLMTAPGIGWVLGYTIAAEIGDIGRFPTAKKLVGYTGLCPSVDQSGGHDWRGSLAKNGPKYLRWALIEAATHAARHPVYRDRYQRTKTRLGRQRGPSVARVDIARKLTEAIWHMLTTNKPFAPAGATTTALAA

SEQ ID NO: 460731 - protein, 406 aa, unidentified
MQFCGIDWANDHHDALSIDEQGHQLGSIRVAHSPEGLSQLDTYLERMAGPGGREQIACIVETTQGLLIAHLLEQGWPVYPVNPRTVERRRAPSGAKTDTIDAYLLAKTGRADFQDLRRLNPDSEQIQELKTLTRDQDALIQMQTRLVNQLTACLKAYYPVVLDLFGKLHQPSTLKFLHDYPTLQAARAATAEELADLLKQARYPGAKLAAQRMAAQLQQPCLQANEVTTRTKSRLMLALVDQLEPLLKQIADYDKEIERLFLRHADSELFQALPGAGARLAPRLLAEMGEDRSRYESACSLQALAGTSPVLFQSGTYQKAHRRLGCIKPWRNALQQFAWESTRQEAWAKEYYQRKRTEGKSHTVAVRALANVWARILYAIWKKKEPYQTTTFEQARRAHAPRPHAA

SEQ ID NO: 460732 - protein, 374 aa, unidentified
MMARVHADVRRVPIVNMQPHRRSVMKYYKSTTEYNCGIDLHSRQMYVCVMDKEGNKLLHTNIKGNDFDYFLKRIEPYRQDLTIVCESTFNWYWLADACCEAKLEFVLAHALYLKHIHGGKNKNDRIDSEKPAHLLRANLIPPAYVYPAEYRPMRALLRQRMKYVWARASLIGHLTMDQHAEGVVPASTSSNRDDWEQRILEQYTDPLHRMAVETDMELIRFYDKLIKQLGNELERRAKKFFRKNYLLLTSVPGLGKIMALTILLEIDTVDRFPTVKDFTSYARLVKGSVASAGKVKGLTGGKMGNAYLRWAFGQIAVLAKQHDPLIKLYAERLVAKHGKFKGNAILSNKIARAVYFMLKNKTVFDVEQLLAASI

SEQ ID NO: 460733 - protein, 386 aa, unidentified
MQGSNVCTPTVGHVGTIFVAIELSQKSWLMTIHSPDRDRISRHKLTGGDHAGLLGLLETIRTRASHKLGSAPAIVSCYEAGYDGFWLHRLLTAAGIRSHVFDPASIAVEQRGRRAKTDRIDGELLLRTLMAYCRGEPRVVRIVRPPSPEQEDARRETRERDRLVQEQGGHTNRIKALLRLLGMAVGNPRRRDWLAWLMRQRDWQGQAVAPQIKAEIEREHARLMLVREQLAALEQRSAQAQPTPAAAEMARRRGILFQLKGLGPAFSGTLAAEVFYKDFDNHRQVGAYVGLAPSPWKSGGIDREQGISKAGNPRARLAAVELAWLWLRHQPNSALTHWFLARTANASKRVKRIAIVALARKLMVALWRYLTTGLVPDGAVLKPVEA

SEQ ID NO: 460734 - protein, 524 aa, unidentified
MKLLVRLRRLAVAINPERRLKIESPGSRCQPSQSKTTMATTRKQPHRKNGSDARCSALKRKASSHCHPGKGNRQRSKLTISNPDAAGIDVGAEVHYVAVPEDRAEAPVRSFGAYSAQLDELVQWLKECGIKTVAMESTGVYWIALFQKLEEAGLEVLLVDARQAKHVPGRKSDVQDCQWLQQLHSYGLLRAAFRPEDSICRLRTLQRHRKDLVECAAMWIQHMQKALNEMNLHLHHVLSDISGQSGLAILDAIVAGERDPSKLASLAHYRVQKSQAEIEAALRGDYRPELLFVLSQSLENYRQLQQQLLKCDLSIEKKMATLAGRATISQGAEPTQQSQDSDGKPPKRKPKDALELSLASHLKRILGVDLTTIPGLNVLAVLTLLSEIGTNMTKWRNEKAFASWLGLNPNNKISGQRVLSSRTRKVANRAATTLRLAAMLSGKTNTPLGSFYRRKRAQLGAPKAITATARKLACLVYRLIKNGQAYKPTDLRTYELKYKQQTLDSLRKRAKNLGFDLVQLPKAA

SEQ ID NO: 460735 - protein, 429 aa, unidentified
MRAESTPGARGPVFCGVDTHADSHWLCVLDWRGRKVLSRQFPADAAGYEALAGAIAAAGEPACVAMEGTSSYGAGLTRHLASLGMPVREALSPARMQRRRPGQGKCDEADAERAARAAMSGSKLGTPKSQDGWVDGVRCMLAARSGAVKARTSAINTARSLLTTAPEGLRSRFRGMGGPRLMEELPSVRSEGALGAALGALADLWAAARDAALDMERAIEASLEENCPALLAMYGCGPVSAAKLAVAAGDNPGRLRSEASFAAICGACPIPASSGKTVRHRLNRGGDRQANSALHEIARQRVMRDPETAEYAERARGRGKSDREVMRCLKRYVAREAYRALMHPHEIRRPEDASELVAARRAAKVSQVRAASILGTSEKYISMLERGQRELKPIRRAYEAWVEAGLPLDWDRQAFEAERKMDSKKHLAK

SEQ ID NO: 460736 - protein, 317 aa, unidentified
MERTEISFEQAVRVGCGIDVHQAVIVATISKGQENYETKEFSAFTSSLTDLREWCKKEGVTHVAMESTGVYWKPVFNILEEDFEIILVNARHVKNVPGHKTDKKDSKWISKLLLAGLLKGSFIPPRDIRELRDLVRYKKKQIAHVSSEKNRMIKILEDANIKISTVLSDVHGASGSKIVADIIEGKLNIEDLMKHIHGKVKASREDIRKALEGRLTTHHRFMLKIIKKSIAEKEGIIKELEEHIDVATRQYAVEIDLLQTIDGVGKDSVIGIISEVGVDMEQFPNEHHLSSWAGMSPGNNESAGKKKVQEPSKGTNI

SEQ ID NO: 460737 - protein, 409 aa, unidentified
MQVVHERCAGLDVHKKSIFGCVLWFDEKGNKQQEIRSFGAMTVQLLQLADWLKQHQITHVAMEATGVYWRPVWAILEGHFELILVNPHHIKAIPGRKTDAKDCEWLADLLQHGLVRGSFVPATEIQDLRDLTRYRVELTQAQNRVANRIQKVLEQANIKLSSVASDTLGVSGRLMIEAIIAGEQDGEQLSQLAKGRLRSRIPELQAALAGRIRSHHRFMLKEHFSEWKALAERIERVEKEIDKSMSPFEQAVTLWQSIPGVDRLTACSLVAEIGINMKQFPTAQHLASWAGVCPGNNESAGKRMATMTRDGNRWLRRALCQAAWAASHKKNCYLASQFKRIAARRGAKRALVAVAHSILIIVYKILQTSKPYQDLGADYLQQIDKEQLRRSLLRKLQGLGFHVTVSAPA

SEQ ID NO: 460738 - protein, 411 aa, unidentified
MSHEITWLFVYGSPRVIIFTSEVIFMVFVGIDVAKDKHDLYAVDSDGVVLCDNFTFANSAAGFASLLERISVWGKIKVGIEATGHYSSNLLSFLKAHDFEVVVFNPLSVSRLRSAASLRKTKTDKNDSRYIARLLLTGVANPYQSQSYNISVLKSMTRARFRLFQEIQPLKNRFRRLLHVLFPELQGFFSNLYGNTSLNLLSVLPSAKDIAECNILKLTKILSEFSRGMLKRGRAEQLKSLAQNSIATYNYGDAFELKQTVRRIQFLSSQMSEIESEIDSVMAVLNSPITSIPGIGNLLGATILSEIGDIKNFDNPDKLLAFAGCEPSTYQSGKYTATNTPMVKHGSRYLRRALYCAADMAYVNSPSFRSYIDRKRAQGKHYYVAMSHGMKKLVRIIFAVLSRNVPFSEPA

SEQ ID NO: 460739 - protein, 314 aa, unidentified
MKTTDEINIGVDTGKHQLDIYVRPLGDYFTVTNDQKGIKEAIKRIKKYHPKRIVIEATGRLEMPFACAASKAHLPIVIANTFNVHRFIQSTGQLAKTDKLDAEMIAYYGEAITPRLTEIKPDNIQRISDLLARRSQLIELRTMEKNRLSILSAEIKRSNTRLIKAIQKEVDKVESTLDKLIEDTPDWKKILCILLSVKGVGKVLAYTLLSDLPELGQLNRKEIAALVGVAPMNRESGAYKGKRRVRGGRAKIRTVLFMAMLSTIQSNPRFKRDYQRLVAKGKPKKVAIVACMRKMITILNVMVKTETMWDEKLA

SEQ ID NO: 460740 - protein, 343 aa, unidentified
MEYYVGLDVSLKQTSICVVDQSGSVVREGVVDSDPEAISVYVRSKAPGAVRIGLETGPTSTWLWTELKRLGLPVICIDARHAKAVLKMQINKSDRNDAIGIARIMQTGWFKEVHVKDIDSHSVRALLASRALLVKIKRDLENHVRGLLKNLGLVIGRAKFNVFAVRAEELIEGRPELIAAIRPLLEARTAVEQQVSELDRKVMKLARHDAQVRRFMTVPGVGPITALAFKATIDDPARFARSRSVGAYVGLTCRRHASGEVDWSGRISKCGDAMLRSYLFEAAGVLLTRVQKWSAVKAWGVKLAKRNGLRKAKVAVARKLAVILHRMWIDGTEFNWSKKEIAA

SEQ ID NO: 460741 - protein, 370 aa, unidentified
MLNTTTFVGLDVHARSIKAVALDAMTGEVRSATFGYDAAEVAGWVSSVDPSAKCVYESGVTGFDLQKRLSSMGIDCVVGAVSKMIKPSADRRRKNDRNDAEFLARMLSVGNVVEVWVPDDECEAARDLTRALDDAREDLKRCKQRLSKFLLRHGLVFSETNAKGQRRKNWTAAHWAWIRSISFPDKADDEVLAYYIDAARQAMEDKARLERLVEAEASKPRWKKRVDSVRCLKGIDVTSAADLVFEAGEFSRFKNARSFAAWIGLTPSEHSSGESVRQGGITKAGNKHLRRVLVESAWHYLGCSPHSKDLAKGQAPDPGARRHAAKGVRRLVGRRAAMLERGVHKNKANVATARELACWCWAIGRMVENG

SEQ ID NO: 460742 - protein, 388 aa, unidentified
MQIAADRPQASTAIRTDLGAIFVSLELSRSTWLITSLSPGGGEKMSKHSVRGCDVAGLLERFAHLREKARARTGQRFPIIVIQEAGLDGFWIHRMLNAEGIESHVVDPASIATSRRRRRAKTDRIDGEALVRTLLAYKRGEPRVCSMVKAPTPEEEDRRRLCRERKVLTAERVLHVNRIKGLLFSQGITGYEPLRRDRRERLEQLQTGDGHTLPDHLKGQVRRELDRLELLLNQIKAVEAERDALLAAERAAARTPAAMLLDIKGVGPEFAAILWSEGLFRHFDNRRQVAAYAGLAPTPWQSGSVDREQGVSKAGNPRLRTTLIQLTWLWLRNQPHSALTLWFHERVRRNGGRLRKTTIVAVARKLLVALWRYVTAGVVIEGAVMKPT

SEQ ID NO: 460743 - protein, 358 aa, unidentified
MQRNKKTFKGQNIYIGIDVHKKNWQVAVITESGYTERLSTAADAKALFKFLKSHYPDGNYRAVYESGFSGFATHYALSELGISCVVAHAADIPSSQYELTMKSDRIDAEKLARALRAGLVRGIYVRPKDNLDDRGVLRIRKTIQIQVGGYKTRIKHLLHSNGGELPERFSRSGTHWSRAFIAWLREDVRLLSDTRRSLDLLLLQVETLRANLLEATRGVRALSMTDRYREDCALLMGIPGIGLTVAMTILTEVCDIGRFGNERQFASYLGLVPTSHSSGERVSHGEMTFRGNKHIGPLLVEASWVLIVRDRELGRMYTEYRWRMAGQKAIIKIARKLSNIIFAVLKTRKAYEPYRRDA

SEQ ID NO: 460744 - protein, 380 aa, unidentified
MASETTQTHDTPKVQELYLAIEMSQSEWKLAFTIGLGQDPRLRNLVARDLGGLLEEIELSKKRFGLGKQVVVRSCYEAGRDGFYLHRYLQAQGVSNLVVDSASIEVNRRFRRAKTDRLDAGKLLSMLVRYHQGERKVWSVVHVPKPEEEDQRQLHRELMALKKERTHHINRVKGLLASQGVTLEIRSDFQAQLESLRVWDGTPLGTRLQARLSREYIRYQLCKEQIRELEALRLDCIRHAEGPAMDQVRQLLRLKGIGVNSAWLYVMEFFSWRAFRNRRELGALAGLTPTPYQSGESARERGISKAGNQPVRAIAIEIAWAWLRFQPASQLSQWYQDRFAHGSSRVRRIGIVALARKLLVALWRYLETGQPPQGAIMSNP

SEQ ID NO: 460745 - protein, 346 aa, unidentified
MAEYVGLDVSMKETVVSVRRDGKRVWRGKCASDPKVLADLLRRRAPEAACIAFETGPLSVWFYHQLSAEGLPVVCIDARHAKAALDMAANKTDASDADGLAHLAEVGFFRAVRVKGFDSMIARTLVSARTKLVMVTTDLSNQIRGLMKTFGLVVPVGKGSRFEANVRTLLAEQDLVAPVILPLLEAWRAVRVRATELTRQLIARARQSRACRILMSVPGIGALTATCFATAIEDPANFSRSRSVGAWLGLTTRRYQSGEVDYDGHISRRGDAYLRGLLYEAATVILTRSSAESALRTWGLALREKVGFKRAAVAVARKLAVVMHAMLRSEQLFDRKVGELLQEVTQ

SEQ ID NO: 460746 - protein, 428 aa, unidentified
MKDNLTPIKMPEPVLLIGIDWADQKHDTYTIDGQGHGVWEQIEHSPEAIDAWLAEKLRQAGSQPIAILIEQSRGALIHTLMFRKNVILYPINPKQFARYRESYSNAGCKDDPTDARLLARMLRERIGLLKPWTPDDESTRLLALLCQTRRQLVHERTRLTQQLIDQLKAYFPLVLEFNSSQSVSLLVLELLRRWPDPRCLKRADRRILHRVLREHGYRNEDKRQEVIERIRSAKLLSRDRALIEPAAIVVRCLAKQIPVLEQSIEALETKIDQEMNSHPDADLFTALPGAGKTLAPRLLTAFGSQRDRFASANEVATFSGIAPVTKRSGKSCIVHRRYACPKYLRQTFHEFADHARKWCPWSRAYYCLQKSRGMKHHAALRKLAMRWIRILFRVWKNRTAYDPAAYLTTIKRKNPAIVPFLPPTQVEA

SEQ ID NO: 460747 - protein, 459 aa, unidentified
MKRDNRQGNGLPAQLAAVNLHAAGIDIGAQAHWVAVPPDSDAQPVRGFGACTADLEAMANWLQQCGVTTVAMESTGVYWIPLFELLEARGFAVVLADAREVQRAPGRPKTDVRDCQWLQRLHTYGLLAAAFRPPEQICVLRSYLRQRAMLVTYAGQHIQHMQKALTQMNLKLQHVVSDVTSVTGLAILQAILSGERNPQKLAQLRDRHCQHSEAEIARALQGNWRAEHLFALQQAVELYEFYHRQIALCDRQIETHLQTLPDQSGGKPLAAVPHRAKRRRNEHHFEARLPLFRATGVDLTAIEGINEHTALVLLSEIGTDMSRWPTEKHFAAWLGLCPLHKISGGKVLARKVRPSANRAAAALRLAASCLHHSQSALGAFFRRLKARLGTPKAVVATAHKLARLVYRLLKHGEAYVTHGMAAYEQTYRERVVQSLARKAKALGYKLLPTTDDALQASSA

SEQ ID NO: 460748 - protein, 324 aa, unidentified
MIDGILGIDVCKNTLDVSISSYTKVRTKSFTNSPDGWRHLLDWLIAQKIQRVHACLESTGRYSLGIACALYEADHVVSIINPAQIRDFVRTKLGRNKTDGVDASHIREYCELFKPSPWAPPSEAHRRLGELQTIRSGIIAGLTEWKNRKNSGIVDAEAQALADATISHFTSQLGAVDKAIALTIDNDCDLQSKRDLLLSISGVGETLAGVVLAELPGPDVLRSSAEVVAYAGLNPRQHQSGTCIDRATRISKIGNAVLRAALYMPALSAMRYNSAIVALVTRLKSRGRLKPKQIVVAAMRKLLVLCFGVLKTGRPFDAAIAMGG

SEQ ID NO: 460749 - protein, 321 aa, unidentified
MTAILGIDVAKNKFDVALFRNGKYKNKSFENSPPGFEALVVWLKKNDVTSVHACMEATGSYGDTLARFLFEAGHKVSVVNPARIKAYGESELLRTKNDKTDAKLIARFCEAHKPVAWQPDPPEVEHLRMLGRRRDALISMRTQEVNRLGGPDASVNDSIQKVIDFLNEEIDLISKAIREHIHKHDGLRKKRDLMKSIPGVGDVTIEAILSEANGFEGFDTVEQVVAYMGLSPKEHTSGTSVKGKAALCKIGSARLRKALYMPSLSAIQHNPFVTALYERLKAKSKNGMVIACACMKKLVHIIYGVIKNGKPFNPAYNIKTV

SEQ ID NO: 460750 - protein, 323 aa, unidentified
MQGQKSPERRAQPGVYVGVDVCKDWLDVYLHPIGQKLRVSNTTEGLKALKRRIAELPVALVVMEATGKFHRQAHRTLHAAGFAVAVVNPLRARLFAEAVGQLAKTDRLDARVLALMGQTLEPNAIAPAPEALEALQELARARSAAKADQTALSNQRGASQTAFLKAELGRRLKTLAGHIARLDAEIERRLAADPALKRRFDILLTIPGVGPVAAVALVVGLPELGACSAKAASLLAGLAPLACDSGDKAGERHIKGGRAFVRTGLYLAALAAARFNPQLSDDYNRLRDAGKKAKVAITAIMRKLVVLANVLIKEDRPWKPIHA

SEQ ID NO: 460751 - protein, 312 aa, unidentified
MTSEKFVGIDVSKSWLDVQVHEDGQAWKVENDLDGFAKLIVRMKMVGPALIVFEATGGYERHCVKALSEAGLAVAVVNPTRVRRFAEALGVLAKTDKIDARVIAHYASVVRPPAKSRQTPLEEQLVAYVERRRQLMVEITGEKNRLSTSPDMMRADIEEHIAWIDEHVKKLDAQIQTCIAQKAEWKERAEIIDSVPGVGPVTASTLVAEMPELGLLNRQEIAALAGVAPFNKDSGPKKGKRKTSGGREGIRRTMFMATLSAVRCNPVIRRFYESLRKRGKEKKVALIACMRKMLVMINVMVRDGKHWRYLPA

SEQ ID NO: 460752 - protein, 391 aa, unidentified
MIYVGIDVAKDKHDCFITNSEGEVLFPVFTIQNNRNGFDDLFSKIQSISSDASNIKVGLEATGHYSYNLLGYLINKGLHTFVINPLHTNLYRKSLSLRKTKTDKVDARTIAMMLMSDVNLKSYSDTSYHNEELKSLTRYRFDKVQERAQLKQSVSRLVNILFPELEKLVPSLHLASVYTLLSELPSAREIGSCHLTHLTKLLENASKGRYSREKAIEIREAARVSIGSNMPAKSLELRHTLRLIGELDSEITEIESEIKRIMDQISSPILTIPGIGYRMGAMILAEIGDFSRFDSPDKILAYAGASPSTYQSGQLESSYSHMEKRGSRYLRYALINAAKYVCHWDETFGAYLQKKLSEGKHYNVAITHATKKLVRLIYAIEKSGKPYIKAT

SEQ ID NO: 460753 - protein, 410 aa, unidentified
MDMIYRCCAGLDLHLKSIQAHVRRRNPDGTVASVAQRFGTTTSQILALGDWLASHQVEKVAMEATGVYWKPVWNLLEDRFSLMLVNAQHFRNVPGRKTDVSDAAWLAQLLQCGLLRDSFVPPRAQRELRDLARQRTALVEDKCRVVNRIQKTLEDANIKLSSVASDVMGLSGRHMIQAMIAGEDDPAVLADLALNRLRQKLPELREALKGGVREHHRFMLKQLMAQVEMLEGQIAAFEARIESLMTEDQEKIDRLKGIPGVDDRAARLIIAEIGTDMSRFPSADHLCSWAGVCPGNNESAGKRKTGRTRRGNRWLRRVLNQAAWASSMKKGSYFKAQHARIARRRGLKRATMAVSRSLLTTIYHMLKTGSIYKDLGASFFDQIKPQRVIHGIIKRLDSLGFNVQLTPKTA

SEQ ID NO: 460754 - protein, 417 aa, unidentified
MKLLFIGDDWAEGHHDVAAQDDAGKTLARRRLPEGADGIARFHEMVGSCRGEDAEPDPARVIVVIETDRGPWVKALAAAGYRVYPANPGQAARHKETVANPGKKDDFFDAGCLADMGRTRRHQMRELAAGSDVAEAVKIAARAHQKLVRERTRHLLRMRPALREYFPAALEAYADLTLAGKDALELLAKAPNPESAARLTVTQVTAALKRAGRRGDLAQRARDIQAALRAPHLAQPDVTAEAHAASVQAAAAVITALNEQVKIMEAKVSGLFRRHPDAGLYLSQPGIGDITGARIPGEFGDAPGRYATAKARKNYAGTSPLTIQSGKKKTVHARYIRNRHLIDALPAQALTALSVSPGARGSYDDLRARETGHDDAMRRVASRLAGILHGCLKTGREYDEATAWSHRAGNPEATKAA

SEQ ID NO: 460755 - protein, 323 aa, unidentified
MKENKPMTEETVCIGVDIAKSTLDVAASNFKSTQQFANNDDGISRAVCFIAGLKPAGIILEATGGLEMPLAAALQAACLPVVIINPRQVRDFARATGILAKTDTIDARVLALFGVRINPEIRALPDKQAREMGCLLTRRRQLVEMVTAEHNRLLQADEDVSPNIQAHINWLEKALLEINEDVDNRIKSSPSWHEKDTILKSVPGVGKITSSTLLIELPELGKLNRHKIAALAGVAPLNRDSGTLRGKRTVWGGRAKLRAVLYMAALVASRHNPVIADFYQRLLNAGKAKKVALVACMRKLLIILNAMMRTMTVWHTQTVSLEA

SEQ ID NO: 460756 - protein, 347 aa, unidentified
MITIGVDFHRRTSSYSVLDPYGRQIQRCKMENTKENIRTLIKNIPGPKQLAMEATRNWGLYHDCVIDLVDQFYLGHPKKMKAITESETKNDQKDAELIARMSYSGFLPQAHVSSLNTRHLRSLLRFRHFLVGQRKSIRNQLQTLLDRNLWPNERPKSFKNPFCQRGIQWLEGLHLPERERFILNQCLNSFQQLTQRISELQDFITAQTLDLPGLSFIRSVPGFRRSQINCFIVLTEIDSIHRFRKARGLAHYAGLIPREHSSGDQHRTGRLVKEANMFLRTAFIESTFAAIRADKELKKYYKSVKERSGSSAAIIATARKLAYAIYYVLKEQRPYRSYVFNPSAAAY

SEQ ID NO: 460757 - protein, 370 aa, unidentified
MSVSKKLWVGLDVGVDTMTICVLNAAGEPVREDTIPSNAKALDEVLRPFRRSNVANIGMEAGSTSIKLTRALRKMKYSVSVFECRQVSAFLGIKRNKTDKNDARCIAEVARSGPGAVSEVYVKSTECQHIRSMLMMRQRFIRMRVAGELAIGSLFRLNGGKLKRCHSADGFRRTARAEIARLKKDQRTDLSGEVDPMLTVCAQMRDHVEALDEKLAALAKESDLCRRFMEIPGVGPITALSFFSAIEDPFRFKRNADVGAYFGLVPRVRQSGASVARLRISKMGNTLTRYHLNNAAAVHLRSNSVCSSIKLWGESVGERRGGLRARTAVARKLAVVMIALWKNNARFDPKMPPSVPAIGHDGFLREAAGP

SEQ ID NO: 460758 - protein, 336 aa, unidentified
MNFVGIDLHKKTITVCVANQERTIVQRKTWACSDTEAIRCFFAGLRPFRAVVEATASYEWLWQLLEPLAERLVLAHPKKLRLISESARKSDKLDAQILAEFLALDLIPEAYRPTPRQRQHRALVRQRYFLGRHITAVKNKIRHVLAAYNADRRDLFSDRGQEYLAGVAVSDADRFVVEQLLASWQHLEKQRGALDRQLRAFAKKAPAAEQEARAVLGSIPEVGPVTVDIVLSELGDVQRFRSAKKVAAYAGLAPGQRESAGRCKELGISKEGSALLRWALVEAAWRVVRKTGRWRTTLETLARRRGRKKAIVAVARRLLGVMVALLRTGQRYRLAA

SEQ ID NO: 460759 - protein, 356 aa, unidentified
MQLTARPGAKGESVANTREWYLGIDWGGETHQFCLIDAEGHVRGERAVPHTAVAVHEALRWVRTLTRAAAHEIAVGIETPHGVLVDTLLEQGFLVFAINPKQLDRFRDRFSASGAKDDRRDARVAADALRTDRRAFRAVRLDDPAIIQLRELSRMLDELQVDERRLANRLREQLARVHAAWLTLSPAADERWLWTILRDTPQPQAWSQVPRRRITLALRTHRIRRLTADDVVTILREPRLPVAPGVTDAVAIRIAALVPQLLVIHEQRVTAEREIDRRLEQLATAAATDGELREHRDVEILRSLPGVGRTVTATMLTEAAEPMATRDYLMLRTYAGAAPVTKRSGKHLLRPHALWL

SEQ ID NO: 460760 - protein, 356 aa, unidentified
MNVYTGTHPYYCGIDLHARFMYLCILDCNGEIVYHKNRPCTPESFVQAIAPFQEGLVVGVECIFCWYWIADLCEREGIAFILGHAFYMKSIHGVKTKNDRIDSLKIARLMRGGNFPIAYVYPPGMRATRDLMRRRIHFVRKRAELLGHIQNTTSQYNLPPLGTLSKPHHRRDKDIVGHFPDPVVKLMVEADLKLIDHYDPLIKDLDAQILRLAKAHDPTSLHLLKSIKGVGDVLALTMLYEIHDIGRFPSRGDFCSYARLVKGQKSSNGKNYGTTGGRIGNAHLRWAFSEAALLYLRGNDQAERYYNRLISRHGKGKALTIVAKRLGIAVYYMLKRREPFNEHKFLNKSMIPSKNL

SEQ ID NO: 460761 - protein, 346 aa, unidentified
MNKITRIGLDIAKNIFVLYAVNAHGKTVKRQTLSRSKVLSFFAQTEPCLVGIESCASSQHWAREIRQFGHTVKLMNPKFVVPYRKSGKNDTNDAEAICEAVGRPNMRFVSVKSIEQQAVCALHTGRQFLVVQRTSLINHCRGILAEFGIIMPLGADKVRRLFAEILDDEQSTVPLLLKDLLQQHLQDLARNEQRIESIDKQLAEWAKTNQQATTLLQMLGVGVITATAFAAGVCDPKLFENGRQFSAWIGLVPRQYSSGGKNKLGSITKTGDVYLRTMLAQGARSIVFNAKKKNDPFSLWIQRLLERAGMNKTVIAVAAKQARIMWAIMAKNQDYQPERICSPLSA

SEQ ID NO: 460762 - protein, 393 aa, unidentified
MICVGIDVAKDKHDCFILNSEGEVLADVFTIPNNAEGFDTLLQTIRRCARPEDKIKVGLEATGHYSYNILGFLLDNGLNTYVINPLHTNLYRKSLSLRKTKTDRVDARTIAAMLMSDVDLKSYTDTAYHNEELKSLTRYRFDKVRERAKLKQSVSRLVTILFPELEKLVPTLHMASVYALLGEFPGAKQVAGAHLTHLKAVLHDSSKGRYGRDMATTLRDAARCSVGSVMLAKSLELQHTIRLIRELDAEIEDIEAAIQSMMEEIHSPITTIPGIGVRMGAMILAEIGDFSRFDSPDKILAYAGMSPSTYQSGQLSLSGAYSHMEKRGSRYLRYALYNATKYVCLWDPVFAAYLAKKRTEGKHYNVALSHAAKKLVRLIYAMEKSQQPYNTAA

SEQ ID NO: 460763 - protein, 414 aa, unidentified
MSPPLLVGVDPHRKTNTVSTMDPAGRETGERFTVQNNRPGTEAFVREVAQRALVGDFDAIHIAAEATGWYWWHFFQTLDQDPLLNQWPLSLYPFNPRLTRNYKKTFVDLDHEDPVDAFVVADRLRIGRDLPAPFHYEERYFPVRVLTRYRYHLVHQLAREKSYCLAILYLKYSEYSRKDKKPFSDLFGATSRAVIQEFASIEEIAALPFDELVEFIDRTGKRRFPDPADNARKLQQVVRDSYLLPQALQQPVNLILALSLRQITVLEGLEKRINTAIAEGMSAIYHSLDTIPGFGPVFSGGIVTEIGDVARFAYDQAKVAKYAGLKWRKTQSGEFQAEETRLTRTGNRYLRYYLCEAANRVRQCDPEYRAYYDRKFHEVRKHQHKRAIVLTARKLVRLVVRLLTTNEPYRPRRL

SEQ ID NO: 460764 - protein, 410 aa, unidentified
MQTLVQRGCGLDVHQATVVACLLIVLESGKIHKQVRTFGTTTRDLVGLREWLRSEGCTHVAMESTGVYWKPVYAILEGAFEIVVANAQHVKKVPGRKTDVKDAEWIADLLCHGLLRASFVPPKPIRELRDLTRYRRKLVESRSAERNRLLKVLETANIKLASVVSDVFGASGRLMLLALAEGIDTAQEMAQLAKKQLRKKIPELQLALEGKMEEHHRFLLCVQLHRLGAVEKDLAIVEQRIQEKLKPYAAEVTLLDEIPGVDTALAGAIIAELGADMRVFENVSQLASWAGVCPGNNESAGKRRNSRIPKGNVYLKTALVEAANAAAKAKGTYLRDKFYRLKARRGYKRAAVAIAHKILVAIYHMLSHRVCYNELGDLYLDKLNKHHLTRNLVHRLERLGYTVTLEQKAA

SEQ ID NO: 460765 - protein, 358 aa, unidentified
MRIIGVDLHTRQQTIAMWDTETRELIERTLTHDGDEVRKFYSALPGQVLVGIEATGSMHWFLELLEKLEIDHQVGHPSEIRKAETRKQKHDRRDAALLLKLQIENRFPSIWMPSTELRDLRTLLMHRHQWVRMRTRVQNTLQAIAIGRGLRRGKALWTQTGQHAIASLPLPPHTAYRRTELQGLYHQLRAQIDELDQRVADQALQRPGAKRLMSHPGVGPVTALATDVFLGAPARFADGKAVVSYVGMIPSEYSSGGQQRLGGLSKQGNPFLRFLWCEAAVHAVRKDPELQRFYRRKLAQKGLGKARVAAARKLGIRLWIMLRDQIDYQEFCRRGQMRQKNGGACAGMPEVGHSPAKQ

SEQ ID NO: 460766 - protein, 335 aa, unidentified
MSKREAGKRWYVGIDVSARELVVALSDGGEPTMERVGNDAAGHQQLQSRLRRLPAPVTICLEASGTYSLDVALALARPTAGWQLCLVNPRLARRFAESLGMRSKTDPVDARVLAQYAARMQPAPWQPPSAAGLRLRTITRTIAALVRQCVQHKNRQHALSASAALPALLVRELQAQVAFVDKRIRHLRRQALRLIERQPELLRCWRHLQTIPGVGQASGLAILGELAVLPATLDERQWVAHSGLDPKQHRSGTSVEQKTRISKAGNRYLRAALYMPALVSVQHDPWLGGFYQRLVARGKAKLQALVAVMRKLLHAAWGMFHHDQSYDGAKLCPQP

SEQ ID NO: 460767 - protein, 399 aa, unidentified
MAEGVVAGIDWASEVHVACVLGGDGGVAGRFSFTHDAAAIRAMVRRLRSAGVAGVAIERGDGPVVEELLAAGLAVFVVPSRQIKGLRTRYGSAGNKDDRFDAYVLADTLRTDGHRWKPLRPDTEATRALRALCRSRKDLVETRVQVLAQLRANLDLAFPGAIGLFTKPASAISLAFLRRFPTAVKAAWLSPARLASWLRSAGYTGGVSATVLHARLIAAAPGLAGAEGEARGQITLAFAGMTAALNEQIRVLDAEIGRLFAVHPDQHIFASLPRSGTIRAATLLAEIGDCRQRFPTDDALAALAGACPSTRQSGKRSQAVFRWSCSKKLRAAVMDFANGSRMSDPWAAAIYAAATARGCRHPHAIRILARAWLRIIWRCWQDGTAFDPALHRGRHAAAA

SEQ ID NO: 460768 - protein, 460 aa, unidentified
MDKRRPRKGEQEMPHFQHLNPYAAGIDVGSRSHFVAVPEAADEKPVREFSCFTGDLHRLADWLHTCGIKTVAMESTGIYWIPVFEILECRGFEVKLVNAHHVKNVPGRKTDVSDCQWLQRLHSYGLLEGAFRPPDQVCVLRSYIRQRMNLVQYAATHIQHMQKALGQMNLLLHNVVTDVTGVTGMRIIKAILAGEREPLVLASFRDPRCKSSVETIARSLEGHYKEEHLFGLKQAVELYEFYQAKIADCDRQIEDQLAAFDDRSDGTEAGVQPRSGKGKPRGNEPGFDVQADLYRMTGVDLTRIDGIDAYTALKVVSEVGTDMSHWKSPKQFASWLGLCPGNKVSGGKRLRGKTKTVASRAATALRMAANGLHRSKSALGAYLRRQKARLGAPKAITATAHKLARLIYSMLKHGTQYVDAGQDYYEQRYRTRVVENLKRRASELGFELVKMTLCTETRNQ

SEQ ID NO: 460769 - protein, 333 aa, unidentified
MHRAGLAFASMSQNNNNPIFYAGIDIAKATLQLRVGGASSSLANDPKGHARILKLLAAAEAARPGYKIHVILEATGGYEAALAEALHGAGLRLSVIQPSRVRHFANAKNKHAKTDPIDAVVLVAFGQAIQPPPTPPPSAAQTHLVKLVGRRAQLLDTRTAELNRAAHYSDKLLRTQSRQLLALLTRQIAQCDRAIALQLAADKAMKARAERVQQVPGIGPVVAAVLQAQMPELGSLSQGEAAALAGLAPYNRDSGPCKGTRRICGGRAPVRCALYMAALSAVRHDAILRDFYTRLCAAGKKPLVALTAAMRKLVVLLNHMLRKPNFKLALRPN

SEQ ID NO: 460770 - protein, 345 aa, unidentified
MLYVGVDGHKATSQVTVMDSGGNILRRKRIVSSPIAVRQALTGYDERLKAVLEASYCWAPMYDWLDEVADEVVLAHPLKVRAIAEARIKTDKIDSETLAHLLRADLIPRAHASSQDVRARRRVLRQRMFLIRLQTMVKNRIRALLVQHISEQPKVSDLFGKCGREWLRRVQLPDPDGRLLKEDLGLLEFLQQEISKTDRLIAELAQGDEAVQFLASVPGIGVFLSVLIRWEVDIIERFRQAKKFASYTGLVPSTYASGNRIVHGRLTKQGNKWLRWAFVEAVSPAVRSSAYLHSYYQRIKLRRGVKDARIATARKIAELAWTVWTERRGYQERLPKSLRTATEER

SEQ ID NO: 460771 - protein, 349 aa, unidentified
MNTHITIGMDLGDRDHIIVVFDANGKEVQVSKVNNTKSAIMRYFSAYKNATVAIEAGTHSPWISAVLKEMGHKVYVGNPRKLRLIWDCDDKSDERDARMLALVCRVEPRLLWPIKHRSQKAHNDLNIIKSRSVLIKSRTALINHVRGIVKCCGERLPSCSAQSFAKRCRELIPEQLNSAVEPVINMIEQLNAQLRQLDRTIDQLCQSHYPEAQKLQTVTGVGPLTSLAYALTIEDPNRFSKSRQVGAFLGLTPRRDQSGLSDKQLPITKAGNRYLRQLLVSCAQYILGPFGPDSDLKRFGLSIAARGGKNAKKRAVVAVARKLAVLLHRIWLSGEDYQPFYQRRLSRAA

SEQ ID NO: 460772 - protein, 368 aa, unidentified
MPRMAEQALPVTGGVDTHADVHVAAVVDQVGRVLGTEAFPATAAGYQAALAWMSAHGELAKAGVEGTGSYGAGLARYLAACGVEVVEVIRPNRQARRQRGKSDTADAVAAALAALNGEAAGVPKSRDGAVESIRALRVARAGAVKARTQAGNQLRDLILTAPEQVRQQLAGLSRERQVEAAARFRLRDLADPAEGVRAAIGSVARRHHELTAEIARLDAALKELLTHAAPADFLAKQGVATQVASTLLATTGDNPGRVRKEASFAALCGASPVDASSGKQIRHRLNRGGDRQANSALWTIAMTRLAHDPRTRAYMARRTAEGKTKKEVIRCLKRYIAREIYKALCRPRQPGSASAPQVKQHVPARLLT

SEQ ID NO: 460773 - protein, 387 aa, unidentified
MYFVGIDISKFKHDCAIINELGEVITSSWSFNNDCEGLSLFRDLLNALGGEKKIGFESTGHYGHNLKMFLEANNFSFMEFNPLLISRFVRGKSLRNTKTDALDAQSIAQYLMTVEYKPYPPSFYHMDQLKSLTRFRDSLVRQHSRQLVELTNILDKVFPEFKPFFDGKFSVTALYILAHYQSPEKIANMNAKSYEVLRKKSRGRFTMVKFAQLKALAKNTVGRSDDYLLKQMEITIDIENQLDAKIDEIESQISECVRGLNPPILTIPGIGELTAAVILSEYGDINKFENPAQLLSFAGLEPGYYQSGQAEHNGHMVKHGSSHLRYALMNACLPLITFEPVFAEYYAKKRAEGKPHRVALTHVAKKLLRVIYTLQTRNIPYDATLIR

SEQ ID NO: 460774 - protein, 433 aa, unidentified
MKQIVSVGIDVSKGKSTVCAMIHPNTIIKESFEVLHTVEEMSMLADYIGSLDGEIRIVMESTGHYHLPVAQFLYQKGFFVCVENAYIIRQFSRIMLHGAKTDPLDAKKLAKYGLAYWSELKPYKFHPSCYTELSLLSKQYQTYIKLLIAAKQNVIHLMDEMLPGFKEALDTASSVQFSKVKYVDFAKEFYHVDMIKSMGKEIFRENYKQWCKEKGYRFQSEKADELFHLAEDGIPTLPTEFPSTRLCMEVATEQVSQLGYALEQILSQMQNLAKTLPEYQTIRQMGGMGEKLCVRFIADIGDVRRFHNGKALVAYAGIDAPPYQSGQYTGTKRRISKRGNSALRKTGYEVMKSLKSHPPKTDTRVYDFIIKKENEGKSKKFPQITVLSRSWWDYYHNPKKHRSSYKTYNIPKQWNKVYNEILKLENIPFLIPE

SEQ ID NO: 460775 - protein, 415 aa, unidentified
MALKIVYKICCGIDVHKTFVVACIASTDNKGITSYESHRFSTYTSGLKDLLQWLLTRNCKDVCMESTGKYWIPVYNILESDCSIVLAHPKYVKAIRGKKTDKKDAKWIADLFKHDLVAGSFMPPADIRQLRDLMRYRFKLTCFKSSEKNRLQNCLTVSNIQLGNVVSDTFGKSAQAILDKLLENPADTSFDLEPLVYKSLKKKLPQLRDAIDGFITPEQAGKLKIIKDHYENLGSRKAELEELILALAAPYQQELTILQTAPGISSEFTAIGIISEIGTNMEAFPSAKHLCSWAGLTPTNNESAGKKKSVRVSKAGCYIKPLLIQCANAVVTSKKHPEMRNRYLRLRKRRGHKKAIIAIARMLLTALYHMLKNGENYNAELYRKSDLPPVDREITVEQALIIARNQGYKIKSATA

SEQ ID NO: 460776 - protein, 351 aa, unidentified
MESITIGMDLGDKNNTVCVLDSQGNIVHKEHIENTEESILKCMKKLSNATVAIEAGTHSPWISRLLTGIGQTVLVGNPRKLRSIWQSEKKDDMRDAEMLARIARFDPDLLYPIQHKSKEAQADMSLLHTREALIKQRSSLINHIRGTVKSFGTRIADCSTESFHKQALSQIPEELQSTLCHVLKIIETLTQQIKIFDKKIEVISQERYPETELLREIKGVGPITALAYILTLKDPHKFARSRQVGSYIGLVPRRDQSGETDKQLHITKAGSPYLRKLLVNCAQYILGHFGEDCDLRRFGLRIASRGGKNAKRRAVVAVARKLSVLMHRLWKYGEIYDPLYMDNLKKIKKAA

SEQ ID NO: 460777 - protein, 329 aa, unidentified
MKVTSIMGMDVSKKTLDCHLFVQQKTLSVVSNDVKGFRAINRWLKKEVKNLNGLLVVMEYTGIYTYQVERFLEKQKIKFVKRPALDIKRSLGMVRGKSDKIDAKFISKYGWMRKEELQPMCVLSDTQLELQQLMSHRDKLVADHASYQSKLKELTTQMGKKINKLMVASMKEVMKMLTEQINETEKAIKELIKSDESLQVNYKLACSVMGIGFATAVHLLIATENFTRFSNVRKLICYCGVAPFEHSSGTSIKGKVRVSHLANKKLKSLLTMAAISAIQHDPELKAKYEQKIKEGKAKMCVINIIRAKLIERVFAVIKKQKPYELRLAA

SEQ ID NO: 460778 - protein, 340 aa, unidentified
MYYTGIDLHKKTSFITTIDARGKLVTRANLQNVEEDILAYFANLGDETKIVIESMASWYWLYDLLTGEGFEVVISNPVKTKAIASAKIKNDKLDSHMLAQLLRADLISTVHVSSLETRKLKELLRHRSRLVRDATRMKNRIHMLLMKNNLRSPFSDLFGVKGLRYLEEIDLPDYHRQQVETYLVLYEKLQEQIEPLTRTVRTLAKESHTAQLLMTIPGIGPITAMFILAEVDDISRFRSYRNLASYAGLVPSLDASAGKEKRGRITKQGSRYLRTALVEAAQAAARMQNCRLRAFFRRRIVKTGYQKAIVATAHKILQYAFYVWKNQTPYQETYPVCVTR

SEQ ID NO: 460779 - protein, 343 aa, unidentified
MYFIGIDVSTKESALCILDGNGKIVRETKLPSDPEIIARFIADTGLAIERIGLESGCTAAWLFAGLQRYGWPVICIDARHAAAALQAGFRNKNDRNDARGIADLMRVNKYRPVWVKSPEAQRQGRLLTARATLQSQLVALENTIRGLLRQEGIGLTDRRTAFEAAVREVIGEDRLLHAAVHPLLETRNAVLCQRAALDRQILLIVRADPVCRLLMTAPGVGALVSLAFKVAVDDPRRFSRSRNVGAYFGLTPREHSSGEVSYHGRISKMGDREVRRLLYVAASRMLRRDAALWCPLKAWAVRLAQRVGIRRARVALARKLAVVLHAMWSDGQVFQWRRSEASA

SEQ ID NO: 460780 - protein, 386 aa, unidentified
MRAVCGLDVHKDSVFLCILHDSGEIFENVYGVLTFQLEEMRRTMQSHGVTEVTMESTAVYWIPIWRVLEPHFHLKLVNPYFIKQLPGRKSDVKDAQWIAECTLKDLVRGSFVPSERIQQLRQYDRRIFDLDAEIVCKLSKLDAVMQRCNIRLSNYVSNTDTKSYKDVVRKLCEGVTDPEELIKEIFGRIINRHGRETILAALTGVVSEAEKDTMRQLRDELDLAEKHKQECQDKMLHICKTYYPEELRRLMTIPGIKERAATSLIAEIGVDMTKFQTAAHLASWSGLKPRNDVSNGKYKSRRITHGNVFLRKTIIECAWGASRTKDCFFSRFSYHQTQVRKKNKMKVLVAVARKLLIAVWHVLHDETDYKDFGADNDCDTSVGNNG

SEQ ID NO: 460781 - protein, 347 aa, unidentified
MRFYSKQHTHYCGIDLHTRTMYLCILNQAGAIVVHRNMRADPDSFLKAIAPFRENIVVAVECMFTWYWLADVCTREKMAFVLGHALYMKAIHGGKAKNDKIDAHKIAVLLRGGMIPQAYVYPAQMRSTRDLLRRRMHLMRQRAELLGPIQNTNYQYNLPDIGKNIGYKANREGVAERFPDASVQSNVALDLKLINAYDELLRKVELEIVRQAKDHDAQALHLLDSVPGIGKILSLVILYEVHDIRRFPRVQDFVSYCRLVKSKKESAGKTYGTSGNKIGNAHLKWAFSEAAVLFLKNNPVGQAYLARLEKKHDKGKALTILAHKLARAVYHMLWRKEAFDMKRFLNR

SEQ ID NO: 460782 - protein, 408 aa, unidentified
MKVLNRRCAGLDVHKDEVVACVRLAMRNKLSHEVRRFATTTRGLLELADWLEASGVTQVAMEATGVYWKPVWHMLEERFQLVLANAAHVHNVPGRESDVNDATWIADLMAHGLIRASFVPPAPIQELRDLTRTRKQLGREIVQHTQRIQKVLEDANIKLSSLITEVLGASGRRILKALIAGESDAGALAALGGPRLKCSRQELRDALEGRITSHHRFLVGQHLRMIEELEATVTAFDARIEAVLAPFRDAAERLMSLPGISDVAAQVILAEIGTDMSSFPTAGHLLSWAGLTPRLDESAGKRRSTRLKKGAPWLKPVLVQCAFAAARAKNTYLQAQFLRLKARRGPKKAAIAVAASILTAVYHMLRDGTFFRDLGPDHFARYDKTRAAMRLVRRIKDLGYDVEIKAAA

SEQ ID NO: 460783 - protein, 351 aa, unidentified
MNATRKAVVGVDTAKSVFQVYTVEQETGEVINKPIKRAQFLQWFANRVPCLVGMEACGGSQHWARKLQELGHEVKLMSGKMVKGFVCGNKNDAADARAIYMAAKQPEVRSVAVKTEGQQAVLAMHRIRQQLVKVRTAQINELRGLLGEYGEVFGLGRKAFDTGIQGALGRLAERLPGPLIDTLRDQWNELARLDDRIARIEASLLAWMRQERGARAISAIPGVGLLTATAAVAAIGDAKTFRSGLEFAAWIGLVPGQTGSGGKVRLLGMSKRGDTYLRTLLIHGARAVLRHAKTPSLWLQQLSQRRPPNVVIVALANKIARTIWAVLAHDRAYDKDHVSTRPYAAATWKAI

SEQ ID NO: 460784 - protein, 397 aa, unidentified
MWTLGIDIAKRKHVAALLDDTGQKVFKNFSFTNTMEGVNLLMTKVKQVGFSTENLLIGMEATGHYWMTLYHYLSNAGFQVRLINPLMTAARRNIGIRGTKTDSVDAELIANILREADPKFSAVPDDEVRQLRNLTRLRYECNQTFIAEKLRLVALLDLVFPEYAEHFSDIFGAASRELLAQYPTAEDIKKIDIRKLTRILKEASKGHMGREKAQRLKDAAKNSFSLSGTNLSFALEIKFLVQRMNILLEQIEELEKQIKKYMKENQKLLQTIPGIGPVWAPTILAEVLPVFHPNEKNGARKFVAAAGLDVRLNDSGDSRGNGKMSKRGSRYLRTAAIQAAEVAALVAKDPMFRSVYEKQKAKGKKHLVAISHVANKLLHVVFSVLKNQKPYEVRLSH

SEQ ID NO: 460785 - protein, 389 aa, unidentified
MLEENDAVTDAPIGANIFVSVEMSRSKWVVGIHVPPADKIALHTTACGDVDALLALVNRARAKLASEGGAPTVVVCYEAGYEGFWLYRRLTMLGIRVVVVDPASLLVDRRAKRAKTDRIDARGMVRALMAWARGERQVLSEVRVPTVEQDDVRRGLRERQRLVKERTAHGNRIKGLLKTQGIMDFDPRAVDAIARLDALVTGDGRPLGLCLKREITRELERLALAMRQIVLVEAERDAAVRDCDQQADPAVEPAQSAAMIALLNRLKGIGMNDATILTREAFWREFRNRREVGGWSGLAPAPWASGSVSRDQGITKAGPPMLRAHMIQMSWRWLFWQPDSDLTRWYRKRTEGATGRMRRIMVVALARKLLIALWRCATTGQIPRGAIVT

SEQ ID NO: 460786 - protein, 277 aa, unidentified
MKVNVVGVDIAKRVIQLHWFDAATGQSMSMQVKRGKFLEHFANREPSLVGMESCGGSQHWARELIKLGHEVKLMSARIVKAFVCGNKDDAADARAIWMAVQQPDVKAVVIKTEEQQAVLALHRMRQQLVKFRTAQVNNLRGLLTEYGEVMPQGRRGMQRDVPDVLGRLQVRLPALLIDTLREQYARLAELDTQIKQIEQRLSRWHRENEACKRIAAIPGVGLLSATAAIALIGDGKSFKSGREFAAWLGLVPRHTGTGGKIRLLGSANEGMSICVPC

SEQ ID NO: 460787 - protein, 338 aa, unidentified
MEWTVAIGVDTHKEVHVAVALDALGAELDSREIATTPAGYRCLLTWAQELGVPAFAVEGTGSYGAGLVRFLERAGVAVYECERPRRQERRRGKSDLIDAALAARRLLSGERLSIPRGGGRREDLRLLLLERRSAMQARTAALNQLSALLVTAPEHVRERLGALSGERLAQAAARLRPGPDVLNGVLRRLGKRVERLSKELAEAERALAVLLAEVAPDLLEECGVGPVCGAQLLVSSGDPNRMTSEASFAALAGTSPVDASSGKQRRHRLNRGGDRQLNWALHVIALQRIRHHPETSAYYERLLAAGKSTREARRCVKRALARHFYLRLREIPRLPLTT

SEQ ID NO: 460788 - protein, 384 aa, unidentified
MGNDLGYQSGTDEVVLAVSLELAARKWKVAVHDGRRERPAVHTVEQPQAAARLQAVLALIDAHRHSWSLPAGVRIVVCYEAGPDAFWIWRALQAQGIECYVLDPASIPVERHKRRAKTDRLDVIKLVINLRAWLRGERDRMHVVHVPSAQDEASRHLMRERGQLQKEVLQHLDRMRKLLATLGCWENVTPRSFADRLARDEVRCHDGTPLPPELRERLLRECERLVLATKQLAALEKTRQASVPAPSRARSDALARLKGIGEVGASRLALELYWRDFHNRREVGAGVGLVPQPYDSGESQTDQGISKQGNGRVRALLVEMAWTWLRYQPGSALTQWFNRRTQGTGPNRRARRIAIVAVARRLAIALWRYLKDGVIPDGAQLKPS

SEQ ID NO: 460789 - protein, 329 aa, unidentified
MIGATALEDPVVVLGVDVGKRFIDCVLLEDEEPVHKRFENTIEGFELLTAWLRREKVRKVHACMEATGGYGEELASHLLDHGHVVSIVNPMQIRAFGQSELSRTKTDKADAHLIARFCQKMTPPAWDAPSEGERRLRQLVRRRRALVEMRAQERTRSKGPGTENVRDSLLESISFLDEQIERLDQRIQDTINHDDDLRGKRNLIESIAGIGPTTSSTLLAETPHIKTFASHKALAAFAGVCPQERRSGTSVSSSRVTRIGNREIRRVLYMAALSALRCNPVIQAFADRLRTSGKRPMEINVAVMRKLVVLVYGVLKNGQPFDPQWGLDG

SEQ ID NO: 460790 - protein, 348 aa, unidentified
MTHFVGLDVSVKETSVCVVDDAGQVILEQKVATEPADIIAVLVSLSGICGRIGIEAGPLSQWLVNALTLADLPVICVETRHMKALLTAQQINKTDRNDARGIAQMMRVGLFKPVHVKTLVAQEQRMLLTSRKLLQRKLLDLESELRGTLRNFGLKVGIVGGGRYEARVRELVAGFPGLAAIAEPLLNVRRVMRQQLAVLHKMLLDTVRGDRVCRRLMTAPGVGAVVALTYRATIDQPQRFVHSRAVGAHVGLTPKRYQSGEVDYDGRVSKCGDALLRTMLYEAAHSLLIQSRKWSWLKAWGMRVAQRRGIRRAIVAVARRLAVVLHRMWVDGSEFRWSKDSATVPAVA

SEQ ID NO: 460791 - protein, 315 aa, unidentified
MDRNKSSTTIAGIDVGKRQLDAAVLGRAEQHRVANDAAGWEGLIAWLAERGVRRVGLEATAGYERGVRARLEAAGLEVVVHQPLEVKLFARLKRRRAKTDRLDAALIAAATAQVDTVRAAQDPRLAHLAERLTAYEQISDQAAQLKTFMEHVTLPDLAASLGEQIQSLARLKARLAREILAALKAWPDLLARWTLLRSLPGVGPLVAASLVIRMPELGALKRGQPASLLGVAPFDRQSGQWKGQSFIGGGRSRPRRMLYLAAIAAKRFDAAFKIFADRLLAAGKPPKVAIVAVMRKLVEAANLVLKRQQPWVRHA

SEQ ID NO: 460792 - protein, 315 aa, unidentified
MMRTQVFVGIDVSKAQLDVAFRPEGRVSVPNDEAGCAQVLERLRAVPPTLVVLEATGGLEIPLTGVLAAAGVPVVVVNPRQVRDFAKATGRLAKTDTLDAQTLAHFAQVMRPELRPLPDEQTQALAAILARRRQLVEMLTAEKNRLGSAPKPVRKSLRTHIAWLERELRHTDSNLAHAIRESPVWREKDALLRSTPGVGPVMTTTLLANLPELGTLTGKQIAALAGVAPLNRDSGTWRGKRTVWGGRAQIRATLYMAALVAARFNPVIRAFYQRLCATGKAKKVALTACMRKLLIILNAMLKHRTPWRTELVQCA

SEQ ID NO: 460793 - protein, 340 aa, unidentified
MNSMQIGVDLAKSVFDVAVSDAPGRVRERRRLSRTALSQFFANRSPVQVVMEACGSAHHWGREFQRLGHAVALLHPADVARYRDGNKTDQADAKALLEAMRNEALSPVPVKSLEQQAVSALHRLRQGYLQTRTARINALRGHLREFGVVIPVGASRVLPEAAAALASEAVPVLLHGSLLVLLDEIRALEARAEAVRKELSRLAEHMPGAQLLLTVPGVGVLTATALVALVGDIRRFRSSRDFAAYLGLTPREHSTGQTRRLGTITKRGDSYVRMLLIHGARSALRAGRVTQHPDDLRTWACAVAARKGYNVAAVALANKLARVCWRVWRDQRPFQRREAA

SEQ ID NO: 460794 - protein, 343 aa, unidentified
MAQQMIIGIDLAQHVFQVCMVTPTGTLKTNTAVARGKLFALMARQPPALIFMEACGGAHDWARRFGALGHEVRFLAPQYVTPFRRGQKNDPHDALALAEAGQRPNIPTVPIKTVEQQDLQGLHRVRERLVKHRTAVVNQVRGLLLEYGIVIPQGIARLRKRLPRVLEEADNGLSFLMRDLLQSLQSELSALDARVTEVTGQLARLSHETEACQRLQEMEGIGPLSATALVAALGNGHDFQTGRQVAAWLGLVPRQHSSGGTTRLGSITKGGNSSVRRLLIHGARSVISHVRDKPDAKSAWIRQLVTRLGVNKACVAVAHKMARVAWALLHTGEHYRKPAVLSI

SEQ ID NO: 460795 - protein, 414 aa, unidentified
MDIVHDRCCGLDIHKKTVVACLIAPGPDGKPKKEIRSFGTMTGDLLGMADWLQRAGCTHVAMESTGVYWKPIYNVLEDRFNLLLANTKHLKMVPGRKTDVKDCAWIAELLRVGLVQPSFVPERAERESRELTRYRSSLVRERTAEINRLQKTLEGANIKLASVASEVMGKSGRAMLEALVAGTTDPTVLADLALGQLRRKIPELQRALVGRFGAHQCFLVVEQLAHIDELEQRIERVSQEIRERMRPFETEIALLDTIPGVNRWTAEVLLAEIGFDLSRFPSAGHLASWAGLCPGNRESAGKRKSGRTRKGSPWLRVAVTESAHASGRGKTYLAAQLHRLIPRIGLKKAAIAVGHSILVIVYHVLTRHQPFHDLGALYFDHRHRASLEQRLIHRLEALGNTVTIERTQAPASAA

SEQ ID NO: 460796 - protein, 471 aa, unidentified
MAKAARKPASRPSRLASARPRFSKRYPRLEDLPVVHRHAAGIDLGGDVSHFVALEVGDEVEVREFGGMTPDLHSLVAYLTTHGVTTVAMEATGVYWMPVYDLLEAAGFEVYLVNPSHVKNVPGRRKDDKLDCRWLQKLHKYGLLSASFRPGEEIRPLRSFYRQRTRLVQLCADETRRMQKALDVMNVRIHKTISDLCGVTGLRIVRAIVAGERDPAVLAAMREPTCQCREEELRQALTGHYQADQVFALRQALARYDFFVAQLAAVDQEIEAYLTALIPLPEAEITAKVTAATQPRPKGTHVPAYNVAAYVELFTGHDATVLPGIGPQIALGLLAELGRDMAKWKTQRHFGSYLALAPQPKISGGKVLATRTRHGSHPAAVLFRQAAAAVIRSDSALGAFYRRLAVRIGTAKALTATAYKIARMYYHLMREGRAYVELGEHVYAERYRRQQIAALEKRAKRLGFQVTPVAA

SEQ ID NO: 460797 - protein, 403 aa, unidentified
MIFVGNDWAQDHHDIHVMNTEGKKLAVRRFPEGVAGVSDFHALIAQHAQDPAEVVVGIETDHGLWVASLVAAGYRVYAVNPKAVARYRDRHHVGGGKSDAGDAKVLADLVRTDAHNHRVVAGDSDEVHAVKVLARAQQSLVWSRNREANRLRNALREFYPAALVVFEDLHGRDALAVLGRAPDPVTAARLTLYQVKAVLRAGGRRRNLDATAAKIQAVLRTEQLHAPAAVAAAYAAVVKAQIGVITALNTQLAQLETQLESSFEEHPDADIILSLPGLGDTLGARVLGEFGDDPERFADAKSRRNYAGTSPLTVASGKKRAVLARHARNHRLYDAIDQWAFCSLTTSPGARTLYDQRRAAGDTHHQALRALGNRWVGILHGCLKHRTTYNEHTAWGHRQPAAA

SEQ ID NO: 460798 - protein, 325 aa, unidentified
MSESIEVTSEVVAPSTFIGIDVSKEKLDVCVMPGGELHAFTNDTTGHAKLVTLAQSLDNLLLVIESTGGYERPALFALQDARLAVALVNPRQVRDFAKGIGQLAKTDALDAAVLAEFARLVSPSPTEKTTEKQRELEAIVNRRRQLLEVRVAEQNRAGQTTDNFIQKTLGRMIKTIEREIKTIEDRIAKLLESDDQWKAQLELLLSMPGVGKTVAATLVAELPELGKLNRQEIAALVGVAPFAKDSGTMRGRRSTWGGRRKVRSVLYMAALTARRWNPVIKDFAQRLTIAGKSFKAIQVACIRKLLVILNTMVKNNTPWKNIQKN

SEQ ID NO: 460799 - protein, 343 aa, unidentified
MTSNNKTPTTGLTIGLDLGDRRHAVCVLNTRGHIIAEETLPNTRASLEQLSNRYPGATLAMETGTHSPWVSRLFEARGHTVYVANARKVRAISQSVTKSDEEDARMLARLCRADPQLLSPIKHRSESCQRDLVKLKAREALVRARVDLMNSTRFLLKSLGLTVPSQVKAAAFVRKLRPMLDSATTALVEPLLHSIDALSVQVQQLDKALEQLASIHYPDTERLRQISGVGPITALCYILTLESPGRFAHTRDVGAYLGLVPRRDQSGATDKALPITKAGDTHLRCLLVNCAHYILGPFGSPSALREAGLRIAAKGGRPAKKRAVIATARKLAVTMMALWKNQN

SEQ ID NO: 460800 - protein, 412 aa, unidentified
MQVLYPCCCGIDVHAKTAVVCLIKQGKRQTRTFSTMTDDLLRLSDWLTVEGCTHVAIESTGVYWKPVFNILESVLTVILVNARDAKAVPGRKTDVRDCEWLADLLRHGLLRASFIPPLEIRELRELTRYRQTLIKEHTAVANRIQKLIESANIKLGQVATDVLGVSGRLMLRALADGEEDIERLVELARGSLKEKKSELRRALTSRLTPAQRFVLNELLTRLGELEAATARVGEQIMKEVAESADPFVPEAVKLLQTIPGIGLRVAEVIISEIGVDMTRFPTDAHLASWAGVCPGNNESAGKRRSGQTTKGSPYLRAAITQAAWAASHTKHTYLAAQYHRLIKRMGKNKALVAVAHSLLVIVYHVLAQRADYRELGGDYFDRQHQQTQQQRLVKRLEAMGLKVTVEALPEAA

SEQ ID NO: 460801 - protein, 335 aa, unidentified
MYLGIDHHKHYSQVVVMDKDGITHLNRKINNDKESIETLKRRFNQPIKAVIEAGHNWGKMYDLLEESNIATEVAHPLKVRAIAEARIKTDSIDAKTLAHLLRTDLIPSVHVPSKEVREQKNLLRYRLWLVRLQTMTKNRIYNVLDRNSIDTKGLNIFAKKTREQIKNLSLKDIDKKLLKDHYDILEVIEQHIKDTESWIDSSLKDNQYIAILDSMPGFAKILSALAALEIDNVERFAHPGKFASYCGLIPSTYSSGGKTYHGRLICTCNSYLKYAFIEAAWASIRSSTYCRSCYEKIKESKGSNVAIVSLARRLSQIAYKCLKENHKYEERPYLQ

SEQ ID NO: 460802 - protein, 344 aa, unidentified
MSVVTIGLDLAKSVFQVHGVDAAGHTVLRRRLGRADLLPFFAKQPPCVIGMEACSSAHHWARELSRLGHLVRLIPPQYVKPYVKRNKTDAADAEAICEAVGRPNMRFVPIKTIEQQSILALHRVRALLVRQRTSAINAMRGLLSEFGIVAAKGIRRVEELRQRMSRTEPALLPDETREAIGVLVDHLDGLRERIDKIEARILAWHKASEASRRLASAPGVGPLTATAIVAAVGDGRQFKSARHFAAWLGLTPRIQASGGKEHIGRISKGGDRYLRTMLIHGARAVVGTAFRTDVRPKPWLLELLRRRPVNVAATAVAHKTARSLWAMLTRAELYRPRAAVMVAA

SEQ ID NO: 460803 - protein, 346 aa, unidentified
MMTQILKQVIGIDVAMDELVCVAAQLDIDQRVQILEKKSFTNNHEGFTQLVEWKATCFKEISYPLGSASKVWFVMEATGVYNQHLAYYLVGAGEEVSIQLANRVKNFSRSLNVKSKTDLMDAEVIAKMGLERKMEAWNPPSDKMRQIRSLCREYSERIRKRAKLRNQLHALGKAYGTSPKIMRRYKREEAFVTELIEEIEVELKMIVQEDDLLRDKMKKLKTIPGLGFMTLIILIGETQGFSLIENGKQLASYAGFDVVEKQSGRSRGKSYISKKGNRFIRQALYMPALAASRCNQPMKDFYQGLAERKPAKRIAVTAVARKLLILTYTLWKNDTVFDPNYGVKAA

SEQ ID NO: 460804 - protein, 425 aa, unidentified
MYCKQNQKINQVKECTLVVGIDIGSTTHYARAFDWRGIELGNVFKFSNSLEGFQSLSGWMQRIMKKTEKSEVMVGIEPTGHYWFDLGAYLENGGILLVMVNPYAVKQTKELDDNSQSKNDRKDPKVIAKLVTEGRYSLPYTPQGVYADLRVMVTNRQRLIREITQIKNRFARWFAIYFPEYKEVFGDYESQSSMLVLRRACTPEKIIELGIAGINQIWRDAKLRAVGIKRATTLYETAQHSIGLKNGRNAAEYEMKLLLQDYDYKQAQYESVMEELEHLCRQIPESEQMLAIKGIGLITVAGFLAEVGDLRRFESPRQIQKLAGLSLKENSSGKHKGQTTISKRGRSRLRAILFNAVIPLIATNAEFRELHRYYTTRTVNPLKKKQSVIAISCKLIRVFYAILTKGAIYDGEKMLSDIHRNPQIA

SEQ ID NO: 460805 - protein, 347 aa, unidentified
MQYYNKQHNYYCGIDLHARTMYLCILDSKGDVKLHKNLKTSPDALKKAIEPYLDDLVIGVECMFSWYWVADFCKDNNIKFILGHALYMKAIHGGKAKNDKIDSYKIVSLIRGGTFPQAFVYPRNMRATRDLLRRRMHLMRKRAELLSHVHNTNTQYNNDRICKNLRYKSNRKLVEGRFADPSAQKNVDLDIELINYYDKLLVEIECYIQKHAKINDYQSYMLLKSVPGIGKIISLVLLYEIYDIKRFPRVQDFASYARLVKCRAESAGKSYGTSGAKIGNAHLKWAFSEAAVIFLRGNPKAKAYIEKMTKRHNKGKALSILAHKLGRAVYFILKRKQAFNMDKFLPA

SEQ ID NO: 460806 - protein, 322 aa, unidentified
MSVSVLGIDIAKQKFDAALLVDGKTKHKACKNSAEGFEMMRLWLEKQGIRKVLACLEATGNYGEDLAIYLHEAGHIVSIVNPARIKGFAQSELLRTKTDKLDAALIARFCLAMKPGPWSPPSPEIRSLRALVRRVDSLIDMRSQEKNRISTAHESVSLLIKEHIAYLNQEIEKIRQQIADLIGQSPNLKRKKDLLDSIPAIGKVSIPHILAELDDLEKFHHVRELVAFIGLAPKETLSGSSIKGKPRLCKIGHARLRKALYMPALVSIQCNPVMIDFYNRLKDKGKNGKVIVCAIMRKLVHVIFGVLKSGKEYDPNFKPISA

SEQ ID NO: 460807 - protein, 384 aa, unidentified
MRGNFIPREYDIFTGLDVSKKSISVTFTSHQGFIRSLNMPHKAEHLLNYVRKHFPDQKIAFVYEAGPTGYGLYDGLAAQAYPCLIAAPSMIPRAPGQRVKTNRLDSKALSENLRGGQLKSIHVPSPTYRQLRHLTQLRDVLVSELAGMKQRIKSLLLFEGIEFPPAPPGSQWSFLVKDKLRKLPCSGTVRFKLDQLLDSLEFNEKQVLKTITEIRRFCRNDPELSQCMKYLMTISGIGWITASQLLARIGDWRELKNIRQLAGFLGLVPIEHSTGERIDRGSITRTGDERLRSKLIQASWSAIRQDGELREFFRSVCRNHPREVASRVAIVAVARKLSVRISVVLMKQRPYEVREKVHSAPLTQEETSPQGTTRRLREPGEKNS

SEQ ID NO: 460808 - protein, 468 aa, unidentified
MKFCLGIDVACRAAHQASLADATGEFLWSGWRFRTTVAELETLWSKIPEGAEVTVVMEPTRNAWVPLTAWLSARGAKVVLVAPERSADLRDYYAKHTKTDRLDSRMLARLPLLHPEGLEPVDGLGPGDTLKRSVRRRWGLVQRRQACSQRLDALVELLGPSLADVLGTGDYNETALVILERYSDPRALRRLGRNRLTDVLKRVSRGHYREPKADELLAAADEAILLWSAGGLDFAELAADIAAEIRVIRALSAEIDKLDERIERLYHQADPAGLVVSAPGLGVTLAAAILGRFGDLDRFSDLAAVRSFTGLVPKIDQSGNSHGHGGPTKAGDPGLRMMLYLAADHARRSDPQLAAKYHRLVVEAGKHHDSALCHLAATLATRIAACWRRREPYIVRDTDGRVITEAEGRAIVAERYRISPEVRQARRRAKKAKQLKGRTSRRNQKSNEAASATGSPTTPKPIRPKNVA

SEQ ID NO: 460809 - protein, 412 aa, unidentified
MACLYVGIDLGLNNFVVRVIDEQGKPVSGTFTLTNDLVGAEKLVDKLLEFLASTGSTQLRIGMEATNVYWWHLHEFLSQHDALQPFDTEIYVLNPSLVDGFKKAYTKLPKTDAIDAWVIADRLRFGGLRPTLPQDPRYAALQRLTRFRYHLVHNLIREKNRALGMIFLKFSPLCDDQQNPFSDPFGKAATAVLSELTPDEVAERPLEELAQFIAEHSNNRLRDPQALAQELKRLAQRAYRLNPTVADAIEITLSMTLSNIQFLQQQLKKLDKVIARHLAAIPQTLDTVPGIGPVIAAGIVSEIGDISRFDNQAALAKFAGLTWSVHQSSQFRADDTKLTKSGNYYLRYYLIEAANSLRVHNREYAEFYHRKYREATTHHHKRGLVLTARKFVRLVYALLSKGQIYDERRATG

SEQ ID NO: 460810 - protein, 392 aa, unidentified
MYIVGIDIGKNHHEASIVSPEGKQIGRSLRFATTHKGADSLMNFIFKNIGNSPCVFGMEATGHYWYPIYSFLKARGYTIYVINPIQSDSLRKMYIRQTKNDSIDSFLIAEVIRFGQFTTTSMGDENILAMRQLCRYRDSVISSRTEIKLRISTIIEQIFPEYEKQFSSLWLSTSMGILEKYLTPENIENAPIDELFEIIKDKSHNRLTKAKAISIKGAAADTFGIKIAQDTFSFQLKQLIDRMNFLDKQIEALDIEIMKYYEQFDCYLHTIPGIGIIGAATILAEIGDISRFKNSSALVAFAGIDPTVRQSGEFNSTHNHMSKRGSPFLRHAIFLAATTCSFHNSPLNAYYKKKRDQGKHHLTATGAVARKLTTVIYAVLRDSKPYEPKKFC

SEQ ID NO: 460811 - protein, 315 aa, unidentified
MTTAETPKVSVGIDVSKTTLDIAVHETGESWTVANDSIGGAALVTKLKQLKATSIVLEATGGFETLATAMLAAADLPVVVVNPRQVRDFAKATGQLAKTDHIDSRVLAHFAAAVDPPVRPIKSDETQHLEALLARRRQIVEMLVAEKNRLANHRDRAVVKDLTDHITWLERRLKSRDDELQRVLKNSPAWRERDHLLRSVPGVGRVLSLTLLAELPELGQLNRREIAKLVGVAPFNWDSGQWRGSRHIWGGRATIRSPLFMATLCAIRINPTIKSFYRRLIVAGKAPKVAIVACMRKLLTILNTMVKTQTSWRTA

SEQ ID NO: 460812 - protein, 315 aa, unidentified
MLYDGIKGRIKTRNIQNNRHSVENILRWLRLQHCSPEDVHVVMEATGVYHERLATELHDAGFRVSLANPHRSREFARGMGIMTKTDKVDAYMLACYAFLKKPHRWEPPAPEIRYLGALLRRRDVLLGDALREENRLEKYLSTDTPADIISSCRRMAQLLREEVSNIERQIKAHIKASPALRRDYTLLTSIKSVGPQLGMHMLVVLRSHNFVSAEQAAAFLGVVPIEKRSGTSVRRRPRMSKIGPPQLRAKLYMSALCGKIYNKRMRNIYDEMCLRGKPKMVAIGALMRKLVHWCYGVLKTGTVFNDEDLKPALST

SEQ ID NO: 460813 - protein, 337 aa, unidentified
MIVVGVDVHKQSLTAVAVDEAGRALAELTAGSGGELLAWADSLESERLWALEDCRQLTRTLERALIGAGERLVRVPPKLMAPQRRAGRMRGKSDPIDALAVARAALREPRLDYPRPGEDRLRELKLLVDHRDDLVDERRRAQQRLRWHLHDLDPQLAVPPGALDRPLWLDRIGRRLARQPQTVQVRICRELVGRCRSLTRTILALDRELQAQIDKTAPALLALPGCGPLSAAKLLGEIGPIERFDTDAQLARHAGVAPLEASSGKHQRHRLDRGGNRQLNCALHRIAITQARVHPPARAYLERKQAEGKSRREAIRCLKRQLARTVFNTLKAIPALT

SEQ ID NO: 460814 - protein, 418 aa, unidentified
MDAQFRWFVGLDWASTLHRVCVLDGEGERIGERDVAHGGAALAEMCAWLCQVTGATPGKIAVAIETPRGPVVEALLEHGFAVFAINPKQLDRFRDRFSLAGAKDDSRDALVLGHSLCTDRHAFRRVTLDDPLVIELREWSRMYDELKQEQSRLTNRVRDQLWRYYPQMRAFSEDFASDWFLDLWHAVPTPDQAARATDKAIAAILKSHRIRRFDAATVLGILRQPPLAVAPGTIAAATAHIRTVAARLRLVNAQIKEAEHKLDQLCAAIEASTEATPGQICEQHDVAILRSCPGLGRINVTVLLAEASEPLRRRDYHALRTLSGVAPVTKRSGKSCVVIQRHACNTRLQTAAYHWGRVAIQHDQASRERYRALRARGHNHARALRSVADRLLYVLCTLLERQVLFDPSYAKAPATAAA

SEQ ID NO: 460815 - protein, 328 aa, unidentified
MYIIGIDVSKNKLDCALIDNSNYDKFKFKVVDNSEGGFVALLDWLSKHIESTVSEYHFVMEATGVYHEKCADYLFNMGAKVSVVNPAHIKYYGQSLGVHSKNDKKDSVVIARYGVTQKPISWLPEPIEIRVLKALASRLDAIEKDIRRENNRCEKSNINPCSDNVLHSIKKMLVALNDEKKSLERLIDNHINQYAYLKNNYALLQSIPGIGPVVSRYMVIIIGSRTFKSASQCAAYLGLVPVQNESGSSLRGRSRLSKAGSPIIRAKLYMAAISALQHNPDIKIQNQRLLKNGKSKMSALCAAMRKLVHICFGVIKHQRPYHVQGVLL

SEQ ID NO: 460816 - protein, 389 aa, unidentified
MPSVSERPEAPTAIQTHLAASFVSLELSRSIWLITSLSPGSGEKMSKHSVRAGDVAALLARFLELKRKASERTGKSFPIVVIQEAGLDGFWLHRVLQSEGVESHVVDPSSIATSRRRRRAKTDRIDGEALLRALLAYKRGEPRVCAMVKVPTPEEEDRRRLCRERKVLIAERVKHVNRVKGLLFSQGISGYEPLRRDRRQRLDELTTGDGRPLPVHLKTQIRRELDRLELLLDQIKEAEAERDALLAAPQPAAPAPAGRMLLEFKGIGAELAAVLWLEALFRHFDNRRQLASYAGLAPTPWQSGSVDHEQGVSKAGNPRLRTSLIQLAWLWLRHQPQSALTLWFKERVSGNGGHFKKSTIVALARKLLVALWKYVTAGVVIDGAVMKDA

SEQ ID NO: 460817 - protein, 396 aa, unidentified
MPRIWAGVDIGKEHHHCVVLNDRGERLLSRRVLNDEGALLELIRDVLDIDQDVLWAVDINHGGAALLIGLLLNHDQPMAYLTGLAVHRASGTYRGEAKTDAKDAFVIADQARMRRDLGRLRPGDEIAVDLRILTTRRTDLVSDRTRQINRLRAQLLEYFPALERALDLTNKGPVVLLTGYQTPAALRRSGAKRIEAWLRNRKVRSAEALAKTAVEAAQSQQSALPGEKLAAAMVIRMAKAVTALDEEIAELGALIEDRFREHPHAEVIRSLPGMGSQLGAEFIAATGGDMGAFASADRLAGYGGVAPAPRDSGRISGNLHRPRRYHRGLLRVFYLSSMASLRSCTASRTYYDRKRAEGKGHKQALIALARRRVNVLWAMIRDGACYQAAPPVTAAA

SEQ ID NO: 460818 - protein, 417 aa, unidentified
MSIDPGVTPVRVTAGVDWAKDDHAVCVAGDQGEVLERFTVRHDAAGLKRMAARLLRTGAGQIGIERSDGPVAGTLLQAGLTVFVIPPAQVKNLRSRYGSAGNKDDRFDAYVLADVVRTDVRRLRPMARDSDQTSALRTSVRARRDLVGHRVAAANQLRAHLQIVFPAAATLFASIDSAITLTFLDRFTTQEQADWLSPRRLAAWLASAACSGGTGPCVLHARLMAAPRGATGQYASIHAGTTLALVAILRTLNTQIQVLAASIGEQLAAHPDAAIFTSLPRAGIVRAARLLAGIGDARGRFPTRDSLTCLAGVAPSTRQSGKVKSVTFRWGAGKQLRDALCDFAGDSRRASPWATALYDKAIARGCDHPHAVRILARAWTHVIWRCWQDNLPYDPAAHSSLQALLNQDQPAAARTGA

SEQ ID NO: 460819 - protein, 363 aa, unidentified
MNESMTVTVGLDVHARSIRLAAVRADELLEERTLPYDEEGVERVLRRWPGVRCCYEAGPTGFGLQRFLVERGIDCLVVAPGLVPQRPGDRVKTDSRDARKLARLLAGGLLETIYVPSRELEAARDLVRAREDGRLDRMRDRHRLSKFCLRHGRTLPTNSWTIVRRKWLGEQRFEFPAQQQTFDTYVHAVDLVDARIEQLERAIRETAEQGPWSQLVGRLRCLRGVDTLTALSLAAEIGDFTRFKTAEEFMAFVGLVPSERSSGEQRRQGSITKVGNSHLRRLLVESAWHARRHPKVGYELARRQRGQNAVVIERAWRCQQRLYQRWQRMAGRGKPQQKIVVACARELAGFVWAIATEQPLRST

SEQ ID NO: 460820 - protein, 400 aa, unidentified
MQQQAERVVIGMDPHKRSATIEVMTADEMVIGGGRYATDEAGFAAMTDYVNRLRARVEDRVWAVEGCNGIGHHIAIRLLAAGEQVLDVPPKLSARARVFATGQGRKTDATDAHSVALVGTRMTGLRPVVNDEQLAVLRVLVDRRRSLGEDHTRMVSQLHHLLLELIPGGAKKDLSAAQAKALLAKVRPRDAAGKTRRRVAAELVADLERIYARKKAADKELRELVAATGTSLLGLNGIGPSGAARLLVEVGDITRFPDRGHFASWNGTAPIDASSGDQVRHRLSRAGNRQINRVLHIMATVQLRNPTEGRAYYDRRKADGKTSMESMRALKRRLSDIVYRTMLDDAAAHTIGDQGTGPGGHRGNVSISSAAGSHPHTSSSEKSLPGPATTNPRTPLPAAS

SEQ ID NO: 460821 - protein, 454 aa, unidentified
MARNGKKKTKKQESLPFIQPDAAGIDIGATEIYVAVPEERDIRPVRKFATFTEDLHALADWLIGCQIKTVAMESTGVYWIALFQILERRGLEVCLVNARHVKGVPGRKTDIQDCQWLQYLHSVGLLRGSFRPAQAVCAVRSILRHRDIQLKSASRQVLLMQKALTQMNLQLHNVISDITGVSGLAIIDAILMGEREPSKLSCLCDGRIKASRQVVAKSLVGDYRPEHLFCLQQALESYRHFQNQIAACDEHIEQMLARFDSQEQCAEAPSTKYKAQGNQPTFDVPSEMHRILGVDLSAIPGMSAQTALTFFCEVGPQITRFPSSRHFASWLGLCPDNRISGGKILSSKTRNVRCRLANALRMAATTLYRSRSALGDYFRRLRARLGSPAAITAAAHKLARVLFAMLRDRRSFDPQLLGILNQKHLRRRQNSLRKYAASLGFELVPIQNLAHSVS

SEQ ID NO: 460822 - protein, 372 aa, unidentified
MNHNTIYVGMDVHKENFSLCAYTLEAEKASYHQRTEADYKEVLKYLEFLRSIYGNDANFICGYEAGCLGYTLYHQLSANNVNCVILAPTTMLEQRSKRRIKTDKRDAEIIAKCLAQHNYSSVHIPTAKDEETKEFLRMRDDHKLALKKIKQQILAFCLRHSYRYDGKSHWTAAHLKWLRSLTPEALYKEILDEYLLTYQNLSDKLERMDKRIEELASLEEYREAVKKLCCFIGVRTHTALSVLVEVGDFKRFASAKNFASYLGLVPGENSSGENQTRLGITKAGNRHIRLLLTEASQCYARGKIGFKSKELKSRQSGNTPEIIAYADKANERLRRRYYKMVLGSCKKHNVAKTAIARELACFMWGMMTDCIA

SEQ ID NO: 460823 - protein, 396 aa, unidentified
MHFVGLDWASRTHAVCIIDDRGAVLAHFEVEHTDLGVDELLERLKKLKEPRLAIERPEGVLVDRLVDAGIHVVAVHPNIVKAARSRYRTAGKSDAGDAYVLADLLRTDGHRFNALVPHAAEIQALRILVRLRKDFVQTRVGLGNQLRATLDAFYPGAVGVFSDLTSPISLAFLRAFPSEAHALKLTEQQLQRFLSEHRYSGRRSAADLLLRLNGAPRTALSGDVAETATVAVLSHVATLEPLVAQIRSLTAKIEARLRELPDANILQSFPGSGGVTAAMITAKLGSDRERFQTPEHFAALAGVTPVTYASGKHRAVAFRWACDHELREALTCLADNSRKRSVWAADMYRRALERGCDHPHAIRILARAWARVIWKCWRENTPYEPAKHGQAAKLAA

SEQ ID NO: 460824 - protein, 332 aa, unidentified
MENFYFIGVDVSKKKLDFCVMFEGKVVHEEETANHQSAIMSLLHQLEEDYGIASDQILVCAEHTGQYTFPLACACKAVECKLWLENAAEIKYSSGVQRGKNDKVDAKRIAIYARRFQDKVQYYERPTEDIERLKQLESKRTLYVADLAKYKGQVKDQKDYMPRKLYERKMKRLQTLMDDLEKAIQAITYEMDEVIASCTVLCRQRELLMSIDGVGRVVATNMIITTEAFTRFDDPRKFNCYAGVAPFSYSSGSSQHSKARVSHRADKVMKRLLHLAAVAVTHRIGGELKKYYERKVAEGKNKMSVINALRAKIVARMFAVIKRNEKYKPILS

SEQ ID NO: 460825 - protein, 401 aa, unidentified
MNCVGIDVSKGKSMIAVMRPLGELVVPPFEVGHTDVALCALSRLLGELDGETRVVMEATGNYHLPVASFLHDSGFYVSVVNAMLVHSYGNNSLRRAKTDKKDAIKLANYGLDHWLALPRYIPEDEVRLMLKTTYRQYQQCAKVQTILKNNLISLLDTAFPDANRLFTSPARADGSEKWVDFVAAFPHCECVCGLSAKSFTTKYQKWCKKHSYNFNQDKALDIYASASGHFSVMPKTDTAKLLVEQAVSQLRAASAALAALRNEMQSLAASLPEYPVVMGMFGVGPALGPQLMAEIGDVRRFHSKKALVAFAGIDAPPYQSGQMEVRSRSISKRGSSALRRTLFLVMSTILRCSPADEPVYQFMSKKRAEGKPYRVYMMASANKFLRIYYATVKQHMDSLEA

SEQ ID NO: 460826 - protein, 355 aa, unidentified
MERYIGLDVHAASCTLAVVSEKGRKLRDFPVETNGQALVEAVRMIPGHKHLVLEEGLQSAWLYETLGPHVDEIVVTGVTQSRGPKSDKRDAYGLAEKLRVGDLDKAVFKAPRQFTLLRELSRTHLTLVGDVVRVQARIKSLYRSRGIFVSGMNVYGPHQREEWQKQLRSSVQARATRLYDHFDFLLEQKKQAESDLLREAKKHPMVRILETAPGFGPIRAARLVPIVVTPHRFRTKRQFWSYCGLGIVTRSSSDWVQATDGSWIRARVPQTRGLSRQHNHFLKSIFKGAATTVITQRNKDPIYLRYERLLNGGTKPTLAKLSLARMIAATVLRMWKDEEEYDPGRGGPSTATREG

SEQ ID NO: 460827 - protein, 344 aa, unidentified
MSVYVGLDVHKESTFATVLSQDGRVVVQRRVANELLPSFLGDFNIERIGLEASTYVAPLYRDLVRRGFSVEVSHPKKTRYIAEARIKSDRVDSRAIAELVRLDALPKSYMPPPEVAALREKVRRRAFLVRERAKLMAKVRGVLAYEGVKPPEGSSLFTLKGLEWLRGLGLEPVDCYLRVMTVLNVEIRRLSLELKHLAGEDEDVQLLMTIPGIGYYTALLVKAEVGDVNRFKSGDHLCSYAGIVPSTYSSGSAARHGGITREGSRWLRWAMVEAAMTHIKYDTSITRSYHRVAEKRGKQVAIVAAARRLLFACYTVLKEKRPFRPFLHGQAFRFREPRESAVRL

SEQ ID NO: 460828 - protein, 357 aa, unidentified
MDKLTRIGVDTSKNVFVLHGVNAAEQPVLRRTLRRRQVIEFFGKLEPTKIGLEACGAAHYWARELQALGHEVVLLPPQYVKPYVKRNKNDAADAEAICEAMSRPTMRFVPVKTPEQQAALMLAGTRDALIRRRTQLTNTIRGYAAEFGLTAAKGLDKIEPLLARIAANAALPELAQELFAAYGRDYAQLQVQVRKIEARLMAWHKHNELSRRLVEVPAIGPIGASLLAMKVTNPHAFRSGRDFSAWMGLTPKDHSTAGKTRLGVITRAGDEALRRVLVVGATAVIQQVKRGRGHPSLWLVELLKRKPPKLAAVALANKMARVAWKLMVSGERYNPARRTTGSASRTTSRETIAMTNA

SEQ ID NO: 460829 - protein, 346 aa, unidentified
MHITTIGLDLAKSVFQVHGINSANEVVVKKTLRRVQMRKFFEQLDPCLVGIEACGTSHYWAREITKLGHQVRLMPPGYVKPYVKRGKTDASDAEAICEAVTRPTMRYVAIKSPEQQAALALHRTRDLFVKQRTQLVNMIRGLLAEFGIEIRRGLNQALMLAERIAANEVPDIPPLAAKVISGLAGQVLDLQTRLSEIELELLAWLRSNDIAKRLATIPGVGTVCATALAASVTDPHQFRSGRQFAAWLGLTPLQHSSGGKERRGRISKMGDKYLRRLLVVGMTSLIRRAKYKPEAVDPWLADLLSRKPARLVTVALANKAARVVWAIMVRGGFYHMPAEVRVTTSV

SEQ ID NO: 460830 - protein, 326 aa, unidentified
MRAIGLDVHKHFAEIAVLEPGQAIRHLERISTTPAALRTFAQTLNSTDRVVLEASINTWPIAELLRAHAGQVIVSNPMRTRAIASAKIKTDRVDSAILAQLLAADFIPPVWAPDPATQTSRRQVANHQSLVQQRTRLRNRIHAILDRNLVAQSFTDLFGKAGRAWLADVSLPVEERHQVDSMLRLLDALEAELHGAVERIAQAALADRRVLRLMTIPGVGLTTAVALVAVIGDVTRFPRPTHLVGYLGLDPRVRQSGNRPAFTGHISRQGQAHARGLLVEAAHATIRVAGPLRAFHERISGHRGKQIAYVAVARKLGSSGKTGIAV

SEQ ID NO: 460831 - protein, 407 aa, unidentified
MICVGIDVSKRKSTVCFMAPGDKIIRRPFDVKHTKEELQPLVDEIRVQAKYDEIKVVMESTGVYHLSIAYFLQQNGIFVSVVNALKVANFNKAENFRHTKTDSIDSTNIARYGIAYWAKLPQFDLNGDKYFLLKRLCDAYLNFSEERSRILLQLQSQLEQTMPGIFDLFGGFDINSGKDKLLDFLERYCHIEDIIAKPEAEFVASYCGWAKEKGYRSNESKAATIYAQAKNGIPSIPNNPIVRETIMWYVGLLRRADETLMASLTRMEDIAKDLPEYELVGEMGGVGRVTRVALIAQIGDVRRFKNKHSLICFAGLTPSIHESGKFRASQNHIVKKGPARLRKVLYQVMMSLVMHKIPKDDAVYRFIKKKEAEGKYKKVAKVAGMAKFLRIYYGRVMHLYRDLGLAA

SEQ ID NO: 460832 - protein, 347 aa, unidentified
MKRGHKAELDDSISMFVGLDDHRNHLQAAVVDNEGTLLKEERIPNDADEIERFFADVDYAQIVIESSSAWYHIYEYLSKRYQVVSSNPLKTKAIASAKVKTDRLDAFTLADLLRGGYIAESYVPPRRIIELREMVRCRAGLVRIRTSLKNKIHGHLLMRGVKIERTPFSKTYVDKLRALHDYRIDEYLNVTEALNREIDQVSKKIMLEAKDDEYARLLRTIPGVGYYSALLIVSEIGEIERFPDSAHLCSYAGLTPSTHSSGGVTYHGNITKTGSRYLRWILTECTHSHIRTEPDSNMTRFYNRLVKKRGKAKATVAASVKLLKVIYWVMKEKRPYHSQEELLQRRI

SEQ ID NO: 460833 - protein, 391 aa, unidentified
MVCVGIDVAKDKHDCCILDSDGMVRADCFTIPNNMDGFKQLLQTIRNCTKKSDKIKVGLEATGHYSYNILGFLLDNGLPTYVINPLHTNLYRKSLSLRKTKTDRVDARTIATMLLSDVDLKSYTDIAYHNEELKSLTRYRFDKVQECAKLKQSVSRLATILFPELEGLVSSIHGTSIYALLSEYPGTKQISEVHLTKLTNLLTTASKGRYGKEKAIQIREAARASIGSVMPAKSLELKHTIKLIQELASEINEIEDSIQKIIDELNPPILSIPGMGVNSAAVILAEIGDFSNFSSPDKILAYAGCSPSTYQSGKLTNCYAHMEKRGSRYLRHALYNATKYVCYWNPVFAEYLAKKRAEGKHYNVALSHAMKKLVRLIYALQKSGKAYLAAA

SEQ ID NO: 460834 - protein, 439 aa, unidentified
MYSTPHPYDLVIGLDRSDKKADLCLIDTHTGRHTQQTIDTSPESLQHWAVQVRQEYPKARVAIALEQPALNLIGFLESIEWIDLYALNPITLQKYREAFVTSRAKDDTKDASYLADLLFSHHDKLPLWKPEDTQTRLLQQLVRHRRAVVDSRTALSNQLKALLKQYFPQALELCGPELWRPLATDFLLKWPSLQTVQRARPQTLKQFYYLHRAYRQQLLQRRLVLIAQAVPLTDEPALVESFILRIQLICHQLRRVVRAIEQYDQQIASAFAAHEDHGLFDSLPGAGRVLAPRLLATLGAQRQRFNNHHELQQCSGIAPVTKQSGGKRHVHRRYLCSKFQRQGWHEYAKESVLWCRWAAAYYWQQREKGLLHDTAVRALAYKWQRVIWRCWQDRTVYDDARYEAVLRRRNSPLVKRFDLIELGKSPWKTAQKKLNKSLA

SEQ ID NO: 460835 - protein, 462 aa, unidentified
MKLYLGGDVSKGYADWVILSEKKQAVLENFQLDDTYAGHFKLYAMLEAYIDKHPGLEIYAAVESTGGYENNWFNTLKSYQKVFNLKVARINPAGVNFNRRAGMKRNVTDAISALSIAEYMINHPGNIMYDQDDKWKSLCRHWNFVEMQKQQRIQTINQLETILYSANPTLMRFKKGGFPNWLLELIIQCPTSDKLAKAKPEKLAKIPYLTLARAKALVAEAKQNIASATDKNAEILVSQIALQIKAFDKNIKSQMQLIERELTCPEIDLLKSFKGIDTISAIGLLLEIGTIKRFPTVKGFSCYFGLHPKFKQSGDKVIGVRMSKQGSKNMRKILFNIAKGAITNNPLIRVVYEKKLSQGMSKMAAIGVCMHKILRIIYGMLKHKEAYNPLIDKQNCERSKEKQQEKQQQGKANIEKSRRYQEFDEKAPISRKQTKKRREHDLSQGEIISQSTGSTCSSETKL

SEQ ID NO: 460836 - protein, 353 aa, unidentified
MRLTFNSQEFDMFIGLDVDSKSYAVTFLDQESQGRSLKMPAHPQSLYGYFQKRFPQKRLLFAYEAGPTGYQLYDYLVNQGQRCMMLHPAGIPKAAKDRVKTNRLDSQKIAEQLKSGQLQGIRVPSPAYRQLRHLADLRAQYVQRQTQIKQRIKSLLLFENIHLPPLQGTAWNLQFRQALAQVSANPTVRFKLDLLLKDLEDARSRILMVLQQLRQLVQQETNLQKSMNYLQSIPGFGFVVSAHLLARIGDPSYLRNIRELAAFCGLVPSENSTGETIQRGSITRTGDSLSRGLLIQAAWAAIRKDQELYQFYCRIRAKRGSRQGAQIAIVAVARKLTQRAYRVLKDQRPYMIH

SEQ ID NO: 460837 - protein, 361 aa, unidentified
MAGTMTWVGLDVHARSTYAAAVNVMSGELTRMRFGPGVDAPVDWLGSLPRPLWACYEAGPTGYALYRAAVAAGIRMDVIAPGKTPRGPSDRVKTDRRDAELLSRCLLAGSLKAITVPPAGVEAARELTRAHDACRRDLMNARHRVSKMLLRHGRVYPKDNTWSQEHRRWLARQQFEQDMSAFVFADLVARVDGLTARKAVLAERISRLATDPEFWPTVARLRAFRGVDTLTALSIHLELGADWQRFEKPTRLGSWLGLTPSLNQSGESSRQGAITKTGSGLARRLLVESAWHYGREPRIGATLENRQHGQPEHVLQIANTAQQRIHGVYHRMKARGKPHHVIVVACARELACFLWAVATAP

SEQ ID NO: 460838 - protein, 339 aa, unidentified
MTVKTIGLDLAKDVFQVHGISENGRVIFNKAIKRAKLLAFFEALPPCRVGMEACGSSHHWGRTLRQLGHDVRLMPANYVKPYVKRGKTDAADAEAICEAVRRPTMRFVEIKTEDQQALLSIHRTRDLAVRQRTQMANVIRSLLREFGHILPVGVEAVTAFAKRHLDGDHPDMPDIANGMLGMQCYQFIGLNERIAGYSTMIEQHALLNSDARRLMRMPGIGPITASAIIATIGDAKQFRTGRDFAAWLGLTPLNKSSGGKERLGKITKKGDRYIRKLLVVGMTSRAVMAKRSPEKVDLWTAKIIADKPFRLATTAMANKSARIIWAMLTKKQEYRRPAF

SEQ ID NO: 460839 - protein, 312 aa, unidentified
MTREIRFVGIDVGKFEICAFDATERQHLTVANSAKGHKDLVLWLGNPANTIIALEPTGGYEWALWETLCASAFDARQVSAAHVHAFARATGALAKTDPIDACLIARFIAFRPNAGRKPPVEKLRKLRTLNTRRRQLVEMRKRLSCQIKQRHSTELVTMDSDLTSLITAQITELEIRIAKIISHCNKLAKRAAILRSIPGIGPVLTATFIGDLPELGQCSEKQIAALVGLAPMNNDSGKKAGRRSIRGGRYAIRSLLYQAALVASRHNPALKRFAMRLKEKGKPHKLVLVAVARKLLTIANVLVAKNELWTTV

SEQ ID NO: 460840 - protein, 426 aa, unidentified
MKSNTQNAKITAITEKTLVVGIDVGSETHYARAFSWRGFEFSRKPLEFSNSEEGFETLKAWIEDLKKKRGLDKVIPGMEPTGHYWFNLGKFLQDNGMRPVHVNPHHVKKAKEMDDNDPSKNDRKDPKVIAGLVNEGRYFYPYIPDGIYAEIRGLSGLRVQSQSEITRLKNRIARWFNIYFPNYKDVYGNVGAISGLMILRTAPLPEDIVKLGVDGVNQIWRDARLRGVGIKRAKTLVEAAEHSVGSRDAQEAARIELQILLSDYDRQTKREAELMALINEKIREVPYIDKLLEIRGVGLKTVIGFVAEVGDIKRFDDPKQIQKLSGYAIVKNQSGKHKGESHISYRGRKRLRYVLYEAAVSVVSHSPEFRSIHQYYTTRDKNPLKKMQSMIAVACKLIRIFYVILKNGTKYDAAKMMGDIRRPEAA

SEQ ID NO: 460841 - protein, 354 aa, unidentified
MKRSTKYVALDVHQATTIASVREETGRVIARSILPTEERAVLEFFGGMRGAVHVALEEGTQARWLHDLLAPLVERVVVCDRRGEPRHGNKGDQVDADQLSERLRRGGLRAVYHGSAHRATLKELTRTYQNLVEDATRVMLRLKALYRARAIRTPGTRVYHPQGRAQWVAQLPDRGARVRAEVLYAELDVLRALRPQAKAAMLAEARQDPAWALLQTIPFLGPVRVALLLATMQTPWRFRTKRNLWAYAGLAVVTKSSADYTFVAGRPVRRHRAPLTRGLNRNHNRVLKDVFKGAATAATARPGPLQDCYCGMIARGMREELARVTLTRKLAALTLRLWKTGECFDPAKLTVAVR

SEQ ID NO: 460842 - protein, 335 aa, unidentified
METLYFLGIDISKKTFQAALTLDGMNMYELEVENTSRTIQAYFQELKKKFNFLSRQLTVCLEHTGIYGYPILDYLTKKGIKVCVEPALQIKQSQGMKRGKSDKVDARRIAQYAYKNRHELKFWKPQRPVVQKIKALLVARDRLVKIRVQLSIPIAECQEYIEESIRKRIVKNCEHTLKALKKDILKIEQEIEALLKEDVHIQQEVQCATSVPGVGIITALNVIVATNEFEKISEAKKFACYAGVAPFEHTSGTSIRGKTRVSKMANMTLKKLLTLASMSAVKWNEEIRVYYKRKVAEGKNKMCVLNAVRNKLISRIFACVKNKRLYQKVYQHALV

SEQ ID NO: 460843 - protein, 355 aa, unidentified
MTYSRKDLILGVDTHKDFHHAAVINHVGKSIADRKFDATSAGYSDLIAWATGVGRIGRAGVEGTGSYGAGLTRELTRRGIPVIDVIAPDKQLRRLRGKTDQIDAYNAARAVLNELATAVPKTQDGFVEALRVLRTSRRLLVKQRTESMNQLQGLIVSAPADLRVSLAKLKAKNLALRCSKLPVRKADDLVMTETKNVLRSLGKRYLELLTEADRLMKRLGAIVKEHAPELLAVHGVGPDVAATMLIVAGENVDRLNNESAFAHLIGTAPIQASSGKTNRHRLNRGGHRQGNSAAYRIVMVRMKSHEKTRDYVVKALARGKTKREAMRLLKRYVAREIFQILITIRERHQQAAISA

SEQ ID NO: 460844 - protein, 349 aa, unidentified
MVENDMSFATVQTEPDYKNILNYLEKVRKNIGGPCEFRCGYEAGCLGFTLYNQLTEHGVDCVILAPSTMPSYRKNEIKTDKRDAMKIAKCLAYNTYSPVYVPTQEDLETKEYIRMRDDHKQALKKIKQQILSFCLRHGLKFSRGKAYWTGKHLAWLKTISLSTMLREILDEYLLSYHRLVEKIDRIDQRIAELATSDHYADKVKKLSCFIGVRTHTALALIVETGDFSRFTKAEHYASYLGLVPGEQSSGVSQKRTGITKAGNSHLRQLLTESAQCYGRGQVGYKSKTLKARQAGNLQEVIVYADRANERLRRKFYKLVKSGKQHNVAVAAIARELACFVWGMMTNRIA

SEQ ID NO: 460845 - protein, 353 aa, unidentified
MPVYVAVDFHAREQTISWCDTAAGEVHRTKLRHQHDDVRKFYEQFKGEVIVAFEASGYSAWFEQMLAELGHTVWLGNAAEIRRKAPRKQKNDRRDADLMLDLMLKSDFPRVHTFSTASRTVLRQLRYRHKLVKVRTIAKNSVHAIGINAGLPLRGRLLTQTGLEQLQALPLSPVLSQQRDEWLALIRLMNKQIGAVEESLAQCAKDDEAVELLRTHPGIGLLTALALRYTLEPIARFTSTRSVVGYAGLDCVEEQSSERRRMGSISKQGSRLLRFLLNEAGQTAARKDPQLKQFYRRLLRRRNKPKAKVAVARKLLVRSFIMLRDQIDYAEFVRRGVAARVARETHSPKVTDL

SEQ ID NO: 460846 - protein, 310 aa, unidentified
MDPIVIGIDVSKDKLDVHVLPAEEAFAVARNGAGIEELAARLAALAPAVVAIEATGGFETIVAAGLAGAGLPLVVVNPAQIRAYAKAIKQRAKTDPIDAAVIAKFARATRPEVRPLPDEVTRQLADLVARRRQIVEMMAAEGQRGRRVDHKRVARSIARVRKTLEAELAEVDQEIGDQVRGSPLWREKEDLLVSVPGVGPVVARTLLAELPELGRLERREIAALAGLAPFTRQSGRWRGRSFIGGGRATVRTVLFLAAMTAARHNPTLKAFRDRLVAAGKPKMVALIATARKLLTILNAIIRDNRPWQNA

SEQ ID NO: 460847 - protein, 335 aa, unidentified
MKKIHVGIDISKEKCNLCYRSGLEIVREEECPNDVKGLKKAFKAALKVLGASFEDALVCAEYTGRYIYPLTVACQELSIFLWMDDPTRIKNSMGLTRGKNDAIDAARIAEYAFRYSDKAVRYAIPDAALVSMKSLLADREFLLIDRKRYQSQLTDQKKYMAPGDFKHKNSRWKKIIKSLDEQIAAIDAEIESLIAADPVLARQKELLVSIDGIGEQIAINMIAITGGFTRFQNARQFCSFAGLTPYKYDSGTSVRSKAKISKRANQTMKALLHMSAVNVATRMKGGEYKDYYERKLKEGKHVMCILNVLRAKLVHRMFSVIKRDTEYTKEYMPAC

SEQ ID NO: 460848 - protein, 346 aa, unidentified
MNTITIGLDIAKSVFQVHGEESGKIVLQKRLRRSQVADFFAKLPRSLVGIEACGSAHHWARTLRALGHEVRLLPAAYVKPFVKRNKTDARDAAAICAALGRPDMRFVVIKSVEQQAARGIERSRDLLVKQHTQLMNSVRSQVAEFGIIAAQGRRGFNALAQLVAAGDERLPPVLLVALRMLVAQIAQLDTAIATLEREIVAAARTHPVMRRLATIPGVGPLTAHAIVTAIGDGKQFASGRDFAAWCGLTRRVDQSAEKRRERGISRQGEMRLRKLLALGASTIMRHVRSRPQHATTWQHGILARRPIKVAVLAQAGKNARIAWAMLQSGEAYRKPALIAANQSLAG

SEQ ID NO: 460849 - protein, 328 aa, unidentified
MKHIGVDVSKEKLDCCLLREPSGTKRKSKVVANSVPGVNNLLAFIDKEGIARDDVHVIMEGTGVYHLLAAETLYDAGVLVSVVNPAQVKDFGRGMAVRTKNDAKDSFVLARFGALLQPPPWIAPPASARRLQAYIAREDAIKKDIQREQNRREKSVVGNAPEDLLVSIDETIAFLDGQLETLRKKIRDHIKNHPDLKDDMKLLTSIPGVGPEVGHRMLSVMHNHQFRAAEQVAAYLGLVPVERQSGSSVRARPKMSKAGPGKVRAVMYLPAVSAKRWNPHIRALAARLEEKGKSPKAIVVAAMRKLVHLCFGVLKTKTPYAADYAQVA

SEQ ID NO: 460850 - protein, 344 aa, unidentified
MVISVGIDVSKDKHDCFIVSSEGEVLADVFTTPNNMDGFHCLLQRIRECATPQDKIKVGLETTGHYSYNLLGFLLDNGLATYVLNPLRTNLYRKSLSLRKTKTDRVDARTIASMLLSDAGLKPYTTTAYHNEELKSLTRYRFDKVKERAKLKNSVSRLVCILFPELENLVPSLHIASVYTLLEEFPEAKQVASAHLTKPKFLLETASQGRYKQEMALAIRNAARNSIGSRVPANSLELQHIIRLIRELNSEITEIEEQIQSIMDELHSPITTIPGLGFRMAAMILAEVGGFTRFDSPDKLLAYAGMSPSTYQSRQFKNCYPHMEKRGSRYLRYALYNATQYVCH

SEQ ID NO: 460851 - protein, 376 aa, unidentified
MSVYVGVDVHRKRLQVAVVDEGGAVRVNRNVPNGVEPVLSVIGELPVGTPVAFEAAFGGGWLVELLEDYGYAPHLVHPLRCKAIASARLKNDKVDAAILAQLLRAELLPEAWIAPPAVRQLRALLRHRCQLVRLRTLLRNRIHAVLADHGQDRPAGCWSGPGRQWLADLSLPPASRRVIDDDLALIDALLEPIARLDAQIGERAKTDPRVKSLTTLPGVGELTALVILAEVGDFSRFANARKLAAWAGLTPTVRGSDQVVRHGHISKQGSAWLRWILCEPAQTAKRSAEFSATYQAITRRRGKKIATIAVARKLLSRAYHLLTDTDSTTPATNPTARSRTSRPGPRRPDAAEDREGHQAPGELATSHEPATRRSMT

SEQ ID NO: 460852 - protein, 388 aa, unidentified
MIYVGVDIAKTNHYASIVNHSTGEIIENPFLITNNKQGFDLLYSKIKDLDKENVLIGLESTAHYGNNFIFYFHEKQFKLGLINPIQTSTLRKTRIRKVKNDKVDSLLICEALSLGYYNLLSNYDIELLEIKSLCRFRKDLKDKVSSAKIQLDSFVDQVFPELNCFFKNNLDIKTAHELLKLYQSPQDISKINLTKLSNLLIKSSHGKYDKNRAIELKQLASRSVGINNSALCIQIKMTIELIELLESQIKDIEKQVSEFIKKNDNVITSIPGIADTTAAIIISEIGDINRFNNPSQVLAFAGLDPSVKQSGTFNASSTRMSKRGSSLLRYALILAANNVQLNTKTFSNYYTIKRAQGKLHYNALGHCAGKLIRIIFYMLKNNVKFNLD

SEQ ID NO: 460853 - protein, 327 aa, unidentified
MKGITTVGLDLAKTVFQVHAVDAAGAVVVRRQLRRAQVQLVFSRLVPCLIGIEACAGAHHRARELAKFGHEVRLMPSSYVKPFVKRGKTDAADADAICTAVLQPTMRFVPVKSEAQQAVLMQHRTRDFLVRQLTQLANAIRAHLGEFGLVVPKGVHNMGRLVTDAEAADLPAEARMPLDLLVGQFNDTKRRIDAITADLRRAAEADETARRLQTMPGIGPITASVPGATVPDVSAFRSARDLSAWLGLTPKPHSSGGKERLGAISKMGNRYIRRLLNLGAMGVISARKRADPGADWLGRMLAKKPVKVVAIARARSIPGSWCSVPEP

SEQ ID NO: 460854 - protein, 396 aa, unidentified
MPTMTYSTATQLTPSEQTHQAHHEVTGGVDTHKDTHTVAALDASGRLLGHREFAATPAGYAGLLGWLRGFGQLVRVGIEGTGVYGAGLAGYLQGVGVELVEVDRPDRKTRRWQGKSDPVDAEAAARAAQSGRATGIPKTRGGQVDALRALRTTRRSAVAARAEAQTRMKALVVTAPDPVRTALRGLGDRQLVEHCATRRPDRAAAGDPATATVLALRALARRHQQLTAEIDEFDTLIGPLVAAINPALVALSGVGADVAGQLLVTDGDNPHRLRSEAAFAMLCGAAPLPASSGRTHRHRLNRGGDRQANAALYRIVLCRLRWDPRTRAYAQRRTAEGMSKPEIIRCLKRYIAREIYTALLNPRPSSVPAITSTAPEESTWSARSAARTNDVDTDKR

SEQ ID NO: 460855 - protein, 396 aa, unidentified
MNKRVHYLGLDVHKETIAVAIAPGGDSEVRLYGIIGGTLDALDKLIKKLQLPGVELRFVYEAGPCGYVICRHLKKKGLHCEVVAPSLIPRKASDRVKTDRRDAQQLARLYRAGELTAIYVPDEEDEAVRDLVRARNAAVIDQRKARQRLKGFLLRLGFRYTGKSSWNDAHQRYLARLTMPRPQQQIVFQEYIEAINVESQRLERLTRAMENALPGWKWEPVVRALMSLRGVQIIVAMTLVAEAGDLSRFDDPRQLMAYFGLVPSEHTSSDKRWLGGITKCGNGACRRVLTEAAWQYRLAPKVSPQLRVRQEQQPKVIRDISWKAQQRLHQRYKVLSAHRKKSGVVVTALARELTGFVWAIACQLNATHKLKERKPIQPAATSGRDYKLNPQKKFKK
